United States Patent Application Publication US 2008/0034453 A1 - sequence listing, part 36

SEQ ID NO: 284962 - DNA, 261 bp, Glycine max
  unsure (1)..(261): unsure at all n locations
gcaagtccgttctcagngacatcaagcaacatatcntgttcatcttgctgcaaggactggcccaaaaggcctacactgtctttctatgcggttgactgcagaatactttgccttgaggcctgaggagagaaagcttccaatgaaaataaaatttatcatcctgacctttatcattatgctgtcttctctgacaatgttctggcatgtgcagcggttgttaattctactatctctactgccaaggaacaggagaaacttgtt

SEQ ID NO: 284963 - DNA, 264 bp, Glycine max
  unsure (1)..(264): unsure at all n locations
gagtgatatcaaattgtggccttttaaggtcattgctggtgctgctgacaagccaatgatccgtggttaactacaagggtgaagagaagcaatttgctgcagaagaaatctcttctatggtgctcatncaagatgcgtgagttgctgaggcttaccttggctccacggtgaagaatgctgttntcactgtccctgcttacttcaatgactctgcgcgtcaagctaccaaggatgctggagtcatgctggtcttaatgtgatgcg

SEQ ID NO: 284964 - DNA, 257 bp, Glycine max
  unsure (1)..(257): unsure at all n locations
cactgtttgggatnttggtggccaggacaagattcgtcccttgtggaggcactacttccagaacacccagggtcttatttttgttgtagacagcaatgatagggacagagttgttgaggccagagatgagttgcaaggatgttgaatgaggatgaactgagagatgcagtattgcttgtgtttgccaacaaacaagatcttcctaatgcaatgaatgctgctgagattaccgacaagttgggtctacactctctcag

SEQ ID NO: 284965 - DNA, 257 bp, Glycine max
  unsure (1)..(257): unsure at all n locations
actacaagtacttccttacaatcaaaaccancaacaactanggcaagttatcaaaagcactacgatgatcagggtcgcaaggttgacgagtatggcaacgttgagaagcaaaccgacgaatacggcaaccctgttctgctgctagtgtcacctatgtagccaccagaactgctgctggtggttacagtgatgacattaataagcaacatgataccaccaatgcctacggcgtagacatggtagacagcattctagtg

SEQ ID NO: 284966 - DNA, 249 bp, Glycine max
  unsure (1)..(249): unsure at all n locations
cgctantgcaaagggtttctttgaggtcacccatgacatttctcacctgacatgtgcancatntccgtcgatcccctggagttcagacgcctgtaattgttcgtttctcaactgtcattcatgagcgtgtanccccngaaaccttganggaccctcgaggttttgccgtnaagttttacaccagagagggtantttgaccttgttggaaacaaccttcccgncttctttgtacgtgatggcagaagtnt

SEQ ID NO: 284967 - DNA, 254 bp, Glycine max
  unsure (1)..(254): unsure at all n locations
ctttcttccaacctctcaagtccaacctacccctttttcttctcncaccaacttcaccgtcttcttcctcgatcatgtctcacttcaagggcaagtaccatgatgagcttattgccaatgctgcttacattgcactcctggaaagggtattcttgctgctgatgagtcaacagggacaattggcaagcgtttggccagcatcagtgtagagaatgttgaatccaacaggcgtgctcttagggagctgcttttca

SEQ ID NO: 284968 - DNA, 253 bp, Glycine max
  unsure (1)..(253): unsure at all n locations
ctccttctcaaactagtaatatatactattattcatccattccattctatatatttcataatgggtgttttcacattcgaggatgaaaccacctctcctgtggctcctgctaccctttacaaagctctagttcggatgctganaacgtcatcccaaaggctgttgacgccttcaggngtgttgaaaacgttgagggaaatggtggccccggaaccatcaagaagatcactttccttgaggatggagaaaccaa

SEQ ID NO: 284969 - DNA, 259 bp, Glycine max
gttgcagaccgagctagctagctagcaagcaagcacagagatggaggcaaagcgaggccatgccctcatgtgcttggcacgtgtttcactcttcctctgcgctctaaccctatccgctgctcacggaagcaccacgttcaagacatcgcgagaaagttgaaactcggggacaacgagcttctgcgcacggagaagaagttcaaggttttcatggagaattacgggaggagctactccacagaggaggagtatttgcgcc

SEQ ID NO: 284970 - DNA, 253 bp, Glycine max
  unsure (1)..(253): unsure at all n locations
tgattatggagtactcagctgggatancangcttgctggtgctcaggttcttctgagtcgtttgaggtnattcttgagtcccgggtatccatatgaagaaattttaaagacctttcacaaccagacaagccatcatgtgctcctatctaccagttttcacaagctttantaganccaaaggtggcttgattcaattnaaccacggtaggcctcagcctctccaatatgtggtcaatgctgcctttttggctgc

SEQ ID NO: 284971 - DNA, 254 bp, Glycine max
  unsure (1)..(254): unsure at all n locations
atggagcagaaatggaggcanctatgactcagacaaggctagagccataggngtgagcaatttctcttcaaagaagcttnaagatttgttagatatagcaagagtggttccngctgttaaccaagtggaatncacccaggatggcagcagccaaagttncgcgcanntngtgaatctaaagaaattcatctatctggatattctccactaggttcaccagcagctctcaaaagtgatattcttaagaatcctgt

SEQ ID NO: 284972 - DNA, 258 bp, Glycine max
  unsure (1)..(258): unsure at all n locations
acaaagtacggcagaaagtggaccaaaagggnccactgtgggaggagatctcagcgttgatgaggaaaatggggtacaaccggaacgccaaaaggtgcaaagagaagtgggagaacatcaacaagtacttcaagaggtcaagnnaaagcaacaagaagaggcctgaagattcaaagacatgtccctattttcaccagttggaggctctatacagggagaagaacaagggagaggggcagatgaagccggagagcatga

SEQ ID NO: 284973 - DNA, 172 bp, Glycine max
  unsure (1)..(172): unsure at all n locations
gtgcggtcncctttgttggtgttgctgggaactgttttcctggcatcagtttgtgtctcattaaaggtgagagaggatgagaataaccctttctacttgagaagctctaacagcttccaaactctctttgaaaccaaaacggtcgcntcgtctcctccagagattcaacaaa

SEQ ID NO: 284974 - DNA, 258 bp, Glycine max
  unsure (1)..(258): unsure at all n locations
caaagtacggcaganngtggaccaaaagggccactgtgggaggagatctcagcgttgatgaggaaaatggggtacaaccggaacgccaaaaggtgcaaagagaagtgggaggacatcaacaagtacttcaagaggtcaagnnnaagcaacaagaagaggcctgaagattgnnagacatgtccctattttcaccagttggaggctctatacagggagaagaacaagggagaggggcagatgaagccggagagcatgatt

SEQ ID NO: 284975 - DNA, 257 bp, Glycine max
  unsure (1)..(257): unsure at all n locations
catcggcagccacaccgttcttcagcncttgctcggaggtttcagagccgtcgtcctcgacaacctcgaaaattcctccgaggttgccatccacagagtcagggagctcgccggcgaatttgggaacaacctccctttcacaaggtggacctacgggacagagctgntctagaccaaatattttcttccacacaacatannaacncaaanatgaagaacggtgtggctgccgatgctcgagccgaattctaagctta

SEQ ID NO: 284976 - DNA, 246 bp, Glycine max
  unsure (1)..(246): unsure at all n locations
cgagtttcacagcgaagtcgtaggagggtttcaaaagatggagaacatgcagagcttctggcaattgggcgatgaactcngtggacactcaaaagcatcggaggatcacaaatggttaatggttgctcgaaattggcggaacagacaagattgaagggggagcgtgtgaacaaccttgatctttcaaagggccccattgaaacaaggtcaagggataaatttgggttccaggaagagaacaaattt

SEQ ID NO: 284977 - DNA, 248 bp, Glycine max
  unsure (1)..(248): unsure at all n locations
ggttgtcncatagtatttagcagggtatttcctgttggtgaagcaaatcctcaccttcatccattntggcagacagctgaacaatttggtgctgtttgcaccaaccagattgatgaacaggttactccgtagttgcaaattcccctgggactgataaggtgaattgggctcttaacaacggaagatttgttgtccatcctggctgggtggaagcatcagcattgctgtataggagggcgaatgagcaa

SEQ ID NO: 284978 - DNA, 250 bp, Glycine max
cgaactcgacaatggccaacagcaacctccctcgaagaatcatcaaggaaacgcagcgtttgctcagtgagccagcaccaggaattagtgcctccccttctgaagagaatatgcgatatttcaatgtgtgatccttgggccaacccagtcgccttatgaaggaggagttttcaagttagaactatttttgccagaagaatatccaatggctgctccaaaggttaggtttctaacaaaaatatatcatcca

SEQ ID NO: 284979 - DNA, 252 bp, Glycine max
  unsure (1)..(252): unsure at all n locations
acacacnnggaggatgcnantagaagtggacaccctatattgattattgctgnnganattgaacaagaggctttagcaactcttgtggtgaacaaacttagaggatcactgaagatngcagcactgaagcccctgggtttggagagcgcaagagccagtaccttgatgatattgccatctngaactgnaggtactgnaaatcaganaagnggtnggcctnacntnggacaaagcngggaaanaggtnctcgg

SEQ ID NO: 284980 - DNA, 251 bp, Glycine max
cgagtttcacagcgaagtcgtaggagggtttcaaaagatggagaacatgcagagcttctggcaattgggcgatgaactccgtggacactcaaaagcatcggaggatcacaaatggttaatggttgcttcaaattggcggaacagacaagattgaagggggagcgtgtgaacaaccttgatctttcaaagggccccattgaaacaaggtcaagggataaatttgggttccaggaagagaacaaatttgattc

SEQ ID NO: 284981 - DNA, 261 bp, Glycine max
  unsure (1)..(261): unsure at all n locations
aaactcangttcggttgcgcaaccgaaccggtgtgccacgtgtcggaagcgcgtggggctgaccgggttcaagtgcaggtgcggagtgacgttctgcggggcccacaggtacncggaggagcacgcgtgcgggttcgatttcaagacagtgggaagagaggagattncacgtgccaaccccgtnatcaaacggagaactgcggagnntttnnatnattncaatcnggnctttcgatggnaccgaanctnnatttttccctc

SEQ ID NO: 284982 - DNA, 281 bp, Glycine max
  unsure (1)..(281): unsure at all n locations
ctatgaangcacgcataaccatccactgccacctgctgctatggccatggcatcaaccactacagctgctgctagcatgttgctttctggatcaatgtccagtgcagatggaataatgaacccaaatttgctagctagagcaattcttccttgctctacaagcatggcaacactctcagcttcagcaccattccccactgtgactttgacctcacacacaaccctaacccattgcaatttcaaaggcctggtgccccattccaagtacccttccttcaaga

SEQ ID NO: 284983 - DNA, 278 bp, Glycine max
  unsure (1)..(278): unsure at all n locations
caaaccttgctctatactacacagtacacacactagaagaataatggcttccatcctccactactttttagccctctctctttcttgctcttttcttttcttcttatccgactcagtcacccctacaaaaccaataaaccttgttgttctacccgttcaaaatgatggttccacagggctccattggncccaacctccanaaaagacccctctaatgcaagtaccagtcctggtggacctcaatggaaatcacttgtgggttaactgtgagcagcagt

SEQ ID NO: 284984 - DNA, 276 bp, Glycine max
  unsure (1)..(276): unsure at all n locations
ttctcttctcattaacacactacgcgtgcaaagaacctctgctctcctcttgcttttgatanagaagaaagaagcgagaagatgtcagangcgttctgcagcgactgcaagaggcagacggaggtggtgtttgaccactctgccggcgacacggtgtgctcggagtgcggcctcgtactggagtcccactctatcgacgagaccttgagtggcgtaccttcgccaacgagtccggtgacaagatcccaatcgtgtcggcgggccctccaaccccct

SEQ ID NO: 284985 - DNA, 279 bp, Glycine max
cacaaacccgtccctcacactctccaaaccctagcggcactacacactagttctatcgctatctccccaagatgtcgagcgccgatcccgagcacagagaagaggaggaggcacccgccgttggcgacgacgaggacaccggagctcacgtcgctccaatcgtcaagctcgaggaggttgctgtcaccaccggcgaggaggacgaaatgcaatcctggatctcaaatcgaagctttaccggttcgacaaggacgggaaccagtggaaggagcgtggcgc

SEQ ID NO: 284986 - DNA, 281 bp, Glycine max
cttcacctctgtgatgaccatggaatacagaaccttagaactcaacatcatatccgcaaaggacatcaagaacgttaacctcttctccaagatggacgtatacgccgtcgttacgctctccggcgaccctctccaccctcagggcgccaccacccacgtccacaaagacgccggcagcaaccccacgtggaactaccccgtgaaattcccgtcaacgaatcgctggccaaggagaatcgtttgtctcttgagatcaagctcgtctccgaccgcacctcggg

SEQ ID NO: 284987 - DNA, 282 bp, Glycine max
  unsure (1)..(282): unsure at all n locations
gttttgggattttgaagctctggcacatcagggggtgagagaaagttgatgccaacaattgaagaggagctaggaaggaggtgtatgttgtacagcctcttgatgccantaatgaatcaatttgtccccgacctagaaaagggcaaaggaatgtacctaatgttcataaaatgcgagtccaaaacacccggaggcatagtggctcgccagtcctcacaagctattacaaaagcccttactttagggacagatcctacgacccatatacaaactacaccagcc

SEQ ID NO: 284988 - DNA, 181 bp, Glycine max
  unsure (1)..(181): unsure at all n locations
cgtgatttagcatttaccacaccaaaatcaatctgcggagtcagaaagccatggatccctacaagaatcggccatcaagcgccttcaattctcccttctggactacaaattccggtgctcccatctggaacaataactcatcgctgactgttggatctagaggtccaattcngnggaggat

SEQ ID NO: 284989 - DNA, 269 bp, Glycine max
  unsure (1)..(269): unsure at all n locations
aaaagtttacgttacaaatcgcataataaccgtcctaagtttattgagagaattttgcaagtgtgagaaacatggcatctcgtcaaaacaacaagcaagagcttgatgaaagagcaaggcaaggagagactgttgtcccgggtggaactggtggcaagagcctggaggctcagcaaacaccttgctgaaggaaggagcaaggggggcaaacaaggaaggaacactgggtacagaagggtaccaggaatgggacgcaaggnggttgaccc

SEQ ID NO: 284990 - DNA, 273 bp, Glycine max
ccaaaccaaactctaagcaattattgtatacattctcttctctctcccttttctcatcacacactaacttgctttcgaggttttcttcttctttctcgaattttcacataccgaacttctcgtctttcacatctccaggtttgaaatgaatcctgagaagtttactcacaagactaatgaagctcttgcgtcggcccacgagccgcgatgagttcaggccacgcgcaattgactcccatccacttggcccagcgctgatttccgatcccaagg

SEQ ID NO: 284991 - DNA, 275 bp, Glycine max
  unsure (1)..(275): unsure at all n locations
gctctatactacacagtacacacactagaagaataatggcttccatcctccactactttttagccctctctctttcttgctcttttcttttcttcttatccgactcagtcacccctacaaaaccaataaaccttgttgttctacccgttcaaaatgatggttccacagggctccattgggccaacctccaaaaaagaacccctcnatgcaagtaccagtcctggtggacctcaatggaaatcacttgtgggttaatgtgagcagcagtatcatcc

SEQ ID NO: 284992 - DNA, 284 bp, Glycine max
caactactacaagtacttccttacaatcaaaaccaacaacaactatggcaagttatcaaaagcactacgatgatcagggtcgcaaggttgacgagtatggcaacgttgagaagcaaaccgacgaatacggcaaccctgttcatgctgctagtgtcacctatgtagccaccagaactgctgctggtggttacagtgatgacattaataagaacatgataccaccaatgcctacggcgtagacactggtagacagcattctagtggtggctacgatggtgacacta

SEQ ID NO: 284993 - DNA, 185 bp, Glycine max
atcttccttttctttcttttagccttgatttcaaacctagccttgggcaaacttaaagaaaccgaggtcgaagaagatcccgagctcgtaacatgcaaacaccagtgccaacagcaacggcaatacactgagagtgacaagcgaacatgcttgcaacattgtgacagtatgaagcaagagcgaga

SEQ ID NO: 284994 - DNA, 265 bp, Glycine max
  unsure (1)..(265): unsure at all n locations
ctgacactcttctctccttaaagccaccacattctgatacccttttgatcaatcaaagtgaagatcagcatagaatgcttgtttgattctatttcattgctatggataagtacgaggctgttaaggatttgggagctggcaattttggggtggctaggctcatgaggaacaaggtcaccaaggagcttgtagccatgaatacatcgagcgtggccccaagattgatganaacgtggcaagggagttatgaaccacaggtccttcg

SEQ ID NO: 284995 - DNA, 271 bp, Glycine max
  unsure (1)..(271): unsure at all n locations
gaccacatcaagggtcttgttgtcgactttttctcggcaggaacagactccacagcggtggcaacagagtgggcattggcagaactcatcaacaatcctaaggtgttggaaaaggctcgtgaggaggtctacagtgttgtgggaaaggacagacttgtggacgaagttgacactcaaaaccttccttacattagagcatcgtgaaggagacattccgcatgcacccgccantcccagtggtcaaaagaaagttncncagaaagantgtgat

SEQ ID NO: 284996 - DNA, 270 bp, Glycine max
  unsure (1)..(270): unsure at all n locations
agttgaaggaaatggctgaagcacacctacgagaccagcatggcaaccctgtcccactcaccgatcaatacggtaatccggttatcttaactgacgagcgcggtaatcccgtccaactcactggtgtcgctaccaccgctacnncgcacagcaggttctgggtttgggtcctatggtaccggtgcttacggtggtggtgaagtgcaaccaccgttgcagatcttttggcaacccaaccaaggagtggcagggaggctagagagcttcgtc

SEQ ID NO: 284997 - DNA, 270 bp, Glycine max
ccctggtcacgttgacttcaccttagaagtggagcgtgctcttagggtgttggatggagctatatgcttgtttgacagtgttgctggcgtggagccgcaatcggaaactgtgtggaggcaggctgataaatatggagtcccgcgaatttgttttgtcaataaaatggaccgtcttggagcaaacttttatagaacaagaacatgatagtaacgaatttgggtgctaaaccacttgtaattcagttaccaattggttcagaagataacttt

SEQ ID NO: 284998 - DNA, 267 bp, Glycine max
gaaagatggcacaagttgttaagccacatgaacctaagacacagtcatttaaacttttgagtggtcataccataccggctgttggattgggcacatggaagtctggttcacaagctgccaattctgtgatcaccgccattgttgaggctggttacagacacatagacactgcttcgcagtatggagttcaagaggagttggacatgcactccaatctgccatgcaagcaggattgggaaggaaggatctatttgtcacctccaaact

SEQ ID NO: 284999 - DNA, 264 bp, Glycine max
  unsure (1)..(264): unsure at all n locations
tcaaacanaactctaaatctggaganggcaatgacaaaactgctgatggccctactgttggaccacgaggtatctattgtgggcatgaggatactgtngaagncgtggcttncngcccatctagtgcncaggngttctgtagngttngagatgattcttgtctcatcttatgggatgcacgtgttggctctagcctgtggttaaggntganaaagctcataatgctgatcttcactgtgtggactggaatccccatgatgataa

SEQ ID NO: 285000 - DNA, 268 bp, Glycine max
gcaccctgccacttttgaaacactcgctatggatcggagaaagaaggaggatatacttaaagaccttgtgaagtttaagaagggaaaggattattatgcaaagataggtaaagcttggaagcgtggctatcttttgtacggtcctccggggactggtaagtctaccatgattgctgctattgctaatttcatgaactagatgtgtatgatcttgagttaaccgcggtgaaggacaacactgagctaaggaagctgttgattgagactc

SEQ ID NO: 285001 - DNA, 272 bp, Glycine max
gagtgagtaatcgagaaagagaagaagcatatatatcaaaatggctgcagagatggagagggagtcattgataactgaagctcctaatgcaccagttactgcacagagaagggtcagaaatgacttagaaaattctctaccaaaaccatacttgccaagagcattgaaagctcctgatacgggtcacccaaatggaacagaggccacaggcaccacaacttatctgttcttcagcagcattgtgctttttttgatcaagatgacaatggaat

SEQ ID NO: 285002 - DNA, 268 bp, Glycine max
  unsure (1)..(268): unsure at all n locations
tgcagaccgagctagctagctagcaagcaagcacagagatggaggcaaagcgaggccatgccctcatgtngcttggcacgtgtttcactcttcctctgcgctctaaccctatccgctgctcacggaagcaccacggttcaagacatcgcgagaaagttgaaactcggggacaacgagcttctgcgcacggggaagaattcaaggttttcatggagaattacgggaggagctactccacaangnggantnttgcgccgtttggggattt

SEQ ID NO: 285003 - DNA, 263 bp, Glycine max
  unsure (1)..(263): unsure at all n locations
tgttgttggagtgagcgaagaatatgtattctagagattcatggggtggaccgttggagataaacgcgacggactcggcgacggaggacgagcggagccggaacctgcaggacgttgacagggcagcgctgtcgcgtcccttggatgagacgcagcagagctggctccttggccccggcgagcagaagaagaaaagtacgtcgatctcggctgcatcatcntcagccgcaagatcttcaatggaccctcggcacantcctctt

SEQ ID NO: 285004 - DNA, 256 bp, Glycine max
  unsure (1)..(256): unsure at all n locations
atgttgaagttccagggcaatatttcactgatcaggaaattgcaccagatcataccgtgaagttggatagggttgctgctgatattccaattgngcagaggcatgggagcagttttcggcgcttgactctaattggctctgatggttcccaacgccattttattgtccagacatcttancactcccatgctagaagtgatgaacgcatactgcagcttttccgtgtgatgaaccaaatgtttgagaagcacaagga

SEQ ID NO: 285005 - DNA, 265 bp, Glycine max
attcaaaccttgctctatactacacagtacacacactagaagaataatggcttccatcctccactactttttagccctctctctttcttgctcttttcttttcttcttatccgactcagtcacccctacaaaaccaataaaccttgttgttctacccgttcaaaatgatggttccacagggctccattgggccaactccaaaaaagaacccctctaatgcaagtaccagtcctggtggacctcaatggaaatcattgtgggttaa

SEQ ID NO: 285006 - DNA, 245 bp, Glycine max
caccattgccatggatccttacaagctccggccatccagcgccttcaattctcccttctggactacaaattctggtgctcctgtttggaacaacaactcctctttaaccgttggagctagaggtccaattctgcttgaggattatcatcttgtggagaagcttgcaaactttgcagggaagtatcccagaacgtgttgtccatgccaggggagctagtgcaagggtttctttgaggtcacacatg

SEQ ID NO: 285007 - DNA, 128 bp, Glycine max
aaaggaaataattgatctttgaaaatgcagggaggaaagaaagctggagagtccatcaaggaaacagctgcaaacattggtgcttctgccaaggctggcatggagaaaaccaaggccactgtccagga

SEQ ID NO: 285008 - DNA, 262 bp, Glycine max
  unsure (1)..(262): unsure at all n locations
cacaactacaagaaagaacttccttataaccaaaaccaacaacaactatgggcaagttatcagaagcactacgatgatcagggtcgcaaggtcgacgagtatggcaatgttgagaggcaaactgacgaatatggcaacccggttcatgccactagtgtcacttatgtngccaccaaaagtgttggtggctacatgatgacgctaataagcaacatgatattactggtgtctatcccgagaaagacaccggtagacatcnttt

SEQ ID NO: 285009 - DNA, 172 bp, Glycine max
  unsure (1)..(172): unsure at all n locations
ctacacagtacanacactagaagnatantggcttccatcntncactactttttagccctntctcttncttgctctnttctnttcttcttatccgactcagtcacccctanaaaaccaataaaccttgttgttctacccgttcaaaatgatggttccacagggctccattggg

SEQ ID NO: 285010 - DNA, 265 bp, Glycine max
aaaacaaaaagtttacgttacaaatcgcataataaccgtcctaagtttattgagagaatttgcaagtgtgagaaacatggcatctcgtcaaaacaacaagcaagagcttgatgaaagagcaaggcaaggagagactgttgtcccgggtggaactggtggcaagagcctggaggctcagcaacaccttgctgaagaaggagcaagggagggcaaacaaggaaggaacagctgggtacagaagggtaccaggaaatgggacgcaaag

SEQ ID NO: 285011 - DNA, 224 bp, Glycine max
  unsure (1)..(224): unsure at all n locations
aagaaaggaaataattgatctttgaaaatgcagggaggaaagaaagctggagagtccatcaaggaaacagctgcaaacattggtgcttctgccaaggctggcatggagaaaaccaaggccactgtccaggagaaggcagaaagaatgacggcacgtgatccgatgcaaaaggagttggcaaccccagaaggaaagaggcaagatgagccaggcagagctgnaca

SEQ ID NO: 285012 - DNA, 274 bp, Glycine max
caaaatgactcaagcccagattcaaccagttaaacttggaacccaaggctttgaggtttcaaaattgggattcggatgtatgggccttactggagcgtacaatgaccctctccaagaacaggatggcatatctgttatcaagtatgcgttcagtaagggaatcacattttttgatactgcggatgtttatggagccaatctaatgaacttttggttggaaaggctttgaagcagctgcccagagaaaagattcagatagccacaaaatttggta

SEQ ID NO: 285013 - DNA, 261 bp, Glycine max
  unsure (1)..(261): unsure at all n locations
acaactatggcaagttatcaaaagcactacgatgatcanngtcgcaaggttgacgagtatggcaacgttgagaagcaaaccgacgaatacggcaaccctgttcatgctgctagtgtcacctatgtagccaccagaactgctgctggtggttacagtgatgacattaataagcaacatgataccaccaatgcctacggcgtagacactggtagacagcattctagtggtggctacgatggtgacactaataaacatcatggg

SEQ ID NO: 285014 - DNA, 263 bp, Glycine max
tcaaaccttgctctatactacacagtacacacactagaagaataatggcttccatcctccactactttttagccctctctctttcttgctcttttcttttcttcttatccgactcagtcacccctacaaaaccaataaaccttgttgttctacccgttcaaaatgatggttccacagggctccattgggccaacctccaaaaaagaacccctctaatgcaagtaccagtcctggtggacctcaatggaaatcacttgtgggtt

SEQ ID NO: 285015 - DNA, 262 bp, Glycine max
ggatcatacatagtagtgttggtgggttgcaaagatgcttgggggtcttctccataggggtcataagataaaagggacagtggtgttgatgcgcaagaatgtgttggacgtgaatagcgtaaccagcgttgggggaattattggtcaaggtctcgacttagttggctcaacactcgatactcttactgccttcttgggccgatccgtgtctctccagcttattagtgctaccaaagctgatgccaacggaaaagggaaactt

SEQ ID NO: 285016 - DNA, 230 bp, Glycine max
actactacaagtacttccttacaatcaaaaccaacaacaactatggcaagttatcaaaagcactacgatgatcagggtcgcaaggttgacgagtatggcaacgttgagaagcaaaccgacgaatacggcaaccctgttcatgctgctagtgtcacctatgtagccaccagaactgctgctggtggttacagtgatgacattaataagcaacatgataccaccaatgcctg

SEQ ID NO: 285017 - DNA, 269 bp, Glycine max
  unsure (1)..(269): unsure at all n locations
gnacagntcancagcctattaaggaanctgctcttgggaatattcccaccattgctttctgtgacaccgattgcacctatgaggtncgtggacattggaattcctgccaacaacaagggcaaacacagcattggttgtctcttctggntccttgcaangatggtgttgcagatgaggggtaccattcgccctggcctcaaatgggatgtcatggttganctgttcttctataganaaccagnggaggctanacaacaagnggnggagga

SEQ ID NO: 285018 - DNA, 174 bp, Glycine max
  unsure (1)..(174): unsure at all n locations
acagacaagactatgtgcccttgcaaggntcggcgttgcatctaaactcctttcttannnnnnnnnnnnnnnnnnnnnnnnnnatgtaatatttactttttgtgtgttgataatcatcatttcaataaggtctcattcatctactttttatgaagtatataagcccttccatgc

SEQ ID NO: 285019 - DNA, 254 bp, Glycine max
  unsure (1)..(254): unsure at all n locations
ctcccattccgactcttagccgccgatctctcagggcttgcatcttctcagctgtgaagatgtacacatcaaggaagaaaatccacaaggataaggatgctgaaccaactgaatttgaagagtcagttggacaggcattgtttgatctggaaaataccaatcaggagcttaaaagtgatctgaagganttatacataaactcagccgtgcaagttgatgtttctggaaaccgcaagctgttgttattcatgtcc

SEQ ID NO: 285020 - DNA, 255 bp, Glycine max
  unsure (1)..(255): unsure at all n locations
gggcttttcaaaaataaggaacatgggaagactagtgctgcagctagtctgggtatgattttactctgggatgttgactcgggacttgctcaaattgacaagtacttccatagtaatgataatcatgtcattgctggtgcattactgggtgttggaattgtgaattgnagtatcaagaatgactgtgatcctgcaatggcacttctaggtgactatatagataaagaagacacttcaacaaggattggtgcaatt

SEQ ID NO: 285021 - DNA, 257 bp, Glycine max
  unsure (1)..(257): unsure at all n locations
gtgggagcngggnaggtgagtagtaatggtcatggatgttgcanatcagggccaggctatgcttccccactggangccatttctggtcccagagagtctctcattnatgtaacctctgtctacacagggaccggaatagagaagccagactatttggcgacagtggatgtggatccaaactctccaacttattccaaagtcatccataggcttcctgttcctatttaggtgacgaattgcatcacacaggctggaat

SEQ ID NO: 285022 - DNA, 267 bp, Glycine max
gcttgagctctgcgagatcttgagtcgccgatttgaaaagatgagtaagcttcagagtgatgctttgcgtgaagccatctcaggaatcatggccgattccaaggagaagaatcgcaaatttgtggagaccatcgaactccaaattcggtttgaagaactacgatccacagaaggacaagcgtttcagtggctccgtcaagttggcccacatccctcgccccaagatgaaaatttgcatgcttggtgatgctcagcatgttgaagagg

SEQ ID NO: 285023 - DNA, 258 bp, Glycine max
  unsure (1)..(258): unsure at all n locations
cnagtacttccttacaatcaaaaccaacaacaactatggcaagttatcaaaagcactacgatgatcagggtcgcaaggttgacgagtatggcaacgttgagaagcaaaccgacgaatacggcaaccctgttcatgctgctagtgtcacctatgtagccaccagaactgctgctggtggttacagtgatgacattaataagcaacatgataccaccaatgcctacggcgtagacactggtagacagcattctagtggtg

SEQ ID NO: 285024 - DNA, 257 bp, Glycine max
  unsure (1)..(257): unsure at all n locations
caagtacacatcatcctcaaactagtttgagccgcctttggtcaaagctgtagaaactgcagaaactatggtgctcatcccttctggtggattgctagtgcagcntaaactagcaaacctggcctcagataatgctttccattaatgtgtcttgtaattctggtttttgttatctttatcttttgttttgtttcatgaagaactattatgcatgaataacttccaggagggatattctgtgggttgcaccaatgtta

SEQ ID NO: 285025 - DNA, 262 bp, Glycine max
ttctaacctacctctttttcttctctctcaacaacttcaccttcttcctcctcgatcatgtctcacttcaagggcaagtaccatgatgagcttatcgccaatgctgcgtacattggcactcttggaaagggtattcttgctgctgatgagtcaacagggacaattggcaagcgtttggccagcatcagtgtagagaacattgaatccaacaggcgagctcttagggagctgcttttcactgctcctggtgttcttcaatatc

SEQ ID NO: 285026 - DNA, 262 bp, Glycine max
  unsure (1)..(262): unsure at all n locations
tttcatctgaggacctgctgtatctggaatttttggagaagtttgagaganagtttgttgcccagggagcttatgacacccgcaatatattccagtcactagatcttgcatggactttactccggattttcccccgtgaacttcttcatcgtatacctgccaagactcttgaccagttttatagccgagatgctggcaattgatgattaagcaagcaagttcgtataccttggtatcctctcaaccagtgtctactgtcatc

SEQ ID NO: 285027 - DNA, 261 bp, Glycine max
acctttatggttcgcgctgctcttcgttgtcggattgttaacgattctcaaattggctttcgttgttttcagatgggtctacgtcaatttcctccgaccaccgaagaatctcaaaaagtacggatcttgggcagtggttactggacccactgacggcattggaaagagcttcgctttcgagctcgctcgcaagggcctgaacctcgtccttgtcggaaggaaccccgacaagctcaaagacgtgtcggattcgatcgcggc

SEQ ID NO: 285028 - DNA, 258 bp, Glycine max
gcgtaccgcggaggccagagaagcagggactggtgcgacccttcatcaccattcactgatttgtgggaccctcgtcgtgtcggtgacgctgatgatatcacctcctctctcgcccatgctcacgttgactggcgtgagactgataaagctcatatcttccgtgctgatcttccaggggtgaagaaagaggatctgaaggtgcaggtggaggagaataagatcctgcagataagcggggagagggtgaaggagaaggag

SEQ ID NO: 285029 - DNA, 254 bp, Glycine max
  unsure (1)..(254): unsure at all n locations
ttcaaaccttgctctatactacacagtacanacactagaagaataatggcttccatcctccactactttttagcccncctctctttcttgctcttttcttttcttcttanccgactcagtcacccctacaaaaccaatanaccttgttgttctacccgttcaaaatgatggttccacagggctcnattgtcnacaacctccaaaaaagaacccctctaatgcaagtaccagtcctggtggacctcaatggaaat

SEQ ID NO: 285030 - DNA, 261 bp, Glycine max
  unsure (1)..(261): unsure at all n locations
gtccaactggtgtggggaagtctgaattggccaaagcattgggctgcatactactttggctccgaagaagctatgattcgggntgacntgagtgaattnatggaaaggcacactgtctccaaacttattggttcacctcctggatatgttggttacactgaaggtggtcaattgaccgaggcagttcggcgtcgtccttacactgttgtactgtttgatgagatgagaaagcccatcctgatgtgttcaacatgatgcttc

SEQ ID NO: 285031 - DNA, 252 bp, Glycine max
  unsure (1)..(252): unsure at all n locations
ctttctcttcgagggtttgggtttctcttcctcccttggagaaaangaagagccaccgctgcgacgccgttcgtgcatttttgaggtgccgctgtcangtttgggcgtggtggaccaaggaggagtgataactccaaatattatgatattctcgggatttccaaaaatgccagtgaagatgaaatcaagaaggcctatagaaaggcggctatgaagaaccatccagataagggaggagatcctgaaaattta

SEQ ID NO: 285032 - DNA, 255 bp, Glycine max
  unsure (1)..(255): unsure at all n locations
gtacacataaatctagctccaattcctaatcacctggttaatttcttcacatagagctatcnagatccaacgttaacatgaagaatgttttagtaaggtcagctgcgcgagctctgcttggcggcggtgggcggagtactaccgccagctctcaacggcggcgatcgtggaacagagacaccagcacggtggcggcgcgtttggaagcttccacttgcggaggatgtccactcttccagaggtaaaggatcagca

SEQ ID NO: 285033 - DNA, 249 bp, Glycine max
  unsure (1)..(249): unsure at all n locations
aggaaatcttccgaactgatggtgaacaggcccttaagtttcctcctcctaaagtaattcaagtgagtaagtctgcatggatgactgatgaagaatttgcaagagaaatgcttgctggtgtaaatccaaacntgattcgttgtctaaggatttccctccacgaagcaagcnagatagcnaagtcctatggtgatcatactagtcaaataaccaaagaacacctagagcccaacttagaagggctcactg

SEQ ID NO: 285034 - DNA, 257 bp, Glycine max
  unsure (1)..(257): unsure at all n locations
tcacacacaactacaagaangaacttccttataaccaaaaccaacaacaactatggcaagttatcagaagcactacgatgatcagggtcgcaaggtcgacgagtatggcaatgttgagaggcaaactgacgaatatggcaacccggttcatgccactagtgtcacttatgtngccaccaaaagtgttggtggctacaatgatgacgcnaataagcaacatgatattactggtgtctatcccgagaaagacaccggta

SEQ ID NO: 285035 - DNA, 251 bp, Glycine max
  unsure (1)..(251): unsure at all n locations
ggaacgttatcagataagaacatctcttcagcttttggctttgcagagggagggaagtgcagtaagtatacataatcttttcatattccacttttcttttctttntgaactattttcgttattaagactgtgtattccaggtatctgtcaagaagcagagaagtgcatttcctcctaactttgtacattcattggatagttcacacatgatgatgactgctctagcctgcaatgatgctggattatgtttt

SEQ ID NO: 285036 - DNA, 184 bp, Glycine max
cacacaactactacaagtacttccttacaatcaaaaccaacaacaactatggcaagttatcaaaagcactacgatgatcagggtcgcaaggttgacgagtatggcaacgttgagaagcaaaccgacgaatacggcaaccctgttcatgctgctagtgtcacctatgtagccaccagaactgctg

SEQ ID NO: 285037 - DNA, 251 bp, Glycine max; identical to SEQ ID NO: 134676

SEQ ID NO: 285038 - DNA, 250 bp, Glycine max
agttatcaaaagcactacgatgatcagggtcgcaaggttgacgagtatggcaacgttgagaagcaaaccgacgaatacggcaaccctgttcatgctgctagtgtcacctatgtagccaccagaactgctgctggtggttacagtgatgacattaataagcaacatgataccaccaatgcctacggcgtagacactggtagacagcattctagtggtggctacgatggtgacactaataaacatcatggaa

SEQ ID NO: 285039 - DNA, 251 bp, Glycine max
  unsure (1)..(251): unsure at all n locations
cncaactacaananagaacttccttataacnaaaaccaacaacaactatggcaagttatcagaagcactacgatgatcagggtcgcnangtcgacgagtatggcaatgttgagaggcaaactgacgaatatggcaacccggttcatgccactagtgtcactatgtngccaccaaaagtgttggtggctacaatgatgacgctaataagcaacatgatattactggtgtctatcccgagaaagacaccggta

SEQ ID NO: 285040 - DNA, 256 bp, Glycine max
  unsure (1)..(256): unsure at all n locations
gctctatactacacagtacacacactagaagaataatggcttccatcctccactactttttagccntctctctttcttgctcttttcttttcttcttatccgactcagtcacccctacaaaaccaataaaccttgttgttctacccgttcaaaatgatggttccacagggctccattgggcccaacctccaaaaaagaacccctctaatgcaagtaccagtcctggtggacctcaatggaaatcacttgtgggtta

SEQ ID NO: 285041 - DNA, 254 bp, Glycine max
  unsure (1)..(254): unsure at all n locations
aatccttcagacccagagccctcgntgtcccagttaaaaaagacgcttccaccctccaatatatnnctcaaatcaaacaaagaacaccactcnncccagaaaacctagtacttgacatcggtggccaattcctgtgggtcgattgcgacaacaactacgtctcctccacttaccgccccgcacggtgtggctccgcccagtgctccctcgccagatccgacagctgcggaaactgcttctccgccccaaaaccc

SEQ ID NO: 285042 - DNA, 256 bp, Glycine max
  unsure (1)..(256): unsure at all n locations
ctcgnnccgctagtatccgatccnctgtcctctcgnagctttcatcgttcancatattctcancatcctcagtcatgggcctgcnatcttgttttaggtctaccgtcctgagaaaatgttccaaaggnagctctggcatgtnaagattcctgtatacgaacaattttcaacgaaacttgatttcgtctggtggcaatgaatcgtnttatgggtattttaacaggagatcatacacttcactttatatgggnactgg

SEQ ID NO: 285043 - DNA, 255 bp, Glycine max
ggtttgttcagtaccgacgcaatacagcgagcttggcagattgtggatcagattcctgggagagcaactggtgcctatagccatagtcagggtgtcaagggcttgcgtgatacaatagctgctggaattgaagagcgtgatggttttcctgccaatcctgatgacattttcatgacagatggtgcaagccctgcagtccataatatgatgcaattactcattagatcagaaaatgatggtatctgtgtcccattc

SEQ ID NO: 285044 - DNA, 253 bp, Glycine max
  unsure (1)..(253): unsure at all n locations
ctggctggtgtacgtctactcaaaatcatagtttagcaagttgggcaaaagcggggtaggttgaatgttgaagatgatgattcacagccaagaaagaaggtccgtttagggattcctgctacacaatggatttcaatttacaatggcaagacttccaatgaaacaaaggtaccattacaatgtgtctgatggcaagattagaacagcatgtcgagagaggggttgcagatggcctcttntagttgtgtgtctc

SEQ ID NO: 285045 - DNA, 251 bp, Glycine max
  unsure (1)..(251): unsure at all n locations
cgagattccccctaaacccgtttgcgttgttgtatgcgaagaaatggcgactaagaggagcgtgggaacgttgaaggagggngatttgaaagggaaganggtgttcgtganggtcgatctgaacgtgcctttggatgacaaccttaacatcaccgatgacactagagtccgtgctgctgttcccaccatcangtacttaactggtcatggagccaaagtgatcctttctagccanttggacgtctaaaggt

SEQ ID NO: 285046 - DNA, 255 bp, Glycine max
  unsure (1)..(255): unsure at all n locations
aattagttcattctctttgcgcagttccctacctctcctttcaagatgcagatcttcgtcaagaccctcaccggaaagaccatcacccttgangtggaaagctcngacaccatcgacaacgtcaaggcnaagatccaggacaaggaaggaattcccccggatcagcaacgtctcatcttcgncggaaagcagctcgaggacggccgtaccctcgnngactacaanatccagaaggagtcaacccttcacctngtg

SEQ ID NO: 285047 - DNA, 254 bp, Glycine max
  unsure (1)..(254): unsure at all n locations
ccgaatgagagcatcaaactcttcttcttcgatttccattgcgaaggttactttantcttcttctatctcttcatntncttcgctcttgcgatcttcgtccggggactgctccgaataccaccaccancactcgccgatggccacgatcggaggcttacacgactcccaaggctctcaaaacagcgtcganaccgaagccctcgctcgattcgccgtagacgancacnacaagaagcagattcgcttctggagt

SEQ ID NO: 285048 - DNA, 250 bp, Glycine max
  unsure (1)..(250): unsure at all n locations
ttcattctctttgcgcagttccctcacctctcctttcaagatgcagatcttcgtcaagaccctcancggaaagaccatcanccttgnggtgganagctctgacaccatcgataangtcnaggccaagatccaggactnganggaattcccccggatcagcaangtctcatcttcgccggaaagcagctcgnggacggcngtaccctcgcngactacaacatccagaaggagtcaaccttcacnttgtctt

SEQ ID NO: 285049 - DNA, 252 bp, Glycine max
  unsure (1)..(252): unsure at all n locations
cagaaatcaaaggactatgcaggtgatgctgctcagaaatcaaaggactacgcaggtgatgctgctcagaaaaccaaagactatgccagtgacactgcacagacatcanaggactatgctggtgatgctgctcagaaatcanagggctatgttggtgatgctgcacaaaagaccaaagaatatgttggtgatgcagcacagaagacanaggattatgccactgncgcagcncagangtccanagattatgct

SEQ ID NO: 285050 - DNA, 246 bp, Glycine max
aactactacaagtacttccttacaatcaaaaccaacaacaactatggcaagttatcaaaagcactacgatgatcagggtcgcaaggttgacgagtatggcaacgttgagaagcaaaccgacgaatacggcaaccctgttcatgctgctagtgtcacctatgtagccaccagaactgctgctggtggttacagtgatgacattattaggcacatgataccaccatgctacgggtgacactggtagac

SEQ ID NO: 285051 - DNA, 251 bp, Glycine max
  unsure (1)..(251): unsure at all n locations
cttttggattccgatggcgtcggtgttcgtgtaccacgtggtgngcgatctgacggtggggaagccggagctggcggagtttcacgagagtgagacggtggagtctgcgattagggcgattggggagtcccctgaagggagcatacccatttggaagaagagatctcaattggggattgagaacagtgacatgagacagcagaggtttgttggtgttcttagttcctttgacatagtgcgtttttggctaa

SEQ ID NO: 285052 - DNA, 252 bp, Glycine max
ggcttcgggtgaaaagaaattcccacctcaacaacaacaaacacagcctgggaaggagcatgctatgaatccagtaccccaattcactagccctgactacaagccttcaaataaacttcaaggaaagatagcattagtgactgggggtgactctgggattggacgagcggtgtgtaacttgtttgccttagaaggtgctaccgtgggcttcacatatgtgaaggggcatgaggacaagacgcgagggacacg

SEQ ID NO: 285053 - DNA, 254 bp, Glycine max
  unsure (1)..(254): unsure at all n locations
gngaatcatggaccagaatacagttcagcattgccacttaaaaggttcaatccaaaggagttggagattgccactggttttttcagtgcagacagcatcattggttctagcagtttgagcacagtttacaaaggtcaaatggaagatggccaggttgtagccataaaaagattgaatctgcaacaattctctgcaaatactgacaagatcttcaagagagaagccaacaccttgagccagtgagacataggant

SEQ ID NO: 285054 - DNA, 250 bp, Glycine max
  unsure (1)..(250): unsure at all n locations
ttcaaaccttgctctanactacacagtacacacactagaagnataatggcttccatcctccactactttttagccctctctctttcttgctctntnctntncttcttatccgactcagtcacccctacanaaccaataaaccttgtngttctacccgttcaaaatgatggttccanagggctccattgggccaanctccnannaanancccctctaatgnaantnccagtcctggggacctcaatggana

SEQ ID NO: 285055 - DNA, 252 bp, Glycine max
  unsure (1)..(252): unsure at all n locations
ttcaaaccttgctctatactacacagtacacacactagaagaataatggcttccatcctccactactttttagccctctctctttctngcctctnntcttntcttcttatccgactcagtcacccctacaaaaccaataaaccttgttgttctacccgttcaaaatgatggttccacagggctccattggtcccaacctcgaaaaaagaacccctctaatggcaagtancagtcctggggacctcaatggaa

SEQ ID NO: 285056 - DNA, 247 bp, Glycine max
  unsure (1)..(247): unsure at all n locations
ctcttcttctcttgcggcntnggttttagcgcanttactttctagatttaaggnanatgggtaaggaaaaggttcacatcagtattgtggtcattggccatgtcgactctggganntccactaccactggtcacctgatttacaagcttggaggcattgacaagcgtgttattgagaggtttgagaaggaagctgctgagatgaacaagaggtcttcaagtatgcctgggtgcggacaaactaaggc

SEQ ID NO: 285057 - DNA, 247 bp, Glycine max
  unsure (1)..(247): unsure at all n locations
ttcaaaccttgctctatactacacagtacacacactagaagaataatggcttccatcctccactactttttagccctctctctttcttgctcttttcttttcttcttatccgantcagtcacccctacaaaaccaataaaccttgttgttctacccgttcaaaatgatggttccacagggctccattgggccaacctccaaaaaagaacccctctagtgcnngtaccagtcctgtggacctcaatgg

SEQ ID NO: 285058 - DNA, 247 bp, Glycine max
  unsure (1)..(247): unsure at all n locations
tttatgtggttgcgcctctgnctgtaagagtgaaaaaaccttctcttttccttctctcaagtctcaagagatttcatcatggctccaaaganggacaaggctccaccaccttcctccaagcccgccanatctggcggtggcaagcagnagangangaagtggagcaagggaaagcaaaaggngaaggtgaataacatggtgctgtttgatcagggcacctatgataagctccttctgaagctcccaa

SEQ ID NO: 285059 - DNA, 247 bp, Glycine max
  unsure (1)..(247): unsure at all n locations
ttttgtaattatttggtgtagggattgcgggaaacaagtctatttgggtggatttgacacggctcatgctgctgccagagcctatgatcgagccgctattaagttcaggggagttgatgctgatatnaatttcaatctgagtgattatgaggatgaccttaaacagatgcagaatttgtccaaggaggaattcgtacatatactgcgtcgccaaagtactggtttctcaagagaagctctaaatacc

SEQ ID NO: 285060 - DNA, 249 bp, Glycine max; identical to SEQ ID NO: 140618

SEQ ID NO: 285061 - DNA, 248 bp, Glycine max
gattatcctaagtctttgggaatagtgctgcaatggcttcaagtcaggaggaggtgacccttttgggagctactggaagcccatttgtgtgcagggttcatattgccctcaagttgaagggagttcaatacaaatatgtcgaagaaaatttgaggaacaagagtgaactgcttctcaaatccaacccagttcacaagaaggttccagtgtttattcacaatgagaagcccatacagagtctcttgtga

SEQ ID NO: 285062 - DNA, 250 bp, Glycine max
  unsure (1)..(250): unsure at all n locations
gnaaggatgtttatgctcaatgggtccccgaagaaagaatactgaccacaaatctttggtcggcagaactgtctaagcttgctgctaatgccttcttagcacaaaggatttcatctgtcaatgccatgtcagcactttgtgaggctactggggcaaacgttcaacaggtgtcctattctgttggtacagactcaaggattggacccaagtttctcaatgccagtgttggttttggtgatcctgcttccag

SEQ ID NO: 285063 - DNA, 247 bp, Glycine max
gggaaaatcatggtgaaaggtccaggcctctactctgacattggcaagagagctcgcgatcttctgttcaaggattatcagaatgaccacaagttcaccatcaccacttacacttccaccggagtggaaatcacttcaactggagtcaggaaaggtgagatatatttggccgatgtcagcactaaggtgaagaacaagaacatcacaactgatgtcaaagtggacactaactcaaatctgcgtacaa

SEQ ID NO: 285064 - DNA, 246 bp, Glycine max
  unsure (1)..(246): unsure at all n locations
ctcgctctttcagctttgacttttgttggaaactaaggcctaatcaaaatggtgaagttcacagctgnagagctacgtcgtattatggactataagcataatatccgtaatatgtctgtcattgnccatgttgatcacggannatcaaccctcactgattctcttgtggctgctgctggtattattgctcaagaagttgccggtgatgtccgtatgactgatacccgtgcaatgaagctgagcgtg

SEQ ID NO: 285065 - DNA, 245 bp, Glycine max
atcaccttgatttggaagcttgtgtgtggctcgaagagaatctgaagaagtttgaacgtattctggttgtggtttcacactcacaggatttccttaatggtgtctgcacaaatatcatccacatgcaaaacaagaagctgaaactcttcactggtaattatgatcaatatgttcagacacgtgctgaactggaagagaaccagatgaagcagtacaaatgggagcaggagcaattgcctcgatga

SEQ ID NO: 285066 - DNA, 247 bp, Glycine max
attaggttttcagcctaaatggagactggaagacatacctggagtgcctaaggtacgatataacatcatgcaaaatcacttaggtaaatttggctcacctacaattgaatcattgttcatgacatgctcagttcaggtcaacctggacttcagttctgaagcagacatgatcaagaaaatgcgtgccagtattgctttgcagcctttggcagcagccttattcgctaattcactttcaaggaagggg

SEQ ID NO: 285067 - DNA, 247 bp, Glycine max
  unsure (1)..(247): unsure at all n locations
cgaggaggagaggatgagagcagccattgggaaatttggactgtctggcaaagcgcaggtcatgcctatgaagaatttatccgatgggcagaggagccgtgtgatattcgcatggttagcttatagacagcctcacctgctacttttggatgagccaacgaaccatttggatatagaaacaattgacnccattggctgaggcattgaatgaatgggatggtggcaggtgcttttagccatgatttta

SEQ ID NO: 285068 - DNA, 246 bp, Glycine max
aactatgatcccagggcaaaggtcttaagaaaactggcagaggaagtgttttccattgtgggcagggatcctcttattgaggtggcagttgccttggagaaggttgcactatctgatgaatatttcatcaagaggaagctatatccaaatgttgacttctactctggattaatttatagggccatgggatttccaccagagtatttcactgttttatttgctatccctcgatggctgggtacttgg

SEQ ID NO: 285069 - DNA, 248 bp, Glycine max
  unsure (1)..(248): unsure at all n locations
cttccaacctctcaagtccaacctaccnctttttcttctcccaccaacttcaccgtccttcttcctcgatcatgtctcacttcaagggcaagtaccatgatgagcttattgccaatgctgcttacattggcactcctggaaagggtattcttgctgctgatgagtcaacagggacaattggcaagcgtttggccagcatcagtgtagagaatgttgaatccaacaggcgtgctctagggagctgcttt

SEQ ID NO: 285070 - DNA, 246 bp, Glycine max
  unsure (1)..(246): unsure at all n locations
cgatctcaccgaggacgagtttgagaagctctacactggcgtcaatggcggcttcccgtcatcgaataatgccgccggcggtattgcgccgccgttggaggtggacgggctgccgganaattttgattngagagaganaggagctgtcaccgaagttaagttacagggtagatgtggatcatgctgggctttcagcaccacaggntctatagaaggagccaattttcttgcaccggaaagctcgtc

SEQ ID NO: 285071 - DNA, 246 bp, Glycine max
  unsure (1)..(246): unsure at all n locations
cagagaacagtacgtgtaccttgcganntgtcggagcaggcggagcggtacgaagagatggtggagttcatgcagaaggtggtggtggggtggacgccggcgtcggagctcacggtggaggagcgcaacctcctctcggtggcctacaagaacgtgatcgggtctctgcgtgccgcgtggcgcatacgtgtcctccatcgaacagaangaggaanggcgcaagaacgacgacacgtgtccctcgtg

SEQ ID NO: 285072 - DNA, 246 bp, Glycine max
  unsure (1)..(246): unsure at all n locations
cctaagtgaganacaaagaaaggaaataattgatctttgaaaatgcagggaggaaagaaagctggagagtccatcaaggaaacagctgcaaacattggtgcttctgccaaggctggcatggagaaaaccaaggccactgtccaggagaaggcagaaagaatgacggcacgtgatccgatgcaaaaggagttggcaacccagaagaaagaggcaaagatgagccaggcagagcggacaagcaggcgg

SEQ ID NO: 285073 - DNA, 247 bp, Glycine max
  unsure (1)..(247): unsure at all n locations
cncaactacaaganagaacttccttataaccaaaaccaacaacaactatggcaagttatacagaagcactacgatgatcagggtcgcaaggtcgacgagtatggcaatgttgagaggcaaactgacgantatggcaacccggttcatgccactagtgtcacttatgtngccaccaaaagtgttggtggctacaatgatgacgctaataagcaacatgannntactggtgtctatcccgagaaagaca

SEQ ID NO: 285074 - DNA, 244 bp, Glycine max
  unsure (1)..(244): unsure at all n locations
cttctcttgcggctagggttttagcgcantttcttctagatttaangnagatgggtaaggaaaaggttcacatcagtattgtggtcattggccatgtcgactctgggaaatccactaccactggtcacctgatttacaagcttggaggcattgacaagcgtgttattgagaggtttgagaaggaagctgctgagatgaacaagaggtcttcaagtatgcctgggtgctggcaaacttaaggctg

SEQ ID NO: 285075 - DNA, 246 bp, Glycine max
  unsure (1)..(246): unsure at all n locations
gttcatctgccatcagctcttccagagcatgatttcttgaatgatttggagcctttaggatggntgcatactcaaccaaatgaacttcctcagttgtcgcctcaggatctcacttcacatgccaagatcctagagaacaataagcaatgggatggggagaaatgtattatcttgacttgcagctttactcctggttcttgttctttaactgcatataagctcactccatctgttacgaatgggggc

SEQ ID NO: 285076 - DNA, 246 bp, Glycine max
acttattaacactttccttagttcaatatggggaagcccttcttcactctctctctttcttccctttgcttgctactcttgtcgagtgcatgctttgctattacctccagcaagttcaacgagtgccaactcaacaacctcaacgcgttggaacccgaccaccgcgttgagtccgaaggtggtcttattgaaacatggaactctcaacaccctgagctgcaatgcgccggttcactgtttccaaac

SEQ ID NO: 285077 - DNA, 249 bp, Glycine max
gcattgatgagtggcttcgtgttcctacagtagaggatatcttctcaataggtgactgcagtggatttgttgaaagtactggaaaaacaccactaccggctttagcccaagtggcagaaaggcaaggtaaatatttagcattcttattaaacaaaataggtaaagccaatggaggccgtgcaaacagtgcaaaagatgtagactttggggatcagtttgtttacaagcacatgggaagcatggcatcta

SEQ ID NO: 285078 - DNA, 248 bp, Glycine max
gcatcgaacccgtcgtagcagaaaaacttgtcaccatggtttcttccgacaaggatccacgagaggatgtccttcaagcctggtacatggatgatagtgatgaagatcaaagactcccccaccacaaagaacccaaggagtttgtctcgttggaccaacttgctgaacttggagtccttagctggaaactagatgctgataaccatgaaaatgatccagagctgaagaagattgtgaagagcgtggtt

SEQ ID NO: 285079 - DNA, 282 bp, Glycine max
  unsure (1)..(282): unsure at all n locations
caatgttgctgcgtttgctatatctgcctatgcttcaactgaagggagantttgcaaaccatttaacccattactagggganaacatatgagggctgactttccagataaaggaatcgattttnctcagagaaggtcagtcatcatcccaatgattagtagcatgtcactgtgagggtacaggttggaaattttggggagatagcaacttaaaagagtaattttggggtcggtcaattcagcttgatcctgttggcatttgactttggaatttgatgatggc

SEQ ID NO: 285080 - DNA, 271 bp, Glycine max
  unsure (1)..(271): unsure at all n locations
anatttgtacgcatatcccttggtggagtcaaggatgaggctgatattagaggacataggagaacatatgttggaagcatgcctgggaggctatagatggattaaagagagtagctgtttgcaatcctgtcatgttgctgatgaagttgacaagacaggttctgatattcgtggagatccagcttcagcattgctagaggttctgatccagaacaaaataaatcgttcaatgatcactattgaatgttccgtttgatctatccaggtagtt

SEQ ID NO: 285081 - DNA, 274 bp, Glycine max
  unsure (1)..(274): unsure at all n locations
agagactgcagagatgcctggtctctataaagaaggtgagtacgatcttagtggctgtgcagttggcattgtgaagaaagattctgtaancaatgggtcagacattgttgctggtgatattattattggtcttccatctagtggagttcactctaatggtttctcacttgtaagaagagtgcttgctcaaagtggtctttcactgaaagatcaacttcctggtagtgatgttacaattgcagaggctttgatggccccaactgttatctatgtt

SEQ ID NO: 285082 - DNA, 279 bp, Glycine max
  unsure (1)..(279): unsure at all n locations
ctctttatttgcttcttcgagtttcacagccaagtcgtaaaagggtttcaagggatggaaaacatgcagagctttctggcattgggtgatgaactccgtgggcactcaaaagcatcggaggatcacaagtggttaatggttgcctcgaaactggccgaacagacaagattgaagggggagcgtgtgaacaaccttgatctttcaaagggacccattgaaacaaggtcaagggataaatttgggttccangaagagaacaaatttgattctcttaacttg

SEQ ID NO: 285083 - DNA, 270 bp, Glycine max
gtgctatgattttttgaggaattttcaccgttatagtattgaggagggaatagtagtaaaaaaatcatagcacaagaccacacaactactacaagtacttccttacaatcaaaaccaacaacaactatggcaagttatcaaaagcactacgatgatcagggtcgcaaggttgacgagtatggcaacgttgagaagcaaaccgacgaatacggcaaccctgttcatgctgctagtgtcacctatgtagccaccagaactgctgctggtggt

SEQ ID NO: 285084 - DNA, 281 bp, Glycine max
  unsure (1)..(281): unsure at all n locations
antcaatcaaattctttgagttgaacacaggggccaagattccttctcttgggttagggacttggcaagctgaacctgngtagttgtaggctgaaagctctcaccacagccnattcaggttggatacaggcnatattgactgtgctagtgcgtaataagaatcaagcagagattggttctgctcttaagaagctttttgatgatggtgtggtgaagcgtgaggacttatggatcacttccaaactctggtttgttgtcttttagtaattgtgatccttttt

SEQ ID NO: 285085 - DNA, 263 bp, Glycine max
cttcctcagtagtgcgattttcgattctcttctctgcaactatgcctaaccctaaggtcttcttcgacatgaccatcggcggtcaacctgccggccgcatcgtgatggagctctacgccgacgtgactccgagcaccgccgagaacttccgcgcgctctgcaccggcgagaagggcgccgggcggagggcaagcccctccactacaaaggctcgtccttccaccgcgtgatcccgaacttcatgtgccaggcggcgattcacc

SEQ ID NO: 285086 - DNA, 272 bp, Glycine max
  unsure (1)..(272): unsure at all n locations
gtggttctaaatctggaaggggatttgaggcaacttntgaagtgttacctaggcttaatgaaatcaaatttggcagtggagtaattgatgaactattgtttctggacatgcccacgtgaaatgagattcgctctggtgcaatgatgttagaatatggaaaagcagttcaagagagtgtatatgagcagcttcgtgttgttcgtgaaggtcaacttcgtatcatattcactcaagactgaagatattgtcttgggagttcgtgcaaggcgcca

SEQ ID NO: 285087 - DNA, 183 bp, Glycine max
  unsure (1)..(183): unsure at all n locations
ggcggtttcctttgttggtgttgctgggaactgttttcctggcatcagtttgtgtctcattaaaggtgagagaggatgagaataaccctttctacttgagaagctctaacagcttccaaantctctttgagaaccaaaacggtcgcattcgtctcctccagagattcaacaaacgctacccca

SEQ ID NO: 285088 - DNA, 267 bp, Glycine max
tggtccttaaacactcatcagtcatcaccatggccaagctagttttttccctttgttttctgcttttcagtggctgctgcttcgctttcagttccagagagcagcctcagcaaaacgagtgccagatccaaaaactcaatgccctcaaaccggataaccgtatagagtcagaaggagggctcattgagacatggaaccctaacaacaagccattccagtgtgccggtgttgccctctctcgctgcaccctcaaccgcaacgcccttc

SEQ ID NO: 285089 - DNA, 267 bp, Glycine max
acgcagtgctacaggcattacttacagagagtgggcacctggagctaagtcagcagcattaattggagacttcaacaattggaatccaaatgcagatgtaatgaccaggaatgaatttggtgtgtgggagatcttcttgccaaacaatgtggatggttcaccaccaattccccatggttctcgggtcaagatccgcatggatactccctctggaatcaaggactcaattcctgcttggattaagttttctgtacaggctcctggtga

SEQ ID NO: 285090 - DNA, 272 bp, Glycine max
ggacttaaccactacccgccatgcccggaggtgcaagcattgaacggaaggaatttggttggatttggagagcacacagacccacagataatttctgtcttgagatctaacagcacctcaggcctgcaaatctgtctcacagatggcacttgggtttctgtcccacctgatcaaacttcctttttcatcaatgttggtgacactcttcaggtaatgactaatgggaggtttaaaagtgtaaagcatagagttttggctgacccaaccaagtc

SEQ ID NO: 285091 - DNA, 271 bp, Glycine max
aagaaaaagaagatcaaggaagtgtcacatgaatggtccttggtgaacaagcagaagcctatttggatgaggaagcctgaggagatcacaaaagaggagtattctgctttctacaagagtcttaccaatgactgggaagagcatttggctgtcaagcacttctctgttgagggtcagttggagtttaaggctatactctttgttcccaagagggcaccttttgacctctttgacacaaggaagaagcctaacaacattaagctctatgtcc

SEQ ID NO: 285092 - DNA, 272 bp, Glycine max
  unsure (1)..(272): unsure at all n locations
gaaggattatcatcttgtggagnagcttgcaaattttgatagggaacgtatcccagaacgtgttgtccatgccaggggcgctagtgcaaagggtttctttgaggtcacccatgacatttctcacctgacatgtgcagatttccttcgagcccctggngttcagacgcctgtaattgttcgtttctcaactgtcattcatnagcgtggtagccctgaaaccttgagggaccctcgaggttttnccgtgaagttttacaccagagagggtaact

SEQ ID NO: 285093 - DNA, 274 bp, Glycine max
  unsure (1)..(274): unsure at all n locations
cacacacaactactacaagtacttccttacaatcaaaaccaacaacaactatggcaagttatcaaaagcactacgatgatcagggtcgcaaggttgacgagtatgggcaacgttgagaagcanaccgacgaatacggcaaccctgttcatgctgctagtgtcacctatgtagccaccagaactgctgctggtggttacagtgatgacattaataagcaacatgataccaccaatgcctacggcgtagacactggtagacagcattctagtggtg

SEQ ID NO: 285094 - DNA, 266 bp, Glycine max
  unsure (1)..(266): unsure at all n locations
ganaacctaagcttagaattagaaacaaaganaagaagaaaggaaagaattgatcgttgaaaatgcagggaggaaagaaagcgggagagtccattaaggaaacagctacaaacattggtgcttctgccaaggctggcatggagaagaccaaggccactgtccaagagaaggcagaaagaatgacagcacgtgatccggtgcaaaaggagttggcaacccaaaaganagaggcaaagatgaaccaggcggactggacaagcagcggc

SEQ ID NO: 285095 - DNA, 266 bp, Glycine max
  unsure (1)..(266): unsure at all n locations
ctaacgcgtgcatagcagngtcagngacagagacgcagccatngggcggananctgcgaggtgttataggccaattaagncncaagccataccccaagtcacgtntctgtccgtggtgttcctgatcccaagatcaggatttatgatgttggtatgaagaanaagggtgttgatgagtttccttctgtgtccatctggttagttgggagaaggnnaatgtctcaagtgangcnctggaagctgctcgcattgcttgcaacaagtac

SEQ ID NO: 285096 - DNA, 271 bp, Glycine max
  unsure (1)..(271): unsure at all n locations
aaccaaganacccaagttaaggttttttgcaatcttcccttctaaaaagaaatgggccggaaaaggagagggactcggccatcggaatcgactggggaacaacctattcttgcgtcggagtctggcagcacgaccgcgtcgaaatcatcgccaacgatcagggcaaccgtaccacaccctcttatgtcgccttcaccgataccgaaagactcatcggagatgccgctaagaaccaggtcgccatgaaccccatcaacaccgtcttcgatgc

SEQ ID NO: 285097 - DNA, 268 bp, Glycine max
aatgctctagagccaacacccaccaatgcctcagttgccccgcggcatcaaggccagggtgccacaaaaacacgtgtggcctcatgtccactaatcccatcacccaacaaaccggtttaggtgaactaggagaagacgttcttgcaatccacgccacacaagggtcgacccaacaacttggcccattggtcacagtcccacaattcctcttttcttgtgcaccttccttccttgttcaaaagggtcttcctagaaacactcaaggtgt

SEQ ID NO: 285098 - DNA, 264 bp, Glycine max
cacacaactactacaagtacttccttacaatcaaaaccaacaacaactatggcaagttatcaaaagcactacgatgatcagggtcgcaaggttgacgagtatggcaacgttgagaagcaaaccgacgaatacggcaaccctgttcatgctgctagtgtcacctatgtagccaccagaactgctgctggtggttacagtgatgacattaataagcaacatgataccaccaatgcctacggcgtagacactggtagacagcattct

SEQ ID NO: 285099 - DNA, 215 bp, Glycine max
  unsure (1)..(215): unsure at all n locations
cccttacccttctctatcgcttcgctttcctttgacgcttctgacccttgctttgtctgcgtcnnnnnnnnnnnnnnnnnnnnnnnnnnnnnngtcgtaatggctctcccagactcttcttcccgtcgcaactgccctgatgcccctcttcatctacttcctcttcctccaaaacgctccctgtccaccacatgctcaacaccgntccgctgccg

SEQ ID NO: 285100 - DNA, 262 bp, Glycine max
gtttgttgttcctcactgacctcaccatggcgaccagagccaagctttctttagctatcttccttttctttcttttagccttgatttcaaacctagccttgggcaaacttaaagaaaccgaggtcgaagaagatcccgagctcgtaacatgcaaacaccagtgccaacagcaacggcaatacactgagagtgacaagcgaacatgcttgcaacaatgtgacagtatgaagcaagagcgagagaaacaagtcgaagaggaaac

SEQ ID NO: 285101 - DNA, 266 bp, Glycine max
acacacaactactacaagtacttccttacaatcaaaaccaacaacaactatggcaagttatcaaaagcactacgatgatcagggtcgcaaggttgacgagtatggcaacgttgagaagcaaaccgacgaatacggcaaccctgttcatgctgctagtgtcacctatgtagccaccagaactgctgctggtggttacagtgatgacattaataagcaacatgataccaccaatgcctacggcgtagacactggtagacagcattcta

SEQ ID NO: 285102 - DNA, 269 bp, Glycine max
  unsure (1)..(269): unsure at all n locations
aaacaacacattaacctttctcattccccatctcctcaccttattcagccactngctaatttctagggttccgaaatggacgctggcggaaagatcaagaagggcgccggaggaagaaagggcggcggccctaagaagaagccggtttcaaggtccgtcaaggccggtctccaattccccgtcggaagaattggccgttatttgaagaaaggaaggtacgcccagcgtgtcggtaccggtgctcccgtttacttggccgcagttctcgt

SEQ ID NO: 285103 - DNA, 268 bp, Glycine max
  unsure (1)..(268): unsure at all n locations
gccactgtggaagggtattaggcaacaccgtgggaaggtgttggctgcatttctgaaggcaattgggtttattattccgttgatggaagccccgtatggccagttactatactnaggaagtcatgctcattctgattcgtgaattccagtcacctgatgaagaaatgaagaaaattgttctgaaagtggtgaagcagtgtgtgagcactgagggtgtggaagctgaatatattaganatgatatcctgcctgagtttttcaggaattc

SEQ ID NO: 285104 - DNA, 268 bp, Glycine max
  unsure (1)..(268): unsure at all n locations
cctctttttcttctctctcaacaacttcaccttcntcctcctcgatcatgtctcacttcaagggcaagtaccatgatgagcttatcgccaatgctgcgtacattggcactcctggaaagggtattcttgctgctgatgagtcaacagggacaattggcaagcgtttggccagcatcagtgtagagaacattgaatccaacaggcgagctcttagggagctgcttttcactgctcctggtgttcttcaatatctcagtggtgtcatcct

SEQ ID NO: 285105 - DNA, 263 bp, Glycine max
acgtgagagagattgtgaagtagaaatcggtgcaagaaattctccactttatctaaaaaaattcggtgagtttgtgaagacaaaaaatcactagctactcaaaaatggccacagtaggaaggaacgttgcagctcctttgctgtttcttaacttgatcatgtattttattgttcttggctttgctagttggtgcctcaacaggttcatcaatggccaaacttaccaccctagttttggtggaaatggtgcaaccatgtttttc

SEQ ID NO: 285106 - DNA, 261 bp, Glycine max
ctttggttgacccctccccggtgaaaatagtaaccgatcaggtcatgaaaccgaatgagcctactaacaatggtaacaattcagtttccgatgacacaaagtggtgggaaaatgtctttagcccaccagcaagaggtgaggactatacaatacttcaggcgctattcagcgtcgacatgttaatacttttcatgacttgccatatgtggtgttggaggcacgttgaccgcaatagataatctgggtcagataggaacctcg

SEQ ID NO: 285107 - DNA, 262 bp, Glycine max
  unsure (1)..(262): unsure at all n locations
gttgcagaccgagctagctagctagcaagcaagcacagagatggaggcaaagcgaggccatgccctacatgtgcttggcacgtgtttcactcttcctctgcgctctaaccctatccgctgctcacggaagcaccacggttcaagacatcgcgaganagttgaaactcggggancaacgagcttctgcgcacggagaagaagttcaaggttttcatggagaattacgggaggagctactccacagaggaggagtatttgcgcc

SEQ ID NO: 285108 - DNA, 264 bp, Glycine max
  unsure (1)..(264): unsure at all n locations
gcgatagctgataagagagataccaacaagaaaagannaaaagaagagttgagattccctttgaagaaaagatggnatcccataggcaaagctatgaagctggtcaaactaagggccgaactgaggaaaagacgaaccagacgatgggcaatattggagagaaggcttcaagctgcaaaggagaagacccaggaaatgggcccaagcngcaaaggagaagacccaacaaacagcccaagctgccaaggacaagncttgcgacac

SEQ ID NO: 285109 - DNA, 270 bp, Glycine max
  unsure (1)..(270): unsure at all n locations
gtatgttgnttcaatctaacaaacttctctatatcgtttactttttcnacacaacatacnaannnanaanatatgnnnctttcatataaatatcatggcttcgagggnngnttcggntntggngatagcgatgatgntgtttgccatgaactgtaactgncactagtgttggncacatgccttcaaccaaagaggaaggtcacgattttcaggaggctaaagccaagacaacacaaactgcgaacanggccatggaaatggtaaagatgg

SEQ ID NO: 285110 - DNA, 262 bp, Glycine max
  unsure (1)..(262): unsure at all n locations
ccggtgtctatggtatagacaccgataggcaacaacatgggactactggtggctatgccggtgacactggtaggnnnacatnggaacattcggtggcccttactatggaaccaacaccgcagacaccggtactggtcccagaagtggaaccacgggcggcaccggttatggaggcatggtggcactgattatggaacaactggtggcactggttatggaagtggaatgggtatggagtcaacatgggggtgcgcacatgaag

SEQ ID NO: 285111 - DNA, 264 bp, Glycine max
acgcagtgctacaggcattacttacagagagtgggcacctggagctaagtcagcagcattaattggagacttcaacaattggaatgccaaatgcagatgtaatgaccaggaatgaatttggtgtgtgggagatcttcttgccaaacaatgtggatggttcaccaccaattccccatggttctcgggtcaagatccgcatggatactccctctggaatcaaggactcaattcctgcttggattaagttttctgtacaggctcctg

SEQ ID NO: 285112 - DNA, 262 bp, Glycine max
  unsure (1)..(262): unsure at all n locations
gtcttcttgatccttctttttctccttgaactcaaacatggcagatgaggtggttctgctagatttctggccaagtccatttgggatgagggtcaggattgcacttgctgaaaagggtatcaaatatgagtacaaagaagaggacttgaggaacaagagtcctcttctcctccaaatgaacccggttcacaagaagattccggttctcatccacngtggcaaacccatttgtgaatccctcattgctgttcagtacattgag

SEQ ID NO: 285113 - DNA, 267 bp, Glycine max
caaagaggacaaagcagcagaccacaagaccgtcaccagaagatctataacttcagagagggtgatttgattcgcagtgcctactggtgttgcatggtggatgtacaacaatgaagacactcctgttgttgccgtttctattattgacaccaacagcttggagaaccagctcgaccagatgcctaggagattctatcttgctgggaaccaagagcaagagtttctaaaatatcagcaagagcaaggaggtcatcaaagccagaaagg

SEQ ID NO: 285114 - DNA, 263 bp, Glycine max
gccaacaagaaaatgaagaaggaacaatattcttgtgaccatccacctgcatcatgggattggaggaaaaaaggtgtcatcacccaagtaaagtaccaagggggctgtggaagcggttgggcgttttctgccacgggagccatagaagcagcacatgcaatagcaacaggagaccttgttagcctttctgaacaagaactcgtagactgtgtggaagaaagcgaaggttgttacaatggatggcatatcaatcgttcgaatgg

SEQ ID NO: 285115 - DNA, 266 bp, Glycine max
  unsure (1)..(266): unsure at all n locations
gaaagaacttccttataaccaaaaccaacaacaactatggcaagttatcagaagcactacgatgatcagggtcgcaaggtcgacgagtatggcaatgttgagaggcaaactgacgaatatggcaacccggttcatgccactagtgtcacttatgtnngacaccaaaagtgttggtggctacaatgatgacgctaataagcaacatgatattactggtgtctatcccgagaaagacaccggtagacatcattttggtcgtggttacg

SEQ ID NO: 285116 - DNA, 264 bp, Glycine max
  unsure (1)..(264): unsure at all n locations
gaaagaacttccttataaccaaaaccaacaacaactatggcaagttatcagaagcactacgatgatcagggtcgcaaggtcgacgagtatggcaatgttgagaggcaaactgacgaatatggcaacccggttcatgccactagtgtcacttatgtngccaccaaaagtgttggtggctacaatgatgacgctaataagcaacatgatattnncggtgtctatcccgagaaagacaccggtagacatcattttggtcgtggttac

SEQ ID NO: 285117 - DNA, 270 bp, Glycine max
  unsure (1)..(270): unsure at all n locations
caaaagaaggcaaagccataggcatagacctcggcacgacctacagctgcgtgggcgtgtggcaaaacgaccgcgttgagatcatccccaannaccaaggcaaccgaaccaccccctcctatgtcgccttcaccgacaccgagaggctcatcggagacgccgcgaagaaccaagtcgcgatgaacccgcagaacaccgtcttcgacgccaagcgtttaatcggtcgcagattctcagatctcctgttcaaaacgacatgaagctgtggcc

SEQ ID NO: 285118 - DNA, 267 bp, Glycine max
gtggcattggcatgaccaaagctgatttggtaaacaacttgggtacaattgctaggtctggtaccaaggaattcatggaagccttggctgctggtgctgatgttagtatgattggacagtttggtgtggggttctactctgcatatcttgttgccgaaaaggttattgttacctccaagcacaatgatgatgagcagtacgtttgggagtcccaagctggaggttcatcatgtcaccagggatacctctggtgaggttcttggcagg

SEQ ID NO: 285119 - DNA, 260 bp, Glycine max
gaagaaaggaaagaattgatcgttgaaaatgcagggaggaaagaaagcgggagagtccattaaggaaacagctacaaacattggtgcttctgccaaggctggcatggagaagaccaaggccactgtccaagagaaggcagaaagaatgacagcacgtgatccggtgcaaaaggagttggcaacccaaaagaaagaggcaaagatgaaccaggcggactggacaagcaggcggcgcgtcacataacacggcggccaaacag

SEQ ID NO: 285120 - DNA, 260 bp, Glycine max
  unsure (1)..(260): unsure at all n locations
cacacaactactacaagtacttccttacaatcaaaacnnncaacaactatggcaagttatcaaaagcactacgatgatcagggtcgcaaggttgacgannatggcaacgttgagaagcaaaccgacgaatacggcaaccctgttcatgctgctagtgtcacctatgtagccaccagaactgctgctggtggttacagtgatgacattaataagcaacatgataccaccaatgcctacggcgtagacactggtagacagca

SEQ ID NO: 285121 - DNA, 264 bp, Glycine max
  unsure (1)..(264): unsure at all n locations
cttacaagttccaaacttctctattttgttattatttgttctnacttctcanacatacanaannnngnnnttttatattatcatggcttctanngtggtttcggttttggttatagcgatgatgttgtttgccatgaactgtaactgcactagtgttgggccacatgccttcaaccaaagaggaaggtcacgattttcaggagtctaaagccaagaccacacaaactgcgaacaaggccaggaaatggtaaagagggacaagaa

SEQ ID NO: 285122 - DNA, 266 bp, Glycine max
gttctcctttcattaaggttgtgttgtgtttgttgggcttcgttactgtactttggtttcattattatggcgccgtcttcttcagcttctgcttctcgtgagggacactacagaggggttaggaagcgaccatggggacgctacgccgcagaaataagagacccatggaagaagacacgtgtctggctgggcacattcgatactcccgaggaggccgccctcgcctacgatggcgccgcccgctccctccgcggtgccaaggccaa

SEQ ID NO: 285123 - DNA, 263 bp, Glycine max
  unsure (1)..(263): unsure at all n locations
tggcatctcgtcaaaacaacaagcaagancttnatgaaagagcnaggcnaggnganactgttgtcccgggtggaactggtggcaagagcctggaggctcagcaacaccttnctgaaggaaggancaagggagggcaaacaaggaangaacagctnggtacanaagggtaccangacatgggacgcaaangagggttnagcacngtngacaantcangagaagaacgtgctcaagacgaagggattggcatcgatgagtccagt

SEQ ID NO: 285124 - DNA, 270 bp, Glycine max
  unsure (1)..(270): unsure at all n locations
agcgaatccctctctctctttctctttctctctcatccagatcttgcaaaaaaaaaaaaacacaatggnagcgagngctccnantcnangcgaaganttcgtgtacatggcgaantggcggannaggccgagcgcnacgnggagatggtgganttcatgganaaggtctcngcctccgccgagagcgaggagntgaccgtggaggagngcaacntcctctcngtggcctacangaacgnaatcggcgtncgcngcgcctcctggcgataa

SEQ ID NO: 285125 - DNA, 264 bp, Glycine max
  unsure (1)..(264): unsure at all n locations
aacaaagaaaggaaataattgatctttgaaaatgcagggaggaaagaaagctggagantccattcaaggaaacagctgcaaacattggtgcttctgccaaggctggcatggagaaaaccaaggccactgtccaggagaaggcagaaagaatgacggcactgatccgatgcaaaaggagttggcaacccagaagaaagaggcaaagatgagccaggcaganctggacaagcaggcggcgcgttcacataaacacggcggcgaana

SEQ ID NO: 285126 - DNA, 258 bp, Glycine max
  unsure (1)..(258): unsure at all n locations
gtacttccttacaatcaaaaccancaacaactatnncaagttatccaaaagcactacgntgatcagggtcgcaaggttgacgagtatggcaacgttgagaagcaaaccgacgaatacggcaaccctgttcatgctgctagtgtcacctatgtagccaccagaactgctgctggtggttacagtgatgacattaataagcaacatgataccaccaatgcctacggcgtagacactggtagacagcattctagtggtggc

SEQ ID NO: 285127 - DNA, 256 bp, Glycine max
agcgatgcggatgaggcgccactcgatgtttccatttgcctgcatgcctttggtattgtggggtgtggttcgtttagtggtgtcaagtcttgcgaacgtgagggtgcatgagtggtaatcgggatgtttttgttgcacggctccatgcttgcgcatgcaacgtgtgacatgcatccttttcattgtcaccttagccttcgtggcttaggtgctgacgattggttcctgtgttgcctacctaccaaacggtatcgtg

SEQ ID NO: 285128 - DNA, 260 bp, Glycine max
gcagatattacatacacgtgaatcactaattaagccatggagaagaaatcaatagctgggttgtgcttcctcttccttgttctctttgttgctcaagaagttgtggtgcaaactgaggcaaagacttgcgagaacctggctgatacatacaggggtccatgcttcaccactggcagctgcgatgatcactgcaagaacaaagagcacttgctcagaggcagatgcagggacgattttcgctgttggtgcaccaaaaatgt

SEQ ID NO: 285129 - DNA, 261 bp, Glycine max
  unsure (1)..(261): unsure at all n locations
cgttgtcgttcagttctgaacggaaaagcaccgtcgcaccttccctgaggcttctcttgtctgtcgcgagtgaccatggtgagggntagtgtgctgaacgatgctctgaagagcatgtacaatgctgagaaaaggggaaagcgccaagtcatgattcggccatcctccaaagtcattatcaaattcctttggtgatgcagaagcacggatacattggagagtttgagtatgttgatgaccacagggctggtaaaatcgtgg

SEQ ID NO: 285130 - DNA, 264 bp, Glycine max
  unsure (1)..(264): unsure at all n locations
attagaaacaaagaaaagaagaaaggnaagaattgatcgttgaaaatgcagggaggaaagaaagcgggagagtccattaaggaaacagctacaaacattggtgcttctgccaaggctggcatggagaagaccaaggccactgtccaagagaaggcagaaagaatgacagcacgtgatccggtgnnaaaaggagttggcaacccaaaagaaagaggcaaagatgaaccaggcggantggacaagcaggcggcgcgtcacataaca

SEQ ID NO: 285131 - DNA, 267 bp, Glycine max
  unsure (1)..(267): unsure at all n locations
attcaaaccttgactctatactacacagtacacacactanaagaataatggcttccatcctccactaactttttagccctctctctttcttgctcttttcttttcttcttatccgactcagtcacccctacaaaaccaataaaccttgttgttctacccgttcaaaatgatggttccacagggctccattggnnacaacctccaaaaaagaacccctctaatgcaagtaccagtctggtggacctnnatggaaatcattgtgggtta

SEQ ID NO: 285132 - DNA, 257 bp, Glycine max
  unsure (1)..(257): unsure at all n locations
cacaactactacaagtacttccttacaatcaaaaccagaaacaactnnggcnagttatcaaaagcactacgatgatcagggtcgcaaggttgacgagtatggcaacgttgagaagcaaaccgacgaatacggcaaccctgttcatgctgctagtgtcacctatgtagccaccagaactgctgctggtggttacagtgatgacattantaagcnacatgataccaccaatgcctacggcgtagacactggtagacagc

SEQ ID NO: 285133 - DNA, 258 bp, Glycine max
  unsure (1)..(258): unsure at all n locations
gataaagccaagaacttcgtgtcggagaaggtaaatgatatggccaagccggagggaagtgtcactgacgtggacttcaagcgcgtgagcaaagataatgtcgagtacttggccaaggtctctgttcgtaacccttattcaacttccatacccatttgtgagatcanctactctttcaaaagcgcatccagggagatagcatcagggaaaattccagacccaggatcgttgaaggcaaaggacacaacaatggtggat

SEQ ID NO: 285134 - DNA, 259 bp, Glycine max
  unsure (1)..(259): unsure at all n locations
ctaattcccaaattctctcatttttcaagtttcaaccaagaaaagcagcaacaatgtcgggtcgcggaaagggtgggaagggtttaggaaagggaggagcaaagaggcatcgcaaggtgctccgcgacaatatccagggaatcacgaagcccgcgattcggagactggcgagaagaggtggcgtgaagagaatcagtggttnnnnctacgaagagaccaggggcgtgctcaagatctttctcgagaacgtgattcgcga

SEQ ID NO: 285135 - DNA, 269 bp, Glycine max
  unsure (1)..(269): unsure at all n locations
atnnacntggnntcncntnanaacganangtacnacgnnctatgttggaattgnttaatcagcttgatggtttnngcagtgatnaccggatcaaggtnatagcancaactaaccgtgcagatattcttgatcctgcnctgatgcgttctggncgtttggatcgtaaaattgagtttccacacccaagtgaagaagcaagagctcgaattctacagattcattcaaggaagatgaatgttcacccagatgtcaactttgnagacttgccc

SEQ ID NO: 285136 - DNA, 252 bp, Glycine max
  unsure (1)..(252): unsure at all n locations
gactattgcagttgaattagtggctaacccgtccataattttcatggatgagcctacttctgggttagatgcaagagctgctgcaattgttatgagaacagtcnnnaatactgtggacactggaagaaccgttgtttgcaccatccatcagcctagcattgacatatttgaagcattcgatgagctattcctaatgaagcgtggaggacaagaaatatatgttgggccatgggtcgccactctactcattga

SEQ ID NO: 285137 - DNA, 257 bp, Glycine max
  unsure (1)..(257): unsure at all n locations
ttgcaatcaaattagttcattctctttgcgcagttccctaccttctcctttcaagatgcagatcttcgtcaagaccctcaccggaaagaccatcacccttgaggtggaaagctctgacaccatcgacaacgtcaaggccaagatccaggacaaggaaggaattcccccggatcagcaacgtctcatcttcgccggaaagcagctcgangacggccgtaccctcgccgactacaacatccagaaggagtcaacccttc

SEQ ID NO: 285138 - DNA, 258 bp, Glycine max
agaacctaagtgagaaacaaagaaaggaaataattgatctttgaaaatgcagggaggaaagaaagctggagagtccatcaaggaaacagctgcaaacattggtgcttctgccaaggctggcatggagaaaaccaaggccactgtccaggagaaggcagaaagaatgacggcacgtgatccgatgcaaaaggagttggcaacccagaagaaagaggcaaagatgagccaggcagagctggacaagcaggcggcgcgtca

SEQ ID NO: 285139 - DNA, 258 bp, Glycine max
  unsure (1)..(258): unsure at all n locations
cacacacaactactacaagtacttccttacaatcaaaaccancaacaactatggcannttatcaaaagcactacgatgatcagggnccgcaaggttgacgagtatggcaacgttgagaagcaaaccgacgaatacggcaaccctgttcatgctgctagtgtcacctatgtagccaccagaactgctgctggtggttacagtgatgacattaataagcaacatgataccaccaatgcctacggcgtagacatggtagac

SEQ ID NO: 285140 - DNA, 258 bp, Glycine max
  unsure (1)..(258): unsure at all n locations
aaatttttcataagatgaaggaaaaagttttgggctcatctgatcctgattctggtaaaggaaagagcaagatgaagaagaacataactcatggctttcacttggtaaaggggagatcaggtcatgccatggaagactatcttgttgctcaattcaagcaagttgacgacaatgaattgggtttatttgcaatatttgatggccactcaggtcacagtgtacctgattacttgaagtctcattgtttgataatatntg

SEQ ID NO: 285141 - DNA, 260 bp, Glycine max
gtgagaaacaaagaaaggaaataattgatctttgaaaatgcagggaggaaagaaagctggagagtccatcaaggaaacagctgcaaacattggtgcttctgccaaggctggcatggagaaaaccaaggccactgtccaggagaaggcagaaagaatgacggcacgtgatccgatgcaaaaggagttggcaacccagaagaaagaggcaaagatgagccaggcagagctggacaagcaggcggcgcgtcacataacacggc

SEQ ID NO: 285142 - DNA, 251 bp, Glycine max
tttggtaatcattacccaaaacacgtccaccatagaggagcatctgtaccgaagaacaagatcaagtatagctgtaaaggtggatggtgatggagggacacttctaagccaaacccaaatacaattgttggtgccatggttgccggtcctgacaagcatgatggcttccatgatgttcgtacaaactacaattacacagagccaacacttgctggaaatgccggtttagttgctgcactagtggcattgtc

SEQ ID NO: 285143 - DNA, 252 bp, Glycine max
  unsure (1)..(252): unsure at all n locations
ctgtctcctccatggccatctccttcagtcccaaacaccctccttacgatgagatgatatacacagcaatcggagctctgaaggagagggatggttcgagcaagcgagccataggaaagtacatanaacaagtctacaaggaccttccacccactcaccctgagctgttgactcaccatctcaaccgattgaaatcctctgccctcctcgtcctcgtcaagaaatcctacaagcttcctggatctcatcatc

SEQ ID NO: 285144 - DNA, 253 bp, Glycine max
ggtaaggtaggttaacactcttcttcatcgtcgtcgcaatgggacgtgtgatccgtgcgcacgtagagggagcaggctcggtcttcaagtcccacacgcaccaccgcaagggccctgcacgcttccggagcctggacttcggggagcgcaacggctacctcaagggcgtggtcaccgacgtcatccatgaccctggccgcggcgcgccgctcgccaaggtcgccttccgccaccctttcagatacaagaagca

SEQ ID NO: 285145 - DNA, 253 bp, Glycine max
  unsure (1)..(253): unsure at all n locations
gcacattttaggggaagtttttgcggactttgatccagttgctatctcaaaatttaatgagaaaaagataatggcaccgggatccactgcaagctccttactttctgaccttaaattgcgngctataatcgagaatgcacgtcaaatatcaaaggtcatagaagagtttgggtcatttgacaagtatatttggagttttgtgaaccataagcctatattagcagattccgatatcctcgacaggttcctgtaa

SEQ ID NO: 285146 - DNA, 253 bp, Glycine max
  unsure (1)..(253): unsure at all n locations
ccaagttatgggtttccttgtgttgcttcttttctccctcttaggtctctcttctagttccagcatatcaactcatcgntccatattnggaccttgacctaaccaagtttaccacacagaaacaggtgncttcactgttccaactatggaagagtgagcatggacgtgtctaccataaccacgaagaagaggcaaagagacttgagattttcaagaataacttgaactatatcaggacagaatgcaaacagaa

SEQ ID NO: 285147 - DNA, 257 bp, Glycine max
  unsure (1)..(257): unsure at all n locations
gaaaacctaagcttagaattagagacaaagngaagnagnaaggnaaggattgatcgttgaaaatgcagggaggaaagaaagcgggagagtccattaaggaaacagctacaaacattggtgcttctgccaaggctggcatggagaagaccaaggccatgtccaagagaaggcagaaagatgacagcacgtgatccggtgcaaaaggagttggcaacccaaaagaaagaggcaaagatgaaccaggcggantggacaaa

SEQ ID NO: 285148 - DNA, 267 bp, Glycine max
  unsure (1)..(267): unsure at all n locations
ttgactgtgatgagcacaagagtttgtgcagcaaatatggagtctctgggtacncaacaattnagtggtttccaaaaggatctcttgaacccaaaaagtatgaagggccacgcactgctgattcacttgctgagtttgtaaatacggaaggaggaacaaatgtgaagattgctacagctccttccaatgtagtggtgcttacatctgaaaatttaatgaggtgtcttagatgaaaccaagatgtctnggttgagttttatgcacccg

SEQ ID NO: 285149 - DNA, 275 bp, Glycine max
gctgaaactgcagaagcggctcgcagccagcgtcctcaagtgtggcagaggaaaggtttgggcttgaccccaatgaagtcaacgaaatctccatggctaattctcgccaaaacataaggaagctggttaaggatgggtttattatcaggaagcccaccaagattcactctcgctcacgtgcccgccgaatgaaggaagccaagaggaaaggacgtcactctggatatggtaagcgtaagggtacaagggaggcaaggcttcccactaaaatcctt

SEQ ID NO: 285150 - DNA, 273 bp, Glycine max
acccatcttggaggtgaagattttgataacaggatggtgaaccactttgttcaagagttcaagagaaagaacaagaaggacattagtggaaaccccagagcacttagaaggttgaggactgcttgtgagagggccaagagaacactttcatcgactgctcagaccaccattgaaattgattctctatacgagggaattgatttctactccactgttactcgtgccagatttgaggagctcaacatggatctcttcaggaaatgtatggagccg

SEQ ID NO: 285151 - DNA, 273 bp, Glycine max
  unsure (1)..(273): unsure at all n locations
ttcttctcttgcggctagggttttagcgcanttcttctagatttaaggaagatgggtaaggaaaaggttcacatcagtattgtggtcattggccatgtcgactctgggaaatccactaccactggtcacctgatttacaagcttggaggcattgacaagcgtgttattgagaggtttgagaaggaagctgctgagatgaacaagaggtctttcaagtatgcctgggtgctggacaaacttaaggctgagcgtgaaagaggaatcaccatgata

SEQ ID NO: 285152 - DNA, 268 bp, Glycine max
aaaccttgctctatactacacagtacacacactagaagaataatggcttccatcctccactactttttagccctctctctttcttgctcttttcttttcttcttatccgactcagtcacccctacaaaaccaataaaccttgttgttctacccgttcaaaatgatggttccacagggctccattgggccaacctccaaaaaagaacccctctaatgcaagtaccagtcctggtggacctcaatggaaatcattgtgggttaatgtgag

SEQ ID NO: 285153 - DNA, 273 bp, Glycine max
  unsure (1)..(273): unsure at all n locations
gttccaaacaaaacccatcanagtctttctccctcagtgatcatatattcattcagttctatacaaaatcctcaaaaactcttcctctctgccatgaccatggaatacagaaccttagaactcaacatcatatccgcaaangacatcaagaatgttaatctcttctccaagatggacgtatacgccgccgtttcgctctccggtgaccctctccaccctcagggcgccaccacccacgtccacaaagacgccggcagcaaccccacgtggaac

SEQ ID NO: 285154 - DNA, 269 bp, Glycine max
  unsure (1)..(269): unsure at all n locations
atcaaaatggctgcagagatggagagggagtcattgataactgaagctcctaatgcaccagttactgcacagagaagggtcagaaatgacttagaaaattctctaccaaaaccatacttgccaagagcantgaaagctcctgatacgggtcacccaaatggaacagcaggccacaggcaccacaacttatctgttcttcagcagcattgtgctttttttgatcaagatgacaatggaatcatttacccttgggaaacttacatggggct

SEQ ID NO: 285155 - DNA, 270 bp, Glycine max
caagtacttccttacaatcaaaaccaacaacaactatggcaagttatcaaaagcactacgatgatcagggtcgcaaggttgacgagtatggcaacgttgagaagcaaaccgacgaatacggcaaccctgttcatgctgctagtgtcacctatgtagccaccagaactgctgctggtggttacagtgatgacattaataagcaacatgataccaccaatgcctacggcgtagacactggtagacagcattctagtggtggctacgatggtg

SEQ ID NO: 285156 - DNA, 274 bp, Glycine max
gttgttctgtgtttgtgtttgttttttctctcacctgaaaatgtcttgctgcggtggtaactgtggttgcggaagctcctgcaagtgcggcaacggctgcggaggctgcaagatgtacccagacttgagctacactgagtcaaccaccaccgagaccttggtcatgggagtggcacctgttaaggctcaatttgagggtgctgaaatgggtgtgcccgctgagaacgatggctgcaaatgtggaccaaactgctcctgcaacccctgcacttgc

SEQ ID NO: 285157 - DNA, 266 bp, Glycine max
agaaaagacttcatgtgacaatgggtgtaatggaggtcttatgacaaatgcctacaattatttgctcgagtctggtgggttggaggaggagtcttcatatccctacactggggagagaggtgaatgcaagtttgatccagagaaaatagcagttaagatcacaaatttcaccaatatccctgctgatgagaaccaaattgccgcatatttagtaaaaaatggtccacttggctagtaagtcccccctttccctaattaataatgaa

SEQ ID NO: 285158 - DNA, 265 bp, Glycine max
  unsure (1)..(265): unsure at all n locations
actctgtcacagtcctggggttaaagacagcacagattttcttctctcaaattctccacagcatctngntagnnnccatgnntttctntgacaccacgccatctgggagaattctaagcagggcatccactgatcaaaccaatgttgatgtcttnatccccttgttcatcaattttgtggtggctatgtacattacagtgatcagcatcttcataatcacgtgtcaaaattcttggccaacagctttcttgttaattcctcttgc

SEQ ID NO: 285159 - DNA, 142 bp, Glycine max
ataatatattagcaactacgtagtcgaggttggaatattttgtactgaatatcctcatgttttcttcaagtttagttaaaaaataatagatactcagcatgtcatttctctgaataaagtacccaatttgtaggttccatcc

SEQ ID NO: 285160 - DNA, 268 bp, Glycine max
  unsure (1)..(268): unsure at all n locations
agacacgatgcaggaagcgacgaaggtgataataatcngtgccggaacttctggtatcgccaccgccggttgcttaacgaagcaatcaataccttacataaggctcgagagagaagactgtttcgcttcgctgtggcagaaatacacctacgatcgtctccaccttcatntgaggaagcaagtttgcgagttaccgcacttaccgtttcccaagtcttaccctcactacgtgcctcggaagcagttcatagactacttgggaaactac

SEQ ID NO: 285161 - DNA, 226 bp, Glycine max
  unsure (1)..(226): unsure at all n locations
cattatccatgttgacatggactgcttttttgtctcagtggttatcaggaaccaccctgaattgttgggccagcctgtagctgtatgtcattcaaataattcaaatggaactgctgagatttcctctgcgaactacccagctcgtagtcatngtattagggctggtatgtttgttcgagatgccaaggcgctttgtccccatcttgttatctttccacacaacata

SEQ ID NO: 285162 - DNA, 267 bp, Glycine max
tctgcatggatgactgatgaagaatttgcaagagaaatgcttgctggtgtaaatccaaacttgattcgttgtcttaaggatttccctccacgaagcaagctagatagccaagtctatggtgatcatactagtcaaataaccaaagaacacctagagcccaacttagaagggctcactgtagatgaggcaattcaaaacaagagattgttcctactagatcatcatgacccaatcatgccatatttgaggcgaataaatgcaacctcc

SEQ ID NO: 285163 - DNA, 270 bp, Glycine max
gggacttggcaagctgaacctggtgttgtagctgaagctctcaccacagccattcaggttggatacaggcatattgactgtgctagtgcgtataagaatcaagcagagattggttctgctcttaagaagctttttgatgatggtgtggtgaagcgtgaggacttatggatcacttccaaactctggtgttcagatcatgcaccagaagatgtgccaaaagcattggataaaacttacaggattgcaacttgactatcttgacctctatct

SEQ ID NO: 285164 - DNA, 262 bp, Glycine max
ctacgaccatttcaggaagaaagaagtgcaatggacatcggaacctatggctatcctacaccagcagtgaaaaagattgagtcttactatgatgtgccagagggagtggatattcggggaagatatgatgcagagtttgcaaaaatcctcacaaaagatgcttgaaattcgttgctgacttgcaacgtgagttcaggaaccatatcaagtatgcattagagtgcagaagagaagcaaagaagaagtacatgaaggggccttc

SEQ ID NO: 285165 - DNA, 263 bp, Glycine max
aaagcatttctcaagaaaattcaatggaaatacttgattgtggatgaagggcatcggttgaaaaatcacgagtctgctctggcaagaaccttggacaatggatatcgcatccaacgaagacttctgttgactggtaccccaattcagaacagtttgcaggagttgtggtctttgcttaattttctccttccaaacatttttaactcagttcaaaattttgaggactggtttaacgccccctttgcagaccgagttgatgtctc

SEQ ID NO: 285166 - DNA, 228 bp, Glycine max
  unsure (1)..(228): unsure at all n locations
caattcaataccatttaccaaactcactcatcaattctcatccttacttctcantaactattaattcatcatgttcgagcacagntggccaagtcatcaantgcaaagctgcggtttcatgggaggcagggaagccacttgtgattgaagaagtagaggttgcgccaccacaagctggtgangtgcgttggaagatcctctacacctctctttgccacacanaannng

SEQ ID NO: 285167 - DNA, 269 bp, Glycine max
acttgagaaaaagaaatttagggtcttaagggtttcattctgcggcatcagacatgggaggaggcaatgggcaaaaggcaaagatggcacgcgagaagaacctcgagaagcagaaggccgcctcaaagggaagccagctggattcaaacaagaaagcaatgtcgattcagtgcaaggtgtgcatgcaaacatttatgtgcaccacatcggaagtgaagtgtagggagctgctgaagccaaacaccctaaatctgatgtttatgcttgtt

SEQ ID NO: 285168 - DNA, 264 bp, Glycine max
ctctggttgattcggatctagagtcttcagtttctcctcgttgttcttcgctttcctgttttcaatttcgattctttcgttaatttaataagatgttggggagggcaccgaagaagagcgataatacgaggtactacgaaatcctcggcgtctccaagaacgcttcgcaggatgatctgaagaaggcttacaagaaagccgccattaagaatcaccccgacaagggcggtgatcccgagaagtttaaagagctggcgcaactta

SEQ ID NO: 285169 - DNA, 259 bp, Glycine max
tcttgcggctagggttttagcgcagttcttctagatttaaggaagatgggtaaggaaaatgttcacatccagtattgtggttattggccatgttgactctgggaagtccactaccactggccacctgatctacaagcttggaggcattgacaagcgtgttattgagagatttgagaaggaagctgctgagatgaacaagaggtcttcaagtatgcctgggtgctgataagcttaagctgagcgtgaaagaggaatcaca

SEQ ID NO: 285170 - DNA, 266 bp, Glycine max
gaaggtgctttggctgaagaaaacatgagagccatctgctttgaagtatgtgatgttgtgctgcacgctgatgctatccacagaggaggtggtcaaatcattcctactgccaggagagtcttctatgcttcccagattactgccaaacccaggcttcttgagcctgtctacctggttgaaatacaggctcctgaacaagctcttggtggaatctacagtgttcttaaccagaagcgtggacacgtgttcgaggaaatgcagaggcc

SEQ ID NO: 285171 - DNA, 262 bp, Glycine max
agctagctagcaagcaagcacagagatggaggcaaagcgaggccatgccctcatgtgcttggcacgtgtttcactcttcctctgcgctctaaccctatccgctgctcacggaagcaccacggttcaagacatcgcgagaaagttgaaactcggggacaacgagcttctgcgcacggagaagaagttcaaggttttcatggagaattacgggaggagctactccacagaggaggagtattgcgccgtttggggattttcgccc

SEQ ID NO: 285172 - DNA, 263 bp, Glycine max
  unsure (1)..(263): unsure at all n locations
cttcacactgctgttgatcnagttaacgagaccaagttggatgatgagatcaagtcatggctagcttttgctgcccaaaaaattgttgaagttaacgcattggctaaagcattgtctggccacaaggatgaggccttcttctctggtaatgctgctgctctggcttcaaggaagtcttctccaagagtgaccaacgaggctgttcagaaggctgctgctgcattgaagggttcagatcatcgccgtgcaacaaatgtcagtgc

SEQ ID NO: 285173 - DNA, 260 bp, Glycine max
gtgtacactaaaatctttctgaagtttccgtataagttctggccaagtgggcccgaaaaggaattcttcatctatgctcacgagcggagatgctactacacattttggcagcacatggagaacgcgtatcctggctccaatatcttagtggtgacattgacaaatggggaatcgaaacgtgtggaagctcaacttgatgaagagaccttgagagaagcaatggcagcgctcagggatatgtttggatccaacatccccga

SEQ ID NO: 285174 - DNA, 259 bp, Glycine max
  unsure (1)..(259): unsure at all n locations
ctcacggcggcgacgcgccaaccaacngagccaggttgcctagaatcagttccgctgatgccatggagnccttgggccaacagtcagaaagggaagaagctctacattgtactcatcagcattcatggcctaattcgaggcgagaatatggagntaggacgtgattctgacacgggtggtcaggttaagtatgttgtggaacttgcgagggcattgggatcaatgccaggagtttatcgggttgattngctactagaca

SEQ ID NO: 285175 - DNA, 261 bp, Glycine max
  unsure (1)..(261): unsure at all n locations
cttctacgtgttctccattccctctctcactcctccatctangtntcttaaatcatnntcnnnnnnnnnnnnnnnnnnnnnntctcatttntctnnttacactctttttttttctctcaacttttctcttattaaccatagttcacatattatatcatcacatatcatagtgatatattatatcatatcacaatgtgtggcatacttgctgtgctggttgctctgattcatctcaagccaaaagggttcgcgtccttgagc

SEQ ID NO: 285176 - DNA, 262 bp, Glycine max
  unsure (1)..(262): unsure at all n locations
gncaattttcttgccaccggaaagctcgtcagtcttagtgaacaacagctccttgactgtgacaacaagtgtgacataacagaaaagacttcatgtgacaatgggtgtaatggaggtcttatgacaaatgcctacaattatttgctcgagtctggtgggttggaggaggagtcttcatatccctacactggggagagaggtgaatgcaagtttgatccagagaaaatagcagttaagatcacaatttcaccaatatccctgc

SEQ ID NO: 285177 - DNA, 261 bp, Glycine max
ttgcttgctgaaggcgacacgaggtcggtagaaactaagaatgggggaagagaatgaagaaacaaaaacatttaaggatttgggcttatccgagtcattggtggaagcttgcgaaaaattgggttggaaaaatccattaaagatacagacagaagcaattcctcttgcattggaaggaaaagatgtgataggacttgcccaaactggttccggtaagactggagcttttgctcttcccatattgcatgccttattagaagc

SEQ ID NO: 285178 - DNA, 260 bp, Glycine max
  unsure (1)..(260): unsure at all n locations
gaagctgtccaaaaggccgctgctgctctgaagggctctgatcatcggagggccacaaatgttagtgccaggctggattctcaacagaagaaactgaatcttcctgttcttccaacaactacaattgngctctttccctcaaactgccgatcttagaagagttcgccgtgaattcaaggctaacaagatctccgaggaanntatatccatttcattaaggagggaaattaacaatgttgtgaagctccaggaagaattga

SEQ ID NO: 285179 - DNA, 263 bp, Glycine max
  unsure (1)..(263): unsure at all n locations
ctttcctcctcttccttgtgatttttgtttgcatcacagggagaaactgagacacagaagatgagagagataattagtattcatattggacaagctggaattcaggtggggaattcatgctgggagttgtattgccttgagcatggaattaaccctgatggcaccatgcctagtgatacctcagttggtgtagcacatgatgctttcaacaccttcttcagcgngacgggatccggcaagcatgtgccaagggctttatttgt

SEQ ID NO: 285180 - DNA, 293 bp, Glycine max
  unsure (1)..(293): unsure at all n locations
gtttgttgttgantcgtgnaaatgttcagaaaccagtacgacacggacgtgaccacatggagcccttcggggaggctgttccaggtggagtacgctatggaggcggtgaagcagggctcggcggcgatagggntccgatcgaagacccacgtggtcctncgcatgcgtcaacaaggccaactccgaactctcctcgcaccagaagaagntcttcaangtcgncaatcacntcggcgtcgcatcgctggcctcaccgccgatggncgcgtcctctcccgnnacatgagatccga

SEQ ID NO: 285181 - DNA, 282 bp, Glycine max
  unsure (1)..(282): unsure at all n locations
ctaagtgaganacaannanaggaaataatngatctttgaaaattcagggatngaataaanctgganagtccatcaaggaaacagctgcanacattggtgcttctgccaaggctggcatggagaaaaccnaggccactgtccaggagaaggcanaaagaatgacggcacgtgatccgatgcaaaaggagttngcaacccagaaganagaggcaaagatgagccaggcaganctggacaagcangcggcgcgttcanataacacggcngcgaacaggctgccac

SEQ ID NO: 285182 - DNA, 285 bp, Glycine max
  unsure (1)..(285): unsure at all n locations
cctaagtgagaaacaaagaaaggaaataattgatctttgaaaatgcagggaggaaagaaagctggagagtccatgcaaggaaacagttgcaaacattggtgcttctgccaaggctggnatggagaaaaccaaggccactgtccaggagaaggcagaaagaatgacggcactgatccgatgcaaaaggagttggcaacccagaagaaagaggcaaagatgagccaggcagagctggacaagcaggcggcgcgtcagataacacggcggcgaanaggctgccacngc

SEQ ID NO: 285183 - DNA, 292 bp, Glycine max
  unsure (1)..(292): unsure at all n locations
ataaaacctaagcttagaattagaaacaaaganaagaagaaaggaaagaattgatcgttgaaaatgcagggaggaaagaaagcgggagagtccattaaggagacagctacaaacattggtgcttctgccaaggctggcatggagaagaccaaggccactgtccaaganaaggcaganagaatgacaggcacgtgatccggtgcaaaaggagttggcaacccaaaagaaagaggcaaagatgaaccaggcggactggnacaagcaggcgncgcgtcacatcaacacggcggcc

SEQ ID NO: 285184 - DNA, 298 bp, Glycine max
  unsure (1)..(298): unsure at all n locations
cacacacaantactanaagtgcttccttacaatcagaaccaacaacnactatggcaagttatcaaaagcactactatgatcngggttcgcaanggttgangagtatggcaacgttgagaagcaaaccgacgaatacggcaaccctgttcatgctgctngtgtcacctatgtagccaccagaactgctgctggtggttacagttntgacnttaanangcaacgtgatnccaccaatgcctacgncgtaganactggnagacagcattctagtggnggtacgatggtgacactaataaac

SEQ ID NO: 285185 - DNA, 297 bp, Glycine max
  unsure (1)..(297): unsure at all n locations
ctccattgtctttgaacactcatcanncatggccaagcttgtnctttccctttgtttccntnttttcagtngctgcttgcgntactggagagagcaggcacagcaaaatgagtgccagntccaaaagctgaatgncctcaaaccggataaccgtatagagtcggaagtgggttcatngagacctggaaccctaagaacaagccattncagtgtgccggtgttgccctctctntctgcacccttaancgcaatgcccttcgganaccttccnacaccaacggtccccaggaaatctac

SEQ ID NO: 285186 - DNA, 289 bp, Glycine max
  unsure (1)..(289): unsure at all n locations
ccattggtccttaaacantcatcagtcatcaccatggccaagcnagttntttccctttgttttctngcttttcagtggctgnngcttcgcnttcagttccagagagcagcctcagcaaaacgagtgncagatccaaaaactcaatgccctcaaaccggataaccgtntagngtcngnaggagtgntcattggggcattgaaccctannaacaagccattcnagtgtgccgttgttgccctctctcgntgcaccctcaagcgnaacgcccttcgtagacnttntgacacc

SEQ ID NO: 285187 - DNA, 282 bp, Glycine max
  unsure (1)..(282): unsure at all n locations
gtnccagtccactcacccttgtgccgaattccntgcagcctctagggccatctctggtggaccagtttacgttagtgnttgtgttggaaagcanaacttcaagttgctcaagagcctcgctttgcctgatgggacgattttacgntgtcaacactatgcactccccacacgagactgtttgtttgaagaccccttgcatgatgggaagacaatgctcaaaatttggaatctcaacaaatatacaggtgttttgggtctatttaattgccaaggaggtgggtg

SEQ ID NO: 285188 - DNA, 282 bp, Glycine max
  unsure (1)..(282): unsure at all n locations
attttgatgaaatccttgcaaattcagatgcatttatggtggcacgtggtgaccttggaatggaaattccaatagagaagatatttcttgcacagaaagtgatgatttacaagtgcaacatccaaggaaaaccagttgtcactgcaacccagatgttggagtcaatgatgcaaatctcccaggccaaccagggctgaaggctactgatgtggccaatgcagttctggatggcacagactgtgtnatgctagtggtgaaccgctgctggagctatccagacct

SEQ ID NO: 285189 - DNA, 289 bp, Glycine max
  unsure (1)..(289): unsure at all n locations
aganagaacttccttataaccaaaaccaacaacaactatggcaagttatcagaagcactacgatgatcagggtcgcaaggtcgacgagtatggcaatgttgagagncaaactgacgaatatggcaacccggttcatgccactagtgtcacttatgtagccaccaaaagtgttggtggctacaatgatgacgctaataagcaacatgatantactggtgtctancccgagaaagacaccggtagacntcattttggtcgtggttacnacggtgacactaacaagcaacat

SEQ ID NO: 285190 - DNA, 257 bp, Glycine max
  unsure (1)..(257): unsure at all n locations
caagggcgctggcgaagttgtgtctnacagagngtanaaggagtataggcttggggattactcgaactggttgcagaagagggttaacaacactnagacgtggaacaggatcaggagttgcttgcaatctgggaaagtctgcactgagtttcaatccaagtttctaaacgacaccgttactgagttttactccgaaaacctgtccgcgcttcagtctggatgctgtaaacctgcngaagatgccagtttagctatgt

SEQ ID NO: 285191 - DNA, 283 bp, Glycine max
  unsure (1)..(283): unsure at all n locations
attcaaaccttgctctatnctacacagtanacagactagnagaataatggnttccatcctcnactantttttagccctntctctttcttgctctnttctnttcttcttatccgnntcagtcncccctacnnaaccaanaaaccttgttgttctacccgttcaaaatgatggttccacagggctccattgggcccaacctccaaaaaagaacccctctaatgcaagtaccagtcctggtggacctcaatggaaatcacttgtgggttaactgtgagcagcagta

SEQ ID NO: 285192 - DNA, 278 bp, Glycine max
  unsure (1)..(278): unsure at all n locations
ttncattgcatttcgttactntcattngttgtgnaatcttacaagttccaaacttctctatnttgttatnatttgtnctcacttctcacacatacagatttnagcctttnatattatcatggcntctaaggtggtttcggttttngttatngcgatgatgttgtttgccatgaactgtaactgcactagtgttggccacatgccttcaaccaaagaggaaggtcacgnttttcaggagtcnaaagccaagaccacacaaactgcgaacaaggccatgg

SEQ ID NO: 285193 - DNA, 290 bp, Glycine max
  unsure (1)..(290): unsure at all n locations
gtgaaatggctgatgnaggnacagaagaaagnnaaganagaggttgagaagaaaggctcttcatgcgtgcanaatatgncantgctaantccacctcttcaaagaagaaagcnngtggctctgatgaagaccgcacttcacctactcacagtcaaattgatgagaaagaggaggctccagatggagatgatggtgatnatgacgngcnatggctgacagatacatcacntgatggctgctcggcaacgtatccnagaacagttaagtgctgtgacagctgatatggttat

SEQ ID NO: 285194 - DNA, 280 bp, Glycine max
  unsure (1)..(280): unsure at all n locations
ctctcaccgggctggnggnggcaacancgcncttcatcanctacancccggtgctgattccngccacggtcgcaattggnctggccgtggccgggttcctgacgtcgggagnctttgggctcacggcgctgtcnnccttctcctgnatcctgaactacatccgngagncccagcnggcgtcggagaatctggccactgcggcaaagagccaatctggcnggaggcggcggantacgttaggnagangaccaaagaagtagggcatnaaacnaaggaagtt

SEQ ID NO: 285195 - DNA, 234 bp, Glycine max
  unsure (1)..(234): unsure at all n locations
aggtnatgggctgagtatcgtgtgnaattatgctctggannttntggtcagnatatatatcttgantatggnactatnttgatgcntttgaatcatgtatanggatgtgttccancttctctttgtatgcaccntcgattaatatctcggcctcnatcgcatcagtgtgnctnctgcntttatnntatnataataacgcttctttataaaaaaaananaaaagggnggccnccg

SEQ ID NO: 285196 - DNA, 281 bp, Glycine max
  unsure (1)..(281): unsure at all n locations
cncacgactangacaangncttccttncaantcaaaaccaacaagaacgatggcaagtnatcanaagcacnacgctgatcaaggtacgcaaggttgcacgnntatagcaacgttgagaagcaaancgacgnntacggcaaccctntncatgctgctagtgtcacctatgtatccaccagaactgctgctggtggtacagtgatgacattaataagcaacntgangccacnaatncctacngcntagacactggtagacggcattctagtggnggctacnat

SEQ ID NO: 285197 - DNA, 278 bp, Glycine max
  unsure (1)..(278): unsure at all n locations
cgctccgcaccagnttcaccgcacnaatatcttgttgtttggagcgatccganaaaaactctgtaaacatgttggtttaccaggacctccttacaggtgatgagcttctctctgactccttccgttacaagganattgagaatggaatgctgtgggaagttnaggggaagtgggttgttaaaggagcagttgatgtagacattggtgcaaacccttctgctgagggtggaggagaagatgagggagttgatgatgcagctgttaaggttgttgacatg

SEQ ID NO: 285198 - DNA, 279 bp, Glycine max
  unsure (1)..(279): unsure at all n locations
gacgcgcatgnatggatgaacgatnttcccactgtccctgtctactatccagcgaaaccacatgccaagggaacgggcttggcggaatcagcggggaaagaagaccctgntgagcttgactctagtccgactttgtgaaatgacttgagaggtgtaggataagtggganctggaaacatcgaaagtgaaataccactacttttaacgntattttacttatnccgtgaatcggaancngggnctgccccnctttntggacccaaggtcggnttcggccgg

SEQ ID NO: 285199 - DNA, 282 bp, Glycine max
  unsure (1)..(282): unsure at all n locations
ttcctgacgtcaggggccttcnggctcactgcgctgtcttccttgctcctggatccaganctacntngcgaggagacccagcnagcctcgganaacctcgccgcngccgggaagatcagcctcggccgatncngcggagtacgtggggnagaagacgnntncacttgtgnannagaccaagtatgtgggcaggatattcagagcaaggcanangatacnagggtaggcagctgcaaggatgnnattnatcaactgcaagggatgcaagggangctgntgcaa

SEQ ID NO: 285200 - DNA, 277 bp, Glycine max
  unsure (1)..(277): unsure at all n locations
cttatttccactctctgcagcttcnttttcngcaaaatggatccctctgcggcattgctatntaaccacctcaagggtgcagacccgttcttcctgctagcgggtcctaatgtgattgaatcggaggagcacattctgcggatggctaagaacatcaagagtgttgcatctgaagttggaataccattggttttcaagtcaagctttgacaaagctaaccgaacatcatcaaaatcatttcgtngcccggggatggctgagggattgaagatactcg

SEQ ID NO: 285201 - DNA, 278 bp, Glycine max
  unsure (1)..(278): unsure at all n locations
angcaaagcaatggctacttcaaagttganaacccagaatgtggttgtatcnctctccctaacctnaaccttggtactggtgctactgaccagcaaggcaaactcagcggaaactgtttctttcagctggaacaagttcgtgccgaagcaaccaaacatgatcctccaaggagacgctattgtgacctcctcgggaaagttacaactcaataaggttgacgaaaacggcaccccaaaaccctcgtctcttggtcgcgccctctactccatccccatcc

SEQ ID NO: 285202 - DNA, 283 bp, Glycine max
  unsure (1)..(283): unsure at all n locations
atcacaaacacctcgtccctcacaatgcagctagcaatggcggccaacgctgtcgtttcaccgtcgccgttccgacctcagccctttctccnntcatccttctccggcgtctccgtcaagctcactccccaatccataacgctttcacgctccaagcccctcaccgtcttcgccnacaccaagaaggccgtcgccgtcctcaaggggacctccgccgtcnaaggcgtcgccatctcatccaagaagacgatggcccgacgacagttctgttcgatcacnaacc

SEQ ID NO: 285203 - DNA, 281 bp, Glycine max
  unsure (1)..(281): unsure at all n locations
ctcagattaaacctccttgctctttcaccccaaaagaaattgagtacctgactggtcgcatacaaaacggtggaactgaagttgttgaggccaaagctggagctggttctgcaacactatcaatggcatatgctgctgttaaatttgcagatgcatgccttcatgccctgagaggagatgctggcatcattgaatgtgcatatgttgcttcacaggtgactgaactcccattctttgcatcaaaagtacgantggccgattggggtggaggaaattcttcc

SEQ ID NO: 285204 - DNA, 281 bp, Glycine max
  unsure (1)..(281): unsure at all n locations
acaaaacaaaaagtttacgttacatatcgcataataaccgtcctaagtttattgagagaattttgcaagtgtgaganacatggcatctcgtcaaaacaacaagcaagagcttgatgaaagagcaaggcaaggagagactgttgtcccgggtggaactggtggcaagagcctggaggctcagcaacaccttgctgaaggaaggagcaaggganggcaaacaaggaaggaacagctgggtacagaagggtaccanganatgggacgcnaaggaggttgagcac

SEQ ID NO: 285205 - DNA, 281 bp, Glycine max
  unsure (1)..(281): unsure at all n locations
tgttgttctacccgttcaaaatgatggttccacanggctccattggngccaacctccannanagancccctctaatgcaagtaccagtcctggnggncntcantgganntcanttgtgggttaactgtgagcagcagtantcatccaaaacgtaccaagcacccntctgccantccacccaatgctctagagccaanacccaccantgcctcagttgccccgcggcatctaggccagggtgccacaanaacacgtgtggctcagttgactaatccctcaac

SEQ ID NO: 285206 - DNA, 258 bp, Glycine max
aaaggccatataatttttttttatttgaaataatgtccgggatcatccacaagattgaggagaccctccatgtgggagggcacaagaaagaggagcacaaaggagaacaccatggtgagcacaaaggtgaacacaaaggagaacaccatggtgagcacaaaggtgaacacaaaggagaacaacaccatggggagcacaaggagggacttgtggataagatcaaggacaagatccatggtgatggccatgacaagggtg

SEQ ID NO: 285207 - DNA, 274 bp, Glycine max
  unsure (1)..(274): unsure at all n locations
gttactttcatttgtngtgcaatcttacaagttccaaactnctctattttgttattattngtnctncacttntcacacatatagntnnaacgnntnngatattatcctggcgtcnaaggtggtntcggnatnggttatancgntgatgtagnntgccatgaactgnaacngcactagtgttggaccacatgcnttcaaccaggaggaaggtcagattttcaggagtctanagccagaccacanaaatgcgaagaangccangaantggtaaaga

SEQ ID NO: 285208 - DNA, 278 bp, Glycine max
  unsure (1)..(278): unsure at all n locations
ctttcctcctcttccttgtgatttttgtttgcatcacagggaacnactgagacacagaagatgaganagntaattantattcatattggacaagctggaattcaggtggggaattcatgctgggagttgtattgccttgagcatgganttaaccctgatggcaccatgcctagtgatacctcnttggtgtagcacatgatgctttcaacaccttcttcagcgagacgggatccggcaagcatgtnccaagggctttatttgttgatctggaacctagt

SEQ ID NO: 285209 - DNA, 282 bp, Glycine max
  unsure (1)..(282): unsure at all n locations
cttggcatcgcttctcctctctcccaagaaagaatcatcaatggcgattgaacacgaagacgatctcaaagacgagaagaaccctcgacctctcgacgaggatgacatcgccctcctcaagacctacggtttgggaccttactccacaagcataaaaaanncggagaaggaaatcaaagatatggccnagaaagtgaatgacttatgtggtataaaggagtctgatatggttaagctgcaccaagccatggggtccttgtttctgataagcaatggatgcag

SEQ ID NO: 285210 - DNA, 282 bp, Glycine max
caaacacaacaaaactctccaattctgaagattttcttatctcttgtctttgaaactagaagctccgtgattgatcaatggcgacaaaagaaggcaaagccataggcatagacctcggcacgacctacagctgcgtgggcgtgtggcaaaacgaccgcgttgagatcatccccaacgaccaaggcaaccgaaccaccccctcctatgtcgccttcaccgacaccgagaggctcatcggagacgccgcgaagaaccaagtcgcgatgaacccgcagaacaccg

SEQ ID NO: 285211 - DNA, 277 bp, Glycine max
  unsure (1)..(277): unsure at all n locations
gctattccangcngtctccacccttcagcattctcagggtggagactgcttggaatngcacatgcagagaatgatgatgatcaacaggctattgcagcaatgatgcgtgcacaggannctaacccaacaaacctggaagtgcttcttgctcttggtgttagtcatacaaatgaactggagcaaacagctgctctgaagtatctatatggatggttgcgccatcacccaaaatatggaacattgccccgcctgagaggctgattctttgtactagctg

SEQ ID NO: 285212 - DNA, 279 bp, Glycine max
  unsure (1)..(279): unsure at all n locations
ctttcggaggaggaaatcggtcgtctataccgaataancgaagacggtgatgcagatgctgagggacagaaattttctggttggtgacttcgagatcaacatgntccaagcacganttcaagtccaagtacggcgaacacatgaagcgcgaggacctcgtcatcaacaaatccaagaaggacaactccggcgaccagatctacgttttcttccccgacgaacccaaggtcggcgtcaagaccatgaagacctacaccaaccgctgaatccgaaaagtct

SEQ ID NO: 285213 - DNA, 280 bp, Glycine max
  unsure (1)..(280): unsure at all n locations
ttcaatacctaatgcatcctgagataagaagctttccctctagagagttttatgaagactccttggaagntggggatgaagtcaaatcacggacaatacacgcatggcatgattaccgctgctttggccccttctgcttctttgacattcatgagggaaaagaggctcggccacctgggagtggctcatggataaatgttgaggaagttgactttgttctattcttgtatcaaaaacttatttcactttatccgacactgaagtctggtaaccaagttgc

SEQ ID NO: 285214 - DNA, 282 bp, Glycine max
  unsure (1)..(282): unsure at all n locations
atcacacacaactactacaantacttccttacaattcaaaaccancaacaactatggcaagttatcaaaagcactacgatgatcagggtcgcaaggttgacgagtatggcaacgttgagaagcaaaccgacgaatacggcaaccctgttcatgctgctagtgtcacctatgtagccaccagaactgctgctggtggttacagtgatgacataataagcacatggtaccaccatgcctacggcgtagacactggtagacagcntctagtggtggctcaaccgt

SEQ ID NO: 285215 - DNA, 280 bp, Glycine max
  unsure (1)..(280): unsure at all n locations
gggataacaccacaggattctgatcctattgtgttggccttcgggatcggagtaatgattaacagggacagtcgggggcattcgtatttcatagtcagaggtgaaattcttggatttatgaaagacgaacaactgcgaaagcatttgccaaggatgttttcattaatcaagaacgaaagttgggggcncgaagacgatcagataccgtcctagtctcaaccataaacgatgccgaccagggatcagcggatgttgcttttaggactccgctggcacttat

SEQ ID NO: 285216 - DNA, 281 bp, Glycine max
  unsure (1)..(281): unsure at all n locations
tttccctcttctttctctctcacgttttccgcttcagttttctcgggaaaatcatggtgaaaggtccaggcctctacttctgacattggcaagagagctcgcgatcttctgttcaaggattatcagaatgaccacaagttcaccatcaccacttacacttccaccggagtggaaatcacttcaactggagtcaggaaangtgagatatatttggccgangtcagcactaaggtgaagaacaagaacatcacaactgatgtcaaagtggncactaactcaaa

SEQ ID NO: 285217 - DNA, 279 bp, Glycine max
cacacaactactacaagtacttccttacaatcaaaaccaacaacaactatggcaagttatcaaaagcactacgatgatcagggtcgcaaggttgacgagtatggcaacgttgagaagcaaaccgacgaatacggcaaccctgttcatgctgctagtgtcacctatgtagccaccagaactgctgctggtggttacagtgatgacattaataagcaacatgataccaccaatgcctacggcgtagacactggtagacagcttctagtggtggctacgatg

SEQ ID NO: 285218 - DNA, 277 bp, Glycine max
  unsure (1)..(277): unsure at all n locations
gtcgtttaaaaatgtcgcagttgctggataaagccaagaacttcgtgtcggagaaggtaaatgatatggccaagccggagggagtgtcactgacgtggacttcaagcgcgtgagcaaagataatgtcgagtacttggccaaggtctctgttcgtaacccnnattcaacttccatacccatttgtgagatcaactactctttcaaaagcgcatccagggagatagcatcagggaaaattccagacccaggatcgttgaaggcaaaggacacaacaatg

SEQ ID NO: 285219 - DNA, 281 bp, Glycine max
  unsure (1)..(281): unsure at all n locations
ctctgtggtatagaccaccagaacttttacttggancatctaattatggagttgctgtggatttgtngagcactggttgcatactgggggaactatattgtggcagacctatattacctggaaaaacagaggttgaacaattgcataggatatttaaactttgtgggctcaccatctgaggattattggcgtaagctgcggacgcnacattcaccagtattcaggctccccacccattataggcantgtgttgcntgaaacatttaaagatgcccctctnc

SEQ ID NO: 285220 - DNA, 278 bp, Glycine max
  unsure (1)..(278): unsure at all n locations
tggttggtttggtcccggcagcaaaatcatcatcacaactcgggacaaacaattgctaacatctcatgaagtttataaaaaatatgngcngaaggaattggatgagaaggatgctctacagctgcttacatgggaagcttttaaaaaggaaaaagcttgtccaacttacgtggaggtcttgcatcgtgtagtaacttatgcttctggacttccatggtgttgaaagtaataggttcccacttggttggaaaaagtatacaagaatgggaatctgcatc

SEQ ID NO: 285221 - DNA, 277 bp, Glycine max
  unsure (1)..(277): unsure at all n locations
gtttcgacgtgcttcttcttcgtgtttgctctttctctccttcttccttttcagatactccgctgaggaatcatcggagaaagagttcgtactcacattggatcactctaactttcacgacactgtcagcaagcacgatttcatcgtcgtcgagttctacgctccatggtgtggccancgtaagaagctgctcccgagtatgagaaagctgcttctatcttgagtagtcatggatcctccggttgttttggctaaaatgatgccaatgaggagaaga

SEQ ID NO: 285222 - DNA, 277 bp, Glycine max
  unsure (1)..(277): unsure at all n locations
taacactttccttagttcaatatggggaagcccttcttcactctctctccncnnttccctttgcttgcnacnctngtcgagtgcatgctttgctantacctccagacaagtncaacgagaagccaactcaacaaccttcaacggcgtnggaacccgancancgcgtngagtcngaagnggtgctattgnnacatggaatctcancaccctgagctgcaatgcgcggtgacactgtttcnaaacgnaagctgaagacaaggcntcgactngccagcnc

SEQ ID NO: 285223 - DNA, 275 bp, Glycine max
  unsure (1)..(275): unsure at all n locations
tccaaactctctttgagaaccaaaacggtcgcattcgtntcctccagagattcaacaaacgctccgcacaacttgagantttcncgagantntcggattgtccagtttcagtcaaaacccaacacaatccttctcccccaccatgctgacgcngatttcctcctctttgtccttaggcgggagagccatacttaccttggtgaacaacgacgacagagactcctacaaccttcaccctggcgatgcccagagaatcccagctggaaccattatat

SEQ ID NO: 285224 - DNA, 278 bp, Glycine max
cctcaaatgagaaatgcgatgtttatagttttggagtcatcttatgggagcttgccactctaaggttgccgtggagtggaatgaatcctatgcaagttgttggtgccgttggtttccaaaaccgtagacttgatattcctaaggaagtcgatcctatagttgcaagaataatctgggagtgttggcaacaggatccaaatttgcggccctcgtttgcgcaactcacagtggctctaaagcctctacagcgtctggttatcccatcttatcaagatcag

SEQ ID NO: 285225 - DNA, 272 bp, Glycine max
  unsure (1)..(272): unsure at all n locations
ggngtactggagaaaccatcaacgacagagatcgctgcccacagtgcaagggagaaaaggttgtgcaggagaaaaaagtccttgaagttattgtggaaaagggaatgcagaacgggcagaagattacattccctggcgaantgatgaagcgccagacacaattactggggatattgtctttgtccttcagcagaaggaacatcccaaattcaanaganaggctgaagatcttttgtagagcacntttgtccttatgaagccttatgtggctc

SEQ ID NO: 285226 - DNA, 282 bp, Glycine max
  unsure (1)..(282): unsure at all n locations
ctttcggaggnggaaatcggtcgnctataccgaataaggaagacggtgatgcagatgctgagggacagaaattttctggttggtgacttcgagatcaacaggtccaagcacgagttcaagtccaagtacggcgaacacatgaagcgcgaggacctcgtcatcaacaaatccaagaaggacaactccggcgancagatctacgttttcttccccgacgaacccaaggtcggcgtcaagaccatgaaggacctnacatnaaccgcatgaactccgaaaacgtct

SEQ ID NO: 285227 - DNA, 269 bp, Glycine max
  unsure (1)..(269): unsure at all n locations
cttttgttcctatctctggttttgagggagacaacatgattgagaggtccacaaaccttgantgnacncaagggtccaactctgcttgatgcacttgaccagattagtgagcccaagaggccctctgacaagcccctcaggcttccccttcaggatgtgtacaagattggaggtattggaactgtgccagtgggacgtgttgagaccggtgtctgaagctggaatggtgtgacttgcacaatggatgacaattgaagtcaagtctgtgg

SEQ ID NO: 285228 - DNA, 282 bp, Glycine max
  unsure (1)..(282): unsure at all n locations
gacgagggacgaagatgaagatgaagatcaacctcgcaagagccgcgaatggagatcgaaaaagacacaacccagaagacctagacaagaagaaccacgncnaagaggatgcgagacaagaaacggggttgaggaaaatatctgcaccttgaagcttcacgagaacattgctcgcccttcacgcgctgacttctacaaccctaaagctggtcgcttagtacctcaacagcntcaccttcccagcctcggcaattccancgngnccaattttnnccanaaagg

SEQ ID NO: 285229 - DNA, 281 bp, Glycine max
  unsure (1)..(281): unsure at all n locations
gccctcgtttactgcaccgctggcatctcagggggacacataaacccggcggtgacatttgggctgtttttggngangaagttgtcgttgcccagggcgattttctacatcgtgatgcaatgcttgggtgctatttgtggcgctggcgtggtgaagggtttcgaggggaaaacaaaatacggtgcgttgaatggtggtgccaactttgttgcccctggttacaccaagggtgatggtcttggtgctgagatgtnggcactttcatccttgttacaccgttt

SEQ ID NO: 285230 - DNA, 273 bp, Glycine max
  unsure (1)..(273): unsure at all n locations
anacgaagtctacttgatcacttttttaccgagctaggcaaaatggagaccaagcgtctgtcatcgttattgaatgaggatcctgcaattatggaacgacgtagtggcgctcgcaaagagactagagttataccggagtgcacaagctgaaatagatgcagttgcttggtctaagtagatatatgtatgtcagatcacgtttatacgagagccagcagtgtcattattcatgtttccctattccagttcatattcatactcatttttgttgtc

SEQ ID NO: 285231 - DNA, 271 bp, Glycine max
  unsure (1)..(271): unsure at all n locations
gaatgtttacatggcgaaattggcggagcagggccgagcgttacgaggagatggttgagttcatggagaaggtagcaaagactgtggaggttgaggagttgacggtggaggagagaaatcttctctctgtggcttacaagaacgtgattggtgcgaggagggcttcgtggaggatcatatcctccattgagcagaangaggagaccaggggcaatgaggaccattggccattttaanggttacagggggcaaattgangcngaactcanca

SEQ ID NO: 285232 - DNA, 277 bp, Glycine max
  unsure (1)..(277): unsure at all n locations
cacacaactcacaagaaaccnnttccttataaccaaaaccancaacaactatggcncagttatccagaagcactacgatgatcagggtcgcaaggtcgacgagtatggcaatgtggagaggcaaactgacgaatatggcaacccggttcatgccactagtgtcacttatgtngccaccaaaagtgttggtggctacaatgatgacgctaataagcaacatgatattactggtgtctatcccgagaaagacaccggtagacatcatttggtcggggta

SEQ ID NO: 285233 - DNA, 290 bp, Glycine max
  unsure (1)..(290): unsure at all n locations
tctaacctacctctttttcttctctctcaacaacttcaccttcttcctcctcgatcatgtctncacttccaagggcaagtaccatgatgagcttatcgccaatgctgcgtacattggcactcctggaaagggtattcttgctgctgatgagtcaacagggacaattggcaagcgtttggccagcatcagtgtagagaacattgaatccaacaggcgagctcttagggagctgcttttcactgctcctggtgttcttcaatatctcagtggtgtcatcctctttgaggaaa

SEQ ID NO: 285234 - DNA, 198 bp, Glycine max
atattgttgtctttgaataaatttgctgcatatgtacttacgtacgtacagtgtcttgtcatgtatgtggaggatatagtatatggttatagtttatgtagaagaataaaaaatgtatgcatgtagtaatgtaagggtcttatatatgtggctgaaatataaaccataataaaggcagagatgttgtgccaatacatc

SEQ ID NO: 285235 - DNA, 273 bp, Glycine max
  unsure (1)..(273): unsure at all n locations
gctagctagctagcaagcaagcacagagatggaggcaaagcgaggccatgccctcatgtgcttggcacgtgtttcactctncctctgcgctctaaccctatccgctgctcacggaagcaccacggttcaagacatcgcgagaaagttgaaactcggggacaacgagcttctgcgcacggagaagaagttcaaggttttcatggagaattacgggaggagctactccacagaggaggagtatttgcgccgtttggggattttcgcccagaacat

SEQ ID NO: 285236 - DNA, 271 bp, Glycine max
  unsure (1)..(271): unsure at all n locations
cacacaactactacaagtacttcctttacaatcaaaaccancaacaantatggcaagttatcaaaagcactacgatgatcagggtcgcaaggttgacgagtatggcaacgttgagaagcaaaccgacgaatacggcaaccctgttcatgctgctagtgtcacctatgtagccaccagaactgctgctggtggttacagtgatgacntaataagcaacatgataccaccatgcctacggcgtagacactggtagacagcntctagtggtggc

SEQ ID NO: 285237 - DNA, 270 bp, Glycine max
  unsure (1)..(270): unsure at all n locations
anaacttccttataaccaaaaccaacaacaactatggcaagttatcagaagcactacgatgatcagggtcgcaaggtcgacgagtatggcaatgttgagaggcaaactgacgaatatggcaacccggttcatgccactagtgtcacttatgtngccaccaaaagtgttggtggctacaatgatgacgctaataagcaacatgatattactggtgtctatcccgagaaagacaccggtagacatcatttggtcgtggttacgaggtgacac

SEQ ID NO: 285238 - DNA, 271 bp, Glycine max
  unsure (1)..(271): unsure at all n locations
ctttcctcctcttccntgtgatttttgtttgcatcacanggagaaactgagacacagaagatgagagagatanttagtattcatattggacaagctggaattcaggtggggannttcatgctgggagttgtattgccttgagcatggaattaaccctgatggcaccatgcctagtnatacctcagttggtgtagcacatgatgcttcaacacctcttcagcgagacgggatccggcaagcatgtgccagggcttattgttgatctggaacc

SEQ ID NO: 285239 - DNA, 263 bp, Glycine max
ttcaaaccttgctctatactacacagtacacacactagaagaataatggcttccatcctccactactttttagccctctctctttcttgctcttttcttttcttcttatccgactcagtcacccctacaaaaccaataaaccttgttgttctacccgttcaaaatgatggttccacagggctccattgggccaacctccaaaaaagaacccctctaatgcaagtaccagtcctggtggacctcaatggaaatcacttgtgggt

SEQ ID NO: 285240 - DNA, 262 bp, Glycine max
caacaactatggcaagttatcaaaagcactacgatgatcagggtcgcaaggttgacgagtatggcaacgttgagaagcaaaccgacgaatacggcaaccctgttcatgctgctagtgtcacctatgtagccaccagaactgctgctggtggttacagtgatgacattaataagcaacatgataccaccaatgcctacggcgtagacactggtagacagcattctagtggtggctacgatggtgacactaataaacatcatgg

SEQ ID NO: 285241 - DNA, 261 bp, Glycine max
cacaactacaagaaagaacttccttataaccaaaaccaacaacaactatggcaagttatcagaagcactacgatgatcagggtcgcaaggtcgacgagtatggcaatgttgagaggcaaactgacgaatatggcaacccggttcatgccactagtgtcacttatgtagccaccaaaagtgttggtggctacaatgatgacgctaataagcaacatgatattactggtgtctatcccgagaaagacaccggtagacatcatt

SEQ ID NO: 285242 - DNA, 260 bp, Glycine max
gaagattctggtgaatgcgtagaaaaggaaaataaagaaattagcgtgaaaaatgttgggtgtgttcagcagctccatagtgtcgccgccggaggagctcgttgccgccggcagccgtacaccgtcgccgaagatgacggcggcggcgctgcggaagtggttcgaggagaagaacccctccgcagtgtcggtggaggtcggagagcatgtccagctcgcttatacccaccagaacgagtcgccgtttcagcccagatcct

SEQ ID NO: 285243 - DNA, 259 bp, Glycine max
gaccgccgaggcgacggcgaataaggcaggggagatgaaggaggcaacaaagaaaaagacggcggagaccgcggaggcggcgaagaataaggcgggggagatcaaggacagagccgcggagacggcggaggccgcgaaaaacaagaccgcggagaccgcggaagtgacgaagaataaggctttggagatgaaggatgcagcgaaggacaggaccgctgagacaacggatgcggcgaacagaaaactgcacaggcaaagg

SEQ ID NO: 285244 - DNA, 259 bp, Glycine max
gaccgagctagctagctagcaagcaagcacagagatggaggcaaagcgaggccatgccctcatgtgcttggcacgtgtttcactcttcctctgcgctctaaccctatccgctgctcacggaagcaccacggttcaagacatcgcgagaaagttgaaactcggggacaacgagcttctgcgcacggagaagaagttcaaggttttcatggagaattacgggaggagctactccacagaggaggagtatttgcgccgtttg

SEQ ID NO: 285245 - DNA, 271 bp, Glycine max
atcactggtcaacgacggtggcgttatagaacaaacatttttgtggggaaggtattctgtggaaatgtctgctgtagtttacaaggattgggtttttacagatcaagcattgcctgctgatcttataaaaagaggaatggcaattgaggatccatcgtgccctcatgggcattcgccttgtgatagaggactacccttatgctgttgatggacttgagatatgggatgctatcaagacatgggtccatgaatacgttttctgtactacaaa

SEQ ID NO: 285246 - DNA, 257 bp, Glycine max
gcagttgcagaccgagctagctagctagcaagcaagcacagagatggaggcaaagcgaggccatgccctcatgtgcttggcacgtgtttcactcttcctctgcgctctaaccctatccgctgctcacggaagcaccacggttcaagacatcgcgagaaagttgaaactcggggacaacgagcttctgcgcacggagaagaagttcaaggttttcatggagaattacgggaggagctactccacagaggaggagtatt

SEQ ID NO: 285247 - DNA, 257 bp, Glycine max
ctataatattcggggatgcacctaacaacatgcgacagtttcaaaaccaagatattttccacgatttggccttcaccccattaaccatcaccctgcagggagagtacaacgtgagagtcaactcaataagaatcaaccagcacagtgtgttcccactgaacaagatatcatccaccatcgtagggtcgacctctggaggaaccatgattagcacctcaactcctcacatggttctccagcaatccgtgtaccaggct

SEQ ID NO: 285248 - DNA, 252 bp, Glycine max
ctaccaatcatcgaggagtctagaagactttgcaatattatgcccaatggaaagcctatatctattactgaccaagagattgtggagatgatactattcccagtagttaatgaggcatgccgtgttctagaagatggagttgttatacgagcatcagaccttgacattgcatctgttcttggaatgagcttcccaaattaccggggtggcatgttttctgggcagatttggttggggctaatcatatattta

SEQ ID NO: 285249 - DNA, 253 bp, Glycine max
caaggttcctccaaatggtcttgttctgtatactggcacaatcgtgactgatgatgggaaggaaaagaaggtgactattgattttgagcctttcagacctattaatgcatccctttatctttgtgacaataagtttcatactgaagctttgaatgaactcctagagtctgatgacaagtttggatttattgtcatggatggcaatggtactttgtttgggaccttgagtggtaatacgagagaagtgctcata

SEQ ID NO: 285250 - DNA, 257 bp, Glycine max
gcaatgggaatgtctggttgctcaagatattctcaatacatggagagcaatggaggcactctatgactcagacaaggctagagccataggagtgagcaatttctcttcaaagaagcttcaagatttgttagatatagcaagagtggttcctgctgttaaccaagtggaattgcacccaggatggcagcagccaaagttgcgcgcattttgtgaatctaaagaaattcatctatctggatattctccactaggttcac

SEQ ID NO: 285251 - DNA, 257 bp, Glycine max
  unsure (1)..(257): unsure at all n locations
cttgctatgggcgtgaatgcaattttcatgcaaacatacattggnggtgtctcatgccctctcatatgtagcaagaaaaggctgaaccatggtgtgttacttgtgggatatggtgcaaaaggcttctcaattcttaggcttggcaacaaaccatactggatcatcaagaattcgtggggggagaaatggggagaagatggctattacaagctctgcagagggcatggcatgtgtggaataaacactatggtttctgc

SEQ ID NO: 285252 - DNA, 256 bp, Glycine max
gacaaggaagggatcccaccagaccagcaacgtctcatttttgctggcaagcagcttgaggatggacgtacacttgctgattacaacattcaaaaggagtccactctacacttggtgctccgtctccgtggtggaatgcaaatctttgttaagaccttgaccggaaagacaatcacccttgaggtcgagagctctgacaccattgacaatgttaaggctaagattcaggacaaagagggtatcccaccagaccaac

SEQ ID NO: 285253 - DNA, 256 bp, Glycine max
gcgatagctgataagagagataccaacaagaaaagaaaaaaagaagagttgagattccctttgaagaaaagatggcatcccataggcaaagctatgaagctggtcaaactaagggccgaactgaggaaaagacgaaccagacgatgggcaatattggagagaaggctcaagctgcaaaggagaagacccaggaaatggcccaagctgcaaaggagaagacccaacaaacagcccaagctgccaaggacaagacttg

SEQ ID NO: 285254 - DNA, 251 bp, Glycine max
ggaagttgaaggggaaactgaagaaaggcgacgagccaggttggagcgccaccacaggactaaggagcgtgctgctaaagcattggcggagaagaatcagcgggacttacaaactcaaagagaacaagctgagagacataggcttgccgaaacactggattttgaaattaagcgctgggctgcaggaaaagaggggaatttacgagcttgctttccaccttacaatatgtactgtggcctgaatgtggttg

SEQ ID NO: 285255 - DNA, 255 bp, Glycine max
  unsure (1)..(255): unsure at all n locations
atcacacacaactactacaantacttccttacaatcaaaaccancaacaactatggcaagttatcaaaagcactacgatgatcagggtcgcaaggttgacgagtatggcaacgttgagaagcaaaccgacgaatacggcaaccctgttcatgctgctagtgtcacctatgtagccaccagaactgctgctggtggttacagtgatgacattaataagcaacatgataccaccatgcctacggcgtagacactggt

SEQ ID NO: 285256 - DNA, 257 bp, Glycine max
  unsure (1)..(257): unsure at all n locations
aanaaacattgcccttgttctttcaaagttaccaaacacaagtacacaacacaacagcaatcatatggcgtctgaacaattggctcgcagagagaacaccaccaccgagnaggagattcacgttgagaaacacagggttcccaagatggccacccacttcgagcactctgcggagcaagctaaagaatctgacatcaccgctgggaaggatactccgcagggtagcatagaagcctggcaagctggagagagggtca

SEQ ID NO: 285257 - DNA, 249 bp, Glycine max
attgagaaaagcatgaagaggagcaatgacaagcagctaaaaatcgagctcgaatgttgtcaaagggtgaaggcattgcttgaggaaggaaaagatatacgtctaggggattggaaggctgctgatattgagattttgaattcctttcagttgctaactgccaagcctgttgtatacttggttaatatgaccgaaaaagattaccaaagaaaaaaaaacaagtttctgcccaaaattcatgcatgggtc

SEQ ID NO: 285258 - DNA, 251 bp, Glycine max
gtgttcaccacctatcaggaccagcagactacagtctccattcaggttttcgaaggcgagaggagtctcacaaaggattgccgccttcttgggaaatttgatctgtctggaattcctccagccccaaggggtacgcctcaaattgaagtgaccttcgaagttgatgccaacggcattctaaatgtgaaggcagaagacaagggcactggtaaatcagaaaagatcaccattacaaacgaaaagggactctt

SEQ ID NO: 285259 - DNA, 246 bp, Glycine max
attaattcaccactatagttgttctgttagaagtgctacaaacaacaatggctgctaatcaggaagatgtgaagcttttgggagctactggaagcccatttgtgtgcagggttcagattgccctcaagttgaagggagttcaatacaaatttttggaagaaaatttgaggaacaagagtgaactgcttctcaaatccaacccagttcacaagaaggttccagtgtttattcacaatgagaagccca

SEQ ID NO: 285260 - DNA, 248 bp, Glycine max
gcttactacttgtcatcccaagggccaacacatgatgagattgatttcgagtttttgggaaacctaagtggggacccttatattctccacacaaacatcttcacgcaaggcaaaggtaacagggagcaacagttctatctctggttcgaccccaccagaaacttccacacttattctatcatttggaagccccagcacatcatattcttggttgataacacaccaataagggtattcaagaatgctga

SEQ ID NO: 285261 - DNA, 242 bp, Glycine max
  unsure (1)..(242): unsure at all n locations
cctgccagtagtcatatgcttgtctcaaagattaagccatgcntgtgtaagtatgaactaattcagactgtgaaactgcgaatggctcattaaatcagttatagtttgtttgatggtatctactactcggataaccgtagtaattctagagctaatacgtgcaacaaaccccgacttctggaagggatgcatttattagataaaaggtcaacacaggctctgcctgttgctttgatgattca

SEQ ID NO: 285262 - DNA, 244 bp, Glycine max; identical to SEQ ID NO: 123841

SEQ ID NO: 285263 - DNA, 240 bp, Glycine max
  unsure (1)..(240): unsure at all n locations
gaaacctcgcaggagccattgcctgagtcgaangatgatattaactctgcccattcgttgagcgttgaggctgcttatatcaaccagaatttctctcagcaggtgcttattagggatgggaataaggttacttttgatgaggctaacccttttgctaatgaaggtgaggaggttgcttctgtcgcttataggtataggaggtggaagcttgatgatgatatgtatcttgttgcgaggtgt

SEQ ID NO: 285264 - DNA, 240 bp, Glycine max
ctcctaggccctagaggaaactctctaaagcgtgtagaagcaagtactgagtgtcgtgtcttgatcaggggccgaggtagcattaaggatccagctagggaggaaatgatgagaggaaaacctgggtatgagcatctgaatgaacctctccacattctagttgaggcagaattaccagttgaaatagtagatgctcgcctgatgcaggcacgtgaaatacttgaagatttgctcaaaccg

SEQ ID NO: 285265 - DNA, 239 bp, Glycine max
  unsure (1)..(239): unsure at all n locations
agttaagctcaacttgggagttggtgcttaccgaactgaggaaggaaaacctcttgttttgaatgtagtgangcgagttgaacagcaactcataaatgacgtgtcacgcaacaaggaatatattccgatcgttgggcttgctgattttaataaattgagtgctaagcttatttttggggctgacagccctgctattcaagacaacagggttaccactgttcaatgcttgtctggaactg

SEQ ID NO: 285266 - DNA, 232 bp, Glycine max
  unsure (1)..(232): unsure at all n locations
cacaactactacaagtacttccttacaatcaaaaccaacaacaactatggcaagttatcaaaagcactacgatgatcagggtcgcaaggttgacgagtatggcaacgttgagaagcaaaccgacgaatacggcaaccctgttcatgctgctagtgtcacctatgtagccaccagaactgctgctggtggttacagtnatgacattaataagcaacatgataccaccaatgcc

SEQ ID NO: 285267 - DNA, 197 bp, Glycine max
ttgttgtttgtgtgtttgttttttctctcacctgaaaatgtcttgctgcggtggtaactgtggttgcggaagcgcctgcaagtgcggcaacggctgcggaggctgcaagatgtacccagacttgagctacaccgagtcaaccaccaccgagaccttggtcatgggagtggcaccagttaaggctcaattcgagagtg

SEQ ID NO: 285268 - DNA, 240 bp, Glycine max
acacaactacaagaaagaacttccttataaccaaaaccaacaacaactatggcaagttatcagaagcactacgatgatcagggtcgcaaggtcgacgagtatggcaatgttgagaggcaaactgacgaatatggcaacccggttcatgccactagtgtcacttatgtagccaccaaaagtgttggtggctacaatgatgacgctaataagcaacatgatattactggtgtctatcccgag

SEQ ID NO: 285269 - DNA, 238 bp, Glycine max
  unsure (1)..(238): unsure at all n locations
gttggtgcttaaaattnaggtgcaagaacaaccgctgttataacttgcacgttggaaaaaggtggtggtactcagagaccaataagagaagaagagatatanagtgaaagtgaaanatcancgtgggaacagntttccaactacagtnatcangccacacaaggtgtgaaggaaaagtangaganagcaaagcnagcagcaagcgaganactgancaccacnacacaaaccgcacnag

SEQ ID NO: 285270 - DNA, 240 bp, Glycine max
  unsure (1)..(240): unsure at all n locations
aangaatctgctgagntgancaagaggtctttcaagtatgcntgggtgcttgataagcttaatgctgagcgtgganagaggaattcacaattgatatggccttgtggaagtttgaaaccaccaagtactattgcacagtcattgntgcccctggacacagggatttcatcaanaacatgatcactgggacatcccaagctgactgtgctgntcttatcantgattccactacnggtgggt

SEQ ID NO: 285271 - DNA, 237 bp, Glycine max
  unsure (1)..(237): unsure at all n locations
gaggcgttaccagacaacccnantttntgccattgaggatagtaatggaagggatcgtatgctnaaatatactccagaacacatgcattgccttgctatgttttggggccctcttgctcctcccaacactggggttgtagcctttcagancttatcaaacaatcaggcaacatttaggattactgcaactgcagttgtacttgagtttaatcatgcagcaaggatagtgaagaaaat

SEQ ID NO: 285272 - DNA, 238 bp, Glycine max
aagctcatgaaatatcagaacactcgcgggggaagagttgtacttcaccccatcaagaatgtcccctcagaatttgagcatgtggaaaagggggatgcattgtatgcaatggaattagctttgtctttggagaagttagtgaatgagaaacttctgaatgtgcacagtgtggcagatcgcaacaatgaccctcaaatggccgacttcattgaaagcgagtttttgtctgaacaggttg

SEQ ID NO: 285273 - DNA, 246 bp, Glycine max
  unsure (1)..(246): unsure at all n locations
cgagtatttgccgccgtntgggggaatttcgccccagaacatggtcaagagcgggcggagcatcatgcgctgggaccccaccgccgtccacggcgtcacgcagttctccgatctcaccgaggacgagtttganaagctctacactggcgtcaatggcggcttcccgtcatcgaataatgccgccggcggtattgcgccgccgttggaggtggacgggctgccggagaattttgattggagagagaa

SEQ ID NO: 285274 - DNA, 236 bp, Glycine max
  unsure (1)..(236): unsure at all n locations
tttggcaaagctattgtctgttctgatgctgnagcagaggctgcaagatatggttttactgctgtggacaggccagaaggattcttggttttggccattgcttctctaggaaatgagattaccgagttgaaaaccccacctgaggatgcatcatctttggaggaaaagaaggttggagtgaagggaccggggaagaagaaaacagatgaatcggagcattttgtttggaaagatga

SEQ ID NO: 285275 - DNA, 241 bp, Glycine max
  unsure (1)..(241): unsure at all n locations
anangacctaaagcttagaattagaaacanagaaaagaaganaggaaaaganttgatcgttgaaaatgcagggaggaaagaaagcgggagagtccattaaggaaacagctacaaacattggtgcttctgccaaggctggcatggagaagaccaaggccactgtccaagagaaggcagaaagaatgacagcacgtgatccggtgcaaaaggagttggcaacccaaaagaaagaggcaaagat

SEQ ID NO: 285276 - DNA, 236 bp, Glycine max
  unsure (1)..(236): unsure at all n locations
gttctcagnaaccttaaaaacaacaacgtaggagtgttcggaaaagatggctaagcaggaagtggtggaagggttcaagttcgagcagaggcacgggaaagaacgcgtgagagtggcgcgcgtgtggaagacgaggcaggggcagcacttcattgtggagtngcgcgtggggatcactctcttttcggattgcgtcaactcgtacntccgcgatgacaactctgacatcgttgcta

SEQ ID NO: 285277 - DNA, 236 bp, Glycine max
  unsure (1)..(236): unsure at all n locations
ggggtggaacttgtagagtctgcttccagctaccaantgctgactcagntggatgtgcttaggttcttgcatgatcgtgctggtgaagctgatcgtgaactgcagagcattctctctcgttctgttcaagatttgggggccgacactgaacagatttatgccatcactgaccgcacaaaactcgtggatgccattaagtgcttaaaggccgctatgttaaatgctgttcctattgt

SEQ ID NO: 285278 - DNA, 235 bp, Glycine max
atggatccttacaagctccggccatccagcgccttcaattctcccttctggactacaaattctgggtgctcctgtttggaacaacaactcctctttaaccgttggagctagaggtccaattctgcttgaggattatcatcttgtggagaagcttgcaaactttgacagggaacgtatcccagaacgtgttgtccatgccaggggagctagtgcaaagggtttctttgaggtcaca

SEQ ID NO: 285279 - DNA, 234 bp, Glycine max
  unsure (1)..(234): unsure at all n locations
aatttaatttccatttcgttttcgttttctgttttgatttgatcttccaatnggcgtncgatggnttnaccgacaagaacaccgtgttcagaaagctcaaggcgaagtccgaaaataagatgtgtttcgattgcaatgcgaagaaccctacctgggcgtccgtcacgtatgggatcttcctctgcatcgattgctccgccgttcaccgcagtctcggcgtgcacatcagcttcg

SEQ ID NO: 285280 - DNA, 232 bp, Glycine max
  unsure (1)..(232): unsure at all n locations
atgtgtcanaacactnatggacgtnatagtgctaagcagnctgctattgtgagagcttntgaggntttttacccgcgtgatcctgcttcccataccatccatatnncttctgttgcatanaactcantatnccntggagaattcatgcaacctgactgggacatgtttcatagtttacacccagcagcagantatcatgctgcagctcgtgcaattggtggatgtcctattt

SEQ ID NO: 285281 - DNA, 233 bp, Glycine max
  unsure (1)..(233): unsure at all n locations
ctacttcctantccaaccgcactnctgctccgcnattatcatgggcaaggttcaagatcngaatcaacggatttggaagaattggccgtttngtagccagagtggctctgcagatagacgatgttgaactcgttgccgttaacgaccctttcatcaccaccgattacntgacatacatgtttaaatacgacagtgttnatggacactggaagcatcacgatgtcaccgttaag

SEQ ID NO: 285282 - DNA, 273 bp, Glycine max
  unsure (1)..(273): unsure at all n locations
gangagtgagcatggacgtgtctaccataaccacgaagaagaggcaaagagacttggagatnttcaagaataacttganctatatgcaggganatgaatgcaaacagaaaatcaccccattctcatcgtttaggattgaacaagtntgctgacatcactcctcaagagtncagcaaaaagtacttggcnagctcncaaggatgtgtcgcagcaaatcaaantggncaacaagnnnatgaggaaggnacnatattcttgtgaccatcnaccngc

SEQ ID NO: 285283 - DNA, 284 bp, Glycine max
  unsure (1)..(284): unsure at all n locations
ctcaaagctcgcataccctcctcatgtccacttctctccttcaccctcctccaattatctcttccttaaaacccacaaaccctccgccacacacctctcctcttccttncatgccaccccagcnacaatgcctcnacctncgccgctgccaacacnaccacccgctcgccgctgcctttcaccgtgccggcgccgcccgcggcaagttcgagcgcaagaagccccacgtcaacatnggcacnatcggccangtcgaccnacggtaagacnaancnttnagcgng

SEQ ID NO: 285284 - DNA, 238 bp, Glycine max
  unsure (1)..(238): unsure at all n locations
tacagatctgtttgaccaaaacccctcacaacacataaatcagacaaaagaaagaaagangagaacaacagagcaatggnaggaggaggagctgctccgccggccgacaccgtgatgtccgacgcggcgccacngccgcagcagcctccggtggcgatggggatcgagaatattccggcgacgctgatccacggtgncaggttcatccaatacgacatattcggcaacatattcgaag

SEQ ID NO: 285285 - DNA, 266 bp, Glycine max
  unsure (1)..(266): unsure at all n locations
cccgcaaaatcacccctcatcgacaatttcaaaggcctcggtgtcaatcttgttttaggagatctatacgatgcaccaaagtttggtgagtgctataaagcaggtcgatgtggtaatttctactgtaggacacctgcagctagctgatcaagataagatcatttctgcaattaaagaagcaggaaatgttaagaagttctanccatctgagtttggaaatgatgtggaccggactcatgcagttgaaccagccaagtctgcatttg

SEQ ID NO: 285286 - DNA, 265 bp, Glycine max
  unsure (1)..(265): unsure at all n locations
gcctcacaaaagcaaagatcaaacaaaccaaggacgagaacacgatgttgattgaacttgcacttggtttattggttttggctctgtttctgcacttgcgtcccacacccactgcaaaancaaaagcacttcgccatctcccanacccaccaagcccaaagctcgtcttcccttcatagganaccttcatctctnaaaagncaaacttctccactacgcantcatcgacctctccaaaaaacatggtcccttattctctctctac

SEQ ID NO: 285287 - DNA, 269 bp, Glycine max
  unsure (1)..(269): unsure at all n locations
actgagaggaagagagagggagattctttgtttgctaccttctctcggaaaaatggtnacgttcaggtttcancagtaccaggtggttgggagggctcttcccacggaagcagatcagcaccccaagatctaccgaatgaagctctgggccaccaacgaggttcgcgccaagtccaagttctggtattttctgaggaaactgaaaaaggtgaagaagagcaatggccaagtgcttgncatcaacgagatttttgagaagaacccaacca

SEQ ID NO: 285288 - DNA, 265 bp, Glycine max
  unsure (1)..(265): unsure at all n locations
gctctatactacacagtacacacactagaagaataatggcttccatcctccactacttnttagccctctctctttcttgctcttttcttttcttcttatccgactcagtcacccctacaaaaccaataaaccttgttgttctacccgttcaaaatgatggttccacagggctccattgggccaacctccaaaaaagaacccctctaatgcaagtaccagtcctggtggacctcaatggaaatcacttgtgggttaactgtgagca

SEQ ID NO: 285289 - DNA, 261 bp, Glycine max
gtttgttgttcctcactgacctcaccatggcgaccagagccaagctttctttagctatcttccttttctttcttttagccttgatttcaaacctagccttgggcaaacttaaagaaaccgaggtcgaagaagatcccgagctcgtaacatgcaaacaccagtgccaacagcaacggcaatacactgagagtgacaagcgaacatgcttgcaacaatgtgacagtatgaagcaagagcgagagaaacaagtcgaagaggaaa

SEQ ID NO: 285290 - DNA, 261 bp, Glycine max
  unsure (1)..(261): unsure at all n locations
cttagttctagatcgcgatctagaactaggatcaacaaaagacnggtgtaatcggatccatgttcaaggcggtgcaagacacctacgagaacgccaaggaagctgtcgttggcaagaaagaaccttcgacgacgactaactcgtacagtaccagagaggttattcacgacgttgacattcaacccgatgacgcggctgcagcgagggaagtgagagacaaatcagcctcaaagtcaccaggtatctacaattctgccactg

SEQ ID NO: 285291 - DNA, 270 bp, Glycine max
  unsure (1)..(270): unsure at all n locations
aaccaacataacaatgtcgttgattccaagtttcttcggcaccgggcgaagaaccaacgtcttcgaccccttctccctcgacgtgtgggacccattccatggcttccccggcaccaccgccctctccgctccgcgctncgagacggcggccttcgccaacagncgcatcgactggaaggangacggcgaaggcgcagnggttcaaagnaagaacctgccnggggcctaaagaaggaagnagtnaaggtgaanantcaaggaaggnggaaa

SEQ ID NO: 285292 - DNA, 264 bp, Glycine max
agaagagaggacccttctcttgcatagttcaagtgagtgagagtgccaaaaaatgggaagggctccttgttgttccaaagtggggttgcacaaaggtccatggactcctaaagaagatgcattgcttaccaagtatatccaagctcatggagaaggccaatggaaatcactacccaaaaaagcagggcttcttagatgtggaaaaagttgtagattgagatggatgaactatctgagaccagacataaagagagggaacatagc

SEQ ID NO: 285293 - DNA, 265 bp, Glycine max
  unsure (1)..(265): unsure at all n locations
gcatttcgttactttcatttgtngtgcaatcttacaagtnccaaacttctctattttntnatnatnagtncncacnncnnaannacacacaaacccacctnntatattatcatggcttctaaggnggnttcgntnttggntatagcgatgatgtcgtttgccatgaactgtaactgcactagtgttgnnccacatgcctncaaccaaagaggaaggtcacgattttcaggagtctaaagccaagaccacacaaactgcgaacaag

SEQ ID NO: 285294 - DNA, 262 bp, Glycine max
  unsure (1)..(262): unsure at all n locations
gcaaacattgaacttgttggcattaaagaacaacaacagaagcagaaacaggaagaggaacctttggaagtgcaaaggtacagagctgaattgtctgaagacgatgtatttgtaattccagcagcttatccatttgtcgtcaacgctacctcaaacctcaatttccttgcttttggtatcaatgctgagcaacaaccagaggaanttccttgcaggngagaaagacatngtggtagggcagatagaaagacaagtgcaggag

SEQ ID NO: 285295 - DNA, 259 bp, Glycine max
  unsure (1)..(259): unsure at all n locations
caggggccaagattccttctcttgggttagggacttggcaagctgaacctggtgttgtagctgaagctctcaccacagccattcaggttggatacaggcatattgactgtgctagtgcgtataagaatcaagcagagattggttctgctcttaagaagctttttgatgatggtgtggtgaagcgtgaggactnatggatcacttccaaactctggtgttcagatcatgcaccagaagatgtgccaaaagcattggataa

SEQ ID NO: 285296 - DNA, 259 bp, Glycine max
  unsure (1)..(259): unsure at all n locations
ctcttctnctcttgcggcnagggttttagcgcantnctnctagatttaaggaanatgggtaaggaaaaggttcacatcagtattgtggtcattggccatgtcgactctgggaaatccactaccactggtcacntgattnacaagcttgnaggcattgacaagcgtgttattgagangtttgagaaggaagctgctgagatgaacaataggtctttcaagtatgcctgggtgctggacaaacttaaggctgagcgtgana

SEQ ID NO: 285297 - DNA, 264 bp, Glycine max
  unsure (1)..(264): unsure at all n locations
caaaacagtaaagctaacttcaacacctttaattttctaaaagtaattcagcggctgaataccaagcggagaagatgagtcaggagcagccacggcgtcccaaaggccaaaaccccatcaaatacggcgacgtttttgtcgtctccggcgaccttgcacagaagcccgtcgcaccggaagatgctgccatgatgcaaagcgcggaaactcgagtgctcggacaaacccaacccggcggagcagtttccgtcatgcaatcgnngc

SEQ ID NO: 285298 - DNA, 263 bp, Glycine max
  unsure (1)..(263): unsure at all n locations
cagtgagggacgtgaagtcgaagggcgaggtcgacgaggtggtggcgagtngctctccggttatcctccacttctgggcgtcgtggtgcgaanttaccaagcacatggaccaactcttctctcacctttccactgatttccccaacncccgcttcttangggtcgaggccgaagagcaacccgagatttctgaggcttactccgtctccgctgtgcctttctntgccttctgcaaggatgggaagacctttganacattggag

SEQ ID NO: 285299 - DNA, 257 bp, Glycine max
attcctccctttcttcctctttctagtgaacacatcagtgatgatggaatatatccttcttgagaatggtcatgattgtttgatatatgttggagactctgtgaatccagacatcgtgcagaaactgtttggtgttgctacagttgacaaagtccctaccctgtttgtattgcagcagtacgacaatccactatcaaagaagttaaatgaagtggtaaatgagatacggcggcaaagatgttcctacttccggttca

SEQ ID NO: 285300 - DNA, 256 bp, Glycine max
  unsure (1)..(256): unsure at all n locations
ggaatnatggtaattgattttgagggtttgantactnatggattatgatggtatgagaanaccntccaaaaacttatttcactctcgcttcttccnttnngggttctattgctgggattgggagttcttgaccgcnctcctccttnntagttcttccccttaatcttctntcttcacaantttnatntcctnccttattagacgtattagatcagattgaacaaaagggtttttctntctntctntcttggggaat

SEQ ID NO: 285301 - DNA, 251 bp, Glycine max
  unsure (1)..(251): unsure at all n locations
cacngttcaagacatcgcgagaagacttgaaactcgntgacaacgagcttctgngcacggagnanaagttcanggtgttcatggagaantacgggagtagngactccanagaggaggagtatnctncncngttnggggattntcgcccagaacatggtcagatcggngtagcancagncgctgggacccnacgcggcgtccacggngtctacgcagtncnccgntctcaccgatgactagntnnnnggnct

SEQ ID NO: 285302 - DNA, 260 bp, Glycine max
  unsure (1)..(260): unsure at all n locations
aagcttgctgaagggatcaaactttatgcattattagccactgccacttcaaaacggacagttcttnctgatcttataactgtttatgcaaagggtgggaagactattgtttttactcagacaaaaaaggatgctgatgaagtatcaatggcattaacaagtagtatagcttccgaagcactgcatggtgatatatctcagcatcagagagagagaacattgaatggttttcggcaagggaagttcacagtgcttgttgc

SEQ ID NO: 285303 - DNA, 255 bp, Glycine max
  unsure (1)..(255): unsure at all n locations
cggatggttcggttctccgtgctcagttacctggcaggccaactcgtgattctctatttgtggatccagccagagataggactagcttgctcaaaatatggaacctgaacaaatgctctggagttgttggtgtatttaactgccaaggtgctggatggtgcaagatagagaagaaaacccgcatccangatacatctcctggtacactcaccgcctctgtctgngcctctgatgttgacctcatcacacaagtag

SEQ ID NO: 285304 - DNA, 257 bp, Glycine max
  unsure (1)..(257): unsure at all n locations
cacaaaacaaaaagtttacgttacaantcgcataataaccgtcctaagtttattgagagaattttgcaagtgtgagaaacatggcatctcgtcaaaacaacaagcaagagcttgatgaaagagcaaggcaaggagagactgttgtcccgggtggaactggtggcaagagcctggaggctcagcaacaccttgctgaaggaaggagcaagggagggcaaacaaggaaggaacagctgggtacagaagggtaccaggaa

SEQ ID NO: 285305 - DNA, 254 bp, Glycine max
  unsure (1)..(254): unsure at all n locations
gcgatantgataagagagataccaacaagaaaaganaaaaagaagagttgagattccctttgaagaaaagatggcatcccataggcaaagctatgaagctggtcaaactaagggccgaactgaggaaaagacgaaccagacgatgggcaatattggagagaaggctcaagctgcaaaggagaagacccaggaaatggcccaagctgcanangagaaganccaacaaacagcccaagctgccaagganggngctt

SEQ ID NO: 285306 - DNA, 255 bp, Glycine max
gtggcagcgacacgtatcaacttcaataatcgcatcgcagaagcagtttccggtgcatctcatcgtctccgaaaatgaacgacgcagatgtctcgaagcaaatccagcagatggtgcggttcatccgccaggaagctgaggaaaaggccaacgagatctctgtctccgccgaagaggaattcaatatcgagaagctgcagttggtcgaagccgacaagaagaagatcaggcaagaatacgaacgcaaagagcgcc

SEQ ID NO: 285307 - DNA, 177 bp, Glycine max
  unsure (1)..(177): unsure at all n locations
aacccgtcggctgtcggtggactgctcgagctgcttccgcggcgagagcgggtcgtcgcgtgcnggtcgggggacggattgggaacgggcccttcggggcctcttccccgggcgtcaacagtcaactcagaactggtacggacaaggggaatccgactgtttaattaaaacaaagcc

SEQ ID NO: 285308 - DNA, 164 bp, Glycine max
  unsure (1)..(164): unsure at all n locations
cacaactacaaganagaacttccttataaccagaaccaacaacaactatggcaagttatcagaagcactacgatgatcagggtcgcaaggtcgacgagtatggcaatgttgagagnaaactgacgaatatggcaagccggttcatgccactagtgtcacttatg

SEQ ID NO: 285309 - DNA, 272 bp, Glycine max
  unsure (1)..(272): unsure at all n locations
aaaagaagctcttgctgttgctgcagctatggaaaagggtantactcaccctattggaagggctgtggttgaccatagtgaaggcaaagacntcccatctatttctgttgaaagttcgaatantttcctggtagaggccttactgctactgttaacagcattgagtcaggaactggaggtgctaaactattgaaagcatcacttggatctatagatttcatcacctctttttgtcaatctgaagtcgagtcagaaaagatcagggaactgtt

SEQ ID NO: 285310 - DNA, 274 bp, Glycine max
  unsure (1)..(274): unsure at all n locations
cattagttgccacaaatgtggcagctcgaggtcttgatattaatgatgttcagttaattatacagtgtgaacccccacgggatgtagaagcctatatccatcgttctggacgcaaggaagagcaggtaatactggggttgctgttatgctttatgacccaaaaagatcgaacatatctagaatagagagagagtctggtgtaaantttgaacgangtatctgctcccncagcctgaggatattgccananccttnatggggaagnttnttaatt

SEQ ID NO: 285311 - DNA, 276 bp, Glycine max
gcactattcattcagaaatccccagaggggtggttctaggagattatgtgattgaatatggggatgatgatgctagagacgagtttgaaggcttccctggagatgagggcaactggggacctcatgtattctctatttcgacaactttagaagatccagaaatagaagaaggacaagagtcagtcatacaagaagggataatcgccgtttaagttatgatacttcaaattctgatgaaggttctgtagtatctatggagtatgcagattataggat

SEQ ID NO: 285312 - DNA, 277 bp, Glycine max
  unsure (1)..(277): unsure at all n locations
attttcaccaaaggtgacctgaaggaggtcagtgaggaggttgccaagtacaaggttggagctcctgctcgtgttggtttggttgccccaattgatgttgttgttcctcctggcaacacagggctcgatccctcccagacctctttcttccaggtgctcaanatncnnannaagattaacaagggtactgttgaaatcattacccctgtggagctcattaagaagggagacaangttggatcttctgaagctgcattgcttgccaagctagggataa

SEQ ID NO: 285313 - DNA, 177 bp, Glycine max
  unsure (1)..(177): unsure at all n locations
aatggctgaagcanaactacgagaccagcatggcaaccctgtcccactcancgatcaatacggtaatccggttatcttaactgacgagcgcggtaatcccgtccaactcactgggtcgctaccaccgctaccggcacagcaggttctgggtttgggtcctatggtaccggtgnttag

SEQ ID NO: 285314 - DNA, 170 bp, Glycine max
aggaaagttccctacacttgttactcaccaggaaactcttgagtcaaaggttaatgagtctaaggccatggttaaatttcaacttaagaaagtgctctgcatgggagtagcgtgggcaatgttagtatggaggaaaagcaaatcttccaaaatgttcaactgagtgttaa

SEQ ID NO: 285315 - DNA, 274 bp, Glycine max
  unsure (1)..(274): unsure at all n locations
attcttcatttttganatccgatgcaagcaaaacgattcatgccgctgaaagactgggtaggggtattgagactgatggaattaccacccctgtggttaacacttctgcctactttttaagaaaaccgctgatctcattgatttcaaggagaatcgtcaagtgagttatgaatacgggcgctatggaaacccaacgacggtggttctggaggagaagataagtgcattggagggggccgaatcaactgtgataatggcgtctgggatgtgtgct

SEQ ID NO: 285316 - DNA, 109 bp, Glycine max
cagaaactgcaaggggaagggttggtgctgaaaatgaaggtgcaagaacaaccgctgttataacttgcacgttggaaaaaggtggtggtactcagaaaccaataagaga

SEQ ID NO: 285317 - DNA, 274 bp, Glycine max
cgaaccagacgatgggcaatattggagagaaggctcaagctgcaaaggagaagacccaggaaatggcccaagctgcaaaggagaagacccaacaaacagcccaagctgccaaggacaagacttgcgacacttcccaagcggcaaaggagaagacccaacagaatacaggagctgctcaacaaaagacctcagagatgggccagtccacgaaggaatcggcccagtcagggaaggacaacacccaagggttcctgcagcagacaggggagaaggt

SEQ ID NO: 285318 - DNA, 175 bp, Glycine max
  unsure (1)..(175): unsure at all n locations
atcacacacaactactacaagtacttccttacaatcaaaaccaacaacaactatggcaagttatcaaaagcactacgatgatcagggtcgcaaggttgacgagtatggcaacgttgagaagcaaatgacgaatacggcaaccctgttcatgctgctagtgtcantntgtagcacc

SEQ ID NO: 285319 - DNA, 265 bp, Glycine max
  unsure (1)..(265): unsure at all n locations
ccagagggagcattggttcttttcaatgtttggcaagtaggaagggaccccaaatactgggacagaccatcagaattccgtcccgagaggttcttagaaactggtgctgaaggggaagcagggcctcttnatcttaggggccagcatttccaactcctcccatttgggtctgggaggagaatgtgccctggtgtcaatttggctacttcaggaatggcaacacttcttgcatctcttatccaatgctttgacctgcaagtgctgg

SEQ ID NO: 285320 - DNA, 268 bp, Glycine max
  unsure (1)..(268): unsure at all n locations
aganaagacttcatgtgacaatgggtgtaatggaggtcttatgacaaatgcctacaattatttgctcgagtctggtgggttggaggnggagtcttcatatccctacactggggagagaggtgaatgcaagtttgatccagaganaatagcagttaagatcacaaatttcaccaatatccctgctgatgagaacccaattggcggtatttttaggnaaaaatgggccnnctggttngaaggccccctntccctaattaataaggangcc

SEQ ID NO: 285321 - DNA, 156 bp, Glycine max
  unsure (1)..(156): unsure at all n locations
ccggcatcaaggcgccctcttccatttaccattccgaganaggtccgacgacctctcaggttctcgcagttgtngccggccttccggtcggcggcatcctcctgctcctggcaggactgaccctggctggaactctcaccgggctggtggtggcaa

SEQ ID NO: 285322 - DNA, 266 bp, Glycine max
  unsure (1)..(266): unsure at all n locations
gnagaangaagtgcaatggacatttggaacctatggctatcctacacnagcagtgaaaaagattgngtcttactatgatgtgccagagggattggatattcggggaaatatgatgcagagtttgcnaaaatcctcacaaaagatgntttgaaattcgttgctgacttgcaacgtgngttcaggaaccatatcaagtatgcattagagtgcagnagagaagcaaagaagaagtacaatgaaggggctcttccagagtttgatcctgc

SEQ ID NO: 285323 - DNA, 166 bp, Glycine max
  unsure (1)..(166): unsure at all n locations
atcactggtcaacgacggtggcgttatagaacaaacatttttgtggggaaggtattctgtggaaatgtctgctgtagtttacaaggattggntttttacagataagcattgcctgctgatctnataaaaagaggatggcattgaggncctngtgncccaaggntgg

SEQ ID NO: 285324 - DNA, 174 bp, Glycine max
  unsure (1)..(174): unsure at all n locations
cactaataaacatcatgggaactactggtggctataatgatganaccaatagacatcatggaactaccggtgtctatggtatagacaccgataggcaacaacatggactactggtggctatgccggtganactggtaggcagcatgggaacntcggtngccnttactatggaac

SEQ ID NO: 285325 - DNA, 293 bp, Glycine max
  unsure (1)..(293): unsure at all n locations
cacaactactacaagtacttccttacaatcaaaaccaacaacaactatggcaagttatcaaaagcactacgatgatcagggtcgcaaggttgacgagtatggcaacgttgagaagcaaaccgacgaatacggcaaccctgttcatgctgctagtgtcacctatgtagccaccagaactgctgctggtggttacagtgatgacattaatangcaacatgataccaccaatgcctacggcgtagacatggtagacagcattctagtggtggctacgatggtgcactataaacatc

SEQ ID NO: 285326 - DNA, 262 bp, Glycine max
  unsure (1)..(262): unsure at all n locations
ggaacgcgactccatgctgcttcaacttcctcatttcacaaaggatctggctaagaaatgccaggagaacccagggaagagtatagaaactgtgtttgatttattagaaatggaggatgaggagaggcaaaaattgttgggcatgtcagatttgcagttgttggatattgcccgattttgtaaccgattccctaatattgatttgtcatatgaggtgctgnacagtgacatgtgcgggctggggangtngtcactgtncncc

SEQ ID NO: 285327 - DNA, 285 bp, Glycine max
  unsure (1)..(285): unsure at all n locations
cagagaagttgggtatagagcgagacaataggtcaaacttcaaggcagagtatggtgcgcttctcaaccagtcttaaaggggtgtttgcagctggagattgtcgacgtggtcagtccttggtggtatgggcaatttcagagggacgacaagctgcagcacaagttgacagtttcctcacaaatgaagattncagagcacaatgttgnccgggattccagacgaacttcatcaagaagaagcagcgaccaagggacactgtgncngtgngcaaacanacagtcgnt

SEQ ID NO: 285328 - DNA, 283 bp, Glycine max
  unsure (1)..(283): unsure at all n locations
ctctttaacctttcacaccttgatagtnactanttctcaccatgaatctgatctgacctgtcttctgcaattancaggggggaagcnccttgtgccagtgggtctaggtgatgatgatcaatgcattgaggatgactttactgcatggaaagaagaactgtggccagcattggatgaattgcttagagatgaggacgatgcaactgtgtctacaccttatactgctgcagttttggagtaccgggttgttattcatgatccattggaagcatctgtcgacgaa

SEQ ID NO: 285329 - DNA, 279 bp, Glycine max
attctcttgaggattggcttcacagtggtagcaagaagtacgagaattctacatctctgagttgggtgcagagggttcatattgctcatgatgttgctgacgcacttaactaccttcataactatactagtcctcctcacgtacacaagaatttgaagagtgggaacgtgcttttggatggcaattttagggctaaagtttcgaatttgggattggcaagagctgtggaggatcacggggatgatggggggtttcaattgacaaggcatgtggtgggga

SEQ ID NO: 285330 - DNA, 280 bp, Glycine max
cacacacaactactacaagtacttccttacaatcaaaaccaacaacaactatggcaagttatcaaaagcactacgatgatcagggtcgcaaggttgacgagtatggcaacgttgagaagcaaaccgacgaatacggcaaccctgttcatgctgctagtgtcacctatgtagccaccagaactgctgctggtggttacagtgatgacattaataagcaacatgataccaccaatgcctacggcgtagacactggtagacagcattctagtggtggctacga

SEQ ID NO: 285331 - DNA, 282 bp, Glycine max
caacattagcatcaaaaccagagtggttctagtaatccggtgctgctagaggatgggaactagtgaatggcatatcgagcgaagatctagcttcggcactgaatcccccttagcaagagaggcaggaaatgtgcctgaaactgggtcactctctattgttgtgcttggcgcttctggggatcttgctaagaagaagacatttcctgcacttttccatctataccggcagggattcttaccagcagatgaagttcacatttttggctatgcaaggacaaaaat

SEQ ID NO: 285332 - DNA, 290 bp, Glycine max
  unsure (1)..(290): unsure at all n locations
ttgaagaatcttgattcttccttgcacgcgatgccaaatcncgaaccagattcatggcacttattcagcattatggtcccactgtgtactttcatcctgatgagaagtacttgccatcatcagtgcaatggttttttaagaatggagcagttttgcatgcagcaggcaataagaaaggtatagctatagattatcagggctcaaatttacctagtggtggaacaaatgatggtgcctttggattgattgcctactgatgctgatgcaagaaacnatctaaagaagggnaa

SEQ ID NO: 285333 - DNA, 284 bp, Glycine max
gaaagttgaaactcggggacaacgagcttctgcgcacggagaagaagttcaaggttttcatggagaattacgggaggagctactccacagaggaggagtatttgcgccgtttggggattttcgcccagaacatggtcagagcggcggagcatcaggcgctggaccccaccgccgtccacggcgtcacgcagttctccgatctcaccgaggacgagtttgagaagctctacactggcgtcaatggcggcttcccgtcatcgaataatgccgccggcggtattgcg

SEQ ID NO: 285334 - DNA, 281 bp, Glycine max
aactactacaagtacttccttacaatcaaaaccaacaacaactatggcaagttatcaaaagcactacgatgatcagggtcgcaaggttgacgagtatggcaacgttgagaagcaaaccgacgaatacggcaaccctgttcatgctgctagtgtcacctatgtagccaccagaactgctgctggtggttacagtgatgacattaataagcaacatgataccaccaatgcctacggcgtagacactggtagacagcattctagtggtggctacgatggtgaca

SEQ ID NO: 285335 - DNA, 280 bp, Glycine max
  unsure (1)..(280): unsure at all n locations
acacaactacaagaaagaacttccttataaccaaaaccaacaacaactatggcaagttatcagaagcactacgatgatcagggtcgcaaggtcgacgagtatggcaatgttgagaggcaaactgacgaatatggcaacccggttcatgccactagtgtcacttatgtagccaccaaaagtgttggtggctacatgatgacgctaataagcaacatgatattactggnntctatcccgagaaagacaccggtagacatcatttgggcgtggttacgacggt

SEQ ID NO: 285336 - DNA, 285 bp, Glycine max
ctcgggctaacaaaagacgacgccgttttgacccggcgaccgggaaatggtggagccggtggagcttcgctggcgaggagcagctctcgcttctgtcagattcgagcaatggtgatcggtcgtggcggttgaacttcgacgggtttcagctatcttcggagcacgcggagaagcaagtgaaaccccctcgcggactccacgactgttacggggttctaggtcaagaagataatattgcagagtactatcagcagcaggttgaagtgcttgagggctttactgaaa

SEQ ID NO: 285337 - DNA, 280 bp, Glycine max
actcagtgaaagagaatccgaggcgaagagaagagaaaaattaagatggaggggaaggagcaggatgtgtcgctgggagcgaacaagttcccggagagacagccgattgggacggcggcgcagagccaagacgacggcaaggactaccaggagccggcgccggcgccactggttgacccgacggagtttacgtcatggtccttttacagagcagggatagcagagtttgtggccacttttctgtttctatacatcatgtcttaaccgtcatgggagtcgc

SEQ ID NO: 285338 - DNA, 279 bp, Glycine max
ccagagggagcattggttcttttcaatgtttggcaagtaggaagggaccccaaatactgggacagaccatcagaattccgtcccgagaggttcttagaaactggtgctgaaggggaagcagggcctcttgatcttaggggccagcatttccaactcctcccatttgggtctgggaggagaatgtgccctggtgtcaatttggctacttcaggaatggcaacacttcttgcatctcttatccaatgctttgacctgcaagtgctgggccctcaaggacaa

SEQ ID NO: 285339 - DNA, 278 bp, Glycine max
ggaacccaaaccgaaaccctaaccctaacggagagatggcggagcacttggcatcgatattcgggacggagaaggacagggtgaactgtccgttctacttcaagatcggcgcgtgcaggcacggcgaccggtgctcccggcttcacaccaagccgacaattagcccaacattggttctgtcgaacatgtaccagaggcccgacatgaacatgagcattatcaccaaccccgatcagccacaaccccaatcccttgaccccgacaaggtgcaggatcat

SEQ ID NO: 285340 - DNA, 281 bp, Glycine max
  unsure (1)..(281): unsure at all n locations
gatcctccaattctcttggatgatccttgacttcttctctcactttccagaaagtgagagaagaagtnaaggatcctccaatnancctcactttccagaaagccttcacatgtncacctttgttatntgatgattngggngttccacaaganccacaggcatatggatggtnttggagttaacacatatacgctgatcaacaaggctggganagcagtgtatgtgaaatttcactggaagaccactagtggtananagtgtctattggaggagangccatt

SEQ ID NO: 285341 - DNA, 290 bp, Glycine max
gaaagggccttggactcctgaagaagacatcatattggtgtcttatattcaggaacatggtcctggaaattggagggcagttcctgccaaaacagggttgtcaagatgcagcaagagttgcagacttagatggactaattacctgaggccaggaatcaaacggggcaacttcacagaacaagaggagaagatgataatccatcttcaagatcttttaggaaacagatgggctgcaatagcttcataccttccacagagaacagacaatcgacataaagaactattggaac

SEQ ID NO: 285342 - DNA, 282 bp, Glycine max
agaaagaacttccttataaccaaaaccaacaacaactatggcaagttatcagaagcactacgatgatcagggtcgcaaggtcgacgagtatggcaatgttgagaggcaaactgacgaatatggcaacccggttcatgccactagtgtcacttatgtagccaccaaaagtgttggtggctacaatgatgacgctaataagcaacatgatattactggtgtctatcccgagaaagacaccggtagacatcattttggtcgtggttacgacggtgacactaacaa

SEQ ID NO: 285343 - DNA, 278 bp, Glycine max
ctttcttatggttgtacacgattggagattggagtccaaagcacctatgaagatgttgctcgagacacaaatagaggacactgttgctgctgtagctgattgtttttgcctggctaaagatgctggtttcaagggacatggaaagtttccgggagttttttgagagtcccttgtttagagcagatgggcttaaaatatatcctacacttgtaattcgtggaactgggctttatgagctctggaaaactggcaggtatagaaactatccaccagagcaa

SEQ ID NO: 285344 - DNA, 278 bp, Glycine max
ggattttatgaatgagaccaatggctctgactatgtacccacatatgaagacaaggacggagactggatgctcgtcggtgatgtgccctgggagatgttcgttgaatcatgcaagcgtcttcgcataatgaaaggctccgaggcaatcggtcttgcgccaagagccgtggaaaagtgcaagaacagaagctgaagaagtgatttcatctgcgtcacaaggaagcaaattgactcgagcaagatcgagtctaatataggaataagagtttaattatcat

SEQ ID NO: 285345 - DNA, 277 bp, Glycine max
ctatgatgagagtgcggtttcctttgttggtgttgctgggaactgttttcctggcatcagtttgtgtctcattaaaggtgagagaggatgagaataaccctttctacttgagaagctctaacagcttccaaactctctttgagaaccaaaacggtcgcattcgtctcctccagagattcaacaaacgctccccacaacttgagaaccttcgagactaccggattgtccagtttcagtcaaaacccaacacaatccttctcccccaccatgctgacgc

SEQ ID NO: 285346 - DNA, 275 bp, Glycine max
  unsure (1)..(275): unsure at all n locations
gagtgtgcaaaagagcgtcgtagtcgcaaccctaatcagaagaagcgcanttcaagcgagtgacagccaccagccatgggtcgtatgcacagccgcggtaagggtatatcctcttctgctttgccctacaaaaggacacctcctagctggctcaagatctcttcgcaagatgtcgaagaaaatatctgcaagtttgcgaagaaaggtttgaccccgtctcagattggtgtcattctcagagattctcacggtattgctcaggtcaatagcgtcat

SEQ ID NO: 285347 - DNA, 274 bp, Glycine max
gcaggtgaatggtttgcccttcaacaagtactcgtggatcatgactcataattcgttcagcatcgtggatgcgccacctttgcctggaggagttcagagactcaccttttacaatcaagaagacactgttactaaccagttgaggaatggagcgagaggattgatgttggatatgtacgacttcgagaatgatatctggcttgtcattcatttcgagggcaatgcttcaacttcactgcatttcaacctgcaataaatactttgagagaagtgg

SEQ ID NO: 285348 - DNA, 276 bp, Glycine max
ccaagggtttaacctttctggctgtgttaatatgcgtttcagcactgtcactgagtccttctgttgcgggggaagggcaaaataatggccttgttatgaacttctacaaggaatcatgccctcaggctgaagacatcatcacagaacaagtcaagcttctctacaagcgccacaagaacactgctttctcctggctcaggaacatcttccatgactgtgctgttcagagttgtgatgcttcactgttgctggactccacaagaaggagcttgtctg

SEQ ID NO: 285349 - DNA, 276 bp, Glycine max
  unsure (1)..(276): unsure at all n locations
ctttcagatcaattctaggaaactcctacaatattatgacatcntaccaaggcgtgttctagctacaaaaggatacgacaagtgcgatgaaaagggaaaagttgcttttgtttcagcatatgggattcaccagctccatatattcatctttgtgctggccatttttcatattctacaatgcattgtaacactggctttgggaagaactaagatgagaaagtggagagcatgggaaaatgaaaccaagactattgaatatcattttataacgatccg

SEQ ID NO: 285350 - DNA, 281 bp, Glycine max
atccactgccacctgctgctatggccatggcatcaaccactacagctgctgctagcatgttgctttctggatcaatgtccagtgcagatggaataatgaacccaaatttgctagctagagcaattcttccttgctctacaagcatggcaacactctcagcttcagcaccattccccactgtgactttggacctcacacacaaccctaacccattgcaatttcaaaggcctggtgccccattccaagtacccttccttcaagcacagcctcagaatttgggt

SEQ ID NO: 285351 - DNA, 276 bp, Glycine max
gaaaaccaacataacaatgtcgttgattccaagtttcttcggcaccgggcgaagaaccaacgtcttcgaccccttctccctcgacgtgtgggacccattccatggcttccccggcaccaccgccctctccgctccgcgctccgagacggcggccttcgccaacacgcgcatcgactggaaggagacggcggaggcgcacgtgttcaaggcagacctgccggggctgaagaaggaaaaagttgaaggtggaaatcgaggaggagggaaggtgctgca

SEQ ID NO: 285352 - DNA, 277 bp, Glycine max
  unsure (1)..(277): unsure at all n locations
agaacctaagtgagaaacaaagaaaggaaataattgatctttgaaaatgcagggaggaaagaaagctggagagtccatcaaggaaacagctgcaaacattggtgcttctgccaaggctggcatggagaaaaccaaggccactgtccaggagaaggcagaaagaatgacggcacgtgatccgatgcaaaaggagttggcaacccagaagaaagaggcaaagatgagccaggcagagctggacaagcaggcggcgcgtcanataacacggcggcgaana

SEQ ID NO: 285353 - DNA, 273 bp, Glycine max
  unsure (1)..(273): unsure at all n locations
caacattagcatcaaaaccagagtggttctagtaatccggtgctgctagaggatgggaactagtgaatggcatatcgagcgaagatctagcttcggcactgaatcccccttagcaagagaggcaggaaatgtgcctgaaactgggtcactctctattgttgtgcttggcgcttctggggatcttgctaagaagaagacatttcctgcacttttccatctataccggcagnattcttaccagcagatgaagttcacatttttggctatgcaagg

SEQ ID NO: 285354 - DNA, 274 bp, Glycine max
ggcgatgcaagacgcggtcacggccctggaacggtgccggaagccggtgatcgcaagcgtacatggggcgtgcatcggcggcggaattgatatagtgacggcgtgcgacataaggatgtgcagcgaggaggcgtttttctcggtgaaggaagtggatttggcccttgccgctgaccttggcactcttcagaggttgccgcttattgtagggttcggcaacgccatggaattggctttgaccggtcgcactttttccggtaaggaggctaaggag

SEQ ID NO: 285355 - DNA, 284 bp, Glycine max
cagaccgagctagctagctagcaagcaagcacagagatggaggcaaagcgaggccatgccctcatgtgcttggcacgtgtttcactcttcctctgcgctctaaccctatccgctgctcacggaagcaccacggttcaagacatcgcgagaaagttgaaactcggggacaacgagcttctgcgcacggagaagaagttcaaggttttcatggagaattacgggaggagctactccacagaggaggagtatttgcgccgtttggggattttcgcccagaacatggt

SEQ ID NO: 285356 - DNA, 275 bp, Glycine max
ggtatctatgatgttgaacatttcatcaaaacactgaggtatgatgtaaagattgttgaaagcattccagagaatcagaaaaatggcaaaaagaagaaaataaagccatttcagcttcgccctcctagagatgctcctataagttggtatactactgatgctctgaagaaaatgaaagaacatggtgccatctatcttactcccttttcacatcgcttagctgaagaaattgacaatcctgagtaccaaaggttgaggtgtagagtcaactatca

SEQ ID NO: 285357 - DNA, 273 bp, Glycine max
attctctccattgtctttgaacactcatcaccatggccaagcttgttctttccctttgtttccttcttttcagtggctgcttcgctctgagagagcaggcacagcaaaatgagtgccagatccaaaagctgaatgccctcaaaccggataaccgtatagagtcggaaggtgggttcattgagacctggaaccctaacaacaagccattccagtgtgccggtgttgccctctctcgctgcacccttaaccgcaatgcccttcgtagaccttcct

SEQ ID NO: 285358 - DNA, 271 bp, Glycine max
  unsure (1)..(271): unsure at all n locations
accatttatcaactcactcatcaatctcgtttgttctcactaactattacttcatcatgtcgtcgagcanagttggtcaagtcatcaaatgcaaagctgcggtttcatgggaggcagggaagccacttgtgattgaagaagtagaggtggcaccaccacaagctggtgaagtgcgtttgaagatcctctacacctctctttgccacactgatgtttacttctgggaagccaagggccaaactccattgtttcctcgtatatttggtcatga

SEQ ID NO: 285359 - DNA, 208 bp, Glycine max
  unsure (1)..(208): unsure at all n locations
gtgttagccctaaacttcaccttcaaccatgaccacagtgccaccacacagtgtccaagtgcacacaacaacacaccgctacgangccggcgtcgtcccgccggctcgttttgaggcgccgcgttacgaagccggcatcaaggcgccctcttccatttaccattccgagagaggtccgacgacctctcaggttctcgcagttgtcgcc

SEQ ID NO: 285360 - DNA, 270 bp, Glycine max
aaagaatcccaggcgaggagaaagatggaggggaaggagcaggatgtgtcgttgggagcgaacaagttccccgagagacagccgattgggacggcggcgcagagccaagacgacggcaaggactaccaggagccggcgccggcgccgctggttgacccgacggagtttacgtcatggtcgttttacagagcagggatagcagagtttgtggccacttttctgtttctctacatcaccgtcttaaccgttatgggagtcgccggggctaag

SEQ ID NO: 285361 - DNA, 201 bp, Glycine max
tatcaagatgtctttgctttcggatctcatcaacctcaatctctcagaatccacagaaaagatcgttgctgagtacatatgggttggtggatctggtatggacctcagaagcaaagccaggactcttcctgggccagtgagtgaccctgcaaagcttccaaagtggaatacgatggctctagcacagaccaagctccaggg

SEQ ID NO: 285362 - DNA, 274 bp, Glycine max
ggaggattataagcgtcagggttatggtacacaaggtcatcaagaaccaaagacaggtcgtggagctggagccactgaagcacccactctctctggtgctgcagtttcatctgatgcacaagtcgctgccactgatgccattaacagtaaaggagtcccttaattattcacacttcctagaatagatcgttcctttgctaataagaaatcgttttcttaatttggggtggcgttttttaaatgtgtgaacatctcagtaatttgtattattatt

SEQ ID NO: 285363 - DNA, 275 bp, Glycine max
  unsure (1)..(275): unsure at all n locations
caactgaacatgaagacgatttcaaggatgagaagaatccccgccccctcgacgaggatgacatcgcccttctcaaaacctatggtttggggccttattccaccagcataaaaaancccgagaaggaaatcaaagaaatggcaaaaaaggtcaatgatttatgtggtatcaaggagtctgatactggtttggctgcaccaagccagtgggattcttgtttctgataaacaaatgatgcaggaggagcagcctcttcaggtagcaaggtgcacaaa

SEQ ID NO: 285364 - DNA, 271 bp, Glycine max
  unsure (1)..(271): unsure at all n locations
aagaccctccgaaccaacctcgaagacaacggctccatcttcaacaccacctnctgacanccgaggttgtcctccacctcatcgccacctccaaacacagacccttcattcttcgaatcgttgacgcctgtgaaaagctcgaaggggcttattctattgttttcgtcaccgaggacaagcttgtcgccgttcgagaccctttcgggtttaggctttggttatggggagaaggagcaacggtgctgtagtttcgttctgaaacctgcgcgtt

SEQ ID NO: 285365 - DNA, 275 bp, Glycine max
cacacaactactacaagtacttccttacaatcaaaaccaacaacaactatggcaagttatcaaaagcactacgatgatcagggtcgcaaggttgacgagtatggcaacgttgagaagcaaaccgacgaatacggcaaccctgttcatgctgctagtgtcacctatgtagccaccagaactgctgctggtggttacagtgatgacattaataagcaacatgataccaccaatgcctacggcgtagacactggtagacagcattctagtggtggcta

SEQ ID NO: 285366 - DNA, 270 bp, Glycine max
tggaccccctctctctcttttgcaccggagccctcctcgccggcggcctctactggttcgtgtgcgttctgggccccgccgagcagaagggcaaacgcgccaccgatctttccggcggctccatctccgccgagaaagtccaagacaactacaaacagtactggtccttcttccgccgcccaaaggagatcgagaccgccgacaaagtccccgacttcgtcgacaccttctacaatctagtcacagacatctacgagtgggggtggggcc

SEQ ID NO: 285367 - DNA, 269 bp, Glycine max
cagcaagccgccgtgtcgttcctgacgaacctggcccgcgccgctttcgggctgggcgcctccgcgaccctattgagctcctccctctacaccgtcgatggcgggcagcgcgccgtcctcttcgaccgtttccggggcatcctcgacgagaccgtcggcgaggggacccacttcctcatcccgtgggtccagaaaccctacatcttcgacatccgcacccgcccccacaccttctcctccgtctccggaacaaaagacctccagatggt

SEQ ID NO: 285368 - DNA, 259 bp, Glycine max
  unsure (1)..(259): unsure at all n locations
tcccggtgttgtccacctaatttgtctttcagctcttgtgatttgagacggtttttaatcactttgtaccttttaattatgccacaatagttgtccaattctgccagaaataatattgtgtgcgtatatatataagggagtgtccgtctttgtgttatgtacggggtgtggtctgatatattagcaactacatagtcgaggttggaatattttgnattgaatatgatgttttctttatgtatagttaaaatataataga

SEQ ID NO: 285369 - DNA, 257 bp, Glycine max
caactgaagaaccaacaagaggggtattgagattgagattcaagtaatggggaagagcaaggttcttgtggtggggggaactgggtacatagggaggaggatagtgagggcaagcctggcactgggccatgagacctatgtggttcagaggccagagttgagcctccagatagagaagctgcagaggctcctctccttcaagaagcaaggtgctcatctcattgaggcctctttcaatgatcacaagagccttgttg

SEQ ID NO: 285370 - DNA, 255 bp, Glycine max
agttctgccagggcccaacttatcccagatattattcgctgttatagcagtggaggccggacaattgtttttaccgagacaaaagaatctgcttctcagcttgcagggatcttgactggagcaaaagctctccatggtgacatacagcaatcaacacgtgaggttacactgtctggctttaggtctgggaaattcatgacattagttgccacaaatgtggcagctcgaggtcttgatattaatgatgttcagtta

SEQ ID NO: 285371 - DNA, 260 bp, Glycine max
  unsure (1)..(260): unsure at all n locations
gngctagctagctagcaagcaagcacagagatggaggcaaagcgaggccatgccctccatgtgcttggcacgtgtttgcactcttcctctgcgctctaaccctatccgctgctcacggaagcaccacggttcaagacatcgcgagaaagttgaaactcggggacaacgagcttctgcgcacggagaagaagttcaaggttttcatggagattacgggaggagctactccacagaggaggagtatttgcgccgtttggggt

SEQ ID NO: 285372 - DNA, 269 bp, Glycine max
caaagaatcaaagaaaggggtggtggctgcttcgaaagcttaataatttgtttatttccagaacatcatagttttcgcagcagcaaactaacaaattactcatatcatataataagatggcccgttctctctcgcaagccaaacgtattggtgtccttgttgctcaatctatctccctaattcccgttcatcggcgaggttacgcagtggcatccgatgtatcggtaagagttggattgggtaatattgggcgaaggaatggaatcgtg

SEQ ID NO: 285373 - DNA, 267 bp, Glycine max
gcgtgcattccattgttgttgttattgtatcgtagccagagaagaagaagagaagagattcgcggcgaagaaagaaagatgacggaggcacatataaggaagaagcccgggatggcgagcgtgaaggacatgccggttctccaggacggtccaccgccgggcgggttcgctccggtccggttcgcccggcgcatcccgaacaagggccccagcgccgttgccatcttcctcaccaccttcggcgctttctcttggggcatgtaccag

SEQ ID NO: 285374 - DNA, 253 bp, Glycine max
  unsure (1)..(253): unsure at all n locations
ggcccttaagtttcctcctcctaaagtaattcaagtgagtaagtctgcatggatgactgatgaagaatttgcaagagaaatgcttgctggtgtaaatccaaacttgattcgttgtcttaaggatttccctccacgaagcaagctagatagccaagtctatggtgatcatactagtcaaataaccaaagaacacctagagcccaacttagnagggctcactgtagatgaggcaattcaaaacaagagattgttc

SEQ ID NO: 285375 - DNA, 254 bp, Glycine max
  unsure (1)..(254): unsure at all n locations
aaggaagctgctgagatgaacaagaggtctttcaagtatgcctgggtgcttgataagcttaaggctgagcgtgaaagaggaatcacaattgatattgccttgtggaagtttgaaaccncccaagtactattgcacagtcattgatgcccctggacacagggatttcatcaagaacatgatcactgggacatcccaagctgactgtgctgttcttatcattgattccactactggtggttttgaagctggaattt

SEQ ID NO: 285376 - DNA, 232 bp, Glycine max
  unsure (1)..(232): unsure at all n locations
caccattgccatggactccttacaagctccggccntccagcgccttcaattctcccttctggactacaaattctnntgctcctgtttggaacaacaactcctctntaaccgttggagctagaggtccaattctgcttgaggattatcatcttgtggagaagcttgcaaactttgacagggaacgtattcccagancgtgttgtccntgccaggggagctagtgcnaagggtt

SEQ ID NO: 285377 - DNA, 261 bp, Glycine max
ctcagtgaaagagaatccgaggcgaagagaagagaaaaattaagatggaggggaaggagcaggatgtgtcgctgggagcgaacaagttcccggagagacagccgattgggacggcggcgcagagccaagacgacggcaaggactaccaggagccggcgccggcgccactggttgacccgacggagtttacgtcatggtccttttacagagcagggatagcagagtttgtggccacttttctgtttctatacatcatgtctt

SEQ ID NO: 285378 - DNA, 266 bp, Glycine max
  unsure (1)..(266): unsure at all n locations
ttgaggtggaaagctctgacaccatcgacaacgtcaaggccaagatccaggacaaggaaggaatccccccggaccagcaacgtctcattttcgccggaaagcaacttgaggacggccgtacccttgctgactacaacattcagaaggagagtactcttcacctcgtcctccgtctccgtggtggcatgcagatcttcgttaagacactcaccggcaagacnataaccctagaggttgaaagctccgacaccatcgataacgtcaag

SEQ ID NO: 285379 - DNA, 268 bp, Glycine max
  unsure (1)..(268): unsure at all n locations
catagatcaaggtcacgttcgcgttctcgttcaaagagcaaaaggactagtggttttgatatggctccccctgcctctgctatgttgactggtgcttctgctgttgcaggtcagatcactggggcaaatcctacaattcctggaatgtttccaaatatgtttccgttggctacaagtcagatgcagcaatttagtgctctccctgtccagccagtgcaggctatnactcaacaggctacacgacatgctangcgggtgtatgttggag

SEQ ID NO: 285380 - DNA, 253 bp, Glycine max
ctcctttgcactttcctcctcttccttgtgatttttgtttgcatcacagggagaaactgagacacagaagatgagagagataattagtattcatattggacaagctggaattcaggtggggaattcatgctgggagttgtattgccttgagcatggaattaaccctgatggcaccatgcctagtgatacctcagttggtgtagcacatgatgctttcaacaccttcttcagcgagacgggatccggcaagcat

SEQ ID NO: 285381 - DNA, 255 bp, Glycine max
  unsure (1)..(255): unsure at all n locations
gaaaagaagaaaggaaagaattgatcgttnaaaatgcagggaggaaagaaagcgggagagtccattaaggaaacagctacaaacattggtgcttctgccaaggctggcatggagaagaccaaggccactgtccaagagaaggcagaaagaatgacagcacgtgatccggtgcaaaaggagttggcaacccaaaagaaagaggcaaagatgaaccaggcggantggacaagcaggcggcgcgtcacataacacggc

SEQ ID NO: 285382 - DNA, 255 bp, Glycine max
taagtgagaaacaaagaaaggaaataattgatctttgaaaatgcagggaggaaagaaagctggagagtccatcaaggaaacagctgcaaacattggtgcttctgccaaggctggcatggagaaaaccaaggccactgtccaggagaaggcagaaagaatgacggcacgtgatccgatgcaaaaggagttggcaacccagaagaaagaggcatagatgagccaggcagagctggacaagcaggcggcgcgtcacat

SEQ ID NO: 285383 - DNA, 256 bp, Glycine max
  unsure (1)..(256): unsure at all n locations
gatcatacatagtagtgttggtgggttgcaaanctgcttgggggtcttctccataggggtcataagataaaagggacagtggtgttgatgcgcaagaatgtgttggacgtgaatagcgtaaccagcgttgggggaattattggtcaaggtctcgacttagttggctcaacactcgatantcttactgccttcttgggnngatccgtgtctctccagcttattagtgctaccaaagctgatgccaacggaaaagggg

SEQ ID NO: 285384 - DNA, 263 bp, Glycine max
aaagggctgaaagagaagatcgaggagaaaatagagggtgatcatcatcatcacaaggatgaggacacaagtgtccctgttgagaaagttgaggttgttgaaacagcacatgctgaggaaaagaaggggttcctcgacaagattaaggagaagctaccagggcacaagaagacagaggaggccacagctactactcctcctccaccaccacctgttgctcattggagcatggtgaaggtgctcatcatgaaggagaggccaag

SEQ ID NO: 285385 - DNA, 267 bp, Glycine max
cacaaaacaaaaagtttacgttacaaatcgcataataaccgtcctaagtttattgagagaattttgcaagtgtgagaaacatggcatctcgtcaaaacaacaagcaagagcttgatgaaagagcaaggcaaggagagactgttgtcccgggtggaactggtggcaagagcctggaggctcagcaacaccttgctgaaggaaggagcaagggagggcaaacaaggaaggaacagctgggtacagaagggtaccaggaaatgggacgca

SEQ ID NO: 285386 - DNA, 268 bp, Glycine max
cacacaactactacaagtacttccttacaatcaaaaccaacaacaactatggcaagttatcaaaagcactacgatgatcagggtcgcaaggttgacgagtatggcaacgttgagaagcaaaccgacgaatacgggcaaccctgttcatggctggctagtgttcacctcatgtaggccaccagaaactggctggctggtggttacagtggatgaacattaataagcaacatgattaccaccaatggcctaacgggcgtaggaccactgg

SEQ ID NO: 285387 - DNA, 182 bp, Glycine max
  unsure (1)..(182): unsure at all n locations
ccgaatgagagcattaacctcttcttcttccactttcattccaaantgttatnnnnnnnnnnnnnnnnnnnnnnntctcttcgctcttcgatcctcgtccgggggctgctccgaataccaccaccaccacgcgccgatggccacgataggaggcttacgcgactcccaaggctctcagaaca

SEQ ID NO: 285388 - DNA, 253 bp, Glycine max
  unsure (1)..(253): unsure at all n locations
gcattgatgagaccatttgcacaatgagacttcgccaaaacattggtcagaattcatcacctgacatctacaaccctcangctggtagcatcacaaccgccaccagccttgacttcccagccctctggcttctcaaactcagtgcccagtatggatcactccgcaagaatgctatgttcgtgccacactacaccctgaacgcgaacagcataatatacgcattgaatgggcgggcattggtacaagtggtgaa

SEQ ID NO: 285389 - DNA, 260 bp, Glycine max
  unsure (1)..(260): unsure at all n locations
ttcttgctcttttcttttcttcttatccgactcagtcacccctacaaaaccaataaaccttgttgttctacccgttcaaaatgatggttccacagggctccattggtgnaacctccaaaaaagaacccctctaatgcaagtaccagtcctggtggacctcaatggaaatcacttgtgggttaactgtgagcagcagtactcatccaaaacgtaccaagcacccttctgccactccacccaatgctctagagccaacaccc

SEQ ID NO: 285390 - DNA, 251 bp, Glycine max
aaggaaaggttagagttgtgaactgccaagggaatgcagtgttcgacggtgagcttaggaggggacaattgctggtggtaccacagaacttcgtggtggcggacaagccggagaacaaggattcgaatacatagtattcaagacacaccacaacgcagttcactagctacttgaaggatgtgtttagggcaattccctcagaggttcttgcccattcttacaaccttcgacagagtcaagtgtctgagctt

SEQ ID NO: 285391 - DNA, 250 bp, Glycine max
tacactgcgacttgaaaccagagaatattttggttaaaagctatagtaggtgtgaggtgaaggtcattgatcttggaagtagttgttttgaaacagatcacctttgctcttatgttcagtcaaggtcctatcgtgctcctgaggttattttgggacttccatacgacaagaagattgatatctggtctcttggctgcatcttggcagaactttgtactggcaatgtcctcttccaaaatgattcacctgc

SEQ ID NO: 285392 - DNA, 251 bp, Glycine max
  unsure (1)..(251): unsure at all n locations
gttgcagaccgagctagctagctagcaagcaagcacagagatggaggcaaagcgaggccatgccctcatgtgcttggcacgtgtttcactcttcctctgcgctctaaccctatccgctgctcacggaagcaccacggttcaagacatcgcgaganagttgaaactcggggacaacgagcttctgcgcacggagaagaagttcaaggttttcatggagaattacgggaggagctactccacagaggaggagt

SEQ ID NO: 285393 - DNA, 252 bp, Glycine max
  unsure (1)..(252): unsure at all n locations
gatagcgatgatgttgtttgccatgaactgtaactgcactagtgttggccacatgccttcaaccaaagaggaaggtcacgattttcaggnggctaaagccaagacaacacaaactgcgaacaaggccatggaaactggtaaagatgggaaagaagccgcagagtcatggacagaatgggctaaagagaaactcactgaaggtcttggcttcaaacatgatcaagaatccaccactaagaaagtctctgacta

SEQ ID NO: 285394 - DNA, 255 bp, Glycine max; identical to SEQ ID NO: 115495

SEQ ID NO: 285395 - DNA, 262 bp, Glycine max
cacaactactacaagtacttccttacaatcaaaaccaacaacaactatggcaagttatcaaaagcactacgatgatcagggtcgcaaggttgacgagtatggcaacgttgagaagcaaaccgacgaatacggcaaccctgttcatgctgctagtgtcacctatgtagccaccagaactgctgctggtggttacagtgatgacattaataagcaacatgataccaccatgcctacggcgtagacactggtagacagcttctag

SEQ ID NO: 285396 - DNA, 250 bp, Glycine max
cattctcccatttcctctcagaaccctcgatcactcccacgcgctcctatatcctctccttcaccgtcgctctctccaacgatcacaacaacatcgtcatcccatggcaaacgccgcatctggtatggcagtccatgatgactgcaagttaaggtttttggagctgaagacaaagaggacacaccgtttcatagtttttaagattgaggagcagcagaagcaggtcattgtggagaagcttggtgagcca

SEQ ID NO: 285397 - DNA, 249 bp, Glycine max
aaatggggtcctatctgggtgttgctgcagcctcggctaatcctcctcattttatccatctatgttacaaacctctgagtggacctgtcaatgtcaagttggcattagttggaaggtttgacttttgacagtggtggctacaacatcaagactggacctggctgttcaattgagctcatgaaatttgatatgggtggttcagcagcagttttaggaacagcaaaagctctcggtcaaatcaaacctctt

SEQ ID NO: 285398 - DNA, 255 bp, Glycine max
  unsure (1)..(255): unsure at all n locations
gaaccncaaagctgggttacggtncccaactncgcgctaacctanaccccacaaanggtgttggtcgattaanacagcagnacggnggtcatngaagtcgaaatccgctaaggagtgtgtaacaactcacctgccgaatcaactagccccgaaaatggatggcgctaaagcgcgcnacctatacccngccgtcnggcaccaaaccaanccccnatgantaganggcgcggcggncgcngcaaaacccaggcgcnc

SEQ ID NO: 285399 - DNA, 258 bp, Glycine max
ggcttccatcctccactactttttagccctctctctttcttgctcttttcttttcttcttatccgactcagtcacccctacaaaaccaataaaccttgttgttctacccgttcaaaatgatggttccacagggctccattgggccaacctccaaaaaagaacccctctaatgcaagtaccagtcctggtggacctcaatggaaatcacttgtgggttaactgtgagcagcagtactcatccaaaacgtaccaagcacc

SEQ ID NO: 285400 - DNA, 189 bp, Glycine max
gtgttagccctaaacttcaccttcaaccatgaccacagtgccaccacacagtgtccaagtgcacacaacaacacaccgctacgaagccggcgtcgtcccgccggctcgttttgaggcgccgcgttacgaagccggcatcaaggcgccctcttccatttaccattccgagagaggtccgacgacctctca

SEQ ID NO: 285401 - DNA, 244 bp, Glycine max
  unsure (1)..(244): unsure at all n locations
ttcaaaccttgctctatactacncagtacacacactagaagaataatggcttccatcctccactactttttagccctctctctttcttgctcttttcttttcttcttatccgactcagtcacccctacaaaaccaataaaccttgttgttctacccgttcaaaatgatggttccacagggctccattgggccaacctccaaaaaagaacccctctaatgcaagtaccagtcctggtggacctca

SEQ ID NO: 285402 - DNA, 254 bp, Glycine max
  unsure (1)..(254): unsure at all n locations
actacaagtacttccttacaatcaaaaccaacaacaactatggcaagttatcaaaagcactacgatgatcagggtcgcaaggttgacgagtatggcaacgttgagaagcaaaccgacgaatacggcaaccctgttcatgctgctagtgtcacctatgtagccaccagaactgctgctggtgnctacagtgatgacattaataagcaacatgataccaccaatgcctacggcgtagacactggtagacagcttct

SEQ ID NO: 285403 - DNA, 259 bp, Glycine max
  unsure (1)..(259): unsure at all n locations
cagcacagaagaccaaagattatgctactcagaagactaaggactatgcaagtgatgcaactgatgctgcaaaaaaagactaaagattatgctgctcagaagaccaaggattatgcaagtgatgcaactgatgctgcaaaaaagactanggnttatgctgcgnagaagaccaaggactatgccagtggtggtgcncagaagaccannggactatgccagtggtgctgcgcagaagaccaaggactatgcaagtgatgct

SEQ ID NO: 285404 - DNA, 248 bp, Glycine max
  unsure (1)..(248): unsure at all n locations
actacaagtacttccttacaatcaaaaccaacaacaactatggcaagttatcaaaagcactacgatgatcagggtcgcaaggttgacgagtatggcaacgttgagaagcaaaccgacgaatacggcaaccctgttcatgctgctanntnncacctatgtagccaccagaactgctgctggtggttacagtgatgacattaataagcaacatgataccaccaatgcctacggcgtagacactggtagac

SEQ ID NO: 285405 - DNA, 164 bp, Glycine max
  unsure (1)..(164): unsure at all n locations
gcgccactcgatgtttccatttgcctgcatgccnttggnattntggggtgtggttcgtttagtggtgtcaagtcttgcgaacgtnngggtgcatnagtggtaatcgggatgtttttgttgcacggctccatgcttgcgcatgcaacgtgtgacatgcatccttt

SEQ ID NO: 285406 - DNA, 247 bp, Glycine max
  unsure (1)..(247): unsure at all n locations
gaagaataatggcttccatcctccactactttttagncctctctctttctttgctcttttcttttcttcttatccgactcagtcacccctacaaaancaatanaccttgttgtnctanccgttcaaaatgatggtnccacagggntccatnggncccaanctccaaaaaagaacccctctaatgnnagtaccagtcctggtggacctcaatggnaatcacttgngggttaactgtgagcagcantac

SEQ ID NO: 285407 - DNA, 255 bp, Glycine max
  unsure (1)..(255): unsure at all n locations
caatatgcaaacaaatatagactcccggaaggcttaaaggagcaaatgttggcacacatgcaattgaaatttcagactgcagagttacagcaagaagtgttgcaagacctacctaaaacaataagatccagcattgctcggcatcttttccaaaacatagttgaaacaacatatttatttaaaggagtctctgatgattttatcacccagcnggtaaagcttttncctanatttnctntnatttgtgtcttttag

SEQ ID NO: 285408 - DNA, 244 bp, Glycine max
  unsure (1)..(244): unsure at all n locations
ggcaaagcgaggccatgccctcatgtgcttgncacgtgtttcactcttcctctgcgctctaaccctatccgctgctcacggaagcaccacggttcaagacatcgcgagaaagttgaaactcggggacaacgagcttctgcgcacggagaagaagttcaaggttttcatggagaattacgggaggagctactccacagaggaggagtatttgcgccgtttggggattttcgcccanaacatggtc

SEQ ID NO: 285409 - DNA, 255 bp, Glycine max
  unsure (1)..(255): unsure at all n locations
cacacacaactactacaagtacttccttacaatcaaaaccancaacaactatggcaagttatcaaaagcactacgatgatcagggtcgcaaggttgacgagnctggcaacgttgagaagcaaaccgacgaatacggcaaccctgttcatgctnncagtgtcacctatgtagccaccagaactgctgctggtggttacagtgatgacattaataagcaacatgataccaccaatgcctacggcgtagacactggta

SEQ ID NO: 285410 - DNA, 254 bp, Glycine max
  unsure (1)..(254): unsure at all n locations
gaaagaacttccttataaccaaaaccaacaacaactatggcaagttatcagaagcactacgatgatcagggtcgcaaggtcgacgagtatggcaatgttgagaggcaaactgacgaatatggcaacccggttcatgccactagtgtcacttatgtngccaccaaaagtgttggtggctacaatgatgacgctaatangcaacntgatatncctggtgtctatcccgagaaagacaccggtagacatcattttgg

SEQ ID NO: 285411 - DNA, 246 bp, Glycine max
  unsure (1)..(246): unsure at all n locations
gaaaagaaaagctgagaagatatatacatatatacgagagagtgagtnatcgagaaagagaagaagcatatatatcaaaatggctgcagagatggagagggagtcattgataactgaagctcctaatgcaccagttactgcacagagaagggtcagaaatgacttagaaaattctctaccaaaaccatacttgccaagagcattgaaagctcctgatacgggtcaccaatggaacagcagccacgg

SEQ ID NO: 285412 - DNA, 246 bp, Glycine max
  unsure (1)..(246): unsure at all n locations
atttaaaggccggcgagtagtcactttccacaaccagagagacttcatattcttccggcatcatcggtatatttttgaaaccaaagaagttaaaaaagcagagtccaaaggtaaaaaggacaaagatggcgagagtgagaatgttnctgaacagaaaacaattgcccgacttcaggaatgtggtcctcgtttcacattaaaattgattagcctgcagcatggaacatttgacaccaagggtgggga

SEQ ID NO: 285413 - DNA, 244 bp, Glycine max
  unsure (1)..(244): unsure at all n locations
actacaagtacttccttacaatcaaaaccaacaacaactatggcaagttatcaaaagcactacgatgatcagggtcgcaaggttgacgagtatggcaacgttgagaagcaaaccgacgaatacggcaaccctgttcatgctgctagtgtcncctatgtagccaccagaactgctgctggtggttacagtgatgacattaataagcaacatgataccaccaatgcctacggcgtagacactggta

SEQ ID NO: 285414 - DNA, 242 bp, Glycine max
  unsure (1)..(242): unsure at all n locations
atcatcacatgcttcatgaactcatgggagttgatcctggaactaaccctgtttgccatttccttggaagcaaggccattttatgggtacccantttatctatggacactgcctatcagactaacgttgttgtttaattagtccatgcatctgcatcttgggcaccataagattgtatataaaataaattatggtgtgttgtgtagttgtgcaagacctggaattcacctttctacgtacgt

SEQ ID NO: 285415 - DNA, 253 bp, Glycine max
  unsure (1)..(253): unsure at all n locations
gcaagaaagggggccacttgcattggtacacaaggtataagattgctgtggagncttcaaagggcctttgctatctacaccatgactgttcaccactcattgtccatagagatgttaaatccaacaacatccttcttgattccaattttgaagcacatgttgctgattttgggctcgctaaattcctgcaagattctggagcatctgaatgcatgtctgctattgctggttcttacggatacatagctccaga

SEQ ID NO: 285416 - DNA, 254 bp, Glycine max
  unsure (1)..(254): unsure at all n locations
tatactctctctagagtaattgcggaatcagctaganttttctaataatggccaaagacgttgagcaggttacagagcaaggtgaatactccgcgaaggattaccatgacccacctccggcgccgttgatcgacccagatgagctcnctaagtggtccttntacagagccgccatagctgagttcatagcaacnctccttttcctttacatcaccgtgttgaccattattggctacaagagacagagtgacacc

SEQ ID NO: 285417 - DNA, 249 bp, Glycine max
cagatttgagccttttatattatcatggcttctaaggtggtttcggttttggttatagcgatgatgttgtttgccatgaactgtaactgcactagtgttggccacatgccttcaaccaaagaggaaggtcacgattttcaggagtctaaagccaagaccacacaaactgcgaacaaggccatggaaactggtaaagagggacaagaagccgcagagtcatggacagaatgggctaaagagaaactcagt

SEQ ID NO: 285418 - DNA, 242 bp, Glycine max
  unsure (1)..(242): unsure at all n locations
agaaaacctaagcttagaattagaaacaaagaaaagaagaaaggaaagaattgatcgttgnaaatgcagggaggaaagaaagcgggagantccattaaggaaacagctacaaacattggtgcttctgccaaggctggcatggagaagaccaaggccactgtccaagagaaggcagaaagaatgacagcacgtgatccggtgcaaaaggagttggcaacccaaaagaaagaggcaaagatgat

SEQ ID NO: 285419 - DNA, 246 bp, Glycine max
  unsure (1)..(246): unsure at all n locations
tgaganacaaagaaaggaaataattgatctttgaaaatgcaggncggaaagaaagctggagagtccatcaaggaaacagctgcaaacattggtgcttctgccaaggctggcatggagaaaaccaaggccactgtccaggagaaggcagaaagaatgacggcacgtgatccgatgcaaaaggagttggcaacccagaagaaagaggcaaagatgagccaggcagagctggacaagcaggcggcgcgt

SEQ ID NO: 285420 - DNA, 249 bp, Glycine max
  unsure (1)..(249): unsure at all n locations
cttcttctctggttgattcggatctagagtcttcagtttctcctcgttgttcttcgctttcctgttttcaatttcgattctttcgttaatttaataagatgtttgggagggcaccgaagaagagcgataatacgaggtactacgaaatcctcggcgtctccaagaacgcttcgcaggatgatctgaagaaggcttacaagaaagcngccattaagaatcaccccgacaagggcggtgatcccgagaagt

SEQ ID NO: 285421 - DNA, 244 bp, Glycine max
ctggagagtacaaggattataccgctgagaaggctaagaatgctaaagataccactgtgcagaaagctggagaatacaaggattataccgctgagaaggcaattgaagggaaggacagtgcagtggggaagcttggggagctaaaggaatctgctgctgatgctgctaaaagggctatgggtttcttcaccggtggcaacaaagaccaaactagagaggaggaggaggaaacgaggcggagtat

SEQ ID NO: 285422 - DNA, 246 bp, Glycine max
  unsure (1)..(246): unsure at all n locations
ctcagaaggagggaaccggaagcatcgtgtttacagcaataggngaaacagtaagcantgccggtgagaaggtaaagaaaccgtttaaaaacactatgggaggagaaagtgaaggaggcggagggaaagaagaggggaagagtgtcattggtaaaagtttgaccagcattggtgagaagctgggtgatgcaaaacagagagaggagctnntagacaacgtcactggcaacatcaccgagggaggag

SEQ ID NO: 285423 - DNA, 261 bp, Glycine max
  unsure (1)..(261): unsure at all n locations
ggccataaccttcttcttttgcactacaaatcagttttttacttgaattttcttcatccttctctgttctcctagaacttgattacttgaacattccctatgacagatgaggtggttcttctggatttctggccangtccatttgggatgagggtcaggattgcacttgctgaaaagggtatcgaatatgagtacaaagaagaggacttgaggaacaagagtcctcttctcttacaaatgaacccggttcacaagaagatt

SEQ ID NO: 285424 - DNA, 252 bp, Glycine max
attctttctctcaaccgatttatctgagtgaggggtttggccaatgacgagtggttttggtgaatccaacgagagcgtctgcaccgagcccatcatgctcggggaacagttcaaacgatgccggtgattttgaatgcaacatatgcttcgatttggcgcaagaccctgtgatcacactctgtggtcacctattctgttggccatgcctttataggtggctccaccatcactcccattctcaggaatgccctg

SEQ ID NO: 285425 - DNA, 252 bp, Glycine max
gcggtttcctttgttggtgttgctgggaactgttttcctggcatcagtttgtgtctcattaaaggtgagagaggatgagaataaccctttctacttgagaagctctaacagcttccaaactctctttgagaaccaaaacggtcgcattcgtctcctccagagattcaacaaacgctccccacaacttgagaacacttcgagactaccggattgtccagtttcagtcaaaacccaacacaatccttctccccc

SEQ ID NO: 285426 - DNA, 260 bp, Glycine max
  unsure (1)..(260): unsure at all n locations
gcctcacaaaagcaaagatcaaacaaaccaaggacgagaacacgatgttgcttgaacttgcacttggtttattggttntggctctgtttctgcacttgcgtcccacaccccactgcaaaaagcaaaagcacttcgccatctcccaaacccaccaagcccaaagcctcgtcttcccntcataggagcaccttcanctcttaaaagacaaacttctncantaangcaattcagggacctnttccaaaaaaaaaagggncctt

SEQ ID NO: 285427 - DNA, 245 bp, Glycine max
  unsure (1)..(245): unsure at all n locations
ataaaattcttccaccaagttatgggntttccttggtgttggcttcttttctccctcttangtctctcttctagttccancatatcaactcatcgttccatattgggaccttggacctaaccaagtttaccacacanaaacaggtgtcttcactgttccaactatggaagagtgagcatgggacgtgttaccataaccacnaagaacanggcaaagagacttggacattttcaagaataattgaa

SEQ ID NO: 285428 - DNA, 245 bp, Glycine max
  unsure (1)..(245): unsure at all n locations
atgctgnantactcacnccaccgctacatacaccactgtcccgtgttgggtcatntaaaatnttgacggccaaagctattgaggctaatgatgggaaccccctgccactgnatcagaaagctctatgtgggctgantgnggtgctatnggagcaactgttggtagtncagcanatttggcantcattcggatgcaggttgatgcaacattacgtgctgntcagcgccgaaattacactaatgnnt

SEQ ID NO: 285429 - DNA, 243 bp, Glycine max
  unsure (1)..(243): unsure at all n locations
agnaatcccccaataaatanagaagcgaanaaaccaaacccaaaccatccgagtgncgttgagcccccaccgtaagtagagctatgtccgttgcgcaggcgaaccttgctcaaggtcattgttctcggcgacagcgggttggaaanacctcgttgatgaancaatacgngcacaanaagtttagtcancaatataaggtaccantggagctgattttgnnaccaaagagcttcagattgacgg

SEQ ID NO: 285430 - DNA, 235 bp, Glycine max
  unsure (1)..(235): unsure at all n locations
gcgccgatagccagtcgtacntgctgatnccgnatgtnctgtcncctgcnattagccgcagatgcacgatgttgcatccctggctatggttttcttgcggagaatgctgtgtttgttgaaatntgcagggaacatggaatcaactttattgggncccaaccctggccagtattnggggttatgggtgacaaagccaactgnccagaacagnacantggnaagaaaantcaggttt

SEQ ID NO: 285431 - DNA, 267 bp, Glycine max
  unsure (1)..(267): unsure at all n locations
gnngtcttttnctgctctttggaaaaagtagggtctttgcttgattttggangntgtctctgctctcagatctcaacaanctnaancntcancgataccaccgagnaggtgancgcagantacatntgnttcngtgnatcaggagtngaacctgtggagcanggcntggactctcccangancagttagcgaccctacagaagcttcccaagtgggactnngntgnttccaagcgcnggtcaagctnctggtgaaanacagtgaaat

SEQ ID NO: 285432 - DNA, 260 bp, Glycine max
  unsure (1)..(260): unsure at all n locations
aaagtattgtgcagcaaagtacagagattgaagggaagggagctgatggaaaagatcgngacttgtncaaaaaattgnaaggaacttctgcaaatacaggttccaaagcangagaaagnngaaaggcaggctcaggttcaggcaatgatggcatatccgcaaagtgcnngaaagtggttcanagggttcatcaaatgctagtgatganaatactaaccaacaggaatnagctgcaaaaaagaanggaantttganctgat

SEQ ID NO: 285433 - DNA, 246 bp, Glycine max
  unsure (1)..(246): unsure at all n locations
tgcagttntgctccgcaattatcatgggcaaggtcaanatcggaatcaacggatttggaagaattggncgtttggtancanagtggctctgcagagagacgatgttgaactcgttgccgttaacgacctttcatcaccaccgattacatgacatacatgttnaaatacgacagtgttnatggacactggaancatcacgatgtcacgttaaggacgagaagacgcttctnttcggtgacaanccag

SEQ ID NO: 285434 - DNA, 249 bp, Glycine max
  unsure (1)..(249): unsure at all n locations
attnaatctncanaattcncngacaagagatctttttctgctccnttgaanaaagaagggtntttgnttgattttggagangtctctgctctgagatctcatgaaccttaacccgtacgatanccaccgagaaggtgatcgnagagtacatatggatcggtggatcaggaatggacctgaggagcaaagcaaggatctcccaggaccanntagngaccntcagagttcccaantggaantangatngnc

SEQ ID NO: 285435 - DNA, 272 bp, Glycine max
  unsure (1)..(272): unsure at all n locations
ggggaaacagattgtgccggtgaaatcagtgatctacgcgctctcccctttccagcagnagataatnccgggncnctggaaggacnngcccacaaagattcaccacaaggtctccganaattggatcagcgccactnctcttgcttggtcccctcgtcggaacctacacgtaagtctctctctctctntgaattagggtttcgctgctatctctgttttgcgcgatgattatgtatgtacatgnntgnggttanaagggngaacgcaaaacc

SEQ ID NO: 285436 - DNA, 267 bp, Glycine max
agagtgaagagcgaagagaatggctcccaagggtttaatctttttggctgtgttatgcttctcagcactgtcactgagtcgttgtcttgcggaggataatggacttgttatgaacttctacaaggaatcatgccctcaggctgaagacatcatcaaagaacaagtcaagcttctctacaagcgccacaagaacactgctttctcctggctcagaaacatcttccatgactgtgctgttcagagttgtgatgcttcactgttgctgga

SEQ ID NO: 285437 - DNA, 265 bp, Glycine max
  unsure (1)..(265): unsure at all n locations
acactgtactggttgatgcgctctcacgacgcattcccttggtcagtgacagacctacaattatttttggagctgatgtgactcatccacatcctggagaggattcaagtccatcaattgcagcagttgtggcttcgcaagactatcctgaaattacaaagtatgctggtttagtttgtgcccaagctcataggcaggaactcatccaggatcttttcaaacaatggcaagatccagtcagagggcacngtgactggtggantga

SEQ ID NO: 285438 - DNA, 265 bp, Glycine max
  unsure (1)..(265): unsure at all n locations
ctgtgataagctcttctgacaagaagaancaagaggcacttgaacaccttggagctgatcaatatctcgttagctnctgatgccactgccatgcaggaagctgctgattcacttgactacatcattgacactgtgcctgttggtcaccctcttgagccttatctctccttgctcaaacttgatggcaagttgatcttgatgggggtcatcaacacccctcttcaatttgttagccccatggtcatgctagggaggaagtcaataa

SEQ ID NO: 285439 - DNA, 262 bp, Glycine max
cggaaatatagagctgaattgtctgaacaagatatatttgtaatcccagcaggttatccagttgtggtcaacgctacctcagatctgaatttctttgcttttggtatcaatgccgagaacaaccagaggaacttccttgcaggttcgaaagacaatgtgataagccagatacctagtcaagtgcaggagcttgcgttccctgggtctgcaaaagatattgagaacctaataaagagccaaagtgagtcctactttgtggatg

SEQ ID NO: 285440 - DNA, 268 bp, Glycine max
  unsure (1)..(268): unsure at all n locations
ctggattcagattccatccaacagatgaagacactcgtcatccactacctttgtccgcaaatgcgcttcgcaacatatncgcggttcccataatcgccgaaattgatctgtacaagtacgacccttgggaccttccaggaatggctttgtacggagagaaagagtggtattttttcacgccgagggaccgcaagtacccgaacggttcgcggccgaaccggtccgcgggaacgggtactggaaggcaaccggagcggataaaccagtt

SEQ ID NO: 285441 - DNA, 265 bp, Glycine max
gattatcctaagtctttgggaatagtgctgcaatggcttcaagtcaggaggaggtgacccttttgggagctactggaagcccatttgtgtgcagggttcatattgccctcaagttgaagggagttcaatacaaatatgtcgaagaaaatttgaggaacaagagtgaactgcttctcaaatccaacccagttcacaagaaggttccagtgtttattcacaatgagaagcccatagcagagtctcttgtgattgttgaatacattga

SEQ ID NO: 285442 - DNA, 267 bp, Glycine max
gagaaaactactgagaaggagatctctgatgatgaggatgaggaagagaagaaggatgaggagggtaaggtggaggatgttgacgaagagaaggagaaggaagaaaaaaagaaaaagaagattaaggaagtgtcacatgaatggtccttggtgaacaagcagaagcccatttggatgagaaagcctgaggagatcacaaaggaggagtattctgctttctacaagagtctcaccaatgactgggaagagcatttggctgtcaagcac

SEQ ID NO: 285443 - DNA, 264 bp, Glycine max
  unsure (1)..(264): unsure at all n locations
gaaataattgatctttgaaaatgcagggnggaaaganagctggagagtccantcaaggaaacagctgcaaacattggtgcttctgccaaggctggcatggagaaaaccaaggccactgtccaggagaaggcagaaagaatgacggcactgatccgatgcaaaaggagttggcaacccagaagaaagaggcaaagatgagccaggcagagctggacaagcaggcggcgcgtcagcataaacacggcggcgaacagggctgccacg

SEQ ID NO: 285444 - DNA, 261 bp, Glycine max
  unsure (1)..(261): unsure at all n locations
gcaaacatctttaccttaagcgacaacaatggccgatgccgaggatattcaacccctcgtttgcnataatggaaccggaatggtcaaggctggttttgccggagatgatgcgccgagggcggtgttccccagcattgtggggcgtccacgtcacacgggagtnatggttgggatggggcagaaggatgcgtatgttggggacgaggctcaatccaagaggggtattttgactctcaaatacccattgagcatggattgtga

SEQ ID NO: 285445 - DNA, 271 bp, Glycine max
tgataaatggacaggagatgccattatttattcccaccttggtggagaagtggtttaccttccaaaggatgcatccatcccagttaccttgaaaaccagagaatatgaagttttcacaatagttcctgtgaaggaattgagcaatggtgtcaaattttctcctattggtttaataaagatgttcaattcaggaggggctgtcaaagagtttagttggggatctaatgaaagtacaaatgtagccgtaaaagttcccggttgtggccaattt

SEQ ID NO: 285446 - DNA, 262 bp, Glycine max
gttacgcagtggcatccgatgtatcggtaagagttggattgggtaatattgggcgaaggaatggaatcgtgggaggtgtagaagagaagcctgatacaagagatggttcaaaagcctactcaactgattgggccccagacccagtaacaggttactataggcccattaaccacacccctgaaattgacccggtggagcttcggcataggttgctccgatcacctccactagagcctagaggagttgctggacacccatgaca

SEQ ID NO: 285447 - DNA, 257 bp, Glycine max
  unsure (1)..(257): unsure at all n locations
anaganaggaaataattgatctttgaaaatgcagggaggaaagaaagctggagagtccatcaaggaaacagctgcaaacattggtgcttctgccanggctggcatggagannaccaaggccactgtccaggagaaggcagaaagaatgacggcacgtgatccgatgcaaaaggagttggcaacccagaagaaagaggcaaagatgagccaggcnncgctggacaagcagggggcgtgtcanntaacngggcggcgag

SEQ ID NO: 285448 - DNA, 257 bp, Glycine max
gttgattgcagttgagagagttgtaatgagtaacgaatacgattatctgttcaagcttctcctaatcggcgactcttccgttggaaaatcctgcttgcttctcagattcgctgatgactcctacgtcgacagctacataagtaccattggagttgatttcaaaatcagaaccgtggagctggaaggaaaaaccgtcaagctgcagatttgggatacagctggacaggagcgattcaggactataacaagcagttact

SEQ ID NO: 285449 - DNA, 257 bp, Glycine max
  unsure (1)..(257): unsure at all n locations
gttggtgttcaatatggaatattgagttcaaagatgaacaacaaacagtggaagnaaagggtaaaatgcaggtcggtgcccattattttgaggaaggaaatgtgcagttagntgcaaaacatgaatgcaaagatgcaactctttttcaggcccctgaagattgtgcacttgccataacaagcattattcgtcaccatgaaacagagtaccttgcttctcttgaggcatcatatctaanccttcctgattctactttc

SEQ ID NO: 285450 - DNA, 261 bp, Glycine max
gttagcctcttcttgtttctcctgcaatcaacgacacccccccaaaaatgacaggagagacagtgaacccaaaagcttaccctttggccgatgcgcaactcgcaataacaatactggatcttgtgcaacaagctgccaactacaagcaactcaaaaagggtgctaatgaagcgaccaagacactgaacagaggcatctctgagttcgttgtgatggccgcggacactgagcctcttgagattcttctccatcttcctctcc

SEQ ID NO: 285451 - DNA, 220 bp, Glycine max
  unsure (1)..(220): unsure at all n locations
gagagagtattngcgcttcatcaagatgggtatntctagggattccatgcacaagacgcgtgccactggtggcaagaaaaaggcttggagaaagaagagaaagtatgagcttgggcgtcaggcagcaaacaccaagttatcaagcaacaagacaatcaggaggattcgtgttagaggtggcaatgttanatggagggcttgacgctggntactggctatt

SEQ ID NO: 285452 - DNA, 262 bp, Glycine max
  unsure (1)..(262): unsure at all n locations
ggnatggcactgttgcatggntccttgntgctatagaaagacacaattttnagtcacctcctcctgtggcaattcttccccttggcaccggaaatgatttgtccagggtacttaactggggaagaggcttctctacacttgatggacaangcggattgactatgcttttgcatgacattagcaatgcagcagttactatgctagatcgctgggaagtaaaaatcgtagaaganagttctgaagganaatcananaaagtgaa

SEQ ID NO: 285453 - DNA, 263 bp, Glycine max
  unsure (1)..(263): unsure at all n locations
gtttctctncctcccttgnanaaaaagaagagccaccgctgcgacgccgttcgtnncatttttgaggtgccgctgtcatgtttgggcgtggtggaccaaggaggagtgataactccaaatattatgatattctcgggatttccaaaaatgccagtgaanatgaaatcaagaaggcctatagaaaggcggctatgaagaaccatccagatnagggaggagatcctganaagtttaaggagttaggtacaagcacatgaagtttt

SEQ ID NO: 285454 - DNA, 257 bp, Glycine max
  unsure (1)..(257): unsure at all n locations
aagattcgaaacgaagaaaganagcgttgtgaagaatggcggaagagggacaagtgatcggtgtccacagcgtagaggagtggaaggaacatctcaagaagggagaagagtccaagaaattgattgtggtggattttactgcttcttggtgcggtccatgccgnttcattgccccaattcttgcagagtttgctaaaaagttgccgaatgtcaccttcctcaaggtggatgtggatgaattggagactgtttccaag

SEQ ID NO: 285455 - DNA, 279 bp, Glycine max
  unsure (1)..(279): unsure at all n locations
tcgaggttgcagaccgagctagctagctagnnagcnagcacagngatgnaggcnaagcgnngccatacnatcatantgattggaacgtagtttcataatcacactgtgnntctaaccctntccgctgctcacgggnagcaccacggttcaagacattcgcgagacagttgaaactcggggacaacgagcttctgcgcacggagaagaagttcaaggttttcatggagaattacgggaggngctaattccacagaggaggngtatttgcnccgtttngng

SEQ ID NO: 285456 - DNA, 263 bp, Glycine max
  unsure (1)..(263): unsure at all n locations
cgttttcctgaatcggtgtgaacaatggcgacgtacgctgcgatgaaacccaccaagccagggttggaggagtcccaggnacagatccataagataaggatcaccctttcttccaagcacgtcaaaaacctcgagaaggtttgtgcggacttggttcgtngngcaaaggacaagcgcctcagggttaagggacctgttaggatgcccactaaggttcttcacatcataccaggaagtccccctgtggtgaaggtaccaacaca

SEQ ID NO: 285457 - DNA, 256 bp, Glycine max
  unsure (1)..(256): unsure at all n locations
gcacatgtcgaacgggacattgtattcattgttgcataagaatggtggcggtgcattggattggttgatgaggtttaggattgcattgggtgtggccagggggctcgcntggctgcaccatggctgccaccctccgattatacagcagaacatttgctccagtgtgattcttgtcgacgaggagtttgatgcccggttgatggactttgggcttgcgaggctcatggcttcagactcaaatggtagttttgtgaat

SEQ ID NO: 285458 - DNA, 254 bp, Glycine max
ggttattgtattctgtgttactgggatggtgacatcactcatgtataaccttcttcgggaaatgaaaatgaatgttagggagatacattctcgaaaacctcagctctatcgaactcgtatatcagatgagttcagggaatccaaacaattgattcttgtctcatctgatgtttcatcgcggggaatgaattatcctgatgttaccttagtcatacaggtgggaattccttctgaccgtgaacaatacatacacc

SEQ ID NO: 285459 - DNA, 256 bp, Glycine max
gatatttgagcttaaaccctagccgctcttctcttcattcttcactttggaaacaatcataatggcgttctgtaataaggttggaaatgtcttgaggcagggtgctgctcgcagcacacatgcccctgttgcgtccatgcttaattacatccgctgcatgtcttcaagcaagcttttcattggaggcctttcatatggagttgatgaccagtctcttaaggatgcattttctggctttggagatgtggttgatgca

SEQ ID NO: 285460 - DNA, 269 bp, Glycine max
agaaattgctttgctgtaagtttctgattcctttcttcagaattccaagttttcatttcgttagggacaaaagattgtgagatagagtatggctggaaaaggcgagggtcctgctatcggaatcgatttgggaacgacgtactcttgcgtcggcgtgtggcaacacgatcgtgttgaaatcatagccaacgatcagggtaatagaactaccccatcctacgtggctttcaccgatacagaacggttgatcggcgatgcggcgaagaaac

SEQ ID NO: 285461 - DNA, 258 bp, Glycine max
  unsure (1)..(258): unsure at all n locations
ttgatgtcacattctctgatattggtgccttagatgagaccaaagaatcccttcaagaactagtaatgcttcctctnagaaggccagaccttttcactggangccttctaaagccttgtagaggaatattgctgtttggacctcctggaactgggaagacaatgctggcaaaggccattgcaanggcggcggagnaagtttcangcaatnggnccntggnctgaccnncanttnctaantggtttggtgaagatgtca

SEQ ID NO: 285462 - DNA, 254 bp, Glycine max
  unsure (1)..(254): unsure at all n locations
gggaagagaaattcatcattcattcccaatgactcttttncagcctcacactactcgtctggaccataaaacactgaagcttctcaaaaactggacttggcaatttgtngtgatacgtccagtgtgctcaatcttgatgataactctacagtatcttgatgtttatcccacttgggtcagctggataaacacagtcattctgaacatttcagtgtcactggcattgtattctcttgttgttttctaccatgtgt

SEQ ID NO: 285463 - DNA, 258 bp, Glycine max
accgtaccgtgttgcctctctgcaatctacagccaaaatgcctttcaagaggtacgttgagatcgggagggttgcccaaatcaactacggcaaggaatatggcaggctcgtcgtcattgtcgacgtcattgatcagaacagagctcttgtccgatgcccctgatatggtgaggtcccaagtcaatttcaaaaggctttccctaaccgatattaagattgacattaagagggtccctaagaagaaagatcttgtcaaag

SEQ ID NO: 285464 - DNA, 262 bp, Glycine max
  unsure (1)..(262): unsure at all n locations
ccgcaccagtttcaccgcacgaatatcttgttgtttggagcgatccgagaaaaactctgtaaacatgttggtttaccaggacctccttacaggtgatgagcttctctctgactccttccgttacaaggaaattgagaatggaatgctgtgggaagttgaggggaagtgggttgttaaaggagcagttgatgtagacattggtgcaaacccttctgctgagggtggaggngangatgagggattgatgatnccanctntnang

SEQ ID NO: 285465 - DNA, 266 bp, Glycine max
  unsure (1)..(266): unsure at all n locations
gtatganattgatattcctctgagattcatagcctctgtgggcaccagagtgcatgggttggcatgttggtttgatgtgctattcaatggaagtactgtgcaaaggtggcttaccactgctcctgggtcaccgacaacccattggtaccagttgcgctgtgttctctctcagccaatttatgtcatggcaggacaagaaattactggcaggcttcacttgattgcccacaatgcacaaagctatacaatatacttaacacngtcag

SEQ ID NO: 285466 - DNA, 260 bp, Glycine max
  unsure (1)..(260): unsure at all n locations
cgctgctgttcctgcgcgtgaacaagcctcaggtaagccaaagccatggttaagcataacaatgttatccccaacggacacttccgtaagcnctggcagaactatgtgaagacctggttcaatcagccagcacggaagacaagaagacggttggctcgtcagaaganagctgtgaagattttccccagacctacagctggacctcttagacccattgtacatggtcaaactttgaaatacaacatgaaagtgagagctgg

SEQ ID NO: 285467 - DNA, 256 bp, Glycine max
  unsure (1)..(256): unsure at all n locations
gctatttaaagacaactntgnnnattatggtcttagtaaagcacgagttgtcttcacaattcataaccttnaatttggagcccattccattggnnaagctatggcatatgctgacaaagctacanctgtctctcccacatattcangagagattgctggtaatcctgtaattgctcctcatcttcacaagttccatggnatnataaatggnatcganccagatatatgggacccatataatgataaattcattccc

SEQ ID NO: 285468 - DNA, 216 bp, Glycine max
  unsure (1)..(216): unsure at all n locations
ttgttgtnngtgtgtttgtttnttctctcacctgaanatgtcttgctgcggtggtaactgtggttgcggaagcgcctgcaagtgcggcaacggctgcggaggctgcaagatgtacccagacttgagctacaccgagtcaaccaccaccgagaccttggtcatgggagtggcaccagttaaggctcaattcgagagtgctgaaatgggtgttcccgc

SEQ ID NO: 285469 - DNA, 253 bp, Glycine max
gcaaaagcaagctttggcaaagcagttgaatttgatgcctaggcaggtggaggtgtggtttcaaaacagaagagcaaggaccaaattgaagcagactgaagtggattgtgaatatttgaagaggtgctgtgagaatctaactgaagagaataggaggcttcaaaaggaagtgcaagagctcagggcattgaagttatccccacagctttacatgcaaatgaaccctcccaccactctcacaatgtgcccttca

SEQ ID NO: 285470 - DNA, 250 bp, Glycine max
  unsure (1)..(250): unsure at all n locations
ctctaattacactttctatctcatttccaatctcattttcgttcggttcaaacactctcatggcatcagacaagaagattaggatcggcatcaacggatttggaaggattggccgtttggtggccagggttgctcttcagaggaatgacgttgaacttgttgctgtcaacgatcctttcatcaccactgattacatgacatacatgttcaagtacgacaccgttcatgggcagtggaancatttnnatgt

SEQ ID NO: 285471 - DNA, 253 bp, Glycine max
  unsure (1)..(253): unsure at all n locations
ttttggataacgaagctctctatgacatatgcttccgcacccttaagctcaccaccccaagctttggagatctgaaccatctaatttcagccaccatgagtggtgtgacatgttgtcttcgattccctggtcaactcaactcagatcttcgcaaactcgccgtgaatctcattcccttccctcgtctgnatcacttcatggtgggatttgccccactcacttcccgcggttcccaacagtacagggctctcac

SEQ ID NO: 285472 - DNA, 260 bp, Glycine max
  unsure (1)..(260): unsure at all n locations
acanccgaaacagtttccatctctctcacaaaatgacaacaatatcaaattgctcccttcttcttcctcttcctcttcctctccaccctccacatagcttccaccctctcaacccccaccaacttcatcaagtcctcctgcagcaccacccagtacccggccctctgcatccagtccctctccgtctacgcctccaccatccagcaagacccccacgagctcgtccagacagccctctccctctccctcaaccacaccga

SEQ ID NO: 285473 - DNA, 262 bp, Glycine max
ccactgactcacttataaaaggcgctttaacaccaaacggagtctctctatcaaaaaaagctacctagagcttgcacctattggtatcttctacaatatcctaaagtgtttttcttcttcttcatcaccatgtctttactttcagacctcatcaacctcaatctctcagaatccacagaaaagatcattgctgagtacatatgggttggtggatctggtatggacctcagaagcaaagccaggactcttcctgggccagtga

SEQ ID NO: 285474 - DNA, 252 bp, Glycine max
  unsure (1)..(252): unsure at all n locations
tttaggaaagattactgttggcataattactccttataagctgcagttgaaatgcctccagcgtgagtttgacgaagtcttaaattcagaagaagggaaggatctatatatcaacacagtagatgccttccaaggtcaagaacgggatgtcattataatgtcttgtgtgcgtgcatccagtcatggtgttggctttgttgcagatatacgtcgaatgaatgtngcccttacgcgtgcgcgaagggccctttg

SEQ ID NO: 285475 - DNA, 252 bp, Glycine max
  unsure (1)..(252): unsure at all n locations
tcggaatgggaagggtgattcgcgctcagcgtaagggtgctgggtcggtgttcaagtctcacactcaccaccgcaagggtccggcgaggttccgcagcctcgacttcggcgagcgcaacggctacctcaagggcgtcgtcaccgacatcatccacgaccccggtcgnggggccnctcncgaaannnggattncggcancccttccgctacaagaaggcaaacggngctcttcgtcgcgccgaggnctctaca

SEQ ID NO: 285476 - DNA, 252 bp, Glycine max
  unsure (1)..(252): unsure at all n locations
ggcaagtaacatgatgagcttatcgccaatgctgcgtncatnggcactcctgganagggtattcttgctgctgatgagtcaacagggncaattggcaagcgtttggccagnatcagtgtagagnacattgaatccaacaggcgagctcttagggagctgcttttnactgctcctggtgttcttcaatatctcagtggtgtcatcctctttgaggaaaccctctaccagagcacagctgcaggcaagcccttt

SEQ ID NO: 285477 - DNA, 267 bp, Glycine max
  unsure (1)..(267): unsure at all n locations
agcagcaacaacaggaggcaaagagtccaaggcaaggcaccgagaggagtgaagcggttcggtcaangtggactccaaagccagaacaaatcctcattctcgagtccatcttcaacagtggcatggtgaaccctcccaaggacgaaaccgtcagaataaggaggcttctcgngaaattcggcgccgttggcgacgccaacgtcttctactggttcnaaaaccgccgntcganatcccgcccgccgccagcgccnagatgntncncnc

SEQ ID NO: 285478 - DNA, 257 bp, Glycine max
  unsure (1)..(257): unsure at all n locations
gcagttcttgatggaacagattgtgtgatgcttagtggtgaaagtgctgctggggcatacccagaacttgctgtgaaaatcatggctcgcatttgcattgaagcagaatcatcccttgactatggtgccatcttcaaagagatgataaggtctaccccattgcctatgagtccattggagagccttgcatcatctgctgtccgcacagcaaacaaggccaaagcaaaactcattgttgtgctgacacgtggcgggnc

SEQ ID NO: 285479 - DNA, 252 bp, Glycine max
  unsure (1)..(252): unsure at all n locations
cgtttatatattatttcaattaaaactggaattcaattttcttacataattcagttggcacagtcgaatatgttgtttcttagattgttgattgtcaatacattaggtataccccatttngctctgcccacacaaattgttcaagctgcctgtcaaaactangatttacccagagccagggttcgaactacatcgcaggcaaggngacacccaaactggtcanatgtacacngatgttggagtgtactatgt

SEQ ID NO: 285480 - DNA, 250 bp, Glycine max
  unsure (1)..(250): unsure at all n locations
gcaaacccaattgtcaacttctccggcgttgtaggaactaatgtacttgcccttggtactgatgtttcttttgacaccaagattggggagttaactaaattcaatgctggattgaacttcaccaaagatgatttggttgcctcattgactgtgaataacaanggggattccctgaatgcttcatactaccatacagncaatcgcttnccccacaaagntnntggnngctgtggactcnccaantctcaac

SEQ ID NO: 285481 - DNA, 249 bp, Glycine max
  unsure (1)..(249): unsure at all n locations
cngcttcgcaaagcgaaaagagaagctccaccaggtgagaagccagaacctgtccgcacccacctccgcaacatgattattnngcctgagntgattggtagcattattggagtgtacaatggcaagacctttantcaggttgnnatcaaacctgagatgattgggcattatctggcagagttttctattncatacaaacccgttaagcacgggagacctggtattggtgcnnctcactcatccaggttt

SEQ ID NO: 285482 - DNA, 249 bp, Glycine max
  unsure (1)..(249): unsure at all n locations
gggaagccacttgtgattgaagangtagaggttgcgccaccacaagctggtgaagtgcgtttgaagatcctctacacctactctttgccacactgatgtttacttctgggaagctaagggccaaactccattgtttcctcgtatatttggtcatgaagctggagggattgtggagagcgtaggtgagggtgtgactcatctgaaaccaggggaccatgccctccctgtgtttaccgggnatntgggncc

SEQ ID NO: 285483 - DNA, 250 bp, Glycine max
  unsure (1)..(250): unsure at all n locations
cngatgtgtttcgattgcnatgcgaagnaccctacctgggcgtccgtcacgtatgggatctttctctgcatcgattgcnccgccgtacaccgcagtctcggcgtgcacatcagcttcgtgaggtctacaaatttagactcatggagtcctgagcaactaaaaacaatgagctttggaggaaacaatcgtgcacaggttttctttaagcaacatggttggnatgatggtggtaaaatagaggctaagtaca

SEQ ID NO: 285484 - DNA, 250 bp, Glycine max
  unsure (1)..(250): unsure at all n locations
ctagttcagtgtgtcgtttaaaaatgtcgcagttgctggataaagccaagancttcgtgtcggagaaggtnnatgatatggccaagccggaggcangtgtcactgacgtggacttcaagcgcgtgagcaaagataatgtcgagtacttggccaaggtctctgttcgtaacccttattcaacttccatacccatttgtgagatcaantactctttcaaaagcgcatccagggagatagnatcaggganaat

SEQ ID NO: 285485 - DNA, 248 bp, Glycine max
  unsure (1)..(248): unsure at all n locations
cngagcaataggtgacatggaatttaagcagaataggttcctttctgctgaaaagcaaatggtgacagccaatccagacatcaatactgttgaactttgtgatgaagntgaatttatagtgctggcttgtgatgncntatgggattgcttgtcaagccaacaattggtagattttgtacgtcaacaactgctcttggaaagtaaactttctgcggcttgtgaaagagtactagatcgatgtttggcac

SEQ ID NO: 285486 - DNA, 248 bp, Glycine max
  unsure (1)..(248): unsure at all n locations
aaanccctactccagatctgtataaaaacaaaaacgctggctttgaaaccctaataagcttcatcaatctccgaactnccgaagcccttcagcaaccatgtcgaggagaaaggttagggagccaaaggaggaaaangtcactcttggtccagccgttagagacggtgaacatgttttcggcgtggctcgcatctttgcctccttcaacgacaccttcatccatgtcactgatttgtctgggagggaaa

SEQ ID NO: 285487 - DNA, 256 bp, Glycine max
ggactagagataacaacttgttgggcaaatttgaactttctggcattcctccagctcccaggggtgttcctcaaatcacagtgtgctttgacattgatgccaatggtatcttgaatgtctctgccgaagacaaaactaccggccaaaagaacaagatcaccattaccaatgacaagggtaggttgtcaaaggaagagattgagaagatggttcaagaggctgagaagtacaaatcagaagatgaagagcacaagaa

SEQ ID NO: 285488 - DNA, 251 bp, Glycine max
  unsure (1)..(251): unsure at all n locations
accactttgttcaagagttcaagaganagaacaagaaggacattagtggaaaccccagagcacttagaaggttgaggactgcttgtgagagggccaagagaacactttcatcgactgctcagaccaccattgaaattgattctctatacgagggaattgatttctactccactgttactcgtgccagatttgaggagctcaacatggatctcttcaggaaatgtatggagccggtggagaaatgtttgagg

SEQ ID NO: 285489 - DNA, 241 bp, Glycine max
  unsure (1)..(241): unsure at all n locations
aacctcttcgttccttcgattcattccatttcttccaaaatggccaaagacncagttcgngttcttcgtcactggagccgcagggcaaattggatangctcttgtcnctatnattgcnangggagtgatgcngggncctgaccagcncgtgatcctccacctgcttgacattncctccagcaggagagtgnctnaanangggtnaaaacnggantgnnnggtgcngcagncctnctnntna

SEQ ID NO: 285490 - DNA, 250 bp, Glycine max
  unsure (1)..(250): unsure at all n locations
anaaccaagttaatgttgcaatcgcataataataaccatccaaagtttattgagaganatttgcaagtttgaaaagaaacatggcatctcatcaacaaaacaagcaagagcttgatgaaagggcaaggcaaggagagactgttgttccgggtggcactggtggcaagagccttgaggctcagcaacatcttgctgagggaggagcangggnggggaaccaagggaggggccccacctggggacccgaagg

SEQ ID NO: 285491 - DNA, 245 bp, Glycine max
  unsure (1)..(245): unsure at all n locations
cgtgaganagattgtgaagtagaaatcggtgcaaganattctccactttatctaaaaaaattcggtgagtttgtgaagacaaaaaatcactagctactcaaaaatggccacagtaggaaggaacgttgcagctcctttgctgtttcttaacttgatcatgtattttattgttcttggctttgctagtnggtgcctcaacaggttcatcaatggccaaacttaccaccctagttttggtgganatg

SEQ ID NO: 285492 - DNA, 248 bp, Glycine max
  unsure (1)..(248): unsure at all n locations
cntatttccacttcctaaagaagaacgccgagccggtatccgaagggagttggaganaattgaaatggacggtgaggacctttatttaccgacagctcctaacaagcttgttaggggtattcgagtagatagtggtattcccttacaatcagccgcaaaagttccaatcatgataacttttaatgtaattgatcgagatggggacgaaaatgatgtaaagccacaagcttgcatttncaaggttggag

SEQ ID NO: 285493 - DNA, 251 bp, Glycine max
  unsure (1)..(251): unsure at all n locations
cnaaaccctaacactcctcttcctcttcgatcatcacctctccacaatgccgccgaagttcgacccctcccagatagtcgacgtcttcgtccgcgttaccggcggcgaagtcggcgcggcgagttccctggccccgaagatcggtcccctcggtctctcccccaagaagatcggagaagacatcgccaaagaaaccgccaaggactggaagggcctccgcgtcaccgtcaagctcaccgttcagaatcgtc

SEQ ID NO: 285494 - DNA, 250 bp, Glycine max
  unsure (1)..(250): unsure at all n locations
cngagctccttcgcctcatcgatagtttaaagtctcgttttgacaatggtgngggttagtgtgttgaatgatgctctgaagagcatgtacaacgccgagangcgcgggaagcgccaggtcatgattaggccatcctccaaggtcatcataaaattcctattggtcatgcagaagcacgggtacattggtgagttcgagtatgttgatgaccacagggctgggaaaatcgtggttgaattgaatgggcggc

SEQ ID NO: 285495 - DNA, 251 bp, Glycine max
ctctaaacaaaaaatcaagaacaatggcttatgctaggcttgctcctatggctgtcttcttgcttgccacttccaccataatgttcccaacgaagatagaagcagcagattgtaatggtgcatgttcacctttcgagatgccaccgtgccgctcacgtgattgtcgttgtgtccctataggactagttgctggtttctgcatacatccaactggactttcatctgttgcgaagatgatcgacgaacatccc

SEQ ID NO: 285496 - DNA, 253 bp, Glycine max
  unsure (1)..(253): unsure at all n locations
ganaatggcggtgcctctactctcgaagaagattcgtgaagaagagggtgaagnagttcaagaggctcagagtgacaggaaaatntctgtcaagacaaactggcgcagaccaaagggtatcgattcccgtgttaggagaaagttcaagggatgcactttgatgccaaacattggttatggttcagacaagaagacccgccactatctccctaatggttttaaganatttgttgttcacaatgtgaaggactgg

SEQ ID NO: 285497 - DNA, 244 bp, Glycine max
  unsure (1)..(244): unsure at all n locations
gcacatttattagaaagggcgtggttttgttgtgagtactgagctgagaagagggagaagatgatcatccccgttcgttgttttacctgtggaaaggtaattggnaacaaatgggatacctatttggaccttctccaggcagattacagtgaaggagatgcactggatgcattgggactggttcggtattgttgtaggcgcatgcttatgacccacgttgatctcattgagaagttgctcncnc

SEQ ID NO: 285498 - DNA, 248 bp, Glycine max
ccaaaatgggaacaatggagagcttgaagttcttggtgtcttcaaagtacatcagagatcttgccactttagtggttgcttatggaatcagcatcaatcttgttgaggttacctggaagtctaagctcaaagctcagtttcctagtcccaacgagtactcttcttttatgggtgacttctcaactgcaactggaattgccacattcacaatgatgcttgtcagccaatttatatttgacaagtatgga

SEQ ID NO: 285499 - DNA, 305 bp, Glycine max
  unsure (1)..(305): unsure at all n locations
tcgcttcttgctccgatctacgtttcgtaacttccgttcctcccagtttccggttcaacccnnnnnnnnnnnnnnnnnnnnnnnnnccgaaccgaaccgaaccggcggatctcggttgttccatggaggctcacggcggcgggctccgccgagtccttgttctcgccttctgcgtcgctggaatctggtcggcatacatctaccaaggcgttctgcaggaaaatgtgtcgacgaagcggattcgacggtgaaaggntcgagcaccttgcgtttctgaacttggcacagaatgtggtgtgtttaat

SEQ ID NO: 285500 - DNA, 297 bp, Glycine max
  unsure (1)..(297): unsure at all n locations
ancgcatnangtctccaaggtgaacagcctctggtcgatggaacaatgtaggcaagggaagtcggcaaaatggatccgtaacctcgggaaaaggattggctctgagggctgggcacgggggtcccagtcccgaacccgtcggctgtcggtggactgctcgagctgcttccgcggcgagagcgggtcgtcgcgtgccggtcgggggacgaattggnaangggccntnngggcnttttcccggggtnaaaaantcaaatcccnaaattttaggnaaagggaaacccctntttnataaaa

SEQ ID NO: 285501 - DNA, 294 bp, Glycine max
  unsure (1)..(294): unsure at all n locations
ctgcaacattgatatggaaagtttaatctctgaccagaacagaagcattgctacccttgctattactacacttttgaanaacaggaaatgaatctagtgtggatcgtcttatgaagcagatcacaaatttcatgtctgatattgctgatgagttcaaaattgttgttgttgaagcaataagatcattgtgcctgaagtttcctttaaaatatcgatctctgatgaacttcctgagtaatattcttagggaagaagggggttttgattacaagaaggcaattgtagattcattgg

SEQ ID NO: 285502 - DNA, 214 bp, Glycine max
  unsure (1)..(214): unsure at all n locations
gggcaaccaccaagtaatatggtgggtatgccaaagtgggcatgcttgatgcatcttctactacttaaaantanaagcttatgatgcatctactgctttaaacaaaagagtgctccactacgcaacttttgtttccaacttatagttggttacgttttatgtaaactcaacccatgtatgttttggagcattccagttaataanaaatgtttct

SEQ ID NO: 285503 - DNA, 297 bp, Glycine max
  unsure (1)..(297): unsure at all n locations
tacaaagcaaactgntcttaagnnaactggaggaaaagctcccaggaagcagcttgcaaccaaggctgcacgtaagttctgnaccaacaactggtggtgtgaagaagcctcatcgttatcgccctggaactgttgctcttcgactttttaggaaataccagaagagcactgagctcctaatcaggaagcttcctttccagaggttggtngtgaaatttgcccangattcaaaactganctgcgnttccaaaaagccatgctgtgcttgcattgcaagaggctgctgangcntacctt

SEQ ID NO: 285504 - DNA, 293 bp, Glycine max
  unsure (1)..(293): unsure at all n locations
taccaacaagaaaaganaaaaagaagagttgagattccctttgaagaaaagatggcatcccataggcaaagctatgaagctggtcaaactaagggccgaactgaggaaaagacgaaccagacgatgggcaatattggagagaaggctcaagctgcaaaggagaagacccaggaaatggcccaagctgcaaaggagaagaccccaacaaacagcccaagctgccaaggacaagacttgcgacacttcccaagcggcaaaggagaagacccaacagaatacaggagctgctcaac

SEQ ID NO: 285505 - DNA, 293 bp, Glycine max
  unsure (1)..(293): unsure at all n locations
cgcgcntgnnaggtcnagggcctntgcggatgcnggagctnatgagtcnnttcancgangccccngcnttccaggggntgaagangaaggccttctgcgacgnttctccgcncgttcccaaaatggccaatatgctcgaaggnggnggcnagacacccatacttaatccnatggagcntcaagatattggttttaaaattgttgcgtatccactttccttgatcggggtttctatacgagcnatgcaggattcactcactgccattcgaggtggccgtattcctcctcccgga

SEQ ID NO: 285506 - DNA, 289 bp, Glycine max
  unsure (1)..(289): unsure at all n locations
caagangnnnttcaagtatgcctgggtgctggacnaacttaaggctgagcgtgaaagnngaatcaccattgatattgctttgtggaagtttganacaacaaagtattattgcacagttattgatgcgcctngacatagggatttcattaagaatatgattactgggacatcccaagctgactgtgctgttcttatcattgattcgaccactggtggttttgaagctggtatttccanggatggacagactcgtgaacagctcgactttccattcaccctnggtgnggaa

SEQ ID NO: 285507 - DNA, 289 bp, Glycine max
  unsure (1)..(289): unsure at all n locations
ttcgcgctttattcacacttgcagccaaggtctccccaactataatattcgtggatgaggttgatagcatgcttgggcaacggaccagagttggggaacatgaagccatgaggaaaataaagaatgaatttatgacccattgggatggacttttgacaaagcaaggggagcggatccttgttcttgctgcaaccantaggcctttcgacttggatgaagctattattaggcgatttgaaagaaggattntggtaggnctaccatctgtggagancagggaaaagatttt

SEQ ID NO: 285508 - DNA, 291 bp, Glycine max
  unsure (1)..(291): unsure at all n locations
acaaacaaagtacacttcattttcaagcataagantcccaagagtggggagtatgttgaacaccatcttaagaatcccccttctgtcccgtctgacaaattatctcatgtgtacactgccattttgaagcctgacaatgagttgcaaattttgattgatggggaacagaagaagaaggtaaatttcttatctgctgatgatttgaaccccctcttatccctcccaagacaatcccagatcctgatgataaaaaacctgaggactgggatgagagagagaaattccgactca

SEQ ID NO: 285509 - DNA, 292 bp, Glycine max
  unsure (1)..(292): unsure at all n locations
ctctttttcttctctctcnacaacttcancttcttcctcctcgatcatgtctcacttcaagggcaagtaccatgatgagcttatcgccaatgctgcgtacattggcactcctggaaagggtattcttgctgctgatgagtcaacagggacaattggcaagcgtttggccagcatcagtgtagagaacattgaatccaacaggcgagctcttagggagctgcttttcactgctcctggtgttcttcaatatctcagtggtgtcatcctctttgaggaaaccctctaccaggng

SEQ ID NO: 285510 - DNA, 286 bp, Glycine max
  unsure (1)..(286): unsure at all n locations
aaaaggtaggcctttttccatcttatgagcaggttgaattgttttctgggcaacttccagatttgacattcacccagatnntagaaaaatttggtgaaaattgccgtttggatgggtcatacttcttgtgtcaacataatcacatcaagaagattgctaatatgttagagaaggtccagggattatctctagaagatcgttttaacttctgttttgctcctgttaacgttagagatccaaaagctatgtaccattgcttagatatgccacatcatttggtcagaag

SEQ ID NO: 285511 - DNA, 281 bp, Glycine max
  unsure (1)..(281): unsure at all n locations
ctatgtctccaagatgattccagcatctgataagggnngatttttcgcctttggccgtgtattctctggcagggtttcaactggtttgaaggtgaggnttatgggacctaattatgtccctggggagaaaaaggatttgtatgtnaaaagtgtgcaacgaactgtcatttggatgggaaagaggcaaganactgtagaggatgtcccctgtggtaatacagtggctatggttggtcttgaccagttcatcacaaagaatgcaacattgacaaangagaagg

SEQ ID NO: 285512 - DNA, 283 bp, Glycine max
  unsure (1)..(283): unsure at all n locations
gnttccgncaatntcttcnnctccagagngtttcgatgacgggtgggaaaatcgatgggttaaatcncnttggnaaaagatgagaacgtggctggggagtggaaccacacctctggtcaatngaatggagacgctaatgacaaaggtattcaaaccagtgangattacagattctatgctatttcagctgagtaccctgaattcagcaacaagggtaagacactagtcttcaattttctgttaagcacgaacagaagcttgactgtggtggtggctacatgaa

SEQ ID NO: 285513 - DNA, 292 bp, Glycine max
  unsure (1)..(292): unsure at all n locations
anacgataaaggaggcaatcgtcatgcatgacttgcgcatgattcatactgacctgaagcctgaaaacatactactagtttcaccagagtatgtcaaagttcctgactacaagagttcatctagatcaccaagttcctatttcaagagagttcccaaatcaagtgctataaaggttattgattttggcagcaccacttatgagcgagaagatcagaattacattgtatcaactcgtcattatagggctcctgaagttatccttggacttggctggagctatccatgtgatat

SEQ ID NO: 285514 - DNA, 285 bp, Glycine max
  unsure (1)..(285): unsure at all n locations
ttgcatatgcaggttgagaaccatgaaattgacacacaactgatggagnagttgaagcagttaatcaatacatactatgaggnagacctaaaggaaagcttctaccagtctgagatagccaagaggttggagaaagagcagaacacctctgatatagattgggaaattaccttcttcatttggcatcgccccacctctaacatcaatgaaattccaaacatctctcgggagctttgccaaacaatggatgagtacattgcacagctcctgaagctgggagagaag

SEQ ID NO: 285515 - DNA, 282 bp, Glycine max
  unsure (1)..(282): unsure at all n locations
aggaatcagagctcgcaagctacgggatgattgttaatagcttttacgaactggagcangtgtacgcagattattatgacaagcagctgctacaggtacagggaaggagggcgtggtacataggtcctctttccctgtgcaaccaagacaaaggcaagcgaggaaagcaagcttccgttgaccaaggagacattttgaagtggctggactccaagaaagcaaattcggtggtgtacgtttgttttggaagcatagccaacttcagtgaaatcagctgagaga

SEQ ID NO: 285516 - DNA, 279 bp, Glycine max
  unsure (1)..(279): unsure at all n locations
gtggtggttcggcggggaacaagttccgcatgtcgctgggtcttccggtggcggcgacggtgaactgcgccgacaacacgggggcgaagaacctctacatcatttcggtgaaagggatcaaaggccgtttgaaccgtcttccctcggcctgcgttggcgacatggtgatggccaccgtgaagaagggaaaacccgatctgaggaagaaggtcttgccagctgtcatcgttcgccagcgcaagccatggcgccgaaaggncggcgtctacatgtattcga

SEQ ID NO: 285517 - DNA, 278 bp, Glycine max
ggaaataattgatctttgaaaatgcagggaggaaagaaagctggagagtccatcaaggaaacagctgcaaacattggtgcttctgccaaggctggcatggagaaaaccaaggccactgtccaggagaaggcagaaagaatgacggcacgtgatccgatgcaaaaggagttggcaacccagaagaaagaggcaaagatgagccaggcagagctggacaagcaggcggcgcgtcagcataaacacggcggcgaacaggctgccacggcaggcactgggac

SEQ ID NO: 285518 - DNA, 281 bp, Glycine max
  unsure (1)..(281): unsure at all n locations
caaaaagtttacgttacaaatcgcataataaccgtcctaagtttattgagagaattttgcaagtgtgaganacatggcatctcgtcaaaacaacaagcaagagcttgatgaaagagcaaggcaaggagagactgttgtcccgggtggaactggtggcaagagcctggaggctcagcaacaccttgctgaaggaaggagcaagggagggcaaacaaggaaggaacagctgggtacagaagggtaccaggaaatgggacncaaaggaggnttgancatgtgga

SEQ ID NO: 285519 - DNA, 291 bp, Glycine max
  unsure (1)..(291): unsure at all n locations
tgaaaagagaagagaagatgacaacacgcttcaagaagaacaggaagaagaggggccacgtcagcgctggccacggtcgaatcggaaagcacaggaagcaccctggaggacgcggtaacgccggangcatgcaccaccacaggatcctcttcgacaantaccaccctgggttcttcggcaaggtaggaatgcgctattttcacaagcttcgnaacaaattctactctccgatccctcaacatcgacaagctgtggtccctggtcccgcaagaagtgaaggacaaggcctcc

SEQ ID NO: 285520 - DNA, 283 bp, Glycine max
  unsure (1)..(283): unsure at all n locations
gacgtgttgagaccggtgtcttgaagcctggaatggtggtgacttttgcaccaactggactgacaactgaagtcaagtctgtggagatgcaccatgaatctcttacagaggcacatcctggtgacaatgtgggattcaatgttaagaatgttgctgttaaggatttgaagcgtggttatgttgcctcaaactcaaaggatgaccctgcaaaggaggctgctaacttcacagcccaagtcatcntcatgaaccaccctggtcagattggaaatggctatgcccc

SEQ ID NO: 285521 - DNA, 280 bp, Glycine max
  unsure (1)..(280): unsure at all n locations
gattatcttgctcaaaatgcctttacaccatatgataaattttgccccttctacaagtctgtttggatgatgcgcaacattatccatttctacaatttggcaaatcaggcagtagagaggggagctggttcagatggtcagaagatatcttacacccttatcaagcatcgtatgggagatctgttctaccgattagtgtctcagaaatttgnggatccagcagaaggggannctgctttggttgctaaatttcagaagttacacgnggacctgcntatng

SEQ ID NO: 285522 - DNA, 278 bp, Glycine max
  unsure (1)..(278): unsure at all n locations
gattatggaagttattaaccctgaagatgattatgtgtggatacatgattatcatctgatggtgttgccaactttcttgaggaagagattcaacagggtgaaactggggttcttccttcacagtccattcccttcatcagaaatatataagacattgcctgtnagggaagagatcctgagagccctccttaattcggatttgatcggcttccacacnananaaatnncaaaaaaattnctctcctgntgtaaccggatgctcggnttanntatgaatc

SEQ ID NO: 285523 - DNA, 278 bp, Glycine max
  unsure (1)..(278): unsure at all n locations
catgtcatagtttataacaatgttgacacnnctcctgaatcaggcatgtcatagtttatnacaatgacatgcctgattccgcagacacatacttgcacagggttggtcgagctggaagatttggcaccaaaggccttgcaatcacatttgtttcttgttctactgatgtcgatgttccncaacaatgttcagtctaggtttgaggtggatataaagcagcttcctgagcagattgatacctctacctatatgccatcgtagatttttttgggagcaat

SEQ ID NO: 285524 - DNA, 278 bp, Glycine max
  unsure (1)..(278): unsure at all n locations
catgtcatagtttataacaatgttgacacgtctgctcgaatcaggcatgtcatagtttataacaatgacatgcctgattccgcagacacatacttgcacagggttggtcgagctggaagatttggcaccaaaggcctngcaatcacatttgtttcttgttctactgatgtcgatgttangcaacaatgttcagtctaggtttgaggtggatataaagcagcttcctgagcagattgatacctctacctatatgccatcgtagattttttgggagcaag

SEQ ID NO: 285525 - DNA, 275 bp, Glycine max
  unsure (1)..(275): unsure at all n locations
cgtaccgtgttgcctctctgcaatctacagccaaaatgcctttcaagaggtacgttgagatcgggagggttgcccaaatcaactacggcaaggaatatggcaggctcgtcgtcattgtcgacgtcattgatcagaacagagctcttgncgatgcccctgatatggtgaggtcccaagtcaatttcaaaaggctttccctaaccgatattaagattgacattaagagggtccctaagaagaaagatcttgtcaaagccatggaggatgctgatgtt

SEQ ID NO: 285526 - DNA, 279 bp, Glycine max
  unsure (1)..(279): unsure at all n locations
ctaaacaaaaagtttacattacaaatcgcataataaccgtcctaagtttattgagagaattttgcaagtgtgaganacatggcatctcgtcaaaacaacaagcaagagcttgatgaaagagcaaggcaaggngagactgttgtcccgggtggaactggtggcaagagcctggaggctcagcaacaccttgctgaaggaaggagcaagggagggcaaacaaggaaggaacagctgggtacagaagggtaccaggaaatgggacgcaaaggagggttgagc

SEQ ID NO: 285527 - DNA, 278 bp, Glycine max
ctctgctttgacggctctgtccccattggatggtcgttattggagcaaagttaaggaacttgctccttttttgagtgaatatggcttaatctactttcgggttcttgttgagataaaatggttgctgcagctgtctgtaattcctgaaattgttgaggttcccagtttccagtgacggtgctaaatctttcttacaaggtctgattgatgactttagtgttgaggatgcctcggaggttaaaaacattgagagggtcacgaatcatgagtgaaagcgg

SEQ ID NO: 285528 - DNA, 281 bp, Glycine max
  unsure (1)..(281): unsure at all n locations
ggatcttttggcaaggtcaaaattgcagaacatgtattgactggccataaggttgcgatcaagattcttaaccgacgcaagataaagaacatggaaatggaagaaaaagtgagaagagaantcaaaattttaagatctattcatgcatcctcacattatacgactttatgaagtcatagaaactccaactgacatatattttgtcatggagtatgtgaagtctggagagctgttcgattacattgtagananggncaggttncggaaaanaanccnntant

SEQ ID NO: 285529 - DNA, 284 bp, Glycine max
  unsure (1)..(284): unsure at all n locations
gggggaagagatccagcagcaatggtgtacgtcaaggctcagaaatcaaaagcctacttcaagagatatcaagtcaagttccnagagaagaagagagggaaaaaccgattaccgtgccaggattcggttgattaatcaggacaagaacaaatataacactccgaaataccgatttgtggttcgctttagcaacaaggacattgttgcacaactaatatctgctagcattgccggcgatttagttctgctacagcatattcacatgagcngccacnatatggtct

SEQ ID NO: 285530 - DNA, 278 bp, Glycine max
  unsure (1)..(278): unsure at all n locations
ttacgaacatatatttattatatggctcctgaacttgtccccaccgntgtgaaatccagtgctgcgttcacgaaacccgcgacccttccaaggcgtgcctacgtgacattcctcgccggaaacggtgactacgtgaaaggggtggttggcctcgccaaagggttgcgaaaggtgaaaaccgcgtacccgttggtggtggctgtcctccccgatgtgccggaggagcaccgtaagatccctgggagtctcagggctgcatcttcgcgaatcnacccctt

SEQ ID NO: 285531 - DNA, 272 bp, Glycine max
ccacagccgtttggggtgccaggcattccttttaagcctggatgctcaagtgatattgccatcaatgatcctggggttttgaataatggcttgtgggctaatcagactcaacgaatgcgaacatatactaaggttcaaaaatgtggctctgttggaagatgtattgatgtcacccgttacaaggggtatgatgaactccggcatgatttggctcggatgtttgggattgaagggcagctagaagatcctcaaaggactgagtggaaactagt

SEQ ID NO: 285532 - DNA, 275 bp, Glycine max
  unsure (1)..(275): unsure at all n locations
gnaacgaaggtgatgcttgccttcgaaactggaatccacgatactattgggattgacctggttgcnatgagtgtgaatgacattgttacttcgggggcgaactttgtttttccttgattactttgccactgggcaccttgacgtggacgttgctgaaaaggttataaaaggcattgttgatggttgtaagcaatctgattgtnttcttttaggaggaaganctgcaganatnccnggtctctataaagagggggantatnatctaaggggcggnc

SEQ ID NO: 285533 - DNA, 274 bp, Glycine max
  unsure (1)..(274): unsure at all n locations
ccacgtttagcaataaccaaaccctctctactcttttttcttctccttctcttcgctagggttttagcttcttcctcttcacttcgttcttnttcgcctctacaatgagcaacgacaaggacacattcaacgtcgccgatctcacttctgctctcaacgaggacaatagagcagaccctgtcaatgctcttaagagcaagatacagagtttggctggacaacactcggatattctagagtctctgtcgcccaatgtccgaaagcgtgttgaggt

SEQ ID NO: 285534 - DNA, 275 bp, Glycine max
  unsure (1)..(275): unsure at all n locations
ccaggacaaggagggtatccccccggaccagcaacgtctcatcttcgccggaaagcagctcgaggacggccgnaccctcgccgactacaacatccagaaggaatcaacccttcacctcgtcctccgtctccgtggtggcatgcagatcttcgtnaagaccctcaccggcaagactattaccctagaagtcgaaagctccgacaccatcgacaacgtcaaggctaagattcaggacaaggagggaatccccccagaccagcagaggctgatcttcg

SEQ ID NO: 285535 - DNA, 270 bp, Glycine max
  unsure (1)..(270): unsure at all n locations
ccgatgggaagaactgaatccactgtacccatatttaatatggaagacatagaggagggtgttgaaggttatgatgatgaaaggacactacttatgtctcaaaagagcttggagaagcgttttggtcagtctccagtttttattgctgccactttcatggagcagggtggcattccaccttcaacgaaccctgcaactcttcttaaggnagcaatccatgttatcagctgtggttacgaagacaagacagaatggggcaaagagattggt

SEQ ID NO: 285536 - DNA, 270 bp, Glycine max
  unsure (1)..(270): unsure at all n locations
caaagaatcaaagaaaggggtggtggctgcttcgaaagcttaataatttgtttatttccagaacatcatagttttcgcagcagcaaactaacaaattactcatatcatanaataagatggcccgttctctctcgcaagccaaacgtattggtgtccttgttgctcaatctatctccctaattcccgttcatcggcgaggttacgcagtggcatccgatgtatcggtaagagttggattgggtaatattgggcgaaggaatggaatcgtgg

SEQ ID NO: 285537 - DNA, 272 bp, Glycine max
  unsure (1)..(272): unsure at all n locations
cnatcctatttacgagcaaataagatgtttgtngattatagcgagccccaagtggagagagtgtactcatcctatttggnactncaatcttgaggatgtagagccctgtgtctcangtccaaaaaggcctcacgancgtntccctttgagaganatgaaggtagactggcatgcctgcctcaacaataaagttggatttaagggttttgctgtatcaaaagaatctcagaataaggttgcagagttcacattccaagggacaccagcacatc

SEQ ID NO: 285538 - DNA, 272 bp, Glycine max
  unsure (1)..(272): unsure at all n locations
cggctattgaaatagcagaagctgtccttggtgcgttgaaaggggagcttgccgctactgcagtaaatgcaccaatggttccctcagaggtgttgacagaattaaaaccattcgttgatcttgccgagaaactgggtaggctggctgtccagctggtcgcaggaggnagcggtgtaaaaacagtgaaggtcacttatgccacctctagggcccctgatgatctggacactcgtcttctccgtgccatgataaccaagggtctgattgagcct

SEQ ID NO: 285539 - DNA, 270 bp, Glycine max
  unsure (1)..(270): unsure at all n locations
cntattcgtcgctcatggcactctcttctcgtctcttttccaaatccaaattgatctatggcagtcaaatacttctacaaaaggagcatgctattccagttcgtcactttgctaaagagtctgcccctcctgcccttaagggagacgagatgctgaagaacatttttgtggaggtgaagaacaaatttgagaccgccataggaatattaaagaaggagaaaatcaccattgacccagaaganccagctgctgtttctcattatgcaaagg

SEQ ID NO: 285540 - DNA, 273 bp, Glycine max
  unsure (1)..(273): unsure at all n locations
ctggttttttacccttccaggatgacaacctggtggccttgtacangaaaatttaccgcggtgacttcaagtgtccgccgtggttctcctccgaggcgcggaggctcatcaccaagctcctcgaccccaacccgaacacgcgaatcacaatttcaaaaatcatggactcgtcgtggttcaagaaacccgtgccgaanaacttgatgggaaagaaaagagaggaattggatctggaggagaagnttaaacagcatgagcaggaggtttctacta

SEQ ID NO: 285541 - DNA, 277 bp, Glycine max
  unsure (1)..(277): unsure at all n locations
cttgaagtctcagaacacttaattgttttgtgtgcaatgatcccaacttgggtatcgccgtaccctagaccacacatcataaggtannatcatcaggtngaatatcataaactaacccagggtcatttgctcttgatggattcacatgaccagaacctgtggcaaaaacatctgcagggtgaagtgtttcatcaacaatgagtttgcgttcaaaattgattatgtctgcagaagtcattatggcagattttatggcagctggtgaccaatgaggatg

SEQ ID NO: 285542 - DNA, 274 bp, Glycine max
  unsure (1)..(274): unsure at all n locations
tttcagtttcacncttgagacaagggcnnagttattaaaggatggnatcaaggtattataacaatgaagaaaacngaaaatncccttttcaccatcccagctgagctagcttatggtgaatctggttctcctccaacaatccccccnaatgcaactctaccaatttgatgtggagctgttgtctnggactagtgtgaaggacatatgtaaggatggaggcttatttaagaagatacttaccgagggagagaaatgggaaaaccccaaggatcct

SEQ ID NO: 285543 - DNA, 269 bp, Glycine max
ctgcttactaaaatttcttccattcttagctttgttcaatcaaagttttttaagatggcccagagaaatgttactgctaattcttcttttgaaaggactagcttgccttccctagatcaaaagttggccatggccaagcgctgctctcatgagggtgtgatggcaggagcaaaagcagctgttgttgctactattgctactgccataccaactctggctagtgtaaggatgcttccttgggcaagagccaatctcaatcactctgctca

SEQ ID NO: 285544 - DNA, 264 bp, Glycine max
  unsure (1)..(264): unsure at all n locations
cnaggnnctgctgaaaaatgagtgccctcatattgttgttggaacaccgggaagaatactagcattgactagggataaggacctttctttaaagaatgttagacatttcatattggatgaatgcgacaagatgctggaatcactggatatgaggnaagatgttcaagacattttcaagatgactccccatgataagcaagtnatgatgttctcagcaacactcagnaaggaaattcgcccagtctgcaaganatttatgcaagt

SEQ ID NO: 285545 - DNA, 267 bp, Glycine max
  unsure (1)..(267): unsure at all n locations
cnagaaggnaaaagggtcaaggaagggtaagaaggcatggagagctaacatcagcaccgaagagatcgaagatttcttcgaganatcaacgaaggacgctctttctggtggctctctacaagccgttncttccgattctctcttctangaagacaagtccaaanatcttgctgtgaagaagaagatcgagaaanctagggagagggtgctccgatgtgatagcctgctacaganaaatcagtttgttaagccagtgccatcttctat

SEQ ID NO: 285546 - DNA, 260 bp, Glycine max
  unsure (1)..(260): unsure at all n locations
gctctgtttctgtctctgtgtttgcngctgaggattccgaacgagcgaccttcttcgtttctcgcaaagtttaagtcatcatgggtaangaaaagactcacatcaacattgtcgtcattggacatgtcgactctgggaagtcaactaccactggtcatttgatctacaagcttggaggtattgacaagcgtgtgattganaggttcgagaaggaggctgctgagatgaacaagaggtcattcaagtatgcctgggtgctt

SEQ ID NO: 285547 - DNA, 263 bp, Glycine max
  unsure (1)..(263): unsure at all n locations
aattggtagtgtaactnaaagtattgaagctgtgagaatgtctaaacaagctggttggggtgtcatggctagccacaggagtggtgaaactgaggataccttcattgctgacctctcagttggattagcaactggtcagatcaagactggagctccctgccgatctgaaaggcttgccaagtacaaccagctcctgaggattgaggaggaacttggttctgctgctgtgtatgctggtgccaaattcagagcccccgtggagg

SEQ ID NO: 285548 - DNA, 261 bp, Glycine max
cttcaaaaaggctatggcttgggatctggaatttctctgttcattgccactaatatatgtgaaaacatcatatggaaagcatttagtcccaccaccattaacagtggacgtggagctgaatttgaaggtgctgtcattgctctattccatttgttgataactagaacagacaaggttcgtgcccttcgtgaagcattttaccggcaaaaccttcccaatgtgacaaatctgcttgctaccatcttgatcttcctaattgtg

SEQ ID NO: 285549 - DNA, 222 bp, Glycine max
aacagaagaacaaccaccaccacacacaatgggtcgcgtgagaacaaaaacggtgaagaaatcctcccgccaggtgattgagcgttactactcgcgcatgaccctcgacttccacacaaacaaaaagcctctcgaagaagtggccatcatcccttccaagaggctgcggaacaagatcgcgggtttctccacgcatctcatgaagcgcatccagaagggtcc

SEQ ID NO: 285550 - DNA, 260 bp, Glycine max
  unsure (1)..(260): unsure at all n locations
cctgaganagctcgtcgcggcggttgcagaagaagattgcaagatgaagttcaacatcgcgaatcccaccactggatgccagaagaagctcgagatcgacgacgatctgaaactgcgagcattttgggacaagaggatctcacaggaggtcatcggagatgcactcggtgaggaatttaagggctatgtcttcaaaattaccggaggttgtgacaaacaaggatttccaatgaagcagggagtgctgactcctggtcgtg

SEQ ID NO: 285551 - DNA, 260 bp, Glycine max
  unsure (1)..(260): unsure at all n locations
canggattacaaggatggaaagtactctcaggttgtgtctaatgctcttgatatgaagctcagggatgacttagagagactaaagaagatcagaaaccaccgtggtttgangcactactggggccttcgtgtccgtggtcagcacaccaagactactggccgcaggggaaagactgttggggtctctaagaagcgttaagctattatgttttggcttggatattagattttgtttaggaggcatgtttgaagtacactac

SEQ ID NO: 285552 - DNA, 260 bp, Glycine max
  unsure (1)..(260): unsure at all n locations
ttgagcacaccagcacaccttaaacgtaagtggtatttgttccacacaggtacactannnccttcactctcagaagcctaccgagcccaccccgtgcacgttcaacacaagcaccctgacttaaactccctacaagaactccccgagtcttacacttggacacaccatagccatgatgatcatactcctgcagcttccaacgagagtgtccccgttattgatctcaacgacccaaatgcttcaaagttgatacaccatgc

SEQ ID NO: 285553 - DNA, 261 bp, Glycine max
  unsure (1)..(261): unsure at all n locations
cgaatgaccattacatggtggaacccttgaaagctcgcaagtnttcttttcagaccagcagagtaacatatggcggaatagatggtncatactatacatctactagaaccagaaggatgggggctaatggggagttaatggaggaaaacaaagaaggtgacacaacaacaggccaggctacacatagaatcaccagaggaatccatgacaagggtcattcagttttgaggaagcttgactcagatggtaaggttgatatca

SEQ ID NO: 285554 - DNA, 258 bp, Glycine max
  unsure (1)..(258): unsure at all n locations
atagagaccagcttttgcttctttgtgaacatggagatgaggaaatcatgtggnnnnnnnnnnnnnnnnnnnnnnnntgtctttgcttcccaggtggtggtgcagacggagggaagagtgtgtgagtcacaaagccacgggttccatggtttgtgtaatagagaccacaactgtgctttggtctgcaggaacgaaggtttctccggtggcaggtgcaaaggcttccgccgccgctgcttttgcaccaggatttgttga

SEQ ID NO: 285555 - DNA, 259 bp, Glycine max
aacaagaatgttgacatgattgctgctaggcgtagagaacgtgagtacttcaatagtacccctgaatataaacaccttgcgaacagaatgggttccgagcatctggcgaagatgctctcaaagcatttggagacagtaatcaagtccaaaattcctggcattcaatctctaattaacaaaacaattgctgaacttgaagctgaactaactcgtttaggaaagcctgtagcagctgatgctgggggaaagttgtatgcaa

SEQ ID NO: 285556 - DNA, 261 bp, Glycine max
  unsure (1)..(261): unsure at all n locations
ctctcgtccagctcatgatgggcctttatagggctattgatacatatcttaaggagcaccctgcgatcaacaaaggcgaaaagaagaggatatgcaagctgatggattgtagaaagctatcagttgacgcgtgcttgcatgcagtgcaaaacgagagactaccattncgtgtngtcgtgcaggtactatactttgagcagttaaggactgctgcatcatcaggtaccagcactcctgacatacctagaggaatcaaagact

SEQ ID NO: 285557 - DNA, 254 bp, Glycine max
  unsure (1)..(254): unsure at all n locations
cctattggtatcttctacaatatcctaaagtgtttttcttcttcttcatcancatgtctttactttcagacctcatcaacctcaatctctcagaatccacagaaaagatcattgctgagtacatatgggttggtggatctggtatggacctcagaagcaaagccaggactcttcctgggccagtgagtgaccctgcaaaacttccgaagtggaactatgatgggtctagcacagatcaagctccaggggatgac

SEQ ID NO: 285558 - DNA, 256 bp, Glycine max
  unsure (1)..(256): unsure at all n locations
cgnagantttctgtngtaccaaagacctgagtttatcagcaaactacctttacttcagtatattcactccaagtngggccttctcaatgttgcagctaaattgcctcattactccttgcagaatgatgtaggacccaagatatatatatcttatgggattagtgatgaacttggtagaggtgattcagtgacaaatctccacttcaatatgcgtgacatggtgtaccttttggttcatacaaatgaagtaaagctg

SEQ ID NO: 285559 - DNA, 263 bp, Glycine max
  unsure (1)..(263): unsure at all n locations
gcgaaagaacgacaacaacatcaatcagtgctcctcaagcaaggaagacgctgacntgaataacaaccaccttcgctttgaagaggctgtcgacgagagttccaacctcgaccaatccatgtgcgacatcgaagaatccgatgataaaaccagcgccgactattacttcgattcctactctcattttggaattcacgaagagatgttgaaggacactgtgagaaccaagacatatcaaaatgttatttatcagaacaagtttt

SEQ ID NO: 285560 - DNA, 255 bp, Glycine max
  unsure (1)..(255): unsure at all n locations
caaagnggcttccctaccctgggagagtntttgatgtagtccattgtgcacggtgtagagttccatggcatatagaaggtggcaaacttcttttggagctgaatagagttttgcgacctggtggtttctttgtatggtctgctactccaatttatcagaagcttcctgaagatgttgaaatatggaatganatgaaggcactaacaaaagcaatgtgctgggaagttgtgtctatcagcaaggataaacttaatg

SEQ ID NO: 285561 - DNA, 253 bp, Glycine max
  unsure (1)..(253): unsure at all n locations
cgctctctaataacatttctaatctcattctccttctgttcaaacactctctctcatggcatcagataagaagattaggatcggcatcaacgggtttggaaggattggccgtttggtggccagggttgcccttcaaaggaatgatgttgaacttgttgctgtcaacgatcctttcatcaccactgattacntgacatacatgttcaagtacgacaccgttcatggccagtggaagcattttgatgtgaaggtg

SEQ ID NO: 285562 - DNA, 254 bp, Glycine max
  unsure (1)..(254): unsure at all n locations
cgtttcggnngcngacacagatggctcgtncgangcaaaccgctcgtaagtccacnggaggnaaggctcctaggaagcngcttgcaaccaaggctgcncgtaagtctgcaccaactactggtggtgtgaagaagccccaccgttatcgtcctggtaccgttgctcttcgtgagattaggaaataccagaagagtaccgagcttttgatccggaagctccccttccagaggctggttcgtgaaattgctcaggac

SEQ ID NO: 285563 - DNA, 202 bp, Glycine max
  unsure (1)..(202): unsure at all n locations
atggctttgcccaatcagcaaaccgtggnttaccctagtttcaaactcgtcatcgtcggtgacggcggtacagganagacaacgttcgtgaaanggcatcttaccggtgaattcgagaaananntacgaaccgnccattggagtggaggttcacccattggntttcttcacaaactgcgganagattcgcttctactgttgg

SEQ ID NO: 285564 - DNA, 254 bp, Glycine max
ttcgaagatgtgcgtagtctctatgagggtggaattaaattgacaacagatatactgagccaaattagccccttaccagccctcaaggaaatcttccgcactgatggtgaaaatgttcttcaatttccaccacctcatgtagccaaagttagtaagtctgggtggatgactgatgaggaatttgctagagaggtgattgccggtgtaaacccaaatgtgatccgtcgtcttcaagaattcccaccaaagagcac

SEQ ID NO: 285565 - DNA, 254 bp, Glycine max
  unsure (1)..(254): unsure at all n locations
cgggactgtaactagccgcagcacgaggagcagcctcaggaggagaaggatgtctcacaggaagttcgagcacccaaggcacggttcactgggatttcttcccaggnagcgtgctgctcgtcacaggggaaaagtgaaggcattccccaaggatgacccatccaaggcacccaagctcactgcattcttgggttacnaggccggtatgactcacattgttagagaggtcgagaagccaggntcanagcttcact

SEQ ID NO: 285566 - DNA, 253 bp, Glycine max
  unsure (1)..(253): unsure at all n locations
cntcgacgtcctcacctacgtcgcgtggnagcnctccggcttcccctccaaccgcgtcatcggctccggcaccaacttggactcntcccgcttccgtttcctcatcgccgatcaccttgacgtcaacgcccaggacgtacaggcatatatagtaggggagcatggggatagttcggtggcgttatggtctagcattagcattgggggtgttccggttctgagctttttggagaatcaacagattgtgtatgag

SEQ ID NO: 285567 - DNA, 251 bp, Glycine max
  unsure (1)..(251): unsure at all n locations
taattgtgatatacttccaaggatttcgtgtggttttgcctgtnagatcaaagantgcccgtggacagcaggggtcttatccaatcaagttattttatacctccaacatgcccattattcttcagtctgcccttgtttccaatctctacttcatttctcagcttctacacagaaagtacagtggaaacttcattgtagatctattgggcaaatggaaggagtctgaatatggaggtggtcagtctgttcct

SEQ ID NO: 285568 - DNA, 181 bp, Glycine max
  unsure (1)..(181): unsure at all n locations
tgattgangangatgccgatcagaaacatcgccatcggaaggcctgangaggctactcaccccgacncgttgaaggcggggttggctgagttcatctccnccttgatcttcgtgttcgccggttcaggttccggcatcgcctacnacnngctcaccgacnacggcgccgccactcccgccg

SEQ ID NO: 285569 - DNA, 252 bp, Glycine max
ccaaaaatatggtgttgagacccctataagcagcaaagcagaacgcctcccagaagaagcaaaagagatactgaaatcattggcaagtaaatgggaggatgtatttgatgcaaatgcattgcaggtgatccctctcaaaggggcaatgaccaatgaggtattccagataaagtggccaactacgacaggggaattgtcacgaaaggttcttgttagaatgtatggtgagggtgtggacgtgttctttaatag

SEQ ID NO: 285570 - DNA, 257 bp, Glycine max
  unsure (1)..(257): unsure at all n locations
ctttctctctcctcaaccagagataaagagtcaccttcttatttttctgaatctcgcggcgttgttctttctgctgctgcggctgtggttccggcggcgatgggacagcaatcgttgatctacagcttcgtcgctcgaggcaccgttatcctcgcggagtacaccgagttcaccggaaacttcaccggcgtggcggcgcagtgcctccaganactcccttcctccaacnacaagttcacctacaactgcgatgggca

SEQ ID NO: 285571 - DNA, 249 bp, Glycine max
  unsure (1)..(249): unsure at all n locations
ttatgtgaccatccagctatattggacaanagtgaaacacggggtttgttcagtactgatgcnatacagcgagcatggcagattgtggatcagattcctgggagagcanctggtgcctatagccatagtcagggtgtcaagggcttgcgtgatacaatagctgctggaattgaagagcgtgatggttttcctgccaatcctgatgacattttcatgactgatggtgcaagccctgctgtccataatatg

SEQ ID NO: 285572 - DNA, 248 bp, Glycine max
tgcggatgaggcgccactcgatgtttccatttgcctgcatgcctttggtattgtggggtgtggttcgtttagtggtgtcaagtcttgcgaacgtgagggtgcatgagtggtaatcgggatgtttttgttgcacggctccatgcttgcgcatgcaacgtgtgacatgcatccttttcattgtcaccttagccttcgtggcttaggtgctgacgattggttcctgtgttgcctacctaccaaacggtatt

SEQ ID NO: 285573 - DNA, 251 bp, Glycine max
  unsure (1)..(251): unsure at all n locations
gcttcttcaatccctaatgcgccttctgcgttcaattctcagagctacgttggtctcagagcgccactgaggaccttcaacttttcttctcctcaagctgccaaaattcctcgctcccaacgccttttcgtcgtcagagcctccgattcggagttcgangccgccgttgtcgccggtnaggttccgccggcgcntcccgtnccgcccagaccggcggctccggttggaacaaccggtggttccttcacttc

SEQ ID NO: 285574 - DNA, 250 bp, Glycine max
  unsure (1)..(250): unsure at all n locations
gaggtcacgaggagcactagctagtttcacaatttccaaatggctaggggattgaagaagcatctcaagaggctcaatgctcctaagcattggatgcttgacaaactgggtggtgcatttgcgcccaaaccctcatctggaccacacaaatctagggagtgccttcccctcatactcatcctacganaccggctaaagtatgctctgacttaccgtgaagtcatcgctattctgatgcagagacatgttc

SEQ ID NO: 285575 - DNA, 247 bp, Glycine max
  unsure (1)..(247): unsure at all n locations
gaaactcttcgtcttagaatggcaatccctctccttgtaccacacatgaacctccacgacgcaaagcttgggggctatgatatcccagctgagagcaagatcttggtgaatgcatggtggctggccaacaaccctgcacactggaagaagccagaggagttccggcctgagaggttcttcgaggaggagtcgcttgttgaagccaatggcaatgactttaggtaccttccctntggtgtnngcagaa

SEQ ID NO: 285576 - DNA, 201 bp, Glycine max
  unsure (1)..(201): unsure at all n locations
gtgttagccctaaacttcaccttcaaccatgaccacagtgccaccacacagtgtccaagtgcacacaacaacacaccgctacgangccggcgtcgtcccgccggctcgttttgaggcgccgcgttacgaagccggcatcaaggcgccctcttccatttaccattccgagagaggtccgacgacctctcaggttctcgcagt

SEQ ID NO: 285577 - DNA, 246 bp, Glycine max
  unsure (1)..(246): unsure at all n locations
gagaccagcttttgcttctttgtgaacatggagatgaggaaatcatgtggnnnnnnnnnnnnnnnnnnnnnnnntgtctttgcttcccaggtggtggtgcagacggagggaagagtgtgtgagtcacaaagccacgggttccatggtttgtgtaatagagaccacaactgtgctttggtctgcaggaacgaaggtttctccggtggcaggtgcaaaggcttccgccgccgctgcttttgcaccagg

SEQ ID NO: 285578 - DNA, 247 bp, Glycine max
ccgtcaccgagcgtgtccttgcagcatgctacaaggctttgaatgatcaccacgtccttcttgagggtaccctattgaagccaaacatggtcacccccggatccaattctgctaaggtttcccctcaggtggttgcggagacactgttagagcccttcagagaaccgtgcctgctgcagttcctgctatcgttttcttgtctggtgggcagagtgaggaggaggcatccgttaacctcaatgccatt

SEQ ID NO: 285579 - DNA, 246 bp, Glycine max
  unsure (1)..(246): unsure at all n locations
agaatcaaagaaaggggtggtggctgcttcgaaagcttaataatttgtttatttccagaacatcatagtttnccgcagcagcaaactaacaaattactcatatcatataataagatggcccgttctctctcgcaagccaaacgtattggtgtccttgttgctcaatctatcnccctaattcccgttcatcggcgaggttacgcagtggcatccgatgtatcggtaagagttggattgggtaatatt

SEQ ID NO: 285580 - DNA, 245 bp, Glycine max
  unsure (1)..(245): unsure at all n locations
cggttcgcggccganccggtccgcgggaaccgggtactggaaggcaaccggngcggataanccagncccgtaaaccganaccggttgggatcaagaaagcgttggttttttacgctggaaaagcgcccaagggagaganaactaactggatcatgcncgagtatcgtcttgcagacgtggatcgttccgttcgcnaaangaacagcttaaggctggatgactgggtgctgtgccgaatttacnac

SEQ ID NO: 285581 - DNA, 246 bp, Glycine max
  unsure (1)..(246): unsure at all n locations
ccagctacagcgcaaganaagaaactgtttcttgttgaccttggattagcaacaaaatggagagacacctccagtggacagcatgtggactatgatcaacgtcctgatatgtttagaggaactgttcgatatgctagtgttcatgctcatttggggagaactgctagtagaagagatgatcttgaatctcttgcatacacactagtcttcctccataagggccgattaccatggcaaggttaccag

SEQ ID NO: 285582 - DNA, 248 bp, Glycine max
  unsure (1)..(248): unsure at all n locations
ttttcttagatagagttgttaccatttgctcccagtacagagcttaaccgagcttcacaaagatgaatcgggaaaagttgatgaagatggccggttcggttagaactgggggaaagggtaccatgagaagaaagangaaggctgtccacaagacaacaaccacagatgacaaaaggcttcagagcaccctgaagagaataggggtgaatgccatcccggctattgaggaggtcaatatctttaaggat

SEQ ID NO: 285583 - DNA, 251 bp, Glycine max
  unsure (1)..(251): unsure at all n locations
tccaatccaagnaatagctccaagtatatcatttgcagcaatagggctactggatatgttcaacactggaggagcagtggagcaggttgagattcataaccgagcagcaacgaaaacaatagctcttagtgtaaggggaagaggcagatttggagtttactcctcccagagaccactgaagtgtgtggtaggtggcgctgaaaccgncttcaactatgactcagagaccgggttgacaaccttctccattt

SEQ ID NO: 285584 - DNA, 245 bp, Glycine max
ggagctttggttccgtccttgatataattccccttgctgattcagtaaccaagttaactgccagatgtgaaatctgtgggaagcgtgcttgctttaccctgaggaagacacaggataagcagattgagctgattggtggtgttgatgtctacatgcctgtgtgtcgccagcactatgtcagtggacaggtagccatggaagccacaaggcatgtccttgaatctcacaaggttgaatgtgcctcc

SEQ ID NO: 285585 - DNA, 245 bp, Glycine max
  unsure (1)..(245): unsure at all n locations
gaagaactaaaggataaatttgagggtctttgccatgtgatcaaggatgtgttgggtgacaaggtggagaaagttgtggtgtctgatcgtgttgtggattctccttgctgtctggtgacaggtgaatatgggtggacagccaacatggaaaggattatganagcacaggcattgagggacagcagcatggctggatacatgtcaagcaagaagacgatggagattaaccctgaganccccatcat

SEQ ID NO: 285586 - DNA, 242 bp, Glycine max
catcaacggatttggaaggattggccgtttggtggccagggttgctcttcagaggaatgacgttgaacttgttgctgtcaacgatcctttcatcaccactgattacatgacatacatgttcaagtacgacaccgttcatgggcagtggaagcattttgatgtgaagctgaaggactctaagacccttctcttcggtgagaagcccgtcaccgtttttggattcaggaaccctgaggaaattc

SEQ ID NO: 285587 - DNA, 244 bp, Glycine max
  unsure (1)..(244): unsure at all n locations
aaaacaaaaagtttacgttacaaatcgcataataaccgtcctaagtttattgagagaattttgcaagtgtgaganacatggcatctcgtcaaaacancaagcaagagcttgatgaaagancaaggcaaggagagactgttgtcccgggtggaactggtggcaagagcctggaggctcagcaacaccttgctgaaggaaggagcaagggagggcaaacnaggaaggaacagctgggtacagaagg

SEQ ID NO: 285588 - DNA, 246 bp, Glycine max
agacaggtgtagcaccaaacattgctccttacttgaatgtcgatcctcttactgggaactactatccaattgtttatttcaatgagttctggttactcagggataagctgatacctttaaacgagacagtgactgaattatcacttaacctggaagttggtcccattagtatgacaaagtggcagttattcctgcagattgaccagtccttccagattcaccgtagttatggaagcatgcttgaag

SEQ ID NO: 285589 - DNA, 245 bp, Glycine max
gtttataaaggagttatgccagatggaaatactgttgccataaaaaggcttagctataacacaacacaatgggcagagcatttcttcactgaggtcaatttgatcagtggcattcatcacaaaaatctagtgaaacttttagggtgcagcattacaggacctgaaagccttcttgtttatgaatatgtgcctaaccagagcctccatgatcacttttctgttagaaggacttctcaaccgctgac

SEQ ID NO: 285590 - DNA, 243 bp, Glycine max
  unsure (1)..(243): unsure at all n locations
ctcatctctgctgtggacttctgccacagccgcggcgtctaccaccgtgacctcaagccagagaaccttctcctcgacgacgacggcaacctcaaggtcaccgacttcggcctcagcactttctccgagcncctccggcacgacggcctgctgcacactacgtgcggcacgccggcctatgtcgcgcccgaggtgattgggaaaagaggctacgacggcgccaaggccgatatttggtcttgt

SEQ ID NO: 285591 - DNA, 243 bp, Glycine max
ataaattggagttcagcagagttttggaggctatcaaggctaacttcaacgacaaatatgacgagtacagaaagaagtggggtggtgggatcatgggatccaaatcccaagcgaaaaccagagcaaaggagaagcttcttgccaaggaagctgctcagaggatgacttaggaggagtttcttatattttgttgttttgcgaatgctatttagtctgtgttttttaatgttactctcttttaat

SEQ ID NO: 285592 - DNA, 243 bp, Glycine max
  unsure (1)..(243): unsure at all n locations
tttcacagcagcaatggtgtacgtcaaggctcagaaatcaaaagcctacttcaagagatatcaagtcaagttcaagagaagaagagagggaaaaaccgattaccgtgccaggattcggttgattaatcaggacaagaacaaatataacactccgaaataccgatttgttgttcgctttagcaacaaggacattgttgcacaaataatatctgctagcattgctggcgatattgttctgcngca

SEQ ID NO: 285593 - DNA, 255 bp, Glycine max
  unsure (1)..(255): unsure at all n locations
tcaaatggaagcattggcggtgggattagaaaaatccgaaacgagattcgtgtgggtggtgaagacggcttccacgaaggaagaaatggatgaagggttcgggttggtaccggaggggtttgcggatcgggtttcgggtcggggcttggttgtaaccgggtgggccccacaagtggcgatactgagtcaccgagctgtgggggggtttgtgagtcactgcggatggaactcggtgttngaggcgatgacgagtgg

SEQ ID NO: 285594 - DNA, 252 bp, Glycine max
caagatcgtggtggagaaatccacagtccctgtcaaaactgctgaagccatagagaagattctgacccacaatagcaagggaatcaaattccagattctatcaaaccctgaattccttgcagagggaactgcaatcaaagatctctttaacccagaccgtgttcttattggaggcagggaaaccccagagggccaaaaagctattcaaacattgaaggatgtttatgcctcaatgggtccccgaagaaagaa

SEQ ID NO: 285595 - DNA, 259 bp, Glycine max
  unsure (1)..(259): unsure at all n locations
gnaatggctgaagcacaactacgagaccagcatggcaaccctgtcccacttcaccgatcaatacggtaattccggttatcttaactgacgagcgcggtaatcccgtccaactcactggtgtcgctaccaccgctaccggcacagcaggttctgggtttgggtcctatggtaccggtgcttacggtggtggtgcaagtgcaaccaccgttgcagatcttttggcaacccaaccaaggagtggcagggaggctagagagct

SEQ ID NO: 285596 - DNA, 246 bp, Glycine max
  unsure (1)..(246): unsure at all n locations
antcgcgaaaaaatggttgagacaatgtttgagaagtacaattttgctggagtgtttatccaaattcaagctgttctaacattatatgctcaaggtttgctgactggattagttattgactcaggcgatggtgtcactcatgtggttccagttgttgatggctattcttccctcatctaactaaacgaatgaatgttgctggtcgacatataacctcctatctgttgatttgcttcaaggaggggg

SEQ ID NO: 285597 - DNA, 256 bp, Glycine max
tgataccaacaagaaaagaaaaaaagaagagttgagattccctttgaagaaaagatggcatcccataggcaaagctatgaagctggtcaaactaagggccgaactgaggaaaagacgaaccagacgatgggcaatattggagagaaggctcaagctgcaaaggagaagacccaggaaatggcccaagctgcaaaggagaagacccaacaaacagcccaagctgccaaggacaagacttgcgacacttcccaagcgg

SEQ ID NO: 285598 - DNA, 261 bp, Glycine max
  unsure (1)..(261): unsure at all n locations
gaaatggctgaagcacaactacgagaccagcatggcaaccctgtcccacttcaccgatcaatacggtaatccggttatcttaactgacgagcgcggtaatcccgtccaactcactggtgtcgctaccaccgctaccggcacagcaggttctgggtttgggtcctatggtaccggtgcttacggtggtggtgcaagtgcaaccaccgttgcagnttttnggcaacccaancaggggtggcagggaggctanatcncntcccc

SEQ ID NO: 285599 - DNA, 259 bp, Glycine max
gaagatggccaccgttccagggcagctcgtgtgggagatcgtgaagaaaaacaactcctttttggttcaagcagttcggaagggggacccagagcgtcgaattcagcagagagagcaacaatctctacaacctcaattcgttcaagtactctggtttggcaaacaagaaaactgttacggtacagcctgagggtaaagatcaggctgtgttgttgggctacaacaaagacaaagaagcaaaacagcccgctgcattgct

SEQ ID NO: 285600 - DNA, 255 bp, Glycine max
  unsure (1)..(255): unsure at all n locations
anatctatgtgatgaacttcattttgatccacaaaaggccagtgagcttcatgaagaaatttatcggcaaaagcttcaggaatgtgtagctgatggggagctcaatgaggaagatgntgctgctttgttgacgttgcgtgtaatgctctgcataccgcaacagattgttgaaacagctcattcagatatatgtggcagtttgtttgaaaaggttgtgaaggaggcaatcgcatcaggggttgatggatatgatgc

SEQ ID NO: 285601 - DNA, 252 bp, Glycine max
  unsure (1)..(252): unsure at all n locations
cgttgaagtcgatgtggcggcagcagcngcagcagggctgccgaagaagagaacgttcaagaagttcagttttcgaggcgtggatctcgatgcacttctcgacatgtccaccgatgaactcgtcaagatgttcagtgcccgcgctcgtagaaggttccagagaggcctcaccagaaagcccatggccttgatcaagaagctccgtaaagcgaaaagggaagctcccaccaggtgagaagccagaaccagtac

SEQ ID NO: 285602 - DNA, 249 bp, Glycine max
tctctactactgctagctgtgacttgttttgagttcaatcaaatcgcattggtatctgaaattcaggaaagatggttagcgtagtgagatcaggcaggcacaaagggcagaaggcccagcaaccatccttgccattggaactgcaaacccaccaaaccgtgttgatcagagcacctatcctgattactacttcagaatcaccaacagtgaccacatgaccgagctcaaagagaaatttcagcgcatgtg

SEQ ID NO: 285603 - DNA, 251 bp, Glycine max
tcaaagaaaggggtggtggctgcttcgaaagcttaataatttgtttatttccagaacatcatagttttcgcagcagcaaactaacaaattactcatatcatataataagatggcccgttctctctcgcaagccaaacgtattggtgtccttgttgctcaatctatctccctaattcccgttcatcggcgaggttacgcagtggcatccgatgtatcggtaagagttggattgggtaatattgggcgaggaa

SEQ ID NO: 285604 - DNA, 265 bp, Glycine max
gggaagtgcaggtttaaccagtcaaatgatgaagaagtctgactgatgcttgttgggcactttcatatctttctgatggtacaaatgacaaaattcaaggtgtaattgaagctggtgtttgtagccggcttgttgaccttcttttgcacccttccccttcagtgctattcctgctcttcgtactgttggaaatattgttactggagatgatttgcagacacaggtcatcattaaaccatcaagcctcccacgtcttctgaatatc

SEQ ID NO: 285605 - DNA, 254 bp, Glycine max
  unsure (1)..(254): unsure at all n locations
gngaaacactgtactggttgatgcgctctcacgacgcattcccttggtcagtgacagacctacaattatttttggagctgatgtgactcatccacatcctggagaggattcaagcccatcaattgcagcagttgtggcttcgcaagactatcctgaaattacaaagtatgctggtttagtttgtgcccaagtncataggcaggacctcttggggttntttnaaaaaaggggnnaanccnncngggggggggggg

SEQ ID NO: 285606 - DNA, 253 bp, Glycine max
cctagtaagccgcaatggtgaagtactcaagggagcctgacaatccaactaagtcttgcaaggctagaggcgccgaccttagggttcattttaagaacacaagggaaactgcctttgcaatcaggaagttgcccttggtcaaggctaaaaggtacttggaagatgttcttgcccacaagcaggcaattccattcagacgtttttgtcgaggtgttggaaggacagcccaggctaagaatagacactctaatgg

SEQ ID NO: 285607 - DNA, 252 bp, Glycine max
  unsure (1)..(252): unsure at all n locations
tccacaactgctttgctcncaccggcgaggttgtttcggccaaggtcattcggaataagcaaactggtcagtccgagggatatggattcgtggagttctattcgcgagggacggctgagaaagtcttgcagaactataatggcacgatgatgcccaatacagatcaggcattccgtctgaattgggccacattcagtgccggggaaagacgttcctccgatgctactttcggatctctctatatttgttggg

SEQ ID NO: 285608 - DNA, 249 bp, Glycine max
  unsure (1)..(249): unsure at all n locations
aaaatcaagancaatggcttatgctaggcttgctcctatggctgtcttcttgcttgccacttccaccataatgttcccaacgaagatagaagcagcagattgtaatggtgcatgttcacctttcgagatgccaccgtgccgctcacgtgattgtcgttgtgtccctataggactagttgctggtttctgcatacatccaactggactttcatctgttgcgaagatgatcgacgaacatcccaattatgt

SEQ ID NO: 285609 - DNA, 246 bp, Glycine max
gcgatgcggatgaggcgccactcgatgtttccatttgcctgcatgcctttggtattgtggggtgtggttcgtttagtggtgtcaagtcttgcgaacgtgagggtgcatgagtggtaatcgggatgtttttgttgcacgctccatgcttgcgcatgcaacgtgtgacatgcatccttttcattgtcaccttagcctcgtggcttaggtgctgacgattggttcctgtgttgcctacctaccaaacgg

SEQ ID NO: 285610 - DNA, 245 bp, Glycine max
  unsure (1)..(245): unsure at all n locations
gnattttgagaatgctgatgatgctgctagggctgttgaggctctcaatggcaaaaagtttgatgacaaagaatggtatgttggaaaagctcaaaaganatctgaaagggagaatgaattgaaacaacgatttgagcagagcatgaaagaagctgctgataaatatcaaggggcaaacttgtatgtcaaaaatttagatgatagcctcggtgatgataaactaaggagctgttctcccctttggt

SEQ ID NO: 285611 - DNA, 247 bp, Glycine max
  unsure (1)..(247): unsure at all n locations
gtgaaaatcatgcccgtcctgttcttggaggaaatgacacctttccttatccctcgtagggggagaactggtagaaaaccaacaaggaaagatccnnaatagtgagagtaggagcaatgatgtttatactccaagagatgaggcttttggacacttgaagtcatctganttnttattatggactaaaatccgtatctcnnaaatgttcttccattattgcaatctgcncttgatttgaattcacacc

SEQ ID NO: 285612 - DNA, 250 bp, Glycine max
agaagagaagatgacaacacgcttcaagaagaacaggaagaagaggggccacgtcagcgctggccacggttcgaattcggaaagcacaggaagcaccctggaggacgcggtaacgccggaggcatgcaccaccacaggatcctcttcgacaaataccaccctgggttcttcggcaaggtaggaatgcgctattttcacaagcttcgcaacaaattctatctccgatcctcaacatcgacaagctgtggtc

SEQ ID NO: 285613 - DNA, 253 bp, Glycine max
  unsure (1)..(253): unsure at all n locations
aaaaaaaancagtggtgcgcgatgccaccgaagttcgatcccttgcaggtggtggacgtgttcgtcccgagtacaccggcggcgaggtcggcgcggcgagttccctcgctccaaagatcggtccattgggtctctccccaaagaagatcggagaagacattgcgaaggaaaccgagaaggactggaagggcctccgngtgacggtgaagctgacantacagaaccggcaggcgnaggtnacgtggtnccctcc

SEQ ID NO: 285614 - DNA, 250 bp, Glycine max
gttcgaccctgtcgttgaaagggtcatcaagaagcgccgtgagatcgtcagaaggagaaagaacggagaagttgttgagggcgaggccaacggcgtcttcctcgacactttgcttgaattcgctgaggacgagaccatggagatcaaaattaccaaggagcaaatcaagggccttgttgtcgactttttctctgcagggacagattccacagcggtggcaacagagtgggcattgggcagagctcatcaa

SEQ ID NO: 285615 - DNA, 243 bp, Glycine max
  unsure (1)..(243): unsure at all n locations
caccagtttcaccgcacgaatatcttgttgtttggagcgatccgagaaaaactctgtaaacatgttggtttaccaggacctccttacaggtgatgagcttctctctgactccttccgttacaaggaaattgagaatggaatgctgtgggaagttgaggggaagtgggttgttaaaggagcagttnatgtagacattggtgcaaacccttctgctgagggtggaggagaagatgagggagttga

SEQ ID NO: 285616 - DNA, 244 bp, Glycine max
  unsure (1)..(244): unsure at all n locations
gaagatggagatgtatcagatctggagcaggagaatagcgttgggagcgttcgcgtttgtncctgcttttcctatcggcctcagcagacgacgtcgttgtgctctctgaagataacttcgagaaggaagttggtcaggacagaggagctctcgttgagttctatgctcctggtgtggacactgcaaaaagctgctccagaatatgaaaagctggtagcagctcaagaaagccaaatcgttttaa

SEQ ID NO: 285617 - DNA, 253 bp, Glycine max
  unsure (1)..(253): unsure at all n locations
cttcgagcagggcccaaagccatcacaattgaaggggtccgtagncgncaggccacgatgccataccgaattggacaatttcggggttcgttgaatacataaaatcaggacaaaaacagggtgacatgttactggttgtgcccgagggtgactatgcagttagacttggcaacgaagcttccattaagcagaagctgaagctgattaangggtccttctactccatcacgttcagtgcngctcgaacctgtgc

SEQ ID NO: 285618 - DNA, 260 bp, Glycine max
  unsure (1)..(260): unsure at all n locations
agaatcaaagaaaggggtggtggctgcttcgaaagcttaataatttgtttatttccagaacatcatagttttcgcagcagcaaactaacaaattactcatatcatataataagatggcccgttctctctcgcaagccaaacgtattggtgtcctngtngctcaatcnnnccccctaattcccgttcatcggcgaggttacgcagtggcatccgatgtatcggtaagngttggattgggtaatatngggcgaaggatggaa

SEQ ID NO: 285619 - DNA, 249 bp, Glycine max
  unsure (1)..(249): unsure at all n locations
gactcttagccgccgatctctcagggcttgcatcttctcaggnaagctgtgaagatgnacacatcaaggaaganaatccacaagganaaggangctgaaccaactgaatttnaagagtcagttggacaggcattgtttgatctggaaantaccaatcaggagcttaaaagtgatctgaaggnttnatacataanctcagccgtgcaagttgatgtttctggaaaccgcaaggctgttgttattcatgtc

SEQ ID NO: 285620 - DNA, 249 bp, Glycine max
  unsure (1)..(249): unsure at all n locations
attccggtgcaaaatgaaggtcancgccgcctacttgctcgccgtattgggaggcaatgcagccccttccgctgatgacttaaggaccatccttggctccgttggagctgacgcgaatgatgacaacatcagcaacttcttgtnctgangttaagggcaaagacattgcggagttatgcgccgccggtagggaaaagttggcctccgtgccttctggcggtggccccgngnttnccnggnncncccccc

SEQ ID NO: 285621 - DNA, 247 bp, Glycine max
ttttcttggagaatccaatcatataaaacaaagttggtattattcaagggccctcataagatccaaggaattggtgctggcttcatccctggtgttctggatgtcgatttacttgatgaagttgttcaaatttcaagtgaagaagccattgaaactgctaaacttcttgcttgaaagaaggtttgctggtgggaatatcatctggtgcagctgcagctgctgcaattaagatagcaaagaggccagc

SEQ ID NO: 285622 - DNA, 237 bp, Glycine max
gtggactgcttgtgagagggccaagagaacactttcatcgactgctcagaccaccattgaaattgattctctatacgagggaattgatttctactccactgttactcgtgccagatttgaggagctcaacatggatctctcaggaaatgtatggagccggtggagaaatgtttgagggatgctaagatggacaaaagaagtgttgatgatgttgtcctgttggtggttctaccagaa

SEQ ID NO: 285623 - DNA, 277 bp, Glycine max
  unsure (1)..(277): unsure at all n locations
aggaggaagagagagcgtgcaagttccggccaccaccgaccatgacattcaancgcaggaatggaggtcgcaacaaacacggccgcggccacgtcaaattcatccggtgctccaactgtggcaaatgctgtcccaaggaaaggccatcaagaggtttctggtgaggaacattgttgaacaggctgcagtcagagatgtgcaggaagcttgtgtctatgaacaatatactcttccgaaactctatgtgaagatgcagtactgtgtttcttgtgctatc

SEQ ID NO: 285624 - DNA, 271 bp, Glycine max
  unsure (1)..(271): unsure at all n locations
aaggagccaattttnttgccaccggaaagctcgtcagtcttagtgaacaacagctccttgactgtgacaacaagtgtgacataacagaaaagacttcatgtgacaatgggtgtaatggaggtcttatgacaaatgctacaattatttgctcgagtctggtgggttggaggaggagtcttcatatccctacactggggagagaggtgaatgcaagtttgatccagagaaaatagcagttaagatcacaaatttcaccaatatccctgctgat

SEQ ID NO: 285625 - DNA, 270 bp, Glycine max
  unsure (1)..(270): unsure at all n locations
tgcaattctgaagcctgataatganttgcaantcttgattgatacgggaggagaagaaaaaggcaaatttcttgtcttntgaggantttgancctcctcttataccttccaagacaatccctgatcctgatgataaaaacctgaggactgggacgaaagagccaaaatcccagacccaagtgctgtgaagccagatgantgggatgaggatgcacccatgganatcttagntgaagaagcagagaaacctgaaggatggttggatgatga

SEQ ID NO: 285626 - DNA, 267 bp, Glycine max
  unsure (1)..(267): unsure at all n locations
gtgttctctcccttccctttggtgtcgtgtcttccaaatggcnaaggtttngattcctctgttcaatcgggttttggtggagaaaatcgtgcctccatcgaagaccaccgctggcattttgttacccgagaantcaccaagctcaattccggaaaagttattgctgttggccctggntttcacagtaaggatgggaagctaattcctgtggctgtaaaggaaggtgacactgttcttttgnctgaatatgggggaactgaggtgaag

SEQ ID NO: 285627 - DNA, 271 bp, Glycine max
  unsure (1)..(271): unsure at all n locations
aaagcccttcatcagagataacttgacaaataaaatcaccatgtctatcatcccaaacttgttcggtggtagacgaagcaacgtcttcgacccattntctctggacgtntgggaccctttcgaggggtttccttttccacaggtcacgtgccttcctctggtggggaaagcagtgccatagccaacactcgcgtgnantggaaggagactccggcgnctcacgtgttcaacgttgatcttcccgggttgaagaagnaggaagtgaaggttt

SEQ ID NO: 285628 - DNA, 274 bp, Glycine max
  unsure (1)..(274): unsure at all n locations
aagttgagtagttctatcattgatgatggcctcatccacaaggaagagctcgcattggcantgttgaagaccaccactggcgagaatcttttccttgacagggtgtttgatgtcttcgatgaaaaaagaaacggcatatagaattcgaggagtttgtgcatgctctcagtatctttcatccttgcactcctctggaaaaaaaaattgattttgcttttagattgtatgacttgagacagaccggatatattgagcgagaagaagttaggcaaat

SEQ ID NO: 285629 - DNA, 272 bp, Glycine max
  unsure (1)..(272): unsure at all n locations
atttctcagttctcacactcattccgtgctctaaatctcaaattctagggttagggttcccaatttctccgccaatcagaagatgagttccaccggtggttctaccaagggcggaaggggcaagcccaaagcctccaatccgtttcaagatcgcagaaagctggtctccaattccccgttggaagaatcgctcgnttccttaaggctgggaaatacgctgagcgtgttggtgctggtgctcctgtgtacctctctgcagtgctcgagtatct

SEQ ID NO: 285630 - DNA, 271 bp, Glycine max
aattctccagagagaagaagaaacttaatcgatcatcacttcacttcactaatacatcatggcagacgagacccagaacaagtatgagagctctgaggttgaggtccaggatcgtggtgtttttgactttctcggaagaaaaaggatgaagaagacaagcctcatcctcaggaggaggtcatcgccaccgagtttcaaaaagtcactgtctcagaccaaggagagaacaagcacagcctcttagaaaagcttcaccgatctgacagcagct

SEQ ID NO: 285631 - DNA, 270 bp, Glycine max
ctcttagagagaaaaaaaaatggctgatacaggtggaggagatgcagtgagaccagtggtaatatgtgataacaagtgtggctgcacacttccatgcactggtggttccacttgcaggtgcacaagtgctggcactccacaggagggggtgatcacgtgacatgctcgtgcggagagcactgtggttgcaatccatgctcatgtcccaagattgcggctgctggaagtggttgcagatgtggcacagattgtgcatgtgcctcctgccgc

SEQ ID NO: 285632 - DNA, 268 bp, Glycine max
  unsure (1)..(268): unsure at all n locations
agaacagggactcactctcttcgcagcggcactctcggtggctttcatcttctcgggttgtcaagatgtacacatcgaggaagaaaattcacaaggataaggatgctgagccaactgaatttgaggaatcagttgacaggcattgtttgatctagaaaataccaacaatgagctgaaaagtgatctgaaagntttatacataaactcagctgtccaaattgatgtttctggcaaccgaaaggctgtggttatccatgtcccctacaga

SEQ ID NO: 285633 - DNA, 273 bp, Glycine max
  unsure (1)..(273): unsure at all n locations
accgagtttgggcgtttagatcagaaccaaatcgtgttctcttccattggcaaacatggcaactcaaatgagcaagaagagaaagtttgttgcggacggagtgttctttgccgaactgaacgaggttctgacacgtgattgncggaggacggttactccggcgtcgaagttagggttacgccgatgcgcaccgagatcatcatcagagccaccagaacccaagccgttctaggtgagaagggaaggagaattagggaacttacctcagtggtg

SEQ ID NO: 285634 - DNA, 275 bp, Glycine max
  unsure (1)..(275): unsure at all n locations
ctgcaagacatgcaagaccatgcaaggnaagcagctgcaagacatgcaaggnatgcaaaggtggaggcnaganatgtaaagagaacaacagtgacagcaacaaccgcaaccgcatgaacgtgatgagtattaatgtgttttatgaacttatgatgttggtttatgtggggaaataaatgatgtatgtacctcttcttgcctatgtagtaggtttgggtgttttgttgtctagctttgcttatttagtaattagtagaagggacgttcgttcgtgt

SEQ ID NO: 285635 - DNA, 271 bp, Glycine max
acctaattccccattcatccatctttacgtgtttgttggattccatggccaaaagctccttgcaagcttgaacatcccttggaaagaagacaggctgagtctgctcgcattagagacaagtatcctgatagaatactgtgattgttgagaaagcggaaagaagtgacatcccagacatcgataagaagaagtaccttgtcccagcggatttgactgttggtcagtttgtttatgttgtccgtaaaaggattaaggtcagtgcggagaaggc

SEQ ID NO: 285636 - DNA, 267 bp, Glycine max
  unsure (1)..(267): unsure at all n locations
tcccatagcagcgatgggaatcgntcttaaggctgggggtaagagcaaaaagaccaaaagaacancaccaanatccantgacatctacctcanattanttgtcaagctttatcggttccttgttcgaangactgcagcaatttcaatgctgttatactcaancgcttgttcatgagcaaggttaacaagcctccantttctttgtcaaggttaattaagtatacaaaggggaaggaggataaaattgctgtaatagtggggactgta

SEQ ID NO: 285637 - DNA, 267 bp, Glycine max
  unsure (1)..(267): unsure at all n locations
ctagcgctggcaatgctcgtggcaggnnctagcnaactaacagtagtagcatcgcgttgaacaaagcaagcgccagggcaagcgtcatccgagacaaccgatgctactactcttagttagctaggcgctggcaagctcgtggcaggtgcttggtcattaacggntgctacctggttgatcctgccagtagtcatatgcttgtctcaaagattaagccacccatgtgtaagtatgaactaattcagactgtgnaactgcgantggctc

SEQ ID NO: 285638 - DNA, 268 bp, Glycine max
  unsure (1)..(268): unsure at all n locations
tctcaatggcaaaaattttnatgacaaanaatggnatgttggaanaagctcagaaganatctgaaaggtnagaatgaattgaaacaacgatttgagcagagcatgaaagangctgctgataaatatcaaggcgcaacttgtatgtaaaaaatttagatgatagcattggtgatgaaaaacttaaggngctgttctccccttttggtaccattacctcttgcaaggttatgagagacccaaatggcttaagtcgtggatcgggttttgt

SEQ ID NO: 285639 - DNA, 268 bp, Glycine max
  unsure (1)..(268): unsure at all n locations
accgagtttgggcgtttagatcagaaccaaatcgtgttctcttccattggcaaacatggcaactcaaatgagcaagaagagaaagtttgttgcggacggagtgttctttgccgaactgaacgaggttctgacagtgaattggcggaggacggttactccggcgtcgaagttagggttacgccgatgcgcaccgagatcatcatcagagccaccagaacccaagccgttctaggtgagaagggaaggagaattagggancttacctcag

SEQ ID NO: 285640 - DNA, 271 bp, Glycine max
  unsure (1)..(271): unsure at all n locations
ananatnggagcgtggaacctctctctntctctctntctctctnaggaaaccggaatatcncanttctctgannagatccatccgnngncgnntcagngataatggctccgtncancngcnatnanacggcaccgttttcggnttccttgganccgcagcngcnctcgtcttctcctgtatgggagctgcctatggnacagcgaagagtggcgtttagcgtggcttcgatgggtgnnatganaccagagctggtgatgangtctattgtcc

SEQ ID NO: 285641 - DNA, 272 bp, Glycine max
atcaaagaaaggggtggtggctgcttcgaaagcttaataatttgtttatttccagaacatcatagttttcgcagcagcaaactaacaaattactcatatcatataataagatggcccgttctctctcgcaagccaacgtattggtgtccttgttgctcaatctatctccctaattcccgttcatcggcgaggttacgcagtggcatccgatgtatcggtaagagttggattgggtaatattgggcgaaggaatggaatcgtgggaggtgtag

SEQ ID NO: 285642 - DNA, 272 bp, Glycine max
ataaatataatccagacccaacaatttgctaaggctgatcctgccgccaccacaggggttcagtatgacaaggagtttattgtatgctctcttgatttgctttctggactagcagagggtcttggcagtgggataggagtttggttgcacaatgttctttgagggacctacttctgcattgttgtgtggatgatgctcctgatgtaagacaaagtgcctttgccttacttggagaccttgcgcgagtgtgctcggttcatttggactctcgt

SEQ ID NO: 285643 - DNA, 267 bp, Glycine max
aaagatagcaccttaatcatgcaacttctcagggacaacctaactttgtggacttctgacatcccagaagatggagaagatgcccagaaagtgaatggcactgccaagcttggtggaggtgaggatgcagagtagtccgatggatgatggaatcttccataggattcgatgcatgcgtttgggaatgaaacatgagggccgattacttatctgtgtattagctagagatagggattctattgtttcctctttgtttcctgttggatt

SEQ ID NO: 285644 - DNA, 268 bp, Glycine max
  unsure (1)..(268): unsure at all n locations
atggtacccgggaaaatgtttgactcagaaggttttgaagaaaaagcctaagaagggttcaaagaatgctaaaccaattaccaaaaccgagagctgtgaaagtttcttcanttttttcaaaccaccagaagtcctgaggatgatgttgacattgatgaagatttggctgaggaacttcagaatcagatggaacaagattatgacattgggtcaacaataagagacaaaattatccctcatgctgtatcatggtttactggggaggctg

SEQ ID NO: 285645 - DNA, 276 bp, Glycine max
  unsure (1)..(276): unsure at all n locations
gcgcttcagcacaatgggtgcctacaagtatgtttcggagctatggcgcaagaagcagtctgatgttatgagattcttgcagcgggtgaggtgctgggagtatcgccagcaaccttctattgtccgtttgacaaggtcactcgcccagataaggctcgtcgcttgggtttcaaggctaagcagggttacgtgatttaccgtgttcgcgtacgaaggggtggccgtaaganaccagttccaaagggtattgttnatggtaagcccaccaaccaaggt

SEQ ID NO: 285646 - DNA, 265 bp, Glycine max
  unsure (1)..(265): unsure at all n locations
gtgagcctcgtcgacggttacaatctccccatgatcgtggagccacagggcggaagcngcgccggaaactgcagcgccacggggtgcgtggtggacttaaacacgccgtgcccgacggagctcaaggtgagagcagcggagatggcgtggcgtgcaaaagcgcgtgtgaagcattcgatgatccacaatactgctgtagtggcgcttacgcgacgcctgacacatgcaaacccagttcatactcgcagnncttcaagagcgcgtg

SEQ ID NO: 285647 - DNA, 264 bp, Glycine max
cggtggataggaaacagtacatttgctgatgttttggttgtctttgctaggaatgcatcaactaatcagataaatggatttattattaaaaaggatgctcctggtttaacagtcacaaaaatagagaataaattggactcaggattgtacaaaatggagacattgttatgaggaaagtttttgtccctgacgaggacagaattgcaggagtaaactcttttcaggacacaaacaaggtacttgctgtttcacgcgtaatggttg

SEQ ID NO: 285648 - DNA, 264 bp, Glycine max
  unsure (1)..(264): unsure at all n locations
tcagaaattagaatggctagccaatcaaacactaaatcagttcangatttcacagttaaagatgccaggggaaatgatgttaatctcgccgattacaaaggaaaggtccttctccttgtcaatgttgcccacaatgcggcttgactaattcaaactacacagagcttaatcaattgtatgagaaatacaaagggaaaggacttgaaattctggcattcccgtgcaatcagtttggggctcaggagccaggaactaatgaagaga

SEQ ID NO: 285649 - DNA, 265 bp, Glycine max
  unsure (1)..(265): unsure at all n locations
gaagaagaagatggtgtccttnaagcttcagaagcggctcgccgctagcgtcctaaagtgtggcagangcaaggtctggctcgatccaaatgaagtcaatgaaatctccatggccaattctcgacaaaacaaaganagttggttaaggatgggtttattatcaggaagccaactaagnttcactctcgctctcgtgctcgtcgaatgaaggaggccaagaggaagggacgtcactctggctatggtaagcgtaagggtacaaggg

SEQ ID NO: 285650 - DNA, 260 bp, Glycine max
  unsure (1)..(260): unsure at all n locations
gcaatgacaaaactgctgatggccctactgttggaccacgaggtatctattgtgggcatgangatactgttgaagacgtggctttctgcccatctagtgcacaggagttctgtagtgttggagatgatcttgtctcatcttatgggatgcacgtgttggctctagccctgtggttaaggttgagaaagctcataatgctgatcttcactgtgtggactggaatccccatgatgataatctgattcttactgggtcagcag

SEQ ID NO: 285651 - DNA, 261 bp, Glycine max
  unsure (1)..(261): unsure at all n locations
tgcattttgatttcatggaccctcctgctcccgagaccttaatgcgtgcattggaagtgttgaattacttgggtgcactggntgacgatggtaacttaactaaactgggtgagattatgagtgaattcccttggaccctcagatgtcaaagatgctcgttgtcagtcctgaattcaactgttcaaatgagattctgtcagtttctgccatgctttcaggtattaatcttttatcttgtttttttatgtcggtccagtatcc

SEQ ID NO: 285652 - DNA, 271 bp, Glycine max
  unsure (1)..(271): unsure at all n locations
tgcaaaggatcttgcatcaagagatgtagtttcaagagcaatgaagatggagattcgggaaggtcgtggtgtaggacccctgaaagatcacatctatctccacttgaatcacttgcccccagatgtgctcaaaggagacttcctggnatctctgaaactgctgctatttntgntggtgtggatgttacaaaggaacccattcctgttttgccaactgtacnttataacatgggcggtattcccacaaaccattatggagaggtggttacca

SEQ ID NO: 285653 - DNA, 265 bp, Glycine max
  unsure (1)..(265): unsure at all n locations
aaatcaaagaaaggggtggtggctgcttcgaaagcttaataatttgtttatttccagaacatcatagttttcgcagcagcaaactaacaaattattcatatcatataataagatggcccgttctctctcgaagccaaacgtattggtgtccttgttgctcaatctatctccctaattcccgttcatcggcgaggttacgcagtggcatccgatgtatcggtaagagttggattgggtaatattgggcccnaaaatggaatcgtgg

SEQ ID NO: 285654 - DNA, 265 bp, Glycine max
  unsure (1)..(265): unsure at all n locations
attcaggacaaagagggtatcccaccagaccaacagaggctcatctttgctggaaagcagctagaagatggccgaaccttggctgattacaacatccaaaaagantctaccctccanttggttctccgcctcgtggtgggatgcaaatctttgtcaagactctcactggnaagaccatcacccttgaggtggagagctctgacactattgacaatgtcaaagccaanattcaggacnaagaaggtntcccancagaccancagag

SEQ ID NO: 285655 - DNA, 270 bp, Glycine max
  unsure (1)..(270): unsure at all n locations
tctgtcgttccgtcgttnacgatggcgnttcgggtgcgaaccctcgacctccgntctctctttcttctctctctcttgtccatcgcttccgccaatgtcttcttcgaagagcgtttcgatgacgggtgggaaatcgatgggttaaatcagattggaaaaaagatganaacgtggctggggagtggaaccacacctctggtcaatggaatggagacgctaatgacaaaggtattcaaaccagtgaggattacagattctatgntatttcag

SEQ ID NO: 285656 - DNA, 259 bp, Glycine max
  unsure (1)..(259): unsure at all n locations
caaacctctgccataagacgcctcacttacgacaactctgtggccatggttccattcggaccttactggaagttcgtgaggangctcatcatgaacgaccttcttcaacgccagcaccgttcaacaagcttcaggccttgaggacccnacagatccgcaagttccttagggttatggcccaaagcgccagaggcccagaagccccttgnacgttaccgaggagcttctcaaatggaccaacagnaccattctccatgat

SEQ ID NO: 285657 - DNA, 252 bp, Glycine max
gctgttgacaatgtgaacaccattattgcccctgctttggttggcaaggacccaactcagcagactgctattgacaacttaatggttcaacaacttgatggaactgttaacgaatggggttggtgcaagcaaaacttggagcaaatgccatattggcagtgtctcttgcagtctgcaaagctggtgctgctgtcctgaaagttcctctttacaagcatattgcaaatattgcgggtaacaaaaagttggttt

SEQ ID NO: 285658 - DNA, 255 bp, Glycine max
  unsure (1)..(255): unsure at all n locations
cnncaacaatctncttggnaagtttgancttactgggatccctccagcaccangaggngtncctcagatcaatgtctgcttcgaacatcgatgctaacgggattcacaatgtctccgcagaggacaagactgccgtgtgaagaacaagatcacgatcancaacgataagggnaggctnancaaggaggagattgncaagatgttgaaggatncnganaggtncaagggcggaggntgnagaggtgaagangaagg

SEQ ID NO: 285659 - DNA, 252 bp, Glycine max
  unsure (1)..(252): unsure at all n locations
tcccactttcttctccttttagggnttcctttttgtctctccnttccagatctgcatctntcattttttaggactaagcggtgagattcgtgaatctgagnaatgtcggattcttctcgggaggagaatgtttaatggcgaaattggcgganangccgancgttacgaggagatggttcagttcatggngaacgtagcaaagactgtggaagtngaggagttnacggtngangagngtaatcctctctctgt

SEQ ID NO: 285660 - DNA, 255 bp, Glycine max
  unsure (1)..(255): unsure at all n locations
aaatattgncattacaaagattactccatccactagagttgcactccgnaacgacagttatgttcttcacttagttctgccaagtaaagttgatccattggtcaatctgatgaaagttgagaaagtncccgattcacatatgacatgattggtggtttagaccagnaaattaaaganataagagaggtcattgagctaccaatcaaacatcctgagcngtttgnnagtcttngnattgnacaaccnaagggtgtc

SEQ ID NO: 285661 - DNA, 251 bp, Glycine max
  unsure (1)..(251): unsure at all n locations
cagagcgcggggaggaagagacacaagaggacactgaaagcgaagatgaggaggagcagatatataatcccctaaaattaccaatgggatgggatgggaagcctataccttattggctgtataagctacatggttgggtcaggaatttaagtgtgaganatgcgggaactacagttattgggggcgtcgggctttcgaacgacattttaaagaatggcgccatcaacatgggatgcggtgtcttggtatac

SEQ ID NO: 285662 - DNA, 254 bp, Glycine max
  unsure (1)..(254): unsure at all n locations
ggaaaccctagctggataggtcaaacatcatcatgtcggacgaagagcaccatttcgagtccaaggcagacgccggtgcctccaaaacctacnctcagcaagccggtaccatgtcgcaagaacggctacatcgtcacaaaggacgcccctgcaaggttgtggaagtttcgacttccaaaactgganagcncggtcacnncaagtnccactttnttggnattgatattttcactgccaaganacttgaggatatt

SEQ ID NO: 285663 - DNA, 254 bp, Glycine max
  unsure (1)..(254): unsure at all n locations
tgcacnntgccatnaagcgccgctcnannagaggggncaaatcantgcnnctccttcacgtgtngnggngtggaatgcgtnaaccagatcggtgccaagtttctgggaagtggtgttcgacgagcngggcatagatccacggggaagtacgtcggaaactcagatctgcaactcgagcgcntgaacgtctactacaatgaagcctcgtgcgggcgcttcgtgccacgcgcggtgctgatggacctggagcccgg

SEQ ID NO: 285664 - DNA, 255 bp, Glycine max
  unsure (1)..(255): unsure at all n locations
ctaattcggagaccttgcaagacttcatcaatggctgtcaaagtttntattgtgtacnactccatgtatgggcatgttgagaaactagcagnagaaataaagaaaggggntcctctgtggaaggtgttgaggccagttatggcaggtacctgagacactgctggatgaggtgcttggtaagatgagtgcaccacccaagagtgacgtaccagtcattacccccaatgaactatccgaggctgatggctttgtatt

SEQ ID NO: 285665 - DNA, 252 bp, Glycine max
  unsure (1)..(252): unsure at all n locations
ctgagtcaaccttaagtgcagaagttgaacttatttccacaataacagaaaagaaatcttggactagaccaccaattcagatggagtttcaggttcccatgttcacagcatctggtttacgtgttcgtttcctcaggtgtgggagaagagtgggtacaataccgttgagtgggttcgttacattacaaaagctggatcctacgagattaggngctagacagagtttgtattactggatggagaatgaagcna

SEQ ID NO: 285666 - DNA, 252 bp, Glycine max
  unsure (1)..(252): unsure at all n locations
acgaagatgatggactatggaagcccccaaagattcctaatccagcgtacanaggaccatggaaatgcaagaacaatcnagaaccccaactacaaaggaaagtggaagattccatggnttgataacccagaattcgaggatgatcctgatctgtatgttctcaagccaataaagtatgtgggcattgaagtgtgggcaggtgaaggcaggttnagtttacgacnatatcntaatttgtgangacccacagna

SEQ ID NO: 285667 - DNA, 249 bp, Glycine max
  unsure (1)..(249): unsure at all n locations
ggcaaagctatttttgaaacaggcaaagcaatacgcagatgcaagaccaagctatcctncncaactcttccaattcattgnnnccaagactccctctcactacctcgcttnggacgtcggcactgggagcggcaagctgccaaatctttagctgcaatatacaagaatgtgatagccacagatgctagtgacaaacaacttgaatttgcagccaagctcccaaatgtgagataccaacacaccccttca

SEQ ID NO: 285668 - DNA, 247 bp, Glycine max
  unsure (1)..(247): unsure at all n locations
tacaattgataatgtgaaagccaagatgcaggataaggagggtattcccccagaccagcagaggcntatctttgccgggaagcagcttgaagatggaagaacccttgcngattataacatccagaaggaattactttggacttggtgttgcgacttcgtggtggcatgnaaatcttcgtgaagactttgacgggaaagaccataactttggaggttgaaagctctgacaccattgataatgtgaagg

SEQ ID NO: 285669 - DNA, 250 bp, Glycine max
  unsure (1)..(250): unsure at all n locations
gttcacttccaggatttcaatgnggnagctctagagnaatttgttgaggaatctagtacncctgttgtgactgtcnttaacaatgatccgagnaatcacccttncgttgccaaattcttcaacagtcccaangcaaaggnaatgttgttcatcaacttcactgccgaaggtgctgaatctttcaaatcaaaataccgtgaagctgctgagcaacataaacaacagggtgtaagctttttggtgggagatg

SEQ ID NO: 285670 - DNA, 242 bp, Glycine max
  unsure (1)..(242): unsure at all n locations
gtgaganacaaaganagganataattgatctttgaaaatgcagggaggaaagananctggncagtcattcanggtaacagctgcnaacattggtgcttctgncaaggctggnatggagaanacnnagggcaagtccaggnganggcntanagaatnaacngnacgtgntccgatgcnaaaggngttggnaacccagnananagaggcaaagatgagccaggcagagctggacaagnaggcng

SEQ ID NO: 285671 - DNA, 253 bp, Glycine max
  unsure (1)..(253): unsure at all n locations
cagcttcggctagggntcagaaacgaaaaagggttcggtgttcnatncgcgangagagccaagtggaagaagaagcgtatgaggaggntgaagaggaagcgccgaaagatgagacagagatccaagtagtgcgtaaacctagtttgtttctgttgcttttacaattgcttatgttgtcgaatgggacacccagttgttagtggcactggtttctcctttttgatgtttgatacattnngttggattcaagtag

SEQ ID NO: 285672 - DNA, 180 bp, Glycine max
  unsure (1)..(180): unsure at all n locations
tgtctttgcttcccaggtggtggtgcagacggagggaagagtgtgtgagtcacaaagccacggttccatggtttgtgtaatagagaccacaactgtgctttggtctgcaggaacgaaggtttctccggtggcangtgcaaaggcttccgccgccgctgcttttgcaccaggatttgttga

SEQ ID NO: 285673 - DNA, 246 bp, Glycine max
  unsure (1)..(246): unsure at all n locations
ttcgcggagatcaatattttatctaggtccatcgtcgatagaagatacgagaaaccaaaggcaatgtttttgtgggattggttttatgggattctagcgtcgctcgggctgtggcagaaggaggccaagtcttattcttgggcctcgataacgctggcaaaactaccttgcttcacatgctcaaagatgagagattagtccagcatcagcctacccagtatcctanatcggaggagttgagtattg

SEQ ID NO: 285674 - DNA, 250 bp, Glycine max
  unsure (1)..(250): unsure at all n locations
ctcttcttctcttgcggncagggtttgagngnanttctnntagattcnanggaagatgggtaaggacaaggtncacntcagtattggnnttntnnggcatgntgactctgggaantccactaccantggcccctganctacaagcttggatgcattgncangcgtgttattgagagntttcagaatgaagcngctnagattgaacaanaggtcgttcaattatgcctgngtgcttgataagcttaaggcc

SEQ ID NO: 285675 - DNA, 246 bp, Glycine max
  unsure (1)..(246): unsure at all n locations
tcgttctgaacggaaaagcactggcgcagtaaccctgangctnctcttctcttctcttctctgtcgtgagtcaccatggtgagggttagtgtgctgaacgatgctctnaagagcatgtacaatgctgaaaaaggggaaagcgccaagtcatgattaggccatcctccaaagtcattatcaaattccttttggtgatgcaaaagcacggatacatcggagagtttgagtatgttgatgaccacaggg

SEQ ID NO: 285676 - DNA, 247 bp, Glycine max
cctagatgcttcctcgacatcaccatcggcggcgagttagaaggcaggatcgtcgtcgagctcttccacgacgttgttcccaaaaccgccgagaatttccgcgccctctgcaccggcgaaaagggcatcgccccaacaccggcgtccccctccactacaagggcatgtgtttccaccgcgtgatcaaagggttcatgatccagggcggcgacatctccgctggggatggcaccggtggggaatcaat

SEQ ID NO: 285677 - DNA, 252 bp, Glycine max
cgcattttccctcttctttctctctcacgttttccgcttcagttttctcgggaaaatcatggtgaaaggtccaggcctctactctgacattggcaagagagctcgcgatcttctgttcaaggattatcagaagaccacaagttcaccatcaccacttacacttccaccggagtggaaatcacttcaactggagtcaggaaaggtgagatatatttggccgatgtcagcactaaggtgaagaacaagaacatc

SEQ ID NO: 285678 - DNA, 247 bp, Glycine max
cgtttctggtccaaattcattgatgataaggtttttggtgctgcatggaaatccgttttcacagctgatgagaaagagcgtgagaagaatgttgaggaagcaattgaggctctgcagtttcttgagaatggataaaggacaagaagttctttggaggagaggagattgggttggtagatattgctgctgtctacatagcattttgggtccctatggttcaagaaattgcagggttggagttattcac

SEQ ID NO: 285679 - DNA, 246 bp, Glycine max
  unsure (1)..(246): unsure at all n locations
ctaagtctaaggggtgccctgagatcactttgagcaatggtgaaggctgtggcagttcttgggcagcagcganggtgtcactggaactattttcttcactcaggagggaaatggtccaaccaccgtaacggatctcttgctggtcttaagcctggtctccatggcttccatgtccatgccttgggggacactaccaatggttgcctgtcaactggagcgcatttcaatcctaataacaacgagcac

SEQ ID NO: 285680 - DNA, 251 bp, Glycine max
  unsure (1)..(251): unsure at all n locations
gatatntgagcttaaaccctagccgctcttctcttcattcttcacctttggaaacnatcataatgngcgttctgtaataaggttggaaatgtcttgaggcagggtgctgctcgcagcacacatgcccctgttcgtccatgcttaattacatccgctgcatgtcttcaagcaagcttttcattggnggcctttcatatggagttgatgaccagtctcttaaggatgcattttctggctttggagatgtggtt

SEQ ID NO: 285681 - DNA, 254 bp, Glycine max
  unsure (1)..(254): unsure at all n locations
ttctctgaatcatggagatggaacgcgtcttcgaatttcctcacacttacatgggatcgtcgcccgagaaagagagcgagattgggctgggacatccctgaagttcccaagataagatccataccaaaatggggaaggaacttttgggcaggtcttagaatgctgggatagagaaaggaaggaaatggttgccgtaaaaattgtccgtggtataaagaagtatcgagaagcagccatnatagaaattgaggtgt

SEQ ID NO: 285682 - DNA, 272 bp, Glycine max
  unsure (1)..(272): unsure at all n locations
ggtgctcatggtggtggtgccttctccgggaaggatcccaccaaggttgataggagtggtgcttacattgtgagacaggctgctaagagcattgtggcaagtggactagccagaaggtgcattgtgcaagtgtcttatgccattggtgtgcccgagcctttgtctgtctttgttgacacctatggcaccgggaagatccatgataaggagattctcaacattgtgaaggagaatttgattncaggcccggtatgatctccatcaaccttgat

SEQ ID NO: 285683 - DNA, 269 bp, Glycine max
  unsure (1)..(269): unsure at all n locations
aaagaatcaaagaaaggggtggtggctgcttcgaaagcttaataatttgtttatttccagaacatcatagttttcgcagcagcaaactaacaaattactcatatcatataataagatggcccgttctctctcgcaagccaaacgtattggtgtccttgttgctcaatctatctccctaattcccgttcatcggcgaggttacgcagtggcatccgatgtatcggtaagagttggattgggtaatattgggcgaaggaatggantcgtng

SEQ ID NO: 285684 - DNA, 230 bp, Glycine max
ctctctcacccagatcttgtagcaatggcgagcgctcccactccacgcgaagagttcgtgtacatggcgaactggcggagcaggccgagcgctacgaggagatggtggagttcatggagaaggtctccgcctccgccgagagcgaggagctgaccgtggaggagcgtaacctcctctccgtcgcctacaagaacgtgatcggcgctcgccgcgcctcctggcgatcatct

SEQ ID NO: 285685 - DNA, 269 bp, Glycine max
ggaggggaaaattcggagcctggagcagatctacctacactcgctcccaatcaaggagcaccaaatcattgacaccctcgtggggcccaccctgaaggacgaggtgatgaagatcatgcccgtccagaagcagacccgcgccggtcagcgaacccgcttcaaggccttcgtggtggtcggcgacaacaacggccacgtcggtctcggagtgaagtgcagcaaggaagtcgccaccgccatacgcggcgccatcattcttcgcaaagctc

SEQ ID NO: 285686 - DNA, 266 bp, Glycine max
ttgaaggcgaaagtgctttgtcagttgttggtccaaggccaatggaatggtctactgttccatacaatgcccctcaagctcctgggccaaatggaaagcagcggacctcaagtttggaatcaccgatcatgttgctgtcaggtcaccagagtgctatatataccatgaagttcaatccagcaggatcagtcattgcatctggatctcatgacagggaaattttcctctggaatgtgcatggggattgcaagaacttcatggttctg

SEQ ID NO: 285687 - DNA, 270 bp, Glycine max
  unsure (1)..(270): unsure at all n locations
aattatccaacatttttttatgcaatgccaatgtgcgcgtacaaaagtnntctttgaggaaacctgtttagcatcaaaagatgctatgcctttngatttactaaagaagaagatgttttcgagattaaatacaatggggattagaattaagaaaacttacgaagaggaatggtcttatatcccagttggnggatccctancgaacacagngcaaaagaaccttncatttggtgcaactgccagcatggtgcatccagccacagggtatcc

SEQ ID NO: 285688 - DNA, 271 bp, Glycine max
  unsure (1)..(271): unsure at all n locations
ccaccangtaccgcaagatgaaggagcgtctcgttggggtttctgaggaaaccaccactggtgttaanangctatatcagatncaggcnaatgggantctactcttccctgctattaatgtcaatgactctgttaccaagagcaagtttgacaacttgtacgggtgccgtcactctctccctgatggtctgatgagggctactgatgtgatgattgctggaaaggtggctgttgnggcccggatanggtgatnttggcaagggttgngcnc

SEQ ID NO: 285689 - DNA, 268 bp, Glycine max
  unsure (1)..(268): unsure at all n locations
tgaagaganagacaagactagtaccattctggaatgtgatcaatataacaaagctgattttccagaagaatatactgatgccaaattttntgtcatcaagtcttacagcgaggatgatatccataagagtattaagtataatgngtgggctagtacacaaaatggcaacaagaagcntgatgntgcatatcaggaggcacagcagaaacctggcggcacccctgtttttctctttttctcagttnataccagtgggcaatttgtgggg

SEQ ID NO: 285690 - DNA, 267 bp, Glycine max
aactatatagagcaatatctggctgtggtggaactggagggatcaaaagtgtcaccaattatgcccctgtttatactgcaatggctgatgcaaaggccaacggattctctgatgtgctgttcttagactcagcaactggcaaacatatagaggaggcctcagcatgcaatgtatttgttttgaaggacaatgctatctccactcctgcaatagatggaaccatcctacctggtatcacccgaaaatccatcattgacattgccattg

SEQ ID NO: 285691 - DNA, 266 bp, Glycine max
  unsure (1)..(266): unsure at all n locations
gggttcaatttctcaaccgacatctgtcatcgttcatgtttcgtagcaaagaaagtttggaacctctccttgcatttcttcgcacacacagatatganggtcatgcaatgatgctaaatgancgcatttataacttatccaagctccagtcttccttggcaaaggcagaagaattactttctagactacnacccaatgcaccatattctgactttgaatatgaactacaaggattgggatttgagagcggttggggtgatacagca

SEQ ID NO: 285692 - DNA, 267 bp, Glycine max
  unsure (1)..(267): unsure at all n locations
caatggtgccatggttccagttcgtgtccacactgtcctaatttccacccaacatgatganacctgtgagcaatgaccaaattgctgctgaccttaaagagcatgttatcaagcctgtcattcctgagaagtacctggatgagaagaccatcttccaccttaacccttctggccgttttgtcattggtggccctcatggtgatgctggtctcactggaagaaagatcatcattgatacctatggtgggtggggtgctcatggtggag

SEQ ID NO: 285693 - DNA, 269 bp, Glycine max
ggacaacggtatcaaggagtaaccattcctgaggcttatgaacgcctaattcttgacacaattaaaggtgatcagcagcattttgttcgcagagatgagttgaaggcatcctggcagatcttcaccccacttttgcacagaattgatgaaggggaattcaagccactcccctacaaaccaggaagcagaggtcctgcagaagcagatcagttacttgaaaaagcaggctatgttcaaacacacggctacatatggatccctcctacctt

SEQ ID NO: 285694 - DNA, 273 bp, Glycine max
  unsure (1)..(273): unsure at all n locations
aagagcagtagaaaganactagaatgggccactttagacgaacgcccttctgcgaaaaggtggcttcctcttgaagctaaccctgaagtcatganccagttcctttngggtcntggccttccactggacgaggcagagtgcngtgatgtgtttgggctagatgaagagcntctggaaatggttccgaagcccgtcttcgccgtgctttttctttatgcaattaccgcaaagtcncgaanaagaaaggttgcaacaggagaacgnanaannnga

SEQ ID NO: 285695 - DNA, 246 bp, Glycine max
  unsure (1)..(246): unsure at all n locations
ggcacactgcattgtggattctctacngaatatcacacattacactgtgtacacttgaatttcagacacgtcgtgcatcatactattggttgttgcatgcgttaggcatttaccaaccttatgtgtgggagtattcaaggttgaatgtctctaacacagttatgtcaaagcgtannnaaatcgtctagttacagagaagtgggttgatgggtgggatgatcctcgtttgatgacactagctggttt

SEQ ID NO: 285696 - DNA, 265 bp, Glycine max
  unsure (1)..(265): unsure at all n locations
gtgtgttctcgcaccttggcatggatccaaacagatagaaagtcaggtggccttggtgacttgaactatcctttgatttctgatgtcaccaaatccatatcgaaatcttatggtgttctcattcctgatcagggaattgcattgagaggattgttcattattgacaaggaaggggttattcagcattctaccattaacaacttggcaattggtagaagtgttgacgagacanagagaactctccaggccttacagtatgtgcagg

SEQ ID NO: 285697 - DNA, 263 bp, Glycine max
  unsure (1)..(263): unsure at all n locations
cgagaatcttcgtattgatgttaggactgttgatgcatctctcaagtgtgagatatggatgcntagcagggtgaagaactaccttgaagaccagttgcttggttttgctttggtacccttgtctgaagtactggtccagaatgggaaacttgagaaagagttctctctttcttcaactgatctattccattctccttcaggttttgttcagttgtcgctttcctacactggtgcttcacctgatgttatggcaatttctgcaa

SEQ ID NO: 285698 - DNA, 267 bp, Glycine max
ggagaaacaataaagaatatgcaagcttcaactggagcaagaattcaggtgattcctcttcatcttccacctggtgacacatctaccgaaagaacattaaaaattgaagggacccctgaacaaattgagtctgccaaacaaatggttaatcaagtcatcagtggcgagaatcgtcagagaaatccatctatgtctggtggttattctcagcaaggttaccaagctaggccaccgactagctggggtccccctgctgctccaatgcaa

SEQ ID NO: 285699 - DNA, 269 bp, Glycine max
  unsure (1)..(269): unsure at all n locations
cttcacatgttcaccttnttatttgatgatttgggtgttccacaagattacaggcatcctggatggttttggagttaacacatatacgctgatcaacaaggctgggaaagcagtgtatgtgaaatttcactggaagaccactagtggtataaagtgtctattggaggaagaggccattaaggtgggaggagccaaccacagccatgccactcaagacctccatgattcaattgctgctggtaactatcctgagtggaaactgtntgttc

SEQ ID NO: 285700 - DNA, 267 bp, Glycine max
  unsure (1)..(267): unsure at all n locations
gccagaagaaaccctacagatggttctgtctcaagtctctgacctaaacctaaggcatactttacaatttggcattggattacatcatgcaggcctgaatgacaaagacagatctctggttgaggaactttttgcaaacaacaaaattcagatattggtttgtaccagcaccttggnntggggtgtgaatctccagctcatctagtgattatcaaggggacagaatactatgatggaaaagcaaagaggtatgttgattttccaatc

SEQ ID NO: 285701 - DNA, 267 bp, Glycine max
  unsure (1)..(267): unsure at all n locations
ccgagacagaaaaaggggttagggtttgttcttgtgatcgaagctaagcgaanaaaatgggtggatcagtgagggacgtgaagtcgaagggcgaggtcgacgaggtggtggcgagtggctctccggttatcctccacttctgggcgtcgtggtgcgaactttccaagcacatggaccaactcttctctcacctttccactgatttccccaacgcccgcttcttaagggtcgaggccgaagagcaacccgagatttctgaggcttact

SEQ ID NO: 285702 - DNA, 265 bp, Glycine max
cgggaagccaatccaatcacacatgctacatattcatgtgatagtcagtcaatatatgtaagctttgaagatggaagtattggcattcttaccgtcccagcgctcagattaagatgtagaataaatcaatctgcttatctccatccaaatccaagcctgagagtgcatcctcttgtgattgctgcacatccctccgaacccaatcaatttgcattaggacttacagatggtggagtacatgtacttgaaccactagaggcagaag

SEQ ID NO: 285703 - DNA, 262 bp, Glycine max
  unsure (1)..(262): unsure at all n locations
aacttttacatcacttctattgcagggagcaacaatggcagctctcttgtggtgatgtcaaaaggtacgcagtatactcaacaatcttacaaagtgagtgaatctttccccttcaaatggataaacaagaantggagagaaggttttcatgtcacttcaatggctactgctggaagtcgctggggtgttgttatgtctcgaaatgctggattcagtaaacaggtggttgaacttgattttctctatccaagtgagggcatcc

SEQ ID NO: 285704 - DNA, 268 bp, Glycine max
  unsure (1)..(268): unsure at all n locations
gttttccgatcctctttctcgtcgccaccctcatcaccctcgcctccggtgcccgccacgatattctccggttaccctccgaagcttccaggttcttcaaagcancctgctaatgccgatcaanacgatgagggcaccaggtgggccgttttagttgccggttccaatggctactggaattacaggcancagtctgatgtttgccatgcatatcaactactgaggaaaggtggtgtgaaagaggaaaatattgttgtatttatgtatg

SEQ ID NO: 285705 - DNA, 264 bp, Glycine max
gaccttcttgcatgctgtggctttctgtgtggatctggctgtgatggaggatatcccttatatgcatggcgatacttagcccaccatggtgttgtcactgaagagtgtgacccatattttgatcaaattggctgttctcatcctggttgtgagccagcttatcggactcccaagtgtgttaaaaagtgtgtaagtggaaaccaagtttggaagaagtcaaagcactatagtgttagtgcatacagagtcaactctgatccccat

SEQ ID NO: 285706 - DNA, 265 bp, Glycine max
cagccaaaataggagaaagggacactaaagaggagctcatgaaagctttccatattattgatcatgataaaaatggaaagatatccgcattagacatcaagcgcattgcaaaagagctaggtcaaaatttcactgacagagagattcaggagatggttgaggaagcagaccaagataatgatcgagaggttagtgcggaggagttcatcacgatgatgaacagaactcgcttccatcactagtcttatctatatgggggcagttg

SEQ ID NO: 285707 - DNA, 268 bp, Glycine max
  unsure (1)..(268): unsure at all n locations
ccagaagccacgctgttctttcaaatcgtaaccgaagaatgaagatggtgcgctgctgtcggtgcttcgcctgantgctcattccgtttgcgcccactatcagttgtgctgaggcttaactggttcttgaagcatatttcagagttttatcagagaacaaatgggttatattgggactcacggtgttgcagctctgcacagatataaatatagtggagtagatcatcctatgtggccaaatatgtactacaacccttttggagtcgct

SEQ ID NO: 285708 - DNA, 232 bp, Glycine max
  unsure (1)..(232): unsure at all n locations
gagtgatggagtgcgtattcggattggtgggtaatgggtttgcgatcgtggtggctgattcatcggcggtgcacagcatcctcgtccacaagtccaacgaggacaagatcatgctcctcgattcccacaaactcattgccgctagcggcgagcccggagacagggttcagttcacagagtacattcagaagaacgtcgccttgtatgcagtnccgtaacggcatccttctta

SEQ ID NO: 285709 - DNA, 267 bp, Glycine max
  unsure (1)..(267): unsure at all n locations
cnnttganagananagagaaatgggagaacgaaaaggaatcccaatggctttggggctcttggcgatgatcctcttcttcattgcttcctcttcctctcacctcgttcgcgcttccgatgacgccgacgacgcgatcttctacgagtcgttcgacgaggattttnatggacggtggattgtatccgacaaggaggattacaatggtgtctggaagcatgccaagagtgatgggcatgatgattatggacttcttgttagtgaacaag

SEQ ID NO: 285710 - DNA, 266 bp, Glycine max
  unsure (1)..(266): unsure at all n locations
gtgttctgctatgccttgagtgttaatgatggtactgaatggaggcaacgtattcagtctgaagcagagcactttgtagatgtatctgccatgtcatcggatgcaatagcagaaatgattaatgaggataagatacatatccttgtcaacctaaatggttatacaaagggtgccaganatganatatttgccatgcaacctgcacccattcaagtttcatatatgggattccctggaacaactggggctacttacatagactactt

SEQ ID NO: 285711 - DNA, 260 bp, Glycine max
  unsure (1)..(260): unsure at all n locations
ttcgcacctgctacccagactaagttgcttgaactcttgggaaatcttaaacaagagaatgtgaactccttgactatacttgtnatgggaaaaggaggtgttggaaaatcttcaactgtgaactccatcattggggaaagagtggtttcgattagtcctttccagtcggaagggccaagacctgtgatggtgtcacgatcaagggctggttttacattgaacattattgacactcctggtctcattgaaggggggtacat

SEQ ID NO: 285712 - DNA, 264 bp, Glycine max
actagccgcagcagcctcaggaggagaataaggatgtctcacaggaagttcgagcacccaaggcacgggtcactgggatttctccccaggaagcgtgctgctccgtcacaggggaaaagtgaaggcattccccaaggatgacccatccaaggcacccaagctcactgcattcttgggttacaaggctggtatgactcacattgttagagaggtcgagaagccaggatcaaagcttcacaagaaggaaacatgtgagcctgttac

SEQ ID NO: 285713 - DNA, 261 bp, Glycine max
  unsure (1)..(261): unsure at all n locations
agttctccaagttgtgaccagtcttttaaggnaatggttgctatgtgcctggtaaaagatcaaacaaagaggccatctgtggagaagttactcaaacactccttcttcaaacaagctaagccaccggagctttctgtaaagaaattatttgctgatttaccgcctttgtggaaccgtgtaaaatccctccagcataaagatgcagccgagctagcactaaagaaaatgccttctgcagaacaagaagctntatctcaaagt

SEQ ID NO: 285714 - DNA, 263 bp, Glycine max
gccggtggcggcgacggtgaactgcgccgacaacaccggcgcgaagaacctctacatcatatcagtgaaggggatcaagggtaggctgaaccggttgccgtcagcttgcgtcggagacatggttatggccaccgtcaagaagggaaagcccgatctccgtaagaaggtgctgcccgccgtcatcgtccgccagcgcaagccttggcgccgaaaggacggtgtttacatgtacttcgaagataatgctggtgttatcgtgaatt

SEQ ID NO: 285715 - DNA, 266 bp, Glycine max
  unsure (1)..(266): unsure at all n locations
caatggcttacaacactatgcagcactggggagggacaagttgggagctgctgcagtcaatcttgttggtggagaccaacctgctgatgtttactcaggaattgctgccagagtacttnaaatcatgaaaagggatgcagagaaagatccccaaactaatccaaatgcattgcatgctaggcgtttaatcaaccaggtggaccgaaagttggtgaagcaaacagtgatgacatcagtctatggagtgacttacattggggccaggg

SEQ ID NO: 285716 - DNA, 257 bp, Glycine max
  unsure (1)..(257): unsure at all n locations
gttcagtgtgtcgtttaaaaatgtcgcagttgctggataaagccaagaacttcgtgtcggagaaggtaaatgatatggccaagccggaggcgagtgtcactgacgtggacttcaagcgcgtgagcnaagataatgtcgagtacttggccaaggtctctgttcgtaacccttattcaacttccatacccatttgtgagatcaactactctttcaaaagcgcatccagggagatagcatcagggaaaattccagaccca

SEQ ID NO: 285717 - DNA, 264 bp, Glycine max
gggtattgggagctctcgttgtttcggagttagggacttacgcagccatggccactgctacgaatgccgccgccgccccaccacgccagctctcccagaaggaagctgacatccagatgatgttggccgccgacgtccacctcggcaccaagaactgcgacttccaaatggaacgttacatcttcaagcgccgcaacgacgggatttacattattaacttgggaagacgtgggagaagttcagtagcagctagggttatagttg

SEQ ID NO: 285718 - DNA, 260 bp, Glycine max
aaacaaagaaaggaaataattgatctttgaaaatgcagggaggaaagaaagctggagagtccatcaaggaaacagctgcaaacattggtgcttctgccaaggctggcatggagaaaaccaaggccactgtccaggagaaggcagaaagaatgacggcacgtgatccgatgcaaaaggagttggcaacccagaagaaagaggcaaagatgagccaggcagagctggacaagcaggcggcgcgtcacataacacggcggcga

SEQ ID NO: 285719 - DNA, 257 bp, Glycine max
  unsure (1)..(257): unsure at all n locations
tctgagtgatttngcttgccattatctcagcaagcatggagttagtgcaatccaggaggctgaggaaaactgataataatagaattgcaaaggcttgtggtgctgttattgtgaatanaccagatgaattgcaggagtctgatgttggtactggcgctgggttatttgaggttaagaaaattggagatgagtactttgcatttattgtngattgcaaagaacccaaggcttgtactgttctactaaggggtgctagt

SEQ ID NO: 285720 - DNA, 256 bp, Glycine max
  unsure (1)..(256): unsure at all n locations
acaganacgcagccatggggcggagacctgcgaggtgttataggcaaattaagaacaagccataccccaagttcacgtttctgccgtggtgttcctgatcccaagatcaggatttatgatgttggtatgaagaagaagggtgttgatgagtttcctttctgtgtccatctggttagttgggagaaggaaaatgtttcaagtgaggccctggaagctgctcgcattgcttgcaacaagtacatggccaantttgcng

SEQ ID NO: 285721 - DNA, 256 bp, Glycine max
  unsure (1)..(256): unsure at all n locations
cttccccaagatgtcgagcgccgatcccgagcaccgagaagaggangaggcacccgccgttcggcgacgacgaggacaccggagcacacgttcgctcccatcgtcaagctcgaggaggttgctgtcaccaccggcgaggaggacgaagatgcaatcctagatctcaaatcgaagctttaccggttcgacaaggatgggaaccagtggaaggagcgaggcgcgggcaccgtgaagttcctgaagcataaggctacgg

SEQ ID NO: 285722 - DNA, 252 bp, Glycine max
  unsure (1)..(252): unsure at all n locations
cattcctgctttatttatggcattagctattggaagtntctttntaggcactcccctttacaggtttcaaaaacctgggggaagccctattacgagaatgtgccaggttgtggtagcatctgtctggaggcgaaatctggttgtccctgaggacagtaatctcctatatgagacaccagataagagctctgcaattgaaggaagtcggaaactagggcatagtgatgaactaaagtgtcttgatagancggc

SEQ ID NO: 285723 - DNA, 257 bp, Glycine max
  unsure (1)..(257): unsure at all n locations
agctgctgttcctgcgcgtgaacaagcctcaggtaagccaaagccatngttaagcataacaatgttatccccaacggacacttccgtaagcactggcagaactatgtgaagacctggttcaatcagccagcacggaagacaagaagacggttggctcgtcagaagaaagctgtgaagattttccccagacctacagctggacctcttagacccattgtaatggtcaaactttgaaatacacatgaaagtgagagcgg

SEQ ID NO: 285724 - DNA, 257 bp, Glycine max
  unsure (1)..(257): unsure at all n locations
cctcatcgatagtntaaagtctcgttttgacaatggtgagggttagtgtgttgaatgatcgctctgaagagcatgtacaacgccgagangcgcgggaagcgccaggtcatgattaggccatcctccaaggtcatcataaaattcctattggtcatgcagaagcacgggtacattggtgagttcgagtatgttgatgaccacagggctgggaaaatcgtggttgaattgaatgggcggctgaataagtgtggggttat

SEQ ID NO: 285725 - DNA, 251 bp, Glycine max
  unsure (1)..(251): unsure at all n locations
ctaagtgagaaacaaagaaaggaaataattgatctttgaaaatgcagggaggaaagaaagctggagagtccatcaaggaaanagctgcaaacattggtgcttctgccaaggctggcatggagaaaaccaaggccactgtccaggagaaggcagaaagaatgacggcacgtgatccgatgcaaaaggagttggcaacccagaagaaagaggcaaagatgagccaggcagagctggacaagcaggcggcgcgt

SEQ ID NO: 285726 - DNA, 251 bp, Glycine max
  unsure (1)..(251): unsure at all n locations
tgaaaagggaccatggaggcaaattcaggtgccagcgancgaatttcgagaatcgncggncacctccgcccccagagagaggatgatgtttgtttgaagcgtaggttttgccgtgnaaaaggtggggtctccggattcaaggtggccatattgggtgccgcaggaggnatagggcaacctctggcgatgtngatgaagatgaatccactcgtttcacttctccacctctacgatgttgttaacacccctgg

SEQ ID NO: 285727 - DNA, 185 bp, Glycine max
tatcaagatgtctttgctttcggatctcatcaacctcaatctctcagaatccacagaaaagatcgttgctgagtacatatgactcttcctgggccagtgagtgaccctgcaaagcttccaaagtggaactacgatggctctagcacagaccaagctccaggggatgacagtgaagtcatcctata

SEQ ID NO: 285728 - DNA, 254 bp, Glycine max
  unsure (1)..(254): unsure at all n locations
atttttgtcttnntctttctttctggtggatgtaccacccctgcaggtgctatcaaagaagcaatcaatacattaaggagtgataatgttaatgcatttgttttggatcttagagataatagtggtggtcttttcccagaaggaattgagattgccaaaatttggttggacaaaggggtgattgtgtatatttgtgatagtcgtggtgttcgagatatacttgatacagatggaagtagtgcactagcaacttc

SEQ ID NO: 285729 - DNA, 255 bp, Glycine max
  unsure (1)..(255): unsure at all n locations
ctcttattaatggcgctgctgctaaaggagctgtttgcctggatggatctttaccgggncaccanttccanngcgnatacgntagtagaccaaacagttggcncatacaattggagggaggaggctggtgnggaactanaaaaaattgtctttatagtaagaaaanacgtcatggtncatttncagctgggaaaacaaataccatttattgggatattgagnagnaaagctgaggaaaatccagattttttcaat

SEQ ID NO: 285730 - DNA, 254 bp, Glycine max
  unsure (1)..(254): unsure at all n locations
acgaagcaacgtcttcgacccattctctctggacgtatgggaccctttcgaggggtttcctttttccacaggtacacgtgccttcctctggtggggaaagcagtgccatagccaacactcgcgtggactggaaggagactccggcggctcacgtgttcaacgttgatcttcccgggttgaagaaggaggaagtgaaggttgaagttgaagatggganggtgctgcagattactggtgagaggaccaaagaacaa

SEQ ID NO: 285731 - DNA, 249 bp, Glycine max
  unsure (1)..(249): unsure at all n locations
ctgctgacctcaaagagcatgtgatcaagcctgtgatcccaganaagtaccttgatgagaagaccattttccacttgaacccttcaggccgttttgtcattggtggccctcatggcgatgctggtctcaccggccgcaagatcattatcgatacttatggaggatggggtgctcatggtggtggtgctttctccgggaaggaccctaccaaggttgataggagtggtgcttacattgtgagacaggctg

SEQ ID NO: 285732 - DNA, 248 bp, Glycine max
  unsure (1)..(248): unsure at all n locations
cctaaacctatctttcttctctctctgtgtgtgcgcttcaacggcaaccagaagcagccatggccactgcaaggacctgtgaaggatgtttcacctcatgagttcgttaaggcgtactcctctcacctcaagcgatccggcaagatggagctgccagagtggactgatattgtgaaaactgcaagatttaaggagttggctccttatgatcctgactggtactatgtcaganctgcttccatggcaaa

SEQ ID NO: 285733 - DNA, 246 bp, Glycine max
  unsure (1)..(246): unsure at all n locations
ctccattctgggcagtccatgggctattntganattccagttgancatgtgtatggccagcctgttatacttgattaccttgccagcaagactatntgttcagatgatttggtagttngtctcgccagatgttggtggtgttgccagagcacgtgcttttgccaaaaaattatctgatgctcctttagctattgttgataaaaggcgccatgggcataatgttnctgaggtgatgaatttgattgg

SEQ ID NO: 285734 - DNA, 250 bp, Glycine max
agggacggtagcagagattccgtgagttgcaaaaatgaaaacaattctttctgcagagaccatgaacatcccggacggcgtgagcgtcaaggttaatgccaaggtcatcgaagttgagggcccccgcggaaaattggtgcgagacttcaagcacttgaatctcgattttcagctcatcactgacgaaaacggtaaaaggaagctgaaggtggaggcctggttcggttctcggaaaacatccgccgccatt

SEQ ID NO: 285735 - DNA, 192 bp, Glycine max
  unsure (1)..(192): unsure at all n locations
ctgaagttctagatcgngagcngccatttagatctctgaaaaacagagtttcatntcaattcagttcttattattagggtttgccgattgagagaganagagnnatgggagaacgaaaaggaatcccaatggctttggggctcttggcgangntcctcttcttcattgcttcctcttccnctcaccncgtgc

SEQ ID NO: 285736 - DNA, 253 bp, Glycine max
  unsure (1)..(253): unsure at all n locations
ctcactttcatttctacatccctggctctgttccgtcgatgacganggcgtttagggtgcgaaaccctgacctccgctttctcattcttctctctctcttgtccatcacttccgccaaggtcttcttcgaggagcgtttcgatgacggatggggaaatcgttgggttaaatcagattggaaaaaagatgagaacctggctggggagtggaaccacacctctggccaatggaatggagacgctaacgacaaagg

SEQ ID NO: 285737 - DNA, 251 bp, Glycine max
  unsure (1)..(251): unsure at all n locations
cacatacgaaactactctacaaacacaacaaaactctccaattctctgcggaggagatatcttcaatggtgttggtgaagatgagagaagtagcagaggcgtttctcggacacgcggtgaagaacgcggttatcactgtccctgcttacttcaacgactctcagaggcaggcgacgaaggacgcaggggcaatttcgggtttgaatgcgttgaggattatcaatgaacctaccgttgctgccatcgngnat

SEQ ID NO: 285738 - DNA, 212 bp, Glycine max
cctggggaagtgaagctgtaactcgcaagactcgtatactagatgtggtttacaatgcctcaaacaacgagcttgtgcgtactcagactcttgtaaaaagtgctattgttcaggttgatgctgctccattcaaacagtggtaccttcagcactatggtgttgagattggtaggaagaagaagacagctgccaagaaggaaactgcagaggag

SEQ ID NO: 285739 - DNA, 247 bp, Glycine max
  unsure (1)..(247): unsure at all n locations
ggcgccactcgatgtttccatttgcctgcatgcctttggtattgtggggtgtggttcgtttagtggtgncaagtcttgcgaacgtgagggtgcatgagtggtaatcgggatgtttttgttgcacggctccatgcttgcgcatgcaacgtgtgacatgcatccttttcattgtcaccttagccttcgtggcttaggtgntgacgattggnncngtgttgcctacctaccaaaacggtattcgngnggt

SEQ ID NO: 285740 - DNA, 246 bp, Glycine max
  unsure (1)..(246): unsure at all n locations
ggcaaagcgaggccatgccctcatgtgcttggcacgtgtttcactcttcctctgcgctctaaccctatccgctgctcacggaagcaccacggttcaagacatcgcgagaaagttgaaactcggggacaacgagctnctgcgcacggagaagaagttcaaggttttcatggagaattacgggaggagctactccacagaggaggagtatttgcgccgtttggggattttcgcccagaacatggtcag

SEQ ID NO: 285741 - DNA, 243 bp, Glycine max
  unsure (1)..(243): unsure at all n locations
cganaatcctcaggttaaagaaattcgctgcattgtgatgccaccacaatgggggacacatcaacaagttcatctgccatcagctcttccagagcatgattncttgaatgatttggagcctttaggatggatgcatactcaaccaaatgaacttcctcagttgtcgcctcaggatctcacttcacatgccaagatcctagagaacaataagcaatgggatggggagaaatgtattatcttgac

SEQ ID NO: 285742 - DNA, 242 bp, Glycine max
  unsure (1)..(242): unsure at all n locations
ccttctttctttttttcaatttccaaatcacgaaactcaagaagatggagaaagcgatcaacagacagaagattttgcttcatcatctcaacccttcatcatccacccaccccaacgaancatcctccctccatgcttcagcatgtgtggcgggggatagcgctgcttatcaaaggacatcgacattcggggacgatgttgtgatcgtggctgcttatcggactgctcattgcaaagctaaa

SEQ ID NO: 285743 - DNA, 243 bp, Glycine max
  unsure (1)..(243): unsure at all n locations
gttttcgcagcagnaaactaacaaattactcatatcatataataagatggcccgttcctctctncgcaagccaaacgtattggngtccttgtggctcaatctatctccctaattnccgtncatcggngaggttacgcagtggcatccgatgtatcggtaagagttggattgggtaatantgggcgaaggaatggaatcgtgggaggtgtagaagagaagnctgatacaagagatggttcaaaa

SEQ ID NO: 285744 - DNA, 243 bp, Glycine max
  unsure (1)..(243): unsure at all n locations
aagaatccgaagccttgaacagatctacctccactcgctcccgatcaaggagcaccagatcattcgacacgctcgtgggtcccaccctcaaggacgaggtgatgaagatcacgccggtccagaagcagacccgggccgggcagaggacccggttcaaggccttcgtcgtcgtcggagacaacaacggccacgtcgggctgggcgtgaagtgcagcaaggaagtggcgacactattcncggcgt

SEQ ID NO: 285745 - DNA, 248 bp, Glycine max
ggggattctcgctatcgacatctacttccctcccacctgtattcagcaggaattgctggaggctcatgatggtgccagtaaagggaaatatactattggacttggtcaagattgcatggcgttttgtacagaagtagaagatgtcatctcgatgagtttgacagtagtttcttcccttcttgaaaagtatgcgattgatcctaaacaaattggtcgtctggaagtaggcagtgagactgtgattgaca

SEQ ID NO: 285746 - DNA, 249 bp, Glycine max
caccaatgcatccttctcgaactcccttacatccatatatgactccaatgagagatcctggagcaacacctattcatgatggaatgagaacacctatgcatagccgagcatggaatccttatactccaatgagtcctccaagggataactgggaagatggaaatccaggctcttggggagccagtccacagtatcagcctggaagccctccttcacggccatatgaagccccaactcctggtgctggtt

SEQ ID NO: 285747 - DNA, 248 bp, Glycine max
  unsure (1)..(248): unsure at all n locations
agaatcaaagaaaggggtggtggctgcttcgaaagcttaataatttgtttatttccagaacatcatagttttcgcagcagcaaactaacaaattactcatatcatataataagatggcccgttctctctcgcaagccaaacgtattggtgtccttgttgctcaatctancctccctaattcccgttcatcggcgaggttacgcagtggcatccgatgtatcggtaagagttggattgggtaatattgg

SEQ ID NO: 285748 - DNA, 168 bp, Glycine max
agagaaaaatggctgatacaagtggaggagatgcagtgagaccggtggtaatatgtgataacaagtgtggctgcacagttccatgcactggtggttccacttgcaggtgcacaagtgtcggcatgacaactggaggcggtgatcacgtgacatgctcgtgcggagagt

SEQ ID NO: 285749 - DNA, 197 bp, Glycine max
  unsure (1)..(197): unsure at all n locations
ttgtngtttgtgtgtttgtnttttctctcacctgaaaatgtcttgctgcggtggtaactgtggttgcggaagcgcctgcaagtgcggcaacggctgcggaggctgcaagatgtacccagacttgagctacaccgagtcaaccaccaccgagaccttggtcatgggagtggcaccagttaaggctcaattcgagagtg

SEQ ID NO: 285750 - DNA, 246 bp, Glycine max
caagaatcttaagctatgggaaagtcttacccaaccgtgagcgctgattaccagaaggccgttgagaaggcgaagaagaagctcagaggcttcatcgctgagaagagatgcgctcctctaatgctccgtttggcatggcactctgctggaacttacgacgtgagctcgaagaccggtggtcccttcggaaccataaagcacccctccgaactcgctcacggcgtaacaacggtcttgacatcgctg

SEQ ID NO: 285751 - DNA, 289 bp, Glycine max
gtttcgttcgtcaccatgacttttaagcgcaggaatggaggtcgcaacaaacacggccgtggccacgtcaagttcattcgatgctccaactgcggcaaatgctgtctaaggacaaggctatcaagaggtttctggtgaggaacattgttgaacaggctgcagtcagagatgttcaggaggcttgtgtctatgaacaatacacgcttccgaagctttatgtgaagatgcagtattgtgtttcctgtgctatccactctcatgttgtgagggttcgatcccgcatgatagg

SEQ ID NO: 285752 - DNA, 288 bp, Glycine max
  unsure (1)..(288): unsure at all n locations
gnaaaagcactggngcantaaccctgaggcttctctttctcttctcttctctgtcgtnanttcaccatggtgacggttactgtgctgaacgatgctctgaagngcatgtacaatgctganaaaangggaaagcgccaagtcatgattaggccatcctccaaagtcnttatcaaattccgcttggtgatgcaaaancacggatacatcggagagtttgagtatgttgatgaccacagggctgntnaaaatcgtggttgaattgaacggagattgnacaanttnngggtt

SEQ ID NO: 285753 - DNA, 286 bp, Glycine max
  unsure (1)..(286): unsure at all n locations
gagagacgaaaccctaggttttagtgagtggcgaaaatggcggtgattttttcaagtgcaataccaggaggggcagcaccagcagcaatcgagcaagtgcagtgcttcgggcggaagaagacggcggtggcagtgacctactgcaagcgcggccgaggcctcattaagatcaacggctgcccgatcgagctggtggagccggagatcctccgcttcaaggccttcgagccaatcntcctcctcggtcgccaccgcttcgccggcgtggacatgcgcatccgcgtga

SEQ ID NO: 285754 - DNA, 281 bp, Glycine max
  unsure (1)..(281): unsure at all n locations
gttaagttacagggtagatgtggatcatgctgggctttcagcaccacaggatctatagaaggagccaattttcttgccaccggaaagctcgtcagtcttagtgaacaacagctccttgactgtgacaacaagtgtgacataacagaaaagacttcatgtgacaatgggtgtaatggaggtcttatgacaaatgcctacaattatttgctcgagtctggtgggttggaggaggagtcttcatatccctacactggggagagaggtgaatgcnagtttgatcc

SEQ ID NO: 285755 - DNA, 285 bp, Glycine max
  unsure (1)..(285): unsure at all n locations
agaacctggtgggaaaganatcacctttaagagagtgctcttgnataattgccaggaggcttttgaaggtgctgaaaatctcnagggaggaactaaaaaggatgactgtccctgagcgnngacatggagcgtacggacaagggaacgctgctcaagctacgnncccttggaaatatccgtttnattggtgagctattgaagcagaagntggttcctgaaangattgtncatcacattgttcaggagcttttaggatccccanacagcgaatcttgcccagttgag

SEQ ID NO: 285756 - DNA, 283 bp, Glycine max
  unsure (1)..(283): unsure at all n locations
cttgagatcaatcctaggcaccctattatcaaggagctccgagananagtagtaaagaaccctgaggatgagggtgtgaagcatacagcacagctgatgtaccagactgcactctttgaaagcggcttcctgcttgatgatcccaaggattttgcttcccggatttatgattcagtgaagactagcctggacatcagtcctgaagcaacagttgaggaggaagatgacactgaagtagaggctgaaagtgacgcgaaagnagattcaaagcctgaaactgntg

SEQ ID NO: 285757 - DNA, 280 bp, Glycine max
  unsure (1)..(280): unsure at all n locations
gttntcgctttgcactagcagctttgaaacccggttcatccgaagcccttcaccgaaccatgtcgaggagaaaggttnnagagccaaaggangaaaatgtgactctgggtccagctgttanagatggtgaacacgtttttggcgttgctcgcatctttgcctccttcaacgacaccttcatccatgtcactgatttgtctggcagggaaacccttgtccgaatcactggtggtatgaaagttaaagctgacagagatgaatcatctccttatgctgctat

SEQ ID NO: 285758 - DNA, 283 bp, Glycine max
  unsure (1)..(283): unsure at all n locations
gcgntnntcgcntnagnnagatnccaacaangaganagaaaganaanagttgagnttccctttgaagannagntggcntcccntangcaaagctntgaagctggtcaaactaagggccgaactgngganaagacgaaccagacgatgggcnntnttggagagaaggctcaagctgcaaangagaagacccaggaaatggcccaagctgcaaaggagaagacccancanncngcccaagctgccaaggacaagacttgcgacacttcccaagcggcaaaggagg

SEQ ID NO: 285759 - DNA, 283 bp, Glycine max
  unsure (1)..(283): unsure at all n locations
aaanaatcaaagaaaggggtggtggctgcttcgaaagcttaataatttgtttatttccagaacatcatagttttcgcagcagcaaactaacaaattactcatatcatataataagatggcccgttctctctcgcaagccaaacgtattggtgtccttgttgctcaatctatctccctaattcccgttcatcggcgaggttacgcagtggcatccgatgtatcggtaagagttggattgggtaatattgggcgaaggaatggaatcgtgggaggtgtagaagag

SEQ ID NO: 285760 - DNA, 278 bp, Glycine max
  unsure (1)..(278): unsure at all n locations
gttcatccantctccgaagcccttcaccgcattgcnaccatgtcganaagaaangttagagagccaaaggaagaaaacgtgactctgggcccagctgttagagntggcgaacatgtctttggcgtcgctcgcntctttgcctccttcaatgataccttcattcntgtcactgatctgtccgggagggaaacacttgtccgcatcacaggtggaatgaaggttaaggctgacaganatgaatcgtctccctntgctgctatgcttgctgcacaggacgt

SEQ ID NO: 285761 - DNA, 282 bp, Glycine max
  unsure (1)..(282): unsure at all n locations
ctctcgttgattcggatctagagtcttttttcactcttcagttctncgttgttgttcttcgtttcctgaaactagggttttcaatttcgattcattcgttaataattaaagatgtttgggagggcaccgaagaagagcgataatacgaggtactacgaaatcctcggcgtctcgaagaacgcttcgcaggatgatctgaagaaggcttacaagaaagccgccatcaagaatcaccctgacaagggcggtgatcccgagaagtttaaagagctggcacaagca

SEQ ID NO: 285762 - DNA, 278 bp, Glycine max
  unsure (1)..(278): unsure at all n locations
gacctatatgttttcnccaacttgaagtacgtgggcattgaattgtggcaggtgaaatctggtactntggttgacaatgtcttnnttactgatgatcctgaatatgccangnaactggctgaaganncatggggcaagcacaaggatnttgagaanncagcatttgaagaggctganaanaagacggaagaggaggaatcaaaggatgacccagttgactctgatgctgatgaggaagaggaagatgctgatgaagctggcaatgactccccngcttc

SEQ ID NO: 285763 - DNA, 278 bp, Glycine max
  unsure (1)..(278): unsure at all n locations
ggggcagtagccgagattccgtgagttgcaaaantgaagacgnttctttccaccgagaccatgaacatcccggacggcgtgagcntcaaagttcatgccaaggtcntcgangttgagggcccccgcggaaaattggtgcgagacttcnagcntttgnntctcgnttttcngctcattactgacgaaaacggtaaaagaaagctgaaaatcgacgcgtggtttggttctcggaanacatccgccgccattcgcaccgccttgagccacgtggagaatct

SEQ ID NO: 285764 - DNA, 276 bp, Glycine max
  unsure (1)..(276): unsure at all n locations
gntcgttgttgttctaaagcactcntccacacattctccgtcgccacgacaacaatggctccaaagaaaggtgcgaaaggtggagttgtagcagcaaagaagaaggttcaggagaaggtaacgaaccctttgttcgagaagcgtccgaagcagttcgggatcggaggcgcgctgccgccgaagcgggacctgacgcgcttcgtgaagtggccgaagaacgtccaaatccaacgcaanaagcgcatcctcaagcanaggctcaaggtccctccggct

SEQ ID NO: 285765 - DNA, 266 bp, Glycine max
  unsure (1)..(266): unsure at all n locations
ccctttttnttctcccaccaacttcnccgtcttcttcctcgatcatgtctcacttaaagggcaagtaccatgatgagcttnttgccaatgctgcttacnttggcactcctggaaagggtattcttgctgctgntgagtcaacanggacaattggcaagcgtttggccagcatcagtgtanagaatgttgantccaacaggcgtgctcttagggagctgcttttcnccgctcccggtgctcttaaatatctcagtggtgtcatcctc

SEQ ID NO: 285766 - DNA, 275 bp, Glycine max
  unsure (1)..(275): unsure at all n locations
agaaaacatgagagccatctgctttgaagtatgtgatgttgtgctgcacgctgatgctatccacagangaggtggtcaaatcattcctactgccaggagagtcttctatgcttcccagattactgccaaacccaggcttcttgagcctgtctacctggttgaagtacaggctcctgaacaagctcttggtggaatctacagtgttcttaaccagaagcgtggacacgtgttcgaggaaatgcagaggccaggtaccccactatacaacatcaagg

SEQ ID NO: 285767 - DNA, 278 bp, Glycine max
  unsure (1)..(278): unsure at all n locations
aatnataatantattgcctattgganaaaatttgttgctgaatattactctcctcgtgcaaagaaacggtggtgcttgtcattatatagcaangttgggcatcatgcacttggtgttttcccccaagcanctatggatgcatggcaatgtgacatgtgtggttctaaatctggaaggggatttgaggcaacttangaagtgttacctaggcttaatgaaatccaaattttggaatnggngtgattgatgaattntgttctggacttgccctcgtgaaa

SEQ ID NO: 285768 - DNA, 262 bp, Glycine max
  unsure (1)..(262): unsure at all n locations
tcactgaaggtcttggcttcaaacatgatcaanaatccaccactannaaagtctctgactatgccggtgatgctgctcanaaatcaaangactatgccggtgacactgctcagaaaaccaaggactatgccggtgacactgctcagaaaaccaangactatgccggtgacactgcacagacatcaaaggactatncggtgatgctgcncntaatcaagggnttttggnntgntgaannngcgagtatntttgntnanctgcc

SEQ ID NO: 285769 - DNA, 272 bp, Glycine max
  unsure (1)..(272): unsure at all n locations
agagatggcttctcctcttcttactccttacaanntgggcaanttcaatctgtcccatanagttgttttggcaccgctgaccagacagaggtcttacgacaacgtcccacaaccccatgccatcctctactactcccngagancttccaacggaggccttctcattnctgaagccactggcgtctctgacacggctcaaggctatccgcaancccctggcatatggnctaaagaccatgttcaagcttggaaacccnttgtcgatgccgtcc

SEQ ID NO: 285770 - DNA, 271 bp, Glycine max
  unsure (1)..(271): unsure at all n locations
ggccgatgcgtccgtcaaagccgggaaatggcaganaaataaatatgtgggagtttccttggttgggaaaacacttgccatcttgggatttgggaaggtgggctctgaagttgctcgccgtgccaaggggcttggtatgactgtcattgcgcatgacccgtatgctcctgctgaccgtgcgagggcggtcggtgtggagcttgtgacctttgaggaggccattgccactgcggatttcatctctctacatatgcctctcacggctgctaca

SEQ ID NO: 285771 - DNA, 275 bp, Glycine max
  unsure (1)..(275): unsure at all n locations
ttagcacttcttcttttcacactgccgctggcaacaatggcttcananaanaaactttcgancccaatgagggngatnaaagtgcngaagctcgtttctcantatctctgttggcgacagtggagatcgtctcaccagagccgccaaggtgttggancaacttagtggccaaaccccagtgttttccaaagcaaggtacactgttcgttcctttgggattagaanaaatgngaagnttgcatgctatgtcactntcagaggtgacaaggcaatgg

SEQ ID NO: 285772 - DNA, 270 bp, Glycine max
  unsure (1)..(270): unsure at all n locations
ttttgattnataggttcggaggananaaggatgaaattcacttgggaaanaaggagggacatatccataggtgtggctcggggacttgactttcttcatgagcagcttaagcctcatatcgtacatanagacatcaaagcaaaaaacntacttcttgatagtaatttcntaccaaaggtttctgnttttggtttggcaaaattgctgagagatgaaacatctcacattagcactcgggttgcagggacattgggttatctagctccagaa

SEQ ID NO: 285773 - DNA, 272 bp, Glycine max
  unsure (1)..(272): unsure at all n locations
ggaacacaaaaaatggcagatattcctcgggtgaagcttggaagccaaggcctggaggtttccaagttaggntttggttgtatgggcctaagtggagtgtacaacgatcctgttcccgaagaggttggcatctctttgatcaaacacgcattcaccaaaggggncactttctttgattctgcagatttttatggagcacgtgccaatgaagttttggtcggaaaggctctcagggactttcctcgagatcaatttcagattgccacaaagtt

SEQ ID NO: 285774 - DNA, 264 bp, Glycine max
tcgcgtgtactttcttgcgaaacagaagggcgaaggggcaaacacaacttttttgtttttttgtagagcgagagagaaaaaaatgttggggatcttcagcagttccgtggtgtcgccgccggaggagctggtggctgccggcagcagaacgccgtcgccgaagacgacggcggggaagctgctgaaccggttcgtggagaacaaggcgtcggcggtgtcgctgcaggtgggagaacacgtgcagttggcttacacgcaccacaa

SEQ ID NO: 285775 - DNA, 264 bp, Glycine max
aagaatcaaagaaaggggtggtggctgcttcgaaagcttaataatttgtttatttccagaacatcatagttttcgcagcagcaaactaacaaattactcatatcatataataagatggcccgttctctctcgcaagccaaacgtattggtgtccttgttgctcaatctatctccctaattcccgttcatcggcgaggttacgcagtggcatccgatgtatcggtaagagttggattgggtaatattgggcgaaggaatggaatc

SEQ ID NO: 285776 - DNA, 261 bp, Glycine max
ccaacatgccccattgacagcctaaaactgggggcatgtgtggatgtgctcggtggcctcatacacattggcataggcagcagtgccaagcagacatgttgtccagtgcttgcagggcttgtggacttggatgctgcagtgtgtctctgcacaaccattagggctaagattctcaacatcaacatcatcatccctattgctcttcagcttctcattgactgtggcaagaccccacctgatggattcaagtgtgcagatagt

SEQ ID NO: 285777 - DNA, 267 bp, Glycine max
  unsure (1)..(267): unsure at all n locations
ctcgaaactctgaaaaaagtaaaaaccgctgcgaacaatggcaacgatctcggccgtgaangctcgccagatccttcgacagccgtggaaatccaaccgttgaagttgacgttattctcagcgatggaaccttccacagagctgctgtccctagcggcgcttcaacaggtgtttatgangctttggaattnagggatggaggctcagactacctcgggaaaggtgttcttaaggctgtggagaatgttaattcaattatagcacctg

SEQ ID NO: 285778 - DNA, 263 bp, Glycine max
  unsure (1)..(263): unsure at all n locations
tcgcgtgtactttcttggcgaaacagaagggcgaaggggcaaacacaacttttttgtttttttgtagaccgaganagaaaaaaatgttggggatcttcagcagttccgtggtgtcgccgccggaggngctggtggctgccggcagcagancgccgtcgccgaagacgacggcggggaagctgctgaaccggttcgtggagaacaaggcgtcggcggtgtcgctgcaggtgggagaacacntncagttggcttacacgcaccac

SEQ ID NO: 285779 - DNA, 260 bp, Glycine max
  unsure (1)..(260): unsure at all n locations
gagaagcagaaggagcaaaagcaatggcgccgaagaagccgagaaccacgacaaggaaccctgatttggttagggggattggcaagtattcgaggtcgcagatgtaccacaagaggggcatctgggccatcaaggccaaaaacngtggcgttttgccccgccacgatcccaagcccaagcccgaggccccggcccagaagccgcccaagttctaccccgcggacgatgttaagaagcccctcgtcaacaagcacaagccc

SEQ ID NO: 285780 - DNA, 260 bp, Glycine max
  unsure (1)..(260): unsure at all n locations
ccgacgctagaagaggtgtcggaacaaacaagcttcgtttcgccggaacgatgaccggcggcggatcgacggggaggttgccaacatggaaggagagagaaaacaacaagaggagagagaggagacgaanagcgatcgccgctaagatctacaccggtcttcgagctcaggggaactacaagcttccgaagcactgtgacaacaacgaggtcctgaaagctctatgcnccgaagctggttggatcgtggaagagnatggc

SEQ ID NO: 285781 - DNA, 265 bp, Glycine max
  unsure (1)..(265): unsure at all n locations
ctcaggattcagggaaaacagagcagcaggtaagccaacttgtagctcaacttttccaaatgcgtgttcgtatgaagaacctgatgggtgtaatggaaagtggatcacttccaacacttagtaatcttgaggaagcgcttaaagcagaggaaaaggtgatttcgttttctacatatatgatatttaacaatttttaagttactttattttatttttgaattgactganctagtttatgtaaaataatactnggtgtnaaanaccc

SEQ ID NO: 285782 - DNA, 263 bp, Glycine max
  unsure (1)..(263): unsure at all n locations
attaactctttcttctcataactctgccgccgcaacagccccaaatccaatggcttcagagaagaaactttcgaacccaatgagggagataaaggtgcagaagctcgtcctcaatatctccgttggcgagagtggagatcgtcttaccagagccgctaaggtgttggaacagcttagtggccaagcccncgtgttttccaaagcaaggtacacggttcgttcctttgggattagaagaaatgagaagattgcatgctatgtca

SEQ ID NO: 285783 - DNA, 266 bp, Glycine max
cagagagggagattctttgtttgctaccttctctcggaaaaatggttacgttcaggtttcaccagtaccaggtggttgggagggctcttcccacggaagcagatcagcaccccaagatctaccgaatgaagctctgggccaccaacgaggttcgcgccaagtccaagttctggtattttctgaggaaactgaaaaaggtgaagaagagcaatggccaagtgcttgccatcaacgagatttttgagaagaacccaaccaaaattaag

SEQ ID NO: 285784 - DNA, 259 bp, Glycine max
tgcgctggtggatctcaccgaggatgctgaggttcaggccgagtttttgtacacggttaagtggaaggagactaacacgccattcgagaagaggatggacaagtactcgcagtcttcatcgctgccgcatcatttggaaatccactggttctcgattatcaactcctgtgtgacggtgttgctcttgaccgggttcctcgccaccattttgatgagggtgctcaagaatgattttgtcaagtatgcacatgatgaggag

SEQ ID NO: 285785 - DNA, 266 bp, Glycine max
  unsure (1)..(266): unsure at all n locations
caaagatggagatccctgtgatagattttagtaacctcaatggggacaagaggggtgacacaatggccctattgcacgaagcttgtgaaaaatggggctgctttatggttgagaaccatgaaattgacacacaactgatggagaagttgaagcagttaatcaatacatactatgaggnagacctaaaggaaagcttctaccagtctgagatagccaagaggttggagaaagagcagaacacctctgatatagattgggaaattacc

SEQ ID NO: 285786 - DNA, 261 bp, Glycine max
acagaaggggtccgacaggtgtttcttggatgcaaaactttccggttacatggtaatatgcaacaagaggaccggagaaccagttttcaggcctttaaaactgagaaatctgctctgcttttgtccactgatgtttctgctagaggattggattttccaaaggttaggtgcatcatacaatatgattctcctggggaagctacggaatatgttcatagagttggtagaactgctcgactgggtgaaagaggagagtcattt

SEQ ID NO: 285787 - DNA, 261 bp, Glycine max
  unsure (1)..(261): unsure at all n locations
cnggagcaacgtataaggctgatcttccggatgggtctgcactcgcggtgaagcggttgagtgtgtgcaggatcggggagaagcagtttgggatggagatgaatcggttggngcaggttaggcacccgaatttggcgccactgttggggtactgtgttgtggagnaggagaagctgttggtctacaagcacatgtcgaatgggacgctgtattcgttgttgcataggaacggtggtgatgcgttggattggttgatgaggt

SEQ ID NO: 285788 - DNA, 261 bp, Glycine max
gtgaacacaccgacaaagactcagggtcttggagccggtaaggcggctgatctcacatattgggagagtgctgccaggatgattgctgatgtatcaaaatcggacaagatcgtggttgagaaatcgaccgtgcctgtgaaaacagctgaggcaattgagaggattctgactcacaataggaaaggcatcaatttcacaattctgtcaaaccctgagtttcttgctgagggtacagcaattgcagacctgtttaagccggat

SEQ ID NO: 285789 - DNA, 262 bp, Glycine max
caccaaacaccaacaacgctttagctctctctcttctctccataaccgccacccgcgatctggcactaacagatcgccgctgctacatctgaacccgatccagccaacagatctctccaattcaaatggagaatctaatctctttggtcaacaaaatccagagagcttgcaccgccttaggtgaccacggccgaaaacagtgcactccccacactatgggactctctccccgccatcgccgtcgtcggaggccagagctcag

SEQ ID NO: 285790 - DNA, 263 bp, Glycine max
  unsure (1)..(263): unsure at all n locations
cacctggatatatataaccagccaagangccttgaagatcctgaacttcttgctagananactgtgttcagtgtaagcnaaatagaagcactttacgagctcttcaaaaagattagccgtgctgtaatcgacgatgggttgattaacaaggaagagtttcagttggcattgttcaagacaaataaaaaagaaagtctgtttgcngatcgggtatttgatttatttgacacaaagcacaatgggatactaggttttgaagagtt

SEQ ID NO: 285791 - DNA, 261 bp, Glycine max
  unsure (1)..(261): unsure at all n locations
ggaaaacngcaccgccgccgtagaagaaaacaaccatggtgcacgtctccttttacaggaactatgggaagacattcaagaagccgcgtcgtccgtacgagaaggagcgtctcgacgcggagttgaagctggttggtgagtacgggcttcggtgcaagagagagctgtggagggtgcagtacgcgctcagccgcatccgcaacaacgcgcggaacctcctcaccctcgacgagaagaacccgcgccggatcttcgagggag

SEQ ID NO: 285792 - DNA, 251 bp, Glycine max
  unsure (1)..(251): unsure at all n locations
catctgcttactaaaatttcttccattcttagctttgttcaatcaaagttttttaanatggcccagagaaatgttactgctaattcttcttttgaaaggactagcttgccttccctagatcaaaagttggccatggccaagcgctgctctcatgagggtgtgatggcaggagcaaaagcagctgttgttgctactattgctactgccataccaactctggctagtgtaaggatgcttccttgggcaagagc

SEQ ID NO: 285793 - DNA, 258 bp, Glycine max
ttctcatctttctctcttctctctccacccaaaccctaactcccgaccctgttcccctctcgtatccgtcatgaaaggaggaaagtccaagaccgaatctaagagagccgatcccaaacttgctgtgaataagaagggagccgccaccaaggctaggaaacccgccggcaaggggaaggcagcgaaagaccctaacaagccaaagaggcctccaagtgctttcttcgttttcatggaggagttcaggaaggtattcaa

SEQ ID NO: 285794 - DNA, 258 bp, Glycine max
tccttcgatcatacacttagttgcttccaattaagatggttctgctagagaagctctgggatgatgttgtggctggccctcaacctgagcgtggccttggcaagctcagaaaactcaccaccctcaaaactattgatgaaggagaaagtagcaagctgcagaagacgttgtcgatgccgtcgacaccaacaaccccgatgactccgacgactccaacgacaccgggatcggcccgtaaagctgacaacgtttggagga

SEQ ID NO: 285795 - DNA, 258 bp, Glycine max
  unsure (1)..(258): unsure at all n locations
ccactgctggtgacacccatcttggaggtgaagattttnataacaggatggtgaaccactttgttcaagagttcaagagaaagaacaagaaggacattagtggaaaccccagagcacttagaaggttgaggactgcttgtgagagggccaagagaacactttcatcgactgctcagaccaccattgaaattgattctctatacgagggaattgatttctactccactgttactcgtgccagatttgaggagctcaaca

SEQ ID NO: 285796 - DNA, 261 bp, Glycine max
  unsure (1)..(261): unsure at all n locations
cgtttgccaaaatgcatggggcagtgagactacacatgttttagagactgtgcctggngcaaggngacttggatggggtcggctggcaagggaattgaccactcttgaagcagcagcatggaggaagttgactgttggaggtgctgttgaaccctcacgctgtaattttagtgcttgtgcagttggtaatagagttgtgctttttggtggtgaaggggttaacatgcaacccatgaatgacacctttgtattggatctcaa

SEQ ID NO: 285797 - DNA, 262 bp, Glycine max
  unsure (1)..(262): unsure at all n locations
cgctgaggaaaactgataataatagaattgcaaaggcttgtngtgctgttattgtgaatagaccagatgaattgcaggagtctgatgttggtactggcgctgggttatttgaggttaagaaaattggagatgagtactttgcatttattgttgattgcnaagaacccaaggcttgtactgttctactaaggggtgctagtaaggatctattaaatgaagttgaaaganacctacaggatgccatgtctgttgcaaggnacat

SEQ ID NO: 285798 - DNA, 262 bp, Glycine max
ttcttcatgaaggagaacaaatagttgtctgcggaatgcagggtccaattgttaccacaattcgagctttattgacacctcatccgatgaaggaacttcgtgtcaagggaacatatcttcatcacaaagaaatcaaagctgcaatgggtataaaaatcactgcccagggccttgaacatgccattgccggcactggtttatatgtggtgaagcctgatgatgatttggaagatgttaaagaatcagccatggaagatatgcg

SEQ ID NO: 285799 - DNA, 262 bp, Glycine max
gatgaaggaaggtcagagtgacatctactacatcaccggtgaaagcaagaaggctgttgagaactccccattcttggagaagttgaagaagaaagggtatgaggttcttttcatggttgatgccattgatgaatatgctgttggccagctcaaggaatttgagggcaagaagcttgtctctgccaccaaggagggtctcaaacttgacgagagtgaagatgagaagaagaagcaagaggagttgaaggagaagtttgacaac

SEQ ID NO: 285800 - DNA, 261 bp, Glycine max
  unsure (1)..(261): unsure at all n locations
gcgagctgaatctaccaaaatcatgtaccatgcaattccccaatggcaaagntgacctgatgcactttgaagtttcaattcgacctgatgatggatattacttaggtggcacatttttgttttcctttcaagtgtctcccatctatccacatgaagcaccaaaggttaaatgcaagacaaaggtctatcatccaaatattgacttggaaggaaatgtttgtctcaacatcttacgagaagattggaaacctgtccttaata

SEQ ID NO: 285801 - DNA, 258 bp, Glycine max
  unsure (1)..(258): unsure at all n locations
ccctcgctctatttctcagtctctgtgtttgcggctgaggattccnaacgagtgaccttcntcgtttctcgcaaagtttaagtaatcatgggtaaggaaaaggttcacatcaacattgtcgccattggacatgtcgactctgggaagtcaactaccactggtcacttgatctacaagcttggaggtattgacaagcgtgtgattgagaggttcgagaaggaggctgccgagatgaacaagaggtcattcaagtatgcc

SEQ ID NO: 285802 - DNA, 258 bp, Glycine max
gtttgttttttctctcacctgaaaatgtcttgctgcggtggtaactgtggttgcggaagtcctgcaagtgcggcaacggctgcggaggctgcaagatgtacccagacttgagctacactgagtcaaccaccaccgagaccttggtcatgggagtggcacctgttaaggctcaatttgagggtgctgaaatgggtgtgcccgctgagaacgatggctgcaaatgtggaccaaactgctcctgcaacccctgcacttgca

SEQ ID NO: 285803 - DNA, 259 bp, Glycine max
  unsure (1)..(259): unsure at all n locations
aaatgcagggaggaaagaaagctggagagtccatcaaggaaacagctgcaaacattggtgcttctgccaaggctggcatggagaaaaccaaggccactgtccaggagaaggcagaaagaatgacggcacgtgatccgatgcaaaaggagttggcaacccagaagaaagaggcaaagatgagccaggcagagctggacaagcaggcggcgcgtcagataacacggcggcgaacaggctgccacngcagggcacatgggat

SEQ ID NO: 285804 - DNA, 195 bp, Glycine max
  unsure (1)..(195): unsure at all n locations
atgaggattttaacagtgatgatagcaatgatgaaggaatggaaataattgccaaanaatatggagtnaaaaggtatggttggcttgtttacatggataagaaggctaaggaggaagaaaaaaggcaaaaagagttgatcaaaggtgatcctgcaattaggaagctgagtcgtaaggnaaganggaaggcttctc

SEQ ID NO: 285805 - DNA, 257 bp, Glycine max
  unsure (1)..(257): unsure at all n locations
ccataatagtgcagccnaatcgggtaaccattggcaatggtccttccttgggctgggttttcatggctgatttcttaactgcattggctaaaaaagtgaagaccaacaccgcagctgtggagaattaccggcgtatctatgtcccaccaggcattcctctgaggcgagagaaggatgaaccacttagagttaatgttctattcaagcacattcaagaactgctaagcggagatactgctgtaatagctgaaactggg

SEQ ID NO: 285806 - DNA, 260 bp, Glycine max
tctcttccatggtgctcatcaagatgcgtgagattgctgaggcttacctaggctccacagtgaagaatgctgttgtcaccgtccctgcttacttcaatgattctcagcgtcaagctaccaaagacgctggtgtcattgctggtctaaatgtgatgcgaattatcaatgagcctactgcagctgccattgcatatggtcttgataagaaggccacgagtgttggtgagaagaatgtgttgatttttgaccttggtggtggg

SEQ ID NO: 285807 - DNA, 259 bp, Glycine max
  unsure (1)..(259): unsure at all n locations
cgaatatcttgttgtttggagcgatccgagaaaaactctgtaaacatgttggtttaccaggacctccttacaggtgatgagcttctctctgactccttccgttacaaggaaattgagaatggaatgctgtgggaagttgaggggaagtgggttgttaaaggagcngttgatgtagacattggtgcaaacccttctgctgagggtggaggagaagatgagggagttgatgatgcagctgttaaggttgttgacattgttg

SEQ ID NO: 285808 - DNA, 259 bp, Glycine max
  unsure (1)..(259): unsure at all n locations
cgcccgtggacgcctcaccgaggagcgcaagtcgtggcggaagaaccatccccatggttttgttgcgaancggagacgctgcccgatggaaccgtgaacttgatggtgtggcattgcactattcccgggaagactgggactgattgggagggtggctacttcccgcttacgctgcactttagtgaagactacccaagcaagcctccaaagtgtaaattcccacaaggtttcttccaccctaatgtttatccttctgggg

SEQ ID NO: 285809 - DNA, 259 bp, Glycine max
  unsure (1)..(259): unsure at all n locations
ggctacggcaatgccatgaacctcaagcgaaccgtcaagggtttcattgccgccggtttcgcaggaatcattctggaagaccagattgcnccgaaagcgtgtgggcacacgcncgggaggaaagtgataccgagagaggagggcgttatnaagattagagccgccgtggatgcgagcngagagagtgggtctgacattgtgattgtggcgcgcacggatgctcggcaagctgtgtccttggaggaagcgttgacgaggt

SEQ ID NO: 285810 - DNA, 258 bp, Glycine max
  unsure (1)..(258): unsure at all n locations
gcaaatatgctgcacattggactggtgacaatcagggaacatgggagaacttgaggtactcaatatccacaatgctcaattttggcatatttggggtgccaatggtgggttcagatatatgtggcttctatccacagcccactgaagaattatgcaatagntggattgaagtaggtgctttctacccgttttcaagggatcatgcaaactactactcccctagacaggagctttaccaatggcaatcagtagctgagt

SEQ ID NO: 285811 - DNA, 260 bp, Glycine max
cagctttgaacgccgaagaaggttcatccaatccccgaagcccttcaccgcattgcaaccatgtcgaggagaaaggtcagagagccaaaggaagaaaacgtgactctgggcccagctgttagagatggtgaacatgtctttggcgtcgctcgcatctttgcctccttcaatgataccttcattcatgtcactgatttgtctgggagggaaacgcttgtccgcatcactggtggaatgaaggttaaggctgacagagatga

SEQ ID NO: 285812 - DNA, 256 bp, Glycine max
caaaagtaaaaaaatgtggtttcttggttggaaagggcaatcggggttctcagcgtcctccacagccgaacaagtcactcaagggattgatggaaccgctctcacagccatcgtcacaggagcaacaagtggccttggtctggaaaccacccgggttcttgcattgcgcagtgtccatgttgttatggcagtaaggagtgtggacagtggtaagaatgtcaaagaaacaatacttaaggaaattccctccgctaat

SEQ ID NO: 285813 - DNA, 298 bp, Glycine max
cttttgagaaaccctagggtttggaagaagctgatcggagaagatggtgcagcgtctcacctaccgcaagcgccacagctatgccaccaaatccaaccagcacagagtcgtcaagactcccggtggcaagcttgtttatcagaccacgaagaagagggccagcggacccaagtgccctgtcactggaaagaggattcaagggattccacatttaaggccaacagaatataagagatcaaggttacccaaaaaccgaaggactgtgaaccgtgcatatggtggtgtgttgtctggcagt

SEQ ID NO: 285814 - DNA, 291 bp, Glycine max
  unsure (1)..(291): unsure at all n locations
gcaacatcgccaaaaggggttgcttggaatgggccataaccttgttctctctctccaccctccctaacactttggtcatgggcatccctttgctcaaagggatgtatggtgacttctcagggtcccttatggtgcaaattgtggtcctccagtgtatcattnggtacaccttgatgctgttcttgtttgagtttagaggtgccagaatgcttatctctgagcagtnccctgacactgctggctcccattgtctccatccatgttgactctgatgtcatgtcatggatggna

SEQ ID NO: 285815 - DNA, 290 bp, Glycine max
  unsure (1)..(290): unsure at all n locations
agaacaaaaaaaaaaacgtgattcgctcttctcttcgaataanccacaaaaccaacaaacgagaagaggagtgagagaagatggggttgtcgttcacgaagctgttcagcaggttgtttgcgaagaaggaaatgaggattctgatggtaggtctcgatgctgctggtaagacaaccatcttgtacaagctcaagcttggagaaatcgtcaccaccatccccaccatcggatttaatgttgagactgtggagtacaagaacatcagcttcactgtgtggattttggggggc

SEQ ID NO: 285816 - DNA, 288 bp, Glycine max
  unsure (1)..(288): unsure at all n locations
ctttaaagttggagatgccagtncaaccacatgttgctaccttttntactgccttcttatgcattgggtgtgtcgttattgggaatctggatcttatcactccaactgtaactatgtttttccttctatgttacactggtgtcaacttatcctgcttccttctcgatcttctagatgcccctagttggcgtcctcggtggaaatttcaccattggagtctgtcccttgtgggagcattactttgcatagtgatcatgttcctaaatctcttggtcattcatggggngc

SEQ ID NO: 285817 - DNA, 287 bp, Glycine max
  unsure (1)..(287): unsure at all n locations
caaggnaaggatcacgccttgggacatgattcacttgttgatgggatgttggaagatggtttgtgggatgtctataaggatgttggcatgggagtctgtgctgagctatgtgcagataaccatgcattaacaagagatgaccaggataactatgcagttcagagttttgaacgcggaattgctgcccaagaaagtggtgctttttcatgggaaattgctccagttgaagtctctggtggaaggggaagaccatcaacagttgttgataaggacgaaggcctaggaaa

SEQ ID NO: 285818 - DNA, 286 bp, Glycine max
ggcaagatgtcgaagagaggacgcggtggttcggcggggaacaagttccggatgtcgctgggtctgccggtggcggcgacggtgaactgcgccgacaatacgggggcgaagaacctctacatcatatcggtgaaagggatcaaagggcgtttgaaccgtctcccctcggcttgcgttggcgacatggtgatggccaccgtgaagaaggggaaacccgatctgaggaagaaggttttgccagctgtcattgttcgccagcgcaaccatggcgccgaaaggacggcgt

SEQ ID NO: 285819 - DNA, 293 bp, Glycine max
caaccctcacattcaccacagcagcacacacagacaaagacaaccttgtttgtctccaatcaaaacctttcaagctggcgttcgaaaaccaagacaaccctgtccgagaaatcaagcccaagaataggagaatcatgggtgctggaggccctgatgatgaggacaacaacaggtggccaccgtggctgaagcctctgctaaaagaaagtttctttgttcaatgcaagcttcacgctgattcgcacaagagcgagtgcaacatgtactgcttggattgtatgaacggtgctctc

SEQ ID NO: 285820 - DNA, 287 bp, Glycine max
  unsure (1)..(287): unsure at all n locations
ccatcttggaggtgaagnttttgataacaggatggtgaaccactttgttcaagagttcaagaganagaacaagaaggacattagtggaaaccccagagcacttagaaggttgaggactgcttgtnagagggccaagagaacactttcatcgactgctcagaccaccattgaaattgattctctatacgagggaattgatttctactccactgttactcgtgccagatttgaggagctcaacatggatctcttcaggaaatgtatggagccggtggagaaatgtttga

SEQ ID NO: 285821 - DNA, 287 bp, Glycine max
  unsure (1)..(287): unsure at all n locations
cacactcactgcagatctcaatccatggnccacgncctgnnaaagatctggcgggccttgatgctaacaatggtagccagatctttgacagtngtggcaatccaaccgtcgaggtggatttgacatgctccgatggtgcttttgctagagctgctgttccaagtggtgcatccactgggctttatgaggcccttganctgagagatggaggatctgactaccttggaaagggtgtatcaaaggctgttgacaatgtgaacaccattattgcccctgctttggttggg

SEQ ID NO: 285822 - DNA, 287 bp, Glycine max
  unsure (1)..(287): unsure at all n locations
ttcgcgatctcgttctgttctgtacctgcacccagccgcagcagcaagtgatcgaagcgaaaagagagtcatcagcagagaaattcatcgtcgtagttatgggtaaagttcacggatcacttgcacgtgccggtaaggttagaggccaaaccccaaaagtggccnnnnnnnnnnnnnnnnnnnnnccacgtggccgcgctcacaagaggatgcagtataatccgccgattcgtcaccgccgtggtgggattcggcaagaagaggggacttaattcgtctgagaagtg

SEQ ID NO: 285823 - DNA, 285 bp, Glycine max
cacagagagaaaatggtttcggggtcagggatctgtgccaagagggtaattgtggacgcacgacaccacatgctggggaggctggcatcgatcgtggcgaaagaacttctgaatgggcagaaggtggtggtggtacgctgcgaggagatttgcatctccggtgggctcgtcaggcagaagatgaagtacttgcgtttcctccgcaagcgcatgaacaccaagccctctcacggccccatccatttccgtgcacccggcaagatcttctggcgcaccgttcgtggg

SEQ ID NO: 285824 - DNA, 284 bp, Glycine max
gcatacacctaaacttacccttcttctctctgtgtgtgtgcgcatcaaacgcaaccagaagcagccatggccactgcaagaactgtgaaggacgtttctcctcatgagttcgtcaaagcttactcttctcacctcaagcgatctggcaagatggagctgccagagtggactgatattgtgaaaactgcaagatttaaggagttggctccttatgatcctgactggtactatgtcagagctgcttccatggcaagaaagatctacttgagaggaggacttggtgt

SEQ ID NO: 285825 - DNA, 285 bp, Glycine max
  unsure (1)..(285): unsure at all n locations
gtacattgaggctggtgcttctgagcatgcaaggngccttggtccaaaagggtcagattgtcacaaggcagctgttattggtgacaccattggagaccccctcaaggatacatcagggccttcacttaacatccttatcaagctcatggccgttgagtctcttgtgtttgctcccttctttgcgacacatggtggcctactcttcaagatctaaaggatttaatagaaaaaagagcatcgtccatcattttctacaatggcagaacaaggaaaaccccgtttttt

SEQ ID NO: 285826 - DNA, 282 bp, Glycine max
  unsure (1)..(282): unsure at all n locations
caatcaacacgtgaggntactctgtctggctttaggtctgggaaattcatgacattagtngccacaaatgtggcagctcgaggtcttgatatcaatgatgttcagttaattatccagtgtgaacccccacgagatgtagaagcctatatccatcgttctggacgcacaggaagagcaggtaatactggggttcctgtcatgctttatgatccaaaaagatctaacatacctagaatagaaagagagtccggtgtaaaatttgaacacgtatccgcccctcag

SEQ ID NO: 285827 - DNA, 281 bp, Glycine max
aatcattcagatctattacaaggtcttattatagaggggctgcaggtgcactgcttgtttatgatataaccaggagggagacatttaatcacttggctagctggttggaagatgcaagacagcatgcaaatgcaaatatgactattatgctgattggcaacaagtgtgatcttgctcatagaagggccgtaagcacggaggaaggcgagcaatttgcaaaggagcatgggttgatctttatggaggcctctgcaaaaactgctcagatgttgaagaggctt

SEQ ID NO: 285828 - DNA, 280 bp, Glycine max
  unsure (1)..(280): unsure at all n locations
gtgagaaacaaagaaaggaaataattgatctttgaaaatgcagggaggaaagaaagctggagagtccatcaaggaaacagctgcaaacattggtgcttctgccaaggctggcatggagaaaaccaaggccactgtccaggagaaggcagaaagaatgacggcactgatccgatgcaaaaggagttggcaacccagaagaaagaggcaaagatgagccaggcagagctggacaagcaggcggcgcgtcacataacacggcggcgaanaggctgccacggca

SEQ ID NO: 285829 - DNA, 286 bp, Glycine max
  unsure (1)..(286): unsure at all n locations
cttcttgctgccattacaacaattttcttggcagctgaaaagcagtngatgatgcttgattggnagccaaggcgacctgacatgcttattgacccctttggnataggaaaaattgttcaggatggtctcgtgttccgtgaaaacttttctattagatcatatgagattggtgctgatcgaaccgcatctatagaaacagnaatgaaccatttgcaagaaactgcacttaatcatgttaaaagtgctgggcttcttggtgatggcttcggttccacgccagaaatgt

SEQ ID NO: 285830 - DNA, 283 bp, Glycine max
caaagaatcaaagaaaggggtggtggctgcttcgaaagcttaataatttgtttatttccagaacatcatagttttcgcagcagcaaactaacaaattactcatatcatataataagatggcccgttctctctcgcaagccaaacgtattggtgtccttgttgctcaatctatctccctaattcccgttcatcggcgaggttacgcagtggcatccgatgtatcggtaagagttggattgggtaatattgggcgaaggaatggaatcgtgggaggtgtagaaga

SEQ ID NO: 285831 - DNA, 282 bp, Glycine max
  unsure (1)..(282): unsure at all n locations
caccttnggccaacgcncntccatctaccgcggcgtcacccgacatagatggacgggaagatacgaagctccatctatgggacaatngttgtagaagagaaggccaaagcaggaaaggaagacaagtttacctgggtggttatgacaaggaagataaggcagccagggcttacgatctcgcagctctcaagtactggggtccaactaccaccaccaactttcccatttccaactatgagaaggaactggaggagatgaagaacatgaccaggcaagagtttg

SEQ ID NO: 285832 - DNA, 277 bp, Glycine max
aaatcctgacggtgaaattccctagtgcagaggctggtttacctgagggatgcgaaaatacagagtcaatcccctcccctgacttggtactgactttcttaaaggcaatcaggatgttggaagcccccttggaacacctactccttcaacaccgtcctcattgccttatagccagtgctttcttcccttgggcatctcattccgccactaaactcaaaatccccaggcttgtctttcatggcaccggtgtcttcgcttatgtgctctgaatgcgtcc

SEQ ID NO: 285833 - DNA, 279 bp, Glycine max
  unsure (1)..(279): unsure at all n locations
cttctttcaggcaaatggtctgcaagcctattttgtcaccttgatnncttattttgctctctggtggtttgggatattcaaccctacgattgtttatcatcatttgggagaaatttattcagntctcatcttcggcagctttctcttctgtgtnttcttgtacatnnagggtcatttggcaccgtcttctacagattctggctcatctggaaacttaatcattgatttttactgggggatggaactttatccacgcattggaaaacattttgacataaa

SEQ ID NO: 285834 - DNA, 281 bp, Glycine max
gcatataaagcttctctggcgcttggggcttagcataacccttacctttggtatagagaagaagaatagagagtgatggagtgcgtattcggattggtgggtaatggattcgcgatcgtggtggctgattcatcggcggtgcacagcatcctcgtccacaagtccaacgaggacaagatcatgcttctcgattcccacaaactcatcgccgctagcggcgagcccggagacagggttcaattcactgagtacattcagaaaaacgtcgccttgtatcagtt

SEQ ID NO: 285835 - DNA, 279 bp, Glycine max
  unsure (1)..(279): unsure at all n locations
agagangggtttgggattggagggattgacgctgcgtctcttcctcttctctttcgatccatccctcattcctaatcctccaatccaaccacctcagcctcacactcacatatacacatatctgaacgcgtatcgtccctcctatggcttcaaagcgcatcctcanggagctcaaggacttgcagaaagacccaccaacttcttgcagcgctggtccagtagctgaggacatgttccattggcaagcaacaataatgggtcctgctgatagtccttatg

SEQ ID NO: 285836 - DNA, 277 bp, Glycine max
  unsure (1)..(277): unsure at all n locations
ctcaatgggaagcaaccaagccgccatttccttcctcaccaacgtcgcccncgcggccttcggccttggcgcggcggccaccggcctctcctcctccctctacaccgtggacggcgggcagcgcgccgtcctcttcgaccggttccgcggcatcctggactccaccgtcggcgaggggacccacttcctggtcccatgggtccagaaaccctacatcttcgacatccgcactcgcccccacacattctcctcggtctccggcacaaaggatcttcaa

SEQ ID NO: 285837 - DNA, 277 bp, Glycine max
  unsure (1)..(277): unsure at all n locations
agagaagaagaaacttaatcgatcatcacttcacttcactaatacatcatggcagacgagacccagaacaagtatgagagctctgaggttgaggtccaggatcgtggtgtttttgactttctcggtaagaaaaaggatgaagaagacaagcctcatcctcaggaggnggtcatcgccaccgagtttcaaaaagtcactgtctcagaccaaggagagaacnagcacagcctcttagaaaagcttcaccgatctgacggcngctctagctcttggagng

SEQ ID NO: 285838 - DNA, 137 bp, Glycine max
  unsure (1)..(137): unsure at all n locations
cgntaacctaagcttagaattagcnacaangaaaagatgtnaggnaagaattgatcgttgaaaatgcagggaggaaagaaagcgggagagtccattaagggnacagctacaaacattggtgcttctgccaaggctgg

SEQ ID NO: 285839 - DNA, 272 bp, Glycine max
cgagaaccgtgcctgctgcagttcctgctatcgttttcttgtctggtgggcagagtgaggaggaggcatccgttaacctcaatgccattaaccaggtcaatggaaagaagccatggtcactctctttctcctttggaagggcacttcaacagagcacccttaaggcatggagtggaaaagaggagaatgtgaagaaggctcaggaagcccttttggtaagagccaaggccaactcagaggcaactctgggaactacaagggtaatcaaagct

SEQ ID NO: 285840 - DNA, 274 bp, Glycine max
  unsure (1)..(274): unsure at all n locations
cgcatctcaatacccttttgatttgtgaaaggnaagcaaacatgcttgatcaggtccaacaccctacaatcatggacaaggttgctggccagctccatctccgttctggtgtttctggtattaggagttatgaaggagcctactgccaccccacaatgtaccaaagaccctcttttgggaattacncgaatgctgcattgcagtatcctgtgatgccctcatgcaaagctactatggatttgtctgctgctgcaanaantgcctccccgtnttt

SEQ ID NO: 285841 - DNA, 268 bp, Glycine max
  unsure (1)..(268): unsure at all n locations
gtcattgttacctccaagcacaatgatgatgagcagtacgtttggnagtcccaagctggaggttcattcactgtcaccagggatacctctggtgangttcttggcaggggtactaagatcactctcttcctcaaggagnatcagctagagtaccttgaggagcgccggttgaaggatttgattaagaagcattctgagttcattagctacccatttccctttgggccnagagantaccgagaaggagnttncncgngagggatgagga

SEQ ID NO: 285842 - DNA, 286 bp, Glycine max
ctttcttttcttttctttctttctccgatcgcatcgctcgcaacacacaatcatgccttcccgaagaagaactctcttgaaggtcatcattctcggtgacagcggggtggggaagacgtctttgatgaaccagtatgtgaataagaagtttgtaatcagtacaaggcaaccattggagcggattttttaaccaaagaagtgcaatttgaagataggcttttcaccttacagatttgggatacagctggccaagaaagattccaaagccttggagttgctttctatc

SEQ ID NO: 285843 - DNA, 277 bp, Glycine max
aattttgaaaccataatgtatccatactgccctcctcatataacaaaacccaaggagtgcaaaaagcttttccttgttcatttatctgagagggaatactttgcagtgcccaaaaatttaaaacttcttgctgttccattgtttgaatctatgataatgttcagagatacgggccagttatatccactattcctcagcagctatccagattccagtttaaaatgatcataattgaaggaaatttgaagcttacatgctgataaattacgatttcatt

SEQ ID NO: 285844 - DNA, 282 bp, Glycine max
gtcaacatgcacaacacaatgaatggtgtcagaatcaaaacatggcagggtggatcaggttctgtacaaggagtgctattctccaaatatacaagtttctgaagttgaactcccaattgtgatcgatcaattctactgtgacaaaagaactgcaaaaaccaaacgtcagctgtgtctctcgccggaatcaactatgaaaggataagggggacatacaccgttaagccagttcattttgcctgcagtgatagcctaccttgtgtggatgtttctctaactctg

SEQ ID NO: 285845 - DNA, 285 bp, Glycine max
gaagaaccacagcttcaagcgagtgacatccaccagccatgggtcgtatgcacagccgcggtaagggtatatcctcttctgctttgccctacaaaaggacaccccctagctggctcaagatctcttcgcaagatgtggaagaaaatattgcaagtttgcgaagaagggtttgaccccgtctcagattggtgtcattcttcgagattctcacggtattgctcaggtccaacagcgtcactgggcagcaaaatccttcgcatcctcaaagctcagggcttgcgcctg

SEQ ID NO: 285846 - DNA, 279 bp, Glycine max
cacaatccaagatggcgatgcgcattcggattgggtaagttgcgtccgtttcagccctagcactcttcagccaaccattgtttctgcttcatgggacaggaccgttaaggtttggaacctgaccaactgcaagctgaggaacaccctgctggacacaatgggtatgtgaatactgttgctgtttcccctgatggctctctctgtgccagtggtggcaaagatggggttattcttctgtgggattggctgagggtaagcgtctttatctctcgatgctgg

SEQ ID NO: 285847 - DNA, 283 bp, Glycine max
  unsure (1)..(283): unsure at all n locations
ggcnagtgattntataanattgatgaagtcaattttngattttgaatctatcaggaaactgctgtcatctcctaaattccacattctgttatgatgcactacatggggnnggtggagcatatgcaaagagtatttttgtggatgagctggagcacaaganagctctttactgaactgtacaccaaaggaagacttcggaggaggacacccagaccccaatttgacatatgcaaaagcagttggttgctcgtatgggattgggcaaatccgnaccccaagaaga

SEQ ID NO: 285848 - DNA, 278 bp, Glycine max
  unsure (1)..(278): unsure at all n locations
gtaacgtagctgtggaccagctagctgaaaagataagtgctactggnttaaaggttgtganccttgcgcaaagtccaagggaagctgtgagttctcctgttgagcatttaactctccactatcaggttcgacatcttgacacatcnacaagagtgaacttccataagttacaacagctgaaggatcagcaaggcgaactttctagcagtgatgagaaaaaatcacaaagcattaagcgagcaacaganagggagtttctcagagtgctgatgtgatct

SEQ ID NO: 285849 - DNA, 277 bp, Glycine max
  unsure (1)..(277): unsure at all n locations
tcgaaacagttaatcgtgtgatcaaacattataacaagttgaaccaacggatgcctctgatatatgtaaaactctatacataccagatctttagggcactctcttatattcatcgttgcattggagtctgccatcgggatatcaacctcaaaatctattagttaatcccacatactcaccaggtcaaaatatgcgactttggaagtgcaaaagtcttggtaaaaggcgaaccanatatatcgtacatatgctctagatattatagagcactgagctt

SEQ ID NO: 285850 - DNA, 279 bp, Glycine max
atctaaacaaaaaatcaagaacaatggcttatgctaggcttgctcctatggctgtcttcttgcttgccacttccaccataatgttcccaacgaagatagaagcagcagattgtaatggtgcatgttcacctttcgagatgccaccggccgctcacgtgattgtcgttgtgtccctataggactagttgctggtttctgcatacatccaactggactttcatctgttgcgcagatgatcgacgaacatcccaattatgtcaatctgatgatgatgcagaa

SEQ ID NO: 285851 - DNA, 278 bp, Glycine max
ctgcttcgaaagcttaataatttgtttatttccagaacatcatagttttcgcagcagcaaactaacaaattactccatatcatataataagatggcccgttctctctcgcaagccaaacgtattggtgtccttgttgctcaatcatctccctaattcccgttcatcggcgaggttacgcagtggccatccgatgtatcggtaagagttggattgggtaatattgggcgaaggaatggaatcgtgggaggtgtagaagagaagcctgatacaagagatg

SEQ ID NO: 285852 - DNA, 276 bp, Glycine max
caaagcgaggccatgccctcatgtgcttggcacgtgtttcactcttcctctgcgctctaaccctatccgctgctcacggaagcaccacggttcaagacatcgcgagaaagttgaaactcggggacaacgagcttctgcgcacgagaagaagttcaaggttttcatggagaattacgggaggagctactccacagaggaggagtatttgcgccgtttggggattttccgcccagaacatggtcagagcggcggacatcaggcgctggaccccaccgc

SEQ ID NO: 285853 - DNA, 271 bp, Glycine max
  unsure (1)..(271): unsure at all n locations
gcataataaccgtcctaagtttattganagaattttgcaagtgtgaganacatggcatctcgtcaaaacancaagcaagagcttgatgaaagagcaaggcaaggagagactgttgtcccgggtggaatggtggcaagagctggaggctcagcaacaccttgctgaaggaaggagcaagggagggcaaacaaggaaggaacagctgggtacagaagggtaccagganatgggacgcaaaggagggttgagcatgtggacaatcaggagaaga

SEQ ID NO: 285854 - DNA, 275 bp, Glycine max
  unsure (1)..(275): unsure at all n locations
cttgaaacagagcagagcgaccttgaagagctatggctgtcggaaagaataagaggatttccaagggaaagaagggtggcaagaagaaagccgctgatccctttgccaagaaagactggtacgatatcaaggccccttccctttccaggtcaagaatattggncaaaaccctcgtctctcgtacccagggaaccaagattgcatccgaagactccaaacattcgggtttttgaggtctcattggctgatctccaaggggatgaagaccatcttca

SEQ ID NO: 285855 - DNA, 276 bp, Glycine max
  unsure (1)..(276): unsure at all n locations
gngcancttcgtgtggggagatcgtgaagaaaaacaatcctttttggtcaagcagttcggaagggggaccagagcgtcgaattcagcagagagagcaacaatctctacaacctcaattcgttcaagtactctggtttgggcaacaagaaaactgttacggtacagcctgagggtaaagatcaggctgtgttgttggctacaccaaagncaaagaagcaaaaacaagcctgctgcttgcttcacaaatctgtgatgaagaaggagttcaggaggatg

SEQ ID NO: 285856 - DNA, 273 bp, Glycine max
  unsure (1)..(273): unsure at all n locations
ggtgcacgtggnttggagggtgaagggtgcagttgctcccatcaaagatcagggaagttgtggaagttgttgggcgttctcaacggtggccacagtggaagcaataaacaagatagtgacagggaagtttgtgtccttactgaacaagaacttgtggactgtgacagagcctacaatcaaggatgcnatggtggccttatggactatgcattcgaattcatcatcaaaatggtggcattgacacagacaaagattcacccataccgtggcttt

SEQ ID NO: 285857 - DNA, 268 bp, Glycine max
  unsure (1)..(268): unsure at all n locations
gagacactcaccttggaggggaggattttgataatagaatggtgaaccactttgtacaagagttcaagaggaagaacaagaaggatattactggaaacccaagagccttgagaaggttaagaacctcttgtgagagagaaagaggacactctcatccactgctcagaccaccattgagattgattctctgtttgagggcattgacttctattcaaccatcatcgtgccaggtttgaggagctcaacatggacctcttcaggaangtat

SEQ ID NO: 285858 - DNA, 271 bp, Glycine max
cgaagaagccctaactacgcacgcactcattcttgagaaagctccaatattcattcgtccatggcactctcttctcgtctcttttccaaatccaaattgatctatggctgtcaaatacttctgcaaaaggagcatgctttccagttcgtcactttgctaaagagtctgcccctcctgcccttaagggagatcagatgctgaagaacatttttgtggaggtgaagaacaaatttgagactgccataggaatattaaagaaggagaagatcac

SEQ ID NO: 285859 - DNA, 267 bp, Glycine max
  unsure (1)..(267): unsure at all n locations
cagaaccagatcgtgttctcttcttccattggcaaacatggcaactccaaatgagcaagaagagaaagtttgtggcggatggagtgttcttcgctgaactgaacgaggttctgacacgtgagttggcggaggacggtactccggcntggaggttagggttacgccgatgcgcaccgagattatcatcagagccaccagaacccaagccgttctcggtgagaagggaaggagattagggaattaccttcatggtgcagaagaggttca

SEQ ID NO: 285860 - DNA, 267 bp, Glycine max
gtcagttgcaggaaaaatggtttcgctgaaactgcagaagcggctcgccgcgagcgtgctcaagtgtggcagaggaaaggtttggcttgaccccaatgaagtcaacgaaatctccatggccaattctcgccaaaacaaaggaagctggttaaggatgggtttatcatcaggaagcccaccaagattcactctcgctcacgtgctcgtcgaatgaaggaagccaagaggaaaggacgtcatctggatacggtaagcgtaaggtacaag

SEQ ID NO: 285861 - DNA, 267 bp, Glycine max
  unsure (1)..(267): unsure at all n locations
gccagcttttccacccagagcagctcatcagcggcaaagaagatgccgccaacaactttgcccgtggtcattataccattgggaaagagatcgttgatctgtgcttggaccgcatcagaaagcttgctgacaactgactggactccaagggttcttagtattcaatgccgttggtggaggaactggttctggacttggttcccttctgttggagcgtctctnccgttgattatggcaaganatccaagcttggtttcatgtctaccc

SEQ ID NO: 285862 - DNA, 267 bp, Glycine max
  unsure (1)..(267): unsure at all n locations
gaaaggggtggtggctgcttcgaaagcttaataatttgtttatttccagaacatcatagttttcgcagcagcaaactaacaaattactcatatcatataataagatggcccgttctctctcgcaagccaaacgtattgtgtcttgttgnncaatctatctcctaattcccgttcatcggcgaggttacgcagtggcatccgatgtatcggtaagagttggattgggtatattgggcgaaggaatggnatcgtgggaggtgtanaaca

SEQ ID NO: 285863 - DNA, 282 bp, Glycine max
  unsure (1)..(282): unsure at all n locations
cgangccctaactacgcacgcattcgtgaganaactcaatattcgtcgctcatgggcactctcttctcgtctcttttccaaatccaaattgatctatggcagtcaaatacttctacaaaggagcatgctattccagttcgtcactttgtaaagagtctgcccctcctgcccttaagggagacgagatgctgaagaacatttttgtggaggtgaagaacaaatttgagaccgccataggaatattaaagaaggagaaaatcaccattgacccagaagatccag

SEQ ID NO: 285864 - DNA, 274 bp, Glycine max
ctacagcatattcacatgagctgccacgatatggtcttgaagtaggacttacaaattatgcagcagcttattgcactggtctcctgttggcccgaagagtcctcaaaacacttgaaatggatgaggagtatgaaggaaatgttgaggctactggagaggcctattcagtggaacctgccgagcgcaggaggccattccgtgcactccttgatgttggtcttgttaggactacaacaggaaatcgcgtctttggtgcccttaagggagctctgga

SEQ ID NO: 285865 - DNA, 264 bp, Glycine max
ataacgaagaaagatggcgaaaatcctatacctgcaaaagtggaagttcctgacaacgagtttgagaagcgcataagaccagaggttatccctgcaaatgagataggggttacatttgcagatattggtgcattggtgagatcaaagaatcacttcaagagctggtaatgcttccccttagaaggccagacctcttcaaaggtgggcttctaaagccatgtagaggtatattgctttttgggcctcctggtactggaaaaacaa

SEQ ID NO: 285866 - DNA, 261 bp, Glycine max
  unsure (1)..(261): unsure at all n locations
cagtgaaatagttgaggaccggttttatatttatctggnatatgttcatcctggttcaattaataaatatgtccgtgaacattgtggtgccataacagaatctgttattcggaatttcactcggcatattctctcgggttggcttatttacatagcaaaaaaccattcatagggacatcaaaggggctaacttgcttgttgactctgctggagttgttaagctagctgattttgggatggctaagcatcttactgggtttg

SEQ ID NO: 285867 - DNA, 273 bp, Glycine max
  unsure (1)..(273): unsure at all n locations
ctctaaaacatggattgangtctctggttcatctgctaaagatgttgccaagcagcttaaggaacaacaaatggtaatgcctggacaccgtgagtcaaacttgcagaaagagctgaaccgatacattcccacggccgcagcattggaggcatctgtatcggtgctctgacagtgttggcagacttcatggcggccatcggttcaggnaccggaatattgcttgcagtaacaatcatctatcagtatttgagactttgagaaggagagagcnag

SEQ ID NO: 285868 - DNA, 265 bp, Glycine max
aagaatcaaagaaaggggtggtggctgcttcgaaagcttaataatttgtttatttccagaacatcatagttttcgcagcagcaaactaacaaattactcatatcatataataagatggcccgttctctctcgcaagcaaacgtattggtgtccttgttgctcaatctatctccctaattcccgttcatcggcgaggttacgcagtggcatccgatgtatcggtaagagttggattgggtaatattgggcgaaggaatggaatcgt

SEQ ID NO: 285869 - DNA, 262 bp, Glycine max
  unsure (1)..(262): unsure at all n locations
gcaaggntaagttcaggtttcctgggggtggtacgcaatttatacatggagcagatacaatacttagaccatatttctgagatggttcctgatattaagtttgggcagaatataagagttgctcttgatgtcgacttggtgtagctagttttggcgcatacttgttatcgcgaaatgtcataaccatgtctgttgctcccaaggatgttcatgagaatcagatccagtttgctcttgagcgtggtgtgccggcaatggtggc

SEQ ID NO: 285870 - DNA, 269 bp, Glycine max
  unsure (1)..(269): unsure at all n locations
cataataaccgtcctaagtttattgagagaattttgcaagtgtgaganacatggcatctcgtcaaaacaacaagcaagagcttgatganagancaaggcaaggngagactgttgtcccgggtggaactggtggcaatagctggaggctcagcaacaccttgctgaaggaaggagcaaggganggcaaacaaggacggaacagctgggtacagaagggtaccaggaaatgggacgcaaaggggggttgagcatgtggacaaatcnggaga

SEQ ID NO: 285871 - DNA, 268 bp, Glycine max
  unsure (1)..(268): unsure at all n locations
ttacgtgttcaaggtggtgctaattggtgattcagccgtggggangtcgcagatacttgcacgcttcgcgaganacgagttcagtttggattcaaaggccacaatcggcgtcgagttccaaacgcgcactttggtcatcagcacaagagcgtaaaggctcagatctgggacactgccggccaagaacgatacagagcagttacnagtgcatacttacaggggtgctgttggggcaatgttggtttatgacataaccaaacgccaaagc

SEQ ID NO: 285872 - DNA, 264 bp, Glycine max
  unsure (1)..(264): unsure at all n locations
cggctcnangatagggctaactacttaatgcccangcnggctaagnttgtggcaatgacttgcacccatgcagctctanagnggaaagatttcctccagttaggtttcaagtatgacaacttgctaatggaaganaggcccaaattttagaaattgagacttcattccaatgttantccagcggcaggaggatggtcatgcacggcttaaacgctgcattctgattggtgaccatcaccagttgcctcctgttgtgaannatat

SEQ ID NO: 285873 - DNA, 263 bp, Glycine max
  unsure (1)..(263): unsure at all n locations
agaaaagaagggggaaagtcgtgaaaaaatggagggaaagaggtatttcgtcgcggttcacgtcggcgccggttaccacttctccgtcgaacgacaaagccctcaggtccgccatgaaccgcgcttgcctcgccgccgcgtccgttctctctaacggttcgggaacgcgcttagacgccgtcgtagccgccatccaagtgctggaggacgatccctgcacaaacgccggcngaggctccaatctgaccgaagacggtggcgtg

SEQ ID NO: 285874 - DNA, 259 bp, Glycine max
cttcttcaggtttcgggttcaggcataatcaatgttctgactcatcatttatataatttgggcccaggtagtgatgagcatcttgaaaggaagattctagatcctgagcgcttgagcagggtggaatcaattttcggcaatctttcagaaaccattaaaatatatggtccttggtcttctgcatgggtaggagaagctggaggggcatacaacagtggtggcaatcatgtttctaacagatttctaaacagcttttggt

SEQ ID NO: 285875 - DNA, 263 bp, Glycine max
  unsure (1)..(263): unsure at all n locations
aattggtggtattggtaccgtgccagtgggacgtgttgagactggtgtcgtnaagcccggtatggtggtgacttttggtcccactgggctgacaactgaggttaagtctgttganatgcaccatgaggctctcanaaggctcttccaggtgacaatgttggcttaatgtgaagnatgttgcagtcaaggatctcaagcgtggttttgttgcatccaactccaaggatgaccctgccaaggnagctgccaattcanatctcaag

SEQ ID NO: 285876 - DNA, 265 bp, Glycine max
  unsure (1)..(265): unsure at all n locations
caaattgcagaaganattagaggattctaaagtgtttgtcgttggatctggtgctttgggatgcgaatttttaaaaaatcttgctctcatgggagtntcttgtggaagtcaggggaagctcactattactgatgatgatgtgatagagaagagtaacttaagcagacagttcctttccgtgattggnatattggacaggccaagttccacagttgctgcttcagctgctgcagctataaatcctagttttaatattgaagcnctc

SEQ ID NO: 285877 - DNA, 264 bp, Glycine max
gggacagccactccattggaagatatattcaagtctcttttctgtttgccatgcctattgtgcttgaggtgcatgagggatacatgtattccagaggagaagatgctgaaagatccaaggagactctatgcacctgatcgcctttatcacattgttgagaggaagccttttagaatgggaaggttccccccagtagtgaggacagcagtgccagtagatggaaggtttgagcatatagtccttcttgtaatgccacatctgatc

SEQ ID NO: 285878 - DNA, 263 bp, Glycine max
  unsure (1)..(263): unsure at all n locations
aaacaaagaaaagaaganaggaaagaattgatcgttgaaaatgcagggnggaaagaaagcgggagagtccattaaggaaacagctacaaacattggtgcttctgccaaggctggcatggagaagaccaaggccacttccaagagaaggcagaaagaatgacagcacgtgatcccggtgcaaaaggagttggcaacccaaaaganagaggcaaagatgaaccaggcggactggacaagcaggcggcgcgtcagcttaacacggc

SEQ ID NO: 285879 - DNA, 257 bp, Glycine max
  unsure (1)..(257): unsure at all n locations
gagaatgggaacttgtgggagggatgttcctctggagactcaattcatgcttattgagagcaaggagagtgaaactgatggggagaattctccaatcatctacactgtcttgcttcctctcctcgaaggtcattccgagctgttcttcaaggcaatgacaagaacgagatagagatttgcctcgagngtggggataatgcagttgagactgaccaaggccttcacatggtttacatgcatgctgggaccaatccctt

SEQ ID NO: 285880 - DNA, 260 bp, Glycine max
  unsure (1)..(260): unsure at all n locations
cnacaagtgttaaaattggtggagattcactgcggaaattcgatggtgctatcactttcacaaggtttgctgagaagcatcgccgactgtcaaatgctttcattaggcagaatccaggtttgttggagaaatcatttccatgatgctcaaggcaccaaggctgatagacttcgataacaagagagcctatttccgctcaagaataaggcaacaacatgaccaacacttgtctgggccattgcgtataagtgtaaggcggg

SEQ ID NO: 285881 - DNA, 257 bp, Glycine max
  unsure (1)..(257): unsure at all n locations
agaatcaaagaaaggggtggtggctgcttcgaaagcttaataatttgtttatttccagaacatcatagttttcgcagcagcaaactaacaaattactcatatcatataataagatggcccgttctctctcgcagccaaacgtattggtgtccttgttgctcaatctatctccctaattcccgttcatcggngaggttacgcatggcatccgatgtatcggtaagagttggattgggtaatattgggcgaangaatgg

SEQ ID NO: 285882 - DNA, 275 bp, Glycine max
  unsure (1)..(275): unsure at all n locations
gactgtatgttgatcagaggtgcttgtatttccagaagtcacttcttgaatctggaactcttggggnnaaatgcaatacccaaatggtcattccccagctaactganaattatggcgcatcaagagatgcagctgagaancaggcaccaatgtgtagtgttcantcattnccagatnacattgncgnggcgccatganatggggtcggtnagagtttgagggtttgcttgtgnaaaatccagctgnagtanctncananttancnaatncaaatg

SEQ ID NO: 285883 - DNA, 264 bp, Glycine max
  unsure (1)..(264): unsure at all n locations
cnttttcatggatgagcctacttctgggttagatgcaagnnctgctgcaattgtnatgagnacagttcaggnacactgtggacactggaaganccgttgtctgcaccatccatcagcctagcattgacatatttgagcatttgatgagctattcctaatgaagcgtggaggacaagaaatatatgttgggccgctgggtcgtcactctagtcattgatcaagtnttttgagagcattgaaggggtgngcaaaatcnaagacgga

SEQ ID NO: 285884 - DNA, 259 bp, Glycine max
cgatttcacagttaaagatgccaggggaaatgatgttaatctcgccgattacaaaggaaaggtccttctccttgtcaatgttgcctcacaatgcggcttgactaattcaaactacacagagcttaatcaattgatgagaaatacaaagggaaaggacttgaaattctggcattcccgtgcaatcagtttggggctcaggagccaggaactaatgaagagattgtggagtttgctgtactcgcttcaaagctgagtttcc

SEQ ID NO: 285885 - DNA, 256 bp, Glycine max
  unsure (1)..(256): unsure at all n locations
anccctactcantctccatacctcaacgaagaggttaaagagacggnaacactttgctgtccgccttgaccgagcagagcttcgncttggccctcgattttgccctnaagtactctcagtcacaanagncacgtcgncgtcgtcgncgtcatcaatggcaccgaagcagaccaaggcngagaagaagatcgcttacgatgcgaagtgtgcgacctaatggnggantacggccagatcctcgttgtgaatccgataa

SEQ ID NO: 285886 - DNA, 219 bp, Glycine max
  unsure (1)..(219): unsure at all n locations
tagtgcctcctcgccagaagttaaaatggcccaagaaactttcctattcacatctgaatcagtgaacgaggggcaccctgacaagtctgtgaccagatctccgatgctgtgctcgatgcatgcttggagcaggaccctgacagcaaggttgcctgtgaaacctggcaccaagaccaacatggtgatggttttcggagagatcacaancaaggccaacgt

SEQ ID NO: 285887 - DNA, 265 bp, Glycine max
  unsure (1)..(265): unsure at all n locations
atggcttcagagaagaaactgtcgaacccaatgagggagatgaaggtgcagaagctcgttctcaatatctctgttggagagagtggagatcgtctcaccagagccgccaaggtgttggaacagcttagtggccaaccccagtgttttccaaagcaaggtacactgttcgttccttgggattngnnganatgagaagattgcatgccatgtcactgtcagaggtgacaaggcgangcnacttttagagagtggnttgcangntgca

SEQ ID NO: 285888 - DNA, 265 bp, Glycine max
  unsure (1)..(265): unsure at all n locations
cnataatgtctggttcggaggacgagggaggagaagagtacctcttcaagatcgtcataatcggagactccgcggtggggaaatcgaacctgctgtcccgctacgcccggaacgagttcaacatgcactccaaggcaccataggcgtcgagttccagactcagtgcttggaaatcgactccaaggaagtcaaggctcagatttgggacaccgccggccaagagcgattccgcgccgtcactccgcctacttaccgcngcgctgtc

SEQ ID NO: 285889 - DNA, 262 bp, Glycine max
  unsure (1)..(262): unsure at all n locations
aggcggcacacctttcaggagcagtcatggttctcaaaaccgagctgtgccgatttcagcggtgccaagatctacccagggaaaggcatcagatttgttcgtggtgattctcaggttttcctgtttnctaactcaaatgtaagaggtatttccacaacnggttgaagccgtcaaagctcacgtggactgcaatgtaccgaaagcagcatnagaaggatattgctcaagaagctgtgaagcagagaagacgtgctaccanana

SEQ ID NO: 285890 - DNA, 175 bp, Glycine max
  unsure (1)..(175): unsure at all n locations
gtactgttagatgtcgttgtganaacactgcaacgttgggtganagacaaaatgttaaccntcctggtntngtggtggntctncccacacntnctganaaggntanggnagacattcttggatngggtgtaccancaanattgacatnattgcnctttcntttgttcgnaaaggc

SEQ ID NO: 285891 - DNA, 258 bp, Glycine max
  unsure (1)..(258): unsure at all n locations
gcaaagatgagccaggcagagctggacaagcaggcggcgcgtcagcataacacggcggcgaagaggctgccacggcagggcacatgggacaacccatggggacccatcagacgtcagctatgccccggtcatgaaccggacagcccacgggccatgtcaccgagggagtggtgggctcacaccctattggaaccaacagangcccgggtgggactgctacggcccataatacccgtgcggggggaaacccaaatgatt

SEQ ID NO: 285892 - DNA, 255 bp, Glycine max
  unsure (1)..(255): unsure at all n locations
gcattttcaatggctgttaggttcttgacaggtccagctgtgattgctgcaacctcaataggcatcggactccgtggagttcttttgcatgttgcaattgtccangctgctcttccccaaggtatcgttcctttgtgtttgccaaagaatacaatctccatgcagatatacttagcactgcggttatatttgggatgctaattgcattgcccataaccatactctactacgtgctgcttggagtttaattgtctt

SEQ ID NO: 285893 - DNA, 259 bp, Glycine max
aagaatcaaagaaaggggtggtggctgcttcgaaagcttaataatttgtttatttccagaacatcatagttttcgcagcagcaaactaacaaattactcatatcatataataagatggcccgttctctctccaagccaaacgtattggtgtccttgttgctcaatctatctcccctaattcccgttcatcggcgaggttacgcagtggcatccgatgtatcggtaagagttggattgggtaatattgggcgaaggaatg

SEQ ID NO: 285894 - DNA, 255 bp, Glycine max
  unsure (1)..(255): unsure at all n locations
ccatccctacagtcatgaaangcctcttctaggccaccttaagttctttccttgggttgtaaatgaaggatattttaaggcatggngacaaggaagaactgggtacccttggtggatnctgggatgaggganttgtgggccactggttggctgcatgatcgaatacgtgttgtagtttctagtttcttntgaaggttctgcagtnccttggagatggggaatgaagtattctgggatacccttttagatgccgtc

SEQ ID NO: 285895 - DNA, 277 bp, Glycine max
  unsure (1)..(277): unsure at all n locations
acgggaaagaagataggagagctagactgcaggctcagtttgctcaaatgcgacctgttggaatgccaccatctgtcggtncctcgtgtgccaatgtatcccccaggtggtccaggtattggtcaacaaatattttatgcccaaggccctcctgctatcattccttcccancctggatttgggtatcaacaacaacttgttcctggtatgaggccaggtgcagctcccgtgccaaatttctttgtgcccatggttcagcagggacaacagggacgcc

SEQ ID NO: 285896 - DNA, 256 bp, Glycine max
  unsure (1)..(256): unsure at all n locations
gtcaagtcattacgtaaaatgaatcacccaaatattgtgaagctgaaggaagttattcgagaaagtgatattttgtactttgtttttgagtacatggaatgcaacctataccaacttatgaaagacagggaanaactgttttctgaggtgagttagaattggtgttttcagttttccaggcctgcttacatgcaccagcgtggatacttcctcgcgactgagctgannntgnggnacaggntcntcanntcgcgac

SEQ ID NO: 285897 - DNA, 276 bp, Glycine max
  unsure (1)..(276): unsure at all n locations
gaatcaaaganaggggtggtggctgcttcgaaagcttaataatttgtttatttccagaacatcatagttttcgcagcagcaaactaacaaattactcatatcatataataagatggcccgttctctctcgcaagccaaacgtattggtgtccttgttgctcaatctatnctccctaattcccgttcatcggcgaggttacgcagtggcatccgatgtatcggtaagagttggattgggtaatattgggcgangaatggaatcgtgggaggtgtaga

SEQ ID NO: 285898 - DNA, 276 bp, Glycine max
  unsure (1)..(276): unsure at all n locations
gtcacaagcagtgatgtgagtgatgagagtacttgtagtagctttagtggcaccataaacaaacctcacaagggcaaatgacttgagatgggaagctatccaagcagttcgaagtagagatggggtgttgggtttaggtcactttagattactgaagaggcgggttgtggggatattggcagtgtttacctctccganttgagtggnactaaatgttactttgcntgcaggtatggnacaaagggtctctagcaagtcgtaaaangctaactcgtg

SEQ ID NO: 285899 - DNA, 278 bp, Glycine max
  unsure (1)..(278): unsure at all n locations
gnggatttggggattgggaaggcgagggattgcgctgcgtctcttcctcttctctttcgattcatccctcattcataatcttccaatccaacaacctcagcctcacactcacacatacacacatctgnccgcgtatcgtccctcccatggcttcaaagcgcatcctcaaggagctcaaggacttgcagaaagacccaccaacttcttgcagcgctggtccagtagctgaggacatgttccattggcaagcaacgattatgggtcctgctgatagtcct

SEQ ID NO: 285900 - DNA, 271 bp, Glycine max
  unsure (1)..(271): unsure at all n locations
ataagggaattacctctgtngttcagaagaggttcaantttcccgagaacagtgttgaactttatnctgaaaaggttcaacaataggggtcttgcnctattgctcaggctgantctcttcnctacaagctccttggtggactcgctgtgcgcagggcctgctatngtgttttgaggtttgttatggagagtggtgctaagggatgcgaggtcattgtgagtggaaattganagcccanagagccaatctatgaantttaaggatgggtact

SEQ ID NO: 285901 - DNA, 277 bp, Glycine max
  unsure (1)..(277): unsure at all n locations
gtatcgaccatattctattttttggtggaccgcattcaccttcttctccttctaacccaacctgtttctccgacaatcacattcaacgcttctgtcatggnagaagttaatgtcgtggaaactaaggatggaactgtctcagtagctgctgcgtttgctggtcacccggaagccgtgcaggatagagaccacaaatttttaagcaaagctgttgaagaagcatatnaaggggtagattgtaaagatggaggnccctttggtgccgttatagttcata

SEQ ID NO: 285902 - DNA, 277 bp, Glycine max
  unsure (1)..(277): unsure at all n locations
cgaagaagagcgataatacgaggtactacgaaatcctcggcgtctcgaagaacgcttcgcaggatnatctgaagaacggcttacaagaacgccgccatcaagaatcaccctgacaagggcggtgatcccganaagtttaaagagctggcacaagcatatgaggttcgantgaccctgagaagcgtgagatatatgatncagtatggtgaagatgcgcttaaggtnaggatgggtggtggcggtggccngatccgtttaactctttccaacttcttgg

SEQ ID NO: 285903 - DNA, 281 bp, Glycine max
  unsure (1)..(281): unsure at all n locations
gtgagctgcattctgcttccgattctcaaactcaaaggagacgagacatggcttatgctgcaatgaaacccactaagcccggcttggaggagtcacaggagcaaatccataagattagaatcacccttcctctaagaacgtcaagaatctcgagaaggtttgtgctgacctggttcgtggtgccaaggacaagcatctncagggtgaagggacctgttaggatgcccaataaaagttcttaaatcaccaccagaaantcccccgtggtgaaggcnccaacc

SEQ ID NO: 285904 - DNA, 275 bp, Glycine max
  unsure (1)..(275): unsure at all n locations
gggaaaatggtgtgcataaggaaggngacggtgaaggaccttctggcgatgcaggcgtgcaacctgttctgcctccctgagaactaccagatgaagtactactctatnanatcctctcctggccccagntcctctangtcgcagaagataacaacggccgcatcgtcggctacgtcctcgccaagatggaggaagaaaccaccgantgccanggccactcacctccttcgncgtccctcagcaaccaacgcaagntcggcntcgccacnaagntc

SEQ ID NO: 285905 - DNA, 277 bp, Glycine max
  unsure (1)..(277): unsure at all n locations
gtagcattcactgnaagcactcagtagggtttgcggtttcagagtttgtgacgcacgcattccatggtccaccaccaccaangccgccgcagccccgccgcgccagtctncccaganggaagccgaactccagatgatgttagncgccgagtccactcggcaccaaaaactgcgattccaaatggaacgttacatcttcaagcgccgcaacgacgggatttacattattaacttgggaagactgggagaagcttcagttagcngctagggttattgt

SEQ ID NO: 285906 - DNA, 279 bp, Glycine max
  unsure (1)..(279): unsure at all n locations
aacctaagcttagaattagaaacaaaganaagaagaaagganagaattgatcgttgaaaatgcagggangaaagaaagcgggagagtccattaaggaaacagctacaaacattggtgcttctgcccaaggctggcatggagaagaccaaggccactgtccaagagaaggcagaaagaatgacagcacgtgatccggtgcaaaaggagttggcaacccaaaagaaagaggcaaagttgaaccggcggngtggacaagcaggcggcgcgtcacataaacac

SEQ ID NO: 285907 - DNA, 275 bp, Glycine max
  unsure (1)..(275): unsure at all n locations
ggcactaacactgcagcactcagcactgctctattcaacaatggcatgagttgcgggtcttgctatgagatgaaatgtgacactgaccccaaatggtgcctccccggtagcataatcgttactgccacaaacttctggcccccctaactttgcattgggctaacaaccaatggtggccggtgcaaccctcctttgcaacactttgatcttgctgagcctgcttcttgcaaatgctcaatacaaagctggaattgttccantttccttcanaagag

SEQ ID NO: 285908 - DNA, 278 bp, Glycine max
  unsure (1)..(278): unsure at all n locations
cnagtttacctgggtggttatgacaaggaagataaggcagccagggcttacgatctcgcagctctcaagtactggggtccaactaccaccaccaactttcccatttccaactatgagaaggaactggaggagatgaagaacatgaccaggcaagagtttgttgcttctctacgaaggaagagcagtggtttctctaggggggcctctatatacagaggagtgacgagacaccaccagcatggccgatggcaggcgagaataggcagagttgccggana

SEQ ID NO: 285909 - DNA, 273 bp, Glycine max
  unsure (1)..(273): unsure at all n locations
ggaaatctggtggaggnncgcagcgatactgacgtgcaaatcgttcgtctgacttgggtataggggcgaaagactaatcgnatngtctagtagctggttccctctgaagtttccctcaggntanctgnancncnnngncganttctatngggtaaagccaatgattnnaaggcatcgggggcgcaangncctcgacctattctcaaactttnaataggtnggncggtgtgnntnctctgttganccgcnccatgncatcgagagctccantgg

SEQ ID NO: 285910 - DNA, 272 bp, Glycine max
  unsure (1)..(272): unsure at all n locations
ttgtcaacccgtagtgggggtgttggtatcaatctagttggagctgacacagttattttttatgatagtgactggaatcctgctatggatcaacaggctcaagatcggtgccacagaattggtcagacacgtgaagttcatatctatagattgattagtgaaagcaccattgaggagaatattttgaagaaagcaaatcagaagcgtgcacttgataatnctagttatacaaagtgggggttataataccgagttctcaagaagctcgatnc

SEQ ID NO: 285911 - DNA, 272 bp, Glycine max
  unsure (1)..(272): unsure at all n locations
tgagggagtactcacatactgctgtaaataagtttaatgttattcctgattcaatcccagattgggtatttgactttatgccaatgcgcgggggctacttcattggaaatgttagtccagcncggatggattttcgatggtttgctttaggaaattgtgttgccattctatcttctctggcaactcccgagcaatcaatggctatcatggnatcttattgaatctcgctgggatgaattagttggagaaatgcccctaaaaatatccnaatc

SEQ ID NO: 285912 - DNA, 261 bp, Glycine max
  unsure (1)..(261): unsure at all n locations
tgatgcagatcttcgtcaagaccctcaccggcaagaccatcacccttgaggtggaaagctctgacaccatcgacaacgttcaaggccaagatccaggacaaggaaggaatccccccggaccagcaangtctcttttcgcngganagcagcttgtggaggcgtaccttgctgactacaacttcanaaggagngtatttcactcgtcttcgtctngtggnggcntaaggancttcgnnaaaacccnngcgacagacannncnt

SEQ ID NO: 285913 - DNA, 264 bp, Glycine max
  unsure (1)..(264): unsure at all n locations
gtctctctctctctagacttagattttgtgaatggctgaagtggaagagggacaggtcatcggcgtccacaccgttgatgagtggaagctgcaactccagaatgcaaaagactccaaaaaactgattgtggtggattttactgcttccggtgtggtccatgccgttttatggccccagttcttgcagagattgcaaagaaaactctgaatgatcttccncaaaatggagtggatgaagtgangcctgttgcngaggaacttccc

SEQ ID NO: 285914 - DNA, 274 bp, Glycine max
  unsure (1)..(274): unsure at all n locations
taacgaaaacgacgatgtttggctcctcactgtaggttccaaggtccgcgctagggtttcctccgaaatgcaattgaagatgttcggcgaccagcnccgcgtcgatttcgtcgccgacgggtctgggccctcaagttcccctccgatgacacctaccgccgattcgtcacggaatttcngagctgcatgttcgagaacgtgtacggaatcgagtgcacggaagaaaacaaggtcaaaatctacggtaaagagttcatcggctgggtgaagccgg

SEQ ID NO: 285915 - DNA, 275 bp, Glycine max
  unsure (1)..(275): unsure at all n locations
tcgaagccagatttcaagatgaagttcaacattgcgaatcccaccactggttgtncagaagaagctggagatcgatgatgacctgaagctacgagcattttgggacaagaggatctcacaagaggttgttggtgatgctcgggtgaggaattcaaaggctatgtcttcaaaattactggaggttgcgacaagcnaggatttccaatgaagcaaggagtgttgacccctggtcgtgttcgcctctgctgcatagaggaactcctgtttccgtggtt

SEQ ID NO: 285916 - DNA, 282 bp, Glycine max
  unsure (1)..(282): unsure at all n locations
cggcaagtgacgagcttggtcgtgtgctggggcacggaacgttcgccaaggtgtaccacgcncggaacctgaatacagggcagcacgtggccatgaaggtggtggganaagnaaaggtgatanangtcggaatgatggagcaggtgaagagggagatctcggtgatgaagatggtgnngcaccaaaacatcgtcgaactccacnagtcatggccagcnattccaagatctatattgccntggaactcgtccgcggcggagagctcttcaacaaggtctctnc

SEQ ID NO: 285917 - DNA, 281 bp, Glycine max
  unsure (1)..(281): unsure at all n locations
cnaggttgagaaggttgtggtctctgaccgcgttgtagattcaccatgctgtcttgtgactggcgaatacggttggaccgcaaacatggaaaggataatgaaggcccaagctctaagggacaacagctggcagggtacatgtcaagcaagaagaccatggagatcaaccctgagaacccaatcatggaggagctcaggnagcgtgctgatgcagacaagantgacaaatcgtgaaggncntgttctgttgctgtttgagactgtcttctcattctggtttc

SEQ ID NO: 285918 - DNA, 251 bp, Glycine max
  unsure (1)..(251): unsure at all n locations
ggatcagatagaggaattgagtgcagaatggctgccttttatgcaggtttcccaganacagtgcctcttcgaactgtcaataggcaatgttcatctggacttcaggcggtttctgacgtagctgcttatataanagctgggttctatgaaattgggattggggctggattggagtctatgacagtagatcgtgtgaataggcttcgcaacattaacccaaaggtagaaacctttgcagaagcccgggattg

SEQ ID NO: 285919 - DNA, 248 bp, Glycine max
  unsure (1)..(248): unsure at all n locations
cactctccaaaccctagcggcactacacactagttctatcgctatctccccaagatgtncgagcgccgatcccgagcacagagaagaggaggaggcacccgccgttggcgacgacgaggacaccggagctcacgtcgctccaatcgtcaagctcgaggaggttgctgtcaccaccggcgangaggacgaagatgcaatcctggatctcaatcgaagctttaccggttcgacaaggacgggaaccagtg

SEQ ID NO: 285920 - DNA, 247 bp, Glycine max
  unsure (1)..(247): unsure at all n locations
ccgagatgaacaagnggtcattcaagtatgcctgggtgctcgacangctcnaagctgagcgtgaaagaggnattaccattgatattnctttgtggaantntganaccancangtactactgcacggtcattgatgctcccnggacatcgtgacnttatcaagaacntgattactggtncctcccaggccgactgtgctgtccttattattgantccnccactggtggttttnnaagctggtatttcc

SEQ ID NO: 285921 - DNA, 252 bp, Glycine max
  unsure (1)..(252): unsure at all n locations
cagcaaatggnactggtcataaccatacgggagcttctatcagtagcagtgcaccggctgctaaggcgcaagttgttggttggcctcctataagatcatttaggaaaaactcattggccaccacttcaaagaacaatgatgangtagatggaaaaccaggtgcagctgcnatctttgtgaaggtcagcatggatggggctccctatctgaggaaggtagatctaacaaattcatacaacgtaccggggaact

SEQ ID NO: 285922 - DNA, 146 bp, Glycine max
  unsure (1)..(146): unsure at all n locations
ctcgggctcttgcatcgatgaagancgtaggcgaaatgcgatacttngtgtgaattgcagaatcccgtgaancatacgagtctttgaacgcaagttgcgcccgaagccattaggccgagggcacgcctgcctgggtgtnacacaac

SEQ ID NO: 285923 - DNA, 226 bp, Glycine max
  unsure (1)..(226): unsure at all n locations
ggtttttggaaagcaactggaagagacaagtccatataccanactaattccaagaggattggcatggggaaaccctagtttccccacactggtcgtgctcctcatggccagaagactgattggatcatgcatgagtatcgccttgatgaagatgatgctgatgttcaagaagatgggtgggtggtatgcagggtcttcaaaaagaaaaacctcagccgaggtttcc

SEQ ID NO: 285924 - DNA, 249 bp, Glycine max
  unsure (1)..(249): unsure at all n locations
gagagagggagattctttgtttgctaccttctctcggaaaaatggttacgttcaggtttcaccagtaccaggtggttgggagggctcttcccacggaagcagatcagcaccccaagatctaccgaatgaagctctgggccaccaacgaggttcgcgccaagtccaagttctggtattttctgaggaaactgaaaaaggtgaagaagagcaatggccaagtgcttgccatncaacgagntttttgagaac

SEQ ID NO: 285925 - DNA, 242 bp, Glycine max
  unsure (1)..(242): unsure at all n locations
tatggaagtgccttcctcgtagaattgaatctcaaatcatccaggttccccaacagaagaatgaatatgactgtggtctttttgtattgtacttcattgaacgtttcatggaggaggcacctgaaagactgaaaaggaaagatttagatatgtttggaaggcgatggttcaaacctcaagaggcgtccaatttgagagtgaaaatcctaaattgcttttagaaaaattncagaattcataag

SEQ ID NO: 285926 - DNA, 248 bp, Glycine max
  unsure (1)..(248): unsure at all n locations
ataataagatggcccgttctctctcgcaagccaaacgtattatatgatatgngtnatttgttagtttgctgctgcgaaaactatgatgttctggaaataaacaaattattaagctttcgaagcagcaaactaacaaattactcatatcatataataagatggcccgttctctctcgcaagccaaacgtattggtgtccttgttgctcaatnctatctccctaattcccgttcatcggcgaggttacgc

SEQ ID NO: 285927 - DNA, 249 bp, Glycine max
  unsure (1)..(249): unsure at all n locations
gaacgcggtaaccctagaatcccaaatccccaatcaatcgaccaagagcaggagctttcggtggcgatcttcatccgcctcggtgaaaaanatgtctctggtggcgaacgaggatttccagcacattctgcgtgtgctgaacaccaacgtagatgggaagcagaagataatgttcgctctcacctctatcaaaggtattggcaggcgattcgctaacatttgctgcaaaanagctgatgtcgacatgaa

SEQ ID NO: 285928 - DNA, 251 bp, Glycine max
  unsure (1)..(251): unsure at all n locations
gaggagtcttcatatccctacactggggagagaggtgaatgcaagtttgatccagagaaaatagcagttaagatcacaaatttcaccaatatccctgctgatgagaactaaatatcccngcaatttggttctcatcagcagggatattggtgagaaccaaattgccgcatatntagtaaaanatggtccacttgctatgggcgtgaatgcattttcatgcaaacatacattggtggtgtctcatgccctct

SEQ ID NO: 285929 - DNA, 252 bp, Glycine max
  unsure (1)..(252): unsure at all n locations
cttctcatcatctctacccaaccttacacagaggatgaaattcgcaagattctggatatcagatgccaagaggnagacgtagacatgagtgaaggtgcaaagtgtttgttaaccaaaataggtgtagaaacatctttgagatatgctattcatctaatcacagcagctgcattggcatgccaaaagcgaaaggggaagacagtggagttggatgacggcaatcgggtttacaatctgtttttggatgtcaaa

SEQ ID NO: 285930 - DNA, 256 bp, Glycine max
  unsure (1)..(256): unsure at all n locations
caaaattcaacaatgtttttntgaagaatctatcagantcaaccaccgatgatgagttgaagaacacttttggtgaatttggaactattactagtgctgtagtaatgagggatggggatgggaaatcaaagtgttttggatttgtganttttgagaatgctgatgatgctgctagggcctgttgaggctctcatggcaaaanttttgatgacnaagaatggtatgttggnaaagctcagaagaatctganagggng

SEQ ID NO: 285931 - DNA, 251 bp, Glycine max
gccatgcgtaccagttgctgataaaaggtggactaaaagaagagaacatagtggtgtttatgtacgatgacatagctaccaacgagttgaatcctagacatggagtcatcatcaaccaccctgagggagaagatctgtatgctggtgttcctaaggattacaccggtgataatgtgacgacggagaacctctttgctgttattcttggagacaagagtaaattgaagggaggaagtggcaaagtgatcacc

SEQ ID NO: 285932 - DNA, 250 bp, Glycine max
  unsure (1)..(250): unsure at all n locations
ctcatctttcttctcactaactattaattcatcatgtcgagcacagctggccaagtcatcaaatgcaaagctgcggtttccntgggaggcagggaagccacttgtgattgaagaagtagaggttgcgccaccacaagctggtgaagtgcgtttgaagatcctctacaacctnctacttgccagactgatgtttacttctgggaagcnaagggccanactccatngtttccncgtatatntggtcatgaag

SEQ ID NO: 285933 - DNA, 247 bp, Glycine max
caggcagagaagagccatggtgcacgtttctttctaccgaaactatgggaaaacgttcaagaagcctccgtacgtccctacgagaaggagcgtttggacgccgagttgaagctggtcggtgagtacgggcttcgctgcaagagggagttatggagggtccagtacgccctgagccgcatccgtaacaacgccagaaacctattgacccttgatgagaagaaccctcgccgtatcttcgagggtgaag

SEQ ID NO: 285934 - DNA, 252 bp, Glycine max
gggagtcagagaaaccctaggtaagaagaaaagatgccggctggtcatggtttgagatcccgcaccagagattccttctctcgtcctttcaggaagaagggaaccatcgccctcaccacatacctgagaacctaccacgtcggcgactatgttgacgtcaaggttaacggtgccgttcacaagggaatgccccacaaattctaccatggccgcaccggacgcgtctggaatgtcaccaaacgtgctgttggc

SEQ ID NO: 285935 - DNA, 249 bp, Glycine max
  unsure (1)..(249): unsure at all n locations
cttctttttactctctctctgtctctctctacgctttctcgttcnagatccctcaagggatccactaactgaaggagaaatggggttgacattcaccaagcttttcagccggcttttcgccaagaaggaaatgcgaattctgatggtgggtctcgatgcagctggtaagaccaccatcctgtacaagctcaaacttggagagatcgttaccacaattcccaccattgggttcaatgtggagactgtgga

SEQ ID NO: 285936 - DNA, 246 bp, Glycine max
  unsure (1)..(246): unsure at all n locations
gagggagtcagaganaccctaggtaagaagaaaagatgccggctggtcatggtttgagatcccgcaccagagattccttctctcgtcctttcaggaagaagggaaccatcgccctcaccacatacctgagaacctaccacgtcggcgactatgttgacgtcaaggttaacggtgccgttcacaagggaatgccccacaaattctaccatggccgcaccggacgcgtctggaatgtcaccaaacgtg

SEQ ID NO: 285937 - DNA, 242 bp, Glycine max
  unsure (1)..(242): unsure at all n locations
ctcgaaattggggttctaattggcaatccaatgcgtatttgaatggtcaatctttgtccttcagggtcaccaccactgacggagaaaccagagttttccaagatattgttccagcaagttggacattcggccaaactttctctagcccagttcagttctaagctcacaaataaaccaacggctgaggcgtgcttttcnattttacnggagcagcccgccaaaccctctcnggttttgattat

SEQ ID NO: 285938 - DNA, 243 bp, Glycine max
  unsure (1)..(243): unsure at all n locations
gtacaatgatcctgtggatggttccatctcatcacatcagggaatccgatatttgtttgaggatggatcacgattgattttccgcctatctggaactggatcagaaggtgcaacaattcgattatacattgagcaatatgagaaggatccatcaaagattgggagactttcaaacgaagcacttgctcctcttgtggaagttgcgttgaaactttcgaagatggaaganttcactggtcgatc

SEQ ID NO: 285939 - DNA, 246 bp, Glycine max
  unsure (1)..(246): unsure at all n locations
ggatgcattgcgtgtatgtgtcacaacactgatggactttatagtgcnaagcagactgctattgtgagagcttctgatgattttnaccctcgtgatcctgcttcccataccatccatatttcttctgttgcatacaactcactattccttggagaattcatgcaacctgactgggacatgtttcatagtttacacccagcagcagattatcatgctgcagctcgtgcaattggtggatgtcctatt

SEQ ID NO: 285940 - DNA, 244 bp, Glycine max
  unsure (1)..(244): unsure at all n locations
cattcactgaaagcactcagtagggtttgcggtttcagagtttgtgacgcacgcatccatggnnnnnnnnnnnnnnnnnnnnnnagccccgccgcgccagtctcccagaaggaagccgacatccagatgatgttagccgccgacgtccacctcggcaccaaaaactgcgacttccaaatggaacgttacatcttcaagcgccgcaacgacgggatttacattattaaccttgggaagacatggg

SEQ ID NO: 285941 - DNA, 248 bp, Glycine max
  unsure (1)..(248): unsure at all n locations
gcaaagcgaggccatgccctcatgtgcttggcacgtgtttcactcttcctctgcgctctaaccctatccgctgctcacggnagcaccacggttcaagacatcgcgaganagttgaaactcggggacaacgagcttctgcgcacggagaagaagttcaaggttttcatggagaattacgggaggngctactccacagaggaggagtatttgcgccgtttggggattttcgcccagaacatggtcagagc

SEQ ID NO: 285942 - DNA, 250 bp, Glycine max
  unsure (1)..(250): unsure at all n locations
attcactgaaagcactcagtagggtttgcggtttcagagtttgtgacgcacgcatccatggnnnnnnnnnnnnnnnnnnnnnnagccccgccgcgccagtctcccagaaggaagccgacatccagatgatgttagccgccgacgtccacctcggcaccaaaaactgcgacttccanatggaacgttacatcttcaagcgccgcaacgacgggatttacattattaaccttgggaagacatgggagaagct

SEQ ID NO: 285943 - DNA, 252 bp, Glycine max
ctctaattacactttctatctcatttccaatctcattttcgttcggttcaaacactctcatggcatcagacaagaagattaggatcggcatcaacggatttggaaggattggccgtttggtggccagggttgctcttcagaggaatgacgttgaacttgttgctgtcaacgatcctttcatcaccactgattacatgacatacatgttcaagtacgacaccgttcatgggccagtggaagcattttgatgtg

SEQ ID NO: 285944 - DNA, 246 bp, Glycine max
  unsure (1)..(246): unsure at all n locations
cgtcacgcagttctccgatctcaccgaggacgagtttgagaagctctacactggcgtcaatggcggcttcccgtcatcgaataatgccgccggcggtattgcgccgccgttggaggtggacgggctgccggagaattttgattggagagagaaaggagctgtcaccgaagttaagttacagggtagatgtggatcatgctgggctttcagcaccacaggatctatagnaggagccaattttcttgc

SEQ ID NO: 285945 - DNA, 244 bp, Glycine max
  unsure (1)..(244): unsure at all n locations
caactggtgaaggccaattaatgagctgggaagagcacataatgcttattgctcacacagtcaactgttttggtgggaaaattaaggttattggaaatactggaagcaactccaccagggaagcaattcatgccaccgagcaaggttttgctgttggaatgcatgctgcccttcacataaacccttactatggcaaaacctccttggatggtatgcttgctcactttcaaagtgtgttnccatg

SEQ ID NO: 285946 - DNA, 247 bp, Glycine max
  unsure (1)..(247): unsure at all n locations
cagaacatggtcagagcggcggancattcaggcgctggaccccaccgccgtccacggcgtncacgcagttnctccgatctcaccgaggacgagtttgagaagctctacactggacgtcaatggcggcttcccgtcatcgaataatgccgccggcggtattgcgccgccgttggaggtggacgggctgccggagaattttgattggagagagaaaggagctgtcaccgaagttaagttacagggtaga

SEQ ID NO: 285947 - DNA, 245 bp, Glycine max
  unsure (1)..(245): unsure at all n locations
aacttcactcctctcaataacaggcccatccgtattatgtattcgcatcgtgatcccagtatccgtaaaagtggacaaggaaatatatttattaagaatttggataggncaattnaccacaaggcattgcatgataccttttctacatttggaaatatcctttcgtgcaaggtagctacggattcatctgggcaatcaaaaggctatgggctttgtncaatttgataatgaggaatctgcccaac

SEQ ID NO: 285948 - DNA, 248 bp, Glycine max
gtgaaagctaagattcaagacaaggaagggatcccacctgaccagcagagacttatctttgcgggtaaacagcttgaggatggtcgaacccttgccgactacaacatccaaaaggaatccactctccacctcgtgcttcgcctcaggggtggcatgcaaatctttgtcaagactttgactggcaagaccatcaccctcgaggtcgaatcctcggacaccattgataatgtcaaggccaagatccagga

SEQ ID NO: 285949 - DNA, 277 bp, Glycine max
gcatcttgaaggagctcaagggatttgcagaaggatcctcctacctcatgcagtgcaggccctgtggctgaggacatgtttcactggcaagccacaatcatgggacctgctgatagcccatatgcaggtggtgttttcctagtttcaattcattttcctcctgactatcccttcaagccaccaaaggttgcttttcggactaaggtgttccacccaaacatcaacagcaatggcagtatatgtcttgacattctcaaggagcaatggagcccagccc

SEQ ID NO: 285950 - DNA, 276 bp, Glycine max
  unsure (1)..(276): unsure at all n locations
gcaagctacaattatgggtcctccagacagtccctatgctggaggtgttttcctagtgactattcattncccctccagattatccctttaagccacccaaggttgcattcaggacgaaggtgttccacccaaatataaatagcaatggaagcatttgccttgatatattgaaggagcagtggagccctgctctaaccatttccaaggtgttgctctcaatttgttccctgttgacggacccaaatcctgatgatcctttggtccccgaaattgcac

SEQ ID NO: 285951 - DNA, 277 bp, Glycine max
  unsure (1)..(277): unsure at all n locations
ctcgctcttctccgccacttctnaatctattgaatcaacaatcatgtcggacgaagagcaccatttcgagtccaaggccgacgccggagcctccaaaacctaccctcagcaagccggtaccatccgcaagaacggctacatcgtcatcaaaggccgcccctgcaaggttgtggaagtttcgacttccaaaactggaaagcacggtcacgctaagtgtcactttgttggaattgatattttcactgccaagaaacttgaggatattgtgccctcttct

SEQ ID NO: 285952 - DNA, 278 bp, Glycine max
  unsure (1)..(278): unsure at all n locations
cagagcgcaggcaaacaacttcttctctcagacatggcatctcaaggtttgtntccttcgataanaaatattcttcttttggactctgaagggaagcntgtggcagtcaagtattactcagatgactggccaacaaacaatgcaaagttagcttttgagaagtttgtatttaccaagactgttaagacaaatgctcgtacagaagctgaggtaacactacttgagaacaatatcattatttacaaatttgtacaagacctgcatttttttgtcactgg

SEQ ID NO: 285953 - DNA, 278 bp, Glycine max
  unsure (1)..(278): unsure at all n locations
ccgcacttctgctccgcaattatcatgggcaaggtcaagatcggaatcaacggatttngaagaattggccgtttggtagccagagtggctctgcagagagacgatgttgaactcgttgccgttaacgaccctttcatcaccaccgattacatgacatacatgtttaaatacgacagtgttcatggacactggaagcatcacgatgtcaccgttaaggacgagaagacccttctcttcggtgacaagccagttcactatttttggacacagaaaccctg

SEQ ID NO: 285954 - DNA, 274 bp, Glycine max
  unsure (1)..(274): unsure at all n locations
gatggagcttcctgagtggactgatattgtaaaaacagcaaaatttaaggaattggctccatatgatcctgactggtattatgttagggctgcctcaatggcaagaaagatttatttgagaggcggtcttggtgttggggctttccagaggatctatggtggaagcaagagaaatggaagccgtcccccacatttctgcaagagcagtggggctattncaagacacattctgcaacaattgcaaaacatgagcattgttgagattgatacaaaa

SEQ ID NO: 285955 - DNA, 272 bp, Glycine max
gcaagaacggcttcaggctcttgcgatcaacaaacgcagcgttttgatctcagatttgagggggagagaatggcaacaacagtgagaagtctgaagataaagacaagtacgtgcaaacgtatagtgaaggagctgcattcttatgagaaggaagttgagagagaagctgccaaaacagctgatatgaaggaaaaaggagccgatccctatgatctcaagcaacaggaaaatgtcttggctgagtctaggatgatgattcctgactgccgcaa

SEQ ID NO: 285956 - DNA, 278 bp, Glycine max
  unsure (1)..(278): unsure at all n locations
tctctccccgngctcnnnatcttaaacgtctttcgctgttgcaagatnngtgtngctnagancattcccgatatggagganggtaccttggagattggnatggnatacaganctgtntctggagttgctggaccattggtcattcttgacaaagttaagggacccaaatttcaagagattgtnaatattcgtttaggagatgganctactncggcgtggacaagttctagaggttggatggtgaaaaactgttgttcaggnatttganggtacatccg

SEQ ID NO: 285957 - DNA, 116 bp, Glycine max
  unsure (1)..(116): unsure at all n locations
ttctacacttttntntttggnttgatcgagtgtactttttcttttcgagattggcttggtgtgcagtggaaagagggtggaaaagagtggtaagggggagggcggcgccccttgct

SEQ ID NO: 285958 - DNA, 270 bp, Glycine max
  unsure (1)..(270): unsure at all n locations
gttagatctgtacccgcctagccattgatttggaaaagtccaagcttcaaagatgagtaagcttcagagtgatgctcttagagaagctatctcaggaatcatgactgattccaaggaaaagaacaggaaatttgtggagaccattgaactccaaattgggctgaaaaactatgatccccagaaggacaagcgttttagtggctctgttaagtngcctcacattcctcgccccaagatgaagatttgtatgcttggagatgcccaacacgt

SEQ ID NO: 285959 - DNA, 268 bp, Glycine max
aaaatggcggtgcctcttctctcgaagaagatcgtgaagaagaggctgaagaagttcaagaggcctcaaagtgacaggaagatttctgtgaagacaaactggcgcagaccaaagggtatcgattcccgtgttaggagaaagttcaagggatgcactttgatgccgaacattggttatgcttcagacaagaagacccgccactatctcccgaatggtttcaagaaatttgttgttcacaatgtgaaggatttggaactgctcatgatgc

SEQ ID NO: 285960 - DNA, 222 bp, Glycine max
  unsure (1)..(222): unsure at all n locations
tgtcatcatcttcagacctggacaggcaaatagagcagttgaagaggtgtgagcctcttaaggagtctgaagtgaaggcgcttgcctcaaagccatggaaatccttgtcgaagagagcaacgttcaaagggtcgacgcccctgtcaccatatgtggtgatattcacggtcagttttatgacatgaaggngcttttcanagtaggaggggatgccccaaaact

SEQ ID NO: 285961 - DNA, 270 bp, Glycine max
  unsure (1)..(270): unsure at all n locations
attgcagttaatgcgcttaatggatcacccaaatgtaatttccctgaagcactgtttcttttccacaacaagcaaagatncaactttttctaaacttggtaatggaatatgtccctgagtcaatgtaccgagttataaagcattacactactatgaaccagagaatgcctctcatctacgtgaaactgtatacatatcaaatcttcaggggattagcatatatccataccgccctgcgagtttgccatagggatgtaaagcctcaaaatc

SEQ ID NO: 285962 - DNA, 264 bp, Glycine max
  unsure (1)..(264): unsure at all n locations
atcattagtcgtcaaggaaatgaaatgttggatgcagttttgggtctagcttcctcccctaagaagaaaagcatgttagttgtgtctganttcattggctgttccccatctttaagtggggcaatcagagtgaacccttggaatattgatgctgtagcagatgcaatggactctgcgctggaaatggctgattcggagaaagagcttagacatgaaaagcattatagatatgttagtactcatgatgttgggtactgggctcgc

SEQ ID NO: 285963 - DNA, 264 bp, Glycine max
  unsure (1)..(264): unsure at all n locations
tttcaatttcaatttctcgcgtcgtcttcgatggccctcccaagatcgctttcttgttcctgcgttcgccgcaacctnccctctcgatttcctctgggacgctttcttccagaacggtgacgtttcgagattctctatttacgttcattcggcgccggggtttgtgttggatgagtcaaccaccaggtcacaactcttctacggtcgacaaatcagtaacagcatcaggtttatggggagaatcaagtatgattcacgctgana

SEQ ID NO: 285964 - DNA, 272 bp, Glycine max
  unsure (1)..(272): unsure at all n locations
caactccttgactgtgacaacaagtgtganataacagaaaagacttcatgtgacaatnggngtantggaagtcttatgaccacatgcctagcaattatttgctcgagtctggtgggttggaggaggagtcttcntatccctacactggggagagaggtgaatgcaantttgttccaggagannatagcagttangattcacaaatttcaccaatatccctggctggtgagaaccaaattgnccgcatatttagtaaaaaatggtccacttgg

SEQ ID NO: 285965 - DNA, 263 bp, Glycine max
  unsure (1)..(263): unsure at all n locations
ctacatcctaacccagcaggccatggtggctgtggacaatggaantcctgttaacagggacttaatcagcaacttcctgtcagacccagtgcacggagccattaaagtttgcgctgaactgagacccacagtagacatttctgtgccaccagatgcagactttgttcgtccggagttgcgttctagcaattagaattaaaagcaattatggctttcacttcgaatctttttcagatttctcagaactgcagttatcttgttag

SEQ ID NO: 285966 - DNA, 268 bp, Glycine max
  unsure (1)..(268): unsure at all n locations
cagagagttatgggttccccagaaaatcaattgtcgctcgcagaagangctctttcttcaggagatggatcggttgactttaaagggaggcctgttcttaagcggaatactggcaactggaaagcttgcccatttatcttaggcaacgagtgcngcgaacgtttggcgtactatggcattgcgacaaatctgttacctatcttacccagaagctgcacgaaggaaatgtctctgctgctagaaatgtcaccacctggcaaggcattgt

SEQ ID NO: 285967 - DNA, 267 bp, Glycine max
  unsure (1)..(267): unsure at all n locations
aaacaaaaagtttacgttacaaatcgcataataaccgtcctaagtttattgagagaattttgcaagtgtgaganacatggcatctcgtcaaaacaacaagcaagagcttgatgaaagagcaaggcaaggagagactgttgtcccgggtggaactggtggcaagagcctggaggctcagcaacaccttgctgaaggaaggagcaagggagggcaaacaaggaaggaacagctgggtacagaagggtaccaggaaatgggacgcaaagg

SEQ ID NO: 285968 - DNA, 268 bp, Glycine max
  unsure (1)..(268): unsure at all n locations
gtttcgttcgtcaccatgacttttaagcgcaggaatggaggtcgcaacaaacacggccgtggccacgtcaagttcattcgatgctccaactgcggcaaatgctgtcctaaggacaaggctatcaagaggtttctggtgaggaacattgttgaacaggctgcagtccagagatgttcaggaggcttgtgtctatgaacaatacacgcttccgaagcnttatgtgaagatgcagtattgtgtttcctgtgctatccactctcatgttgtg

SEQ ID NO: 285969 - DNA, 261 bp, Glycine max
  unsure (1)..(261): unsure at all n locations
gccacagttggaggcattcaagcaggtgcttttaaaattggtgacacagctggaacaattgacaatataattcagtgcaagctctacaggcctggatctgttggatttgtttctaaatctggtgggatgtccaatgaactatacaacactattgcccgcgtaactgatgggatttatgaaggcattgctattggaggagatgttttccctggttccacactttctgaccatnttttacggtttaacaacatgccacaggtt

SEQ ID NO: 285970 - DNA, 262 bp, Glycine max
  unsure (1)..(262): unsure at all n locations
gtcgacctgcgtgccgacaagaagaagatcaaggatgccgtgaagaaaatgtatgacatccaggccaaganagttaacaccttgatcaggcctgatggaaccaagaaggcttatgtccggttgacccctgattacgatgcattggatgtggcaaacaagattgggattatctaaggtantacctaggcagttctatggttattcttgggcggaaactttttaaaaaaatgataggttctatattttgtgttttgttatttgg

SEQ ID NO: 285971 - DNA, 264 bp, Glycine max
ggctaaattctcaaagatttaaactttgtctcagagtttccaaattcacccaaccccagagagaaaatgtctctaatcccaaatttcttcggtggcagaaggagcaacgttttcgatcctttttccctcgacgtctgggaccccttcaaggattttcctttcccaaacactctttcttcagcttcctttcctgaattttctcgggaaaattctgcattcgtgagcactcgtgtggattggaaggagaccccagaagcacacgta

SEQ ID NO: 285972 - DNA, 268 bp, Glycine max
  unsure (1)..(268): unsure at all n locations
gttcaagctcttcctccaaacgcacnaggcaacttccttcaacacaaggttccaaacctcagccataagacgcctcacctatgatagctcagtggccatggttcccttcggaccttactggaagttcgtgaggaagcttcatcatgaacgaccttctcaacgccaccactgtaaacaagttgaggcctttgaggacccaacagatccgcaagttccttagggttatgggcccaaggcgcagaggcacagaagccccttgacttgaccg

SEQ ID NO: 285973 - DNA, 253 bp, Glycine max
  unsure (1)..(253): unsure at all n locations
cgttgctctgcttcaaccttgcggaagaagaagacgccgcagccatggtgaagncactccagagaacccgacaatcccaccaagtcctgcaaggccagaggcgctgaccttagagtgcatttcaagaacactagggagactgcctttgccatcaggaagttgcccctggttaaagctaaaagatacctggaggatgttttggcccacaaacaggccatccctttccgacgcttctgtggtggtgttgggagga

SEQ ID NO: 285974 - DNA, 258 bp, Glycine max
ggggaagatttcttttattgatcttgctggaagcgaaagaggtgctgatactactgacaatgatcgtcagacaaggattgaaggtgctgaaatcaataagagccttttggctttgaaggaatgcattcgtgctttggacaatgatcagatccatattccttttcgtggaagcaagcttacagaagtgctccgtgactcctttgttggaaattcgaaaactgttatgatctcttgtatatccccaaatgctgggtcatg

SEQ ID NO: 285975 - DNA, 259 bp, Glycine max
  unsure (1)..(259): unsure at all n locations
gggagggttcactccggttgctcctgggtttctctacttaagagtttacaggtctattagagatgtcatgttcttgacagatgaaattgtatctcttttaatgctttcagttagagatatagcaaatggtgggttgcccaagggtgaagtggagaagctaaagangactaagtatggaataagatacggacaggtttctcttgctgcatcgatgactcgcgttaagcacgccgctccttcttggggctcgattctttgg

SEQ ID NO: 285976 - DNA, 268 bp, Glycine max
  unsure (1)..(268): unsure at all n locations
tacaangttgtgttgggcgtggtgaacgcgcttcattatcttcacgaagacgcagagcaatgcgtgcttcatagggatataaaatccgcgaacgtgttgctggacacggagttcaacacaaaggtgggggatttcggcatggcgaagttggtggatccgaggctgaggactcagaggacgggagtggtgggaacctatggttatttagcgcctgagtatgttaacgtggggagggcgagtagggaatcggatatctacagttttggag

SEQ ID NO: 285977 - DNA, 271 bp, Glycine max
cctaactgggatactgaatctgaagtaagagggttgtcgacgggtcgagatcgagcctcggaagagggaatcgcagcgaagtccactatgccgaagcaaattcatgagattaaagacttcctcctcactgcaaggaggaaggatgcacgctctgtgaaaatcaagcggagcaaggatgtagtgaagttcaaggtccgttgctccaagtacctgtacactctgtgtgtgtttgattctgagaaggctgataagttgaagcaatcactcctcc

SEQ ID NO: 285978 - DNA, 272 bp, Glycine max
  unsure (1)..(272): unsure at all n locations
agaaaagtagtgtattaagactacaaattttcaatttttcaatggcgtcgaggcaacaaaaagaggatcgagctgaggcagctgcgaaanttgctgcgaaagaactcgaacaactcaaccgagaaaaagaccgtgatttcagtgttggtgttgcagaccaacaccaacaagaagaacatcagttagatcaacanaagcgtggtgtaatcggatccatgttcaaggcggtgcaagacacttacgagcancgccaaggaagctgtcgttggcaa

SEQ ID NO: 285979 - DNA, 124 bp, Glycine max
  unsure (1)..(124): unsure at all n locations
ctcggctcttgcatcgatgaagancgtagcgaaatgcgatacttggtgtgaattgcagantcccgtgaaccatcgagtctttgancgcaagttgcgcccgaagccattaggccgagggcacgcc

SEQ ID NO: 285980 - DNA, 269 bp, Glycine max
gttgagcttttttgcgagtccatttgggcaaaagggttgaatgggcattgaaactgaagggtgtggagtatgagtacatagaacaagatatcttcaacaagactagtctccttctccagttgaacccggttcacaagaaggttccggttcttgttcatgcccacaaacccatcgctgagtcattcgtcatcgttgaatacgttgatgaaacatggaagcagtatccactgttgcctcgagacccttatcaaagagcacttgctcgattt

SEQ ID NO: 285981 - DNA, 267 bp, Glycine max
ggaacttggagttgaataccgtgttggcaagttcccgttcatggctaatagcagagctaaggcaattgacaatgctgaaggactggtgaagatattggctgaaaaggagacagacaagatattgggagtgcacattatggcacccaatgcaggagagcttattcatgaagcagcaatagcactacagtatgatgcatctagtgaggacattgcacgtgtgtgccatgcacatccaacaatgagcgaggctgtgaaagaagccgcaat

SEQ ID NO: 285982 - DNA, 265 bp, Glycine max
gttattggatcagagggtggagataaagatgaaatcaaagaaaattaatgactgcttgaacaggtttcatgttgcagtaccaaagcctcgtgaccagaaggaaaggcctccatgtattcctcaagcagttttagaagctaaagctaagcaagcagctgagaaggaaaagagaaaaactgaaaaggatctggaggatgagaatggtggggcgggtgtatactcaatgaacttgagaaagaattacattttggccgatgatgaatgg

SEQ ID NO: 285983 - DNA, 267 bp, Glycine max
  unsure (1)..(267): unsure at all n locations
caagagcattttcaccttctataatctttatngatgagatagatgctattggtagcaagcgtggaggacctgatattggcggaggaggtgctgaaagggaacaaggtttacttcagatactgactgagatggatggattcaaagtttccacagcacaggttctcctgattggtgccacaaatagattggatattcttgatcctgctctattgaggaaaggtcgttttgacaagatcattagagttggtttgccatcggaggatggaa

SEQ ID NO: 285984 - DNA, 266 bp, Glycine max
cttcaaaatcgttgtcaatttcgcctctttctttctcaactcccttagattctctccatccgggtcttcaaaaatgcggatgagctgcaatggatgtcgagttctcagaaaaggttgcagtgaaaattgcagcatcagaccctgtttacaatggatcaaaagcccagaatctcaagccaatgctactgtgtttcttgccaagttctacggccgtgctggtctaatgaacctggttaacgcaggccccgaacatcttcgtccagcga

SEQ ID NO: 285985 - DNA, 270 bp, Glycine max
cacaaacagcgcgagacagaggcacagagagaaaatggtttcggggtcagggatctgtgccaagagggtaattgtggacgcacgacaccacatgctggggaggctggcatcgatcgtggcgaaagaacttctgaatgggcagaaggtggtggtggtacgctgcgaggagatttgcatctccggtgggctcgtcaggcagaagatgaagtacttgcgtttcctccgcaagcgcatgaacaccaagcccttctcacggccccatccatttcc

SEQ ID NO: 285986 - DNA, 264 bp, Glycine max
aggcacacacctcaggctccaacccatttcacgagggatcggattcgctcgccatcatggggaagaagaagaagagagtttcctcgaaggtgtggtgttattactgcgatcgcgaattcgacgacgagaagatcttggtgcagcatcagaaagccaagcactttaagtgccatgtctgccacaagaagctctctaccgctggcggcatggccatccagtcctccaggtccacaaggaatccgtcaccaaggtacccaacgcaaa

SEQ ID NO: 285987 - DNA, 260 bp, Glycine max
  unsure (1)..(260): unsure at all n locations
ggggcttttggttatggctcctatttttcactctcaatgatggacagacactaccanagtggaatgtcagttgnagaagcaattgatctcgttgataagtgcattatggaaatcanatccaggcttgttgttgcgccgcccaactttgttattaaaatcgtggacaaggatggtgcaagagagtacgcatggcgtgagtcagtcaaggatactcctgttccttcagcttgagtaactcttccctaattttcgttggantc

SEQ ID NO: 285988 - DNA, 260 bp, Glycine max
tttgtcttaacatttgctctcggagctggcccagttccaggtctccttctaccagaaatctttcctagtcgaataagagccaaagccatggcagtctgtatgtcagtgcattgggtgataaatttctttgttggactactgttcttgcgtttgctggagaaacttggtccacagctgctttactctatgtttgctaccttttgcatcatggcagtaattttgtaaaaagaaatgtggtggaaaccaaagggaagtcactc

SEQ ID NO: 285989 - DNA, 262 bp, Glycine max
gttagggacatgcgtcaaactgttgctgtgggagtcatcaagaacgttgagaagaaggatcctaccggagccaaggtcaccaaggctgcccagaagaagaagtgaatcgtgcgggctggttcatcaggggatgttggttacaataaatgttggtttcttttctgtactcttgtgtcttcttttctaggtagcttgtttttcggacaaagtttgaagtctccaccatcatctcgcaactgttgttcccagaactgggttcttg

SEQ ID NO: 285990 - DNA, 265 bp, Glycine max
  unsure (1)..(265): unsure at all n locations
gatgtacagcaggtgtctttggttataaactatgatctgccaacccaacctgaaaattatcttcatcgcataggacgaagtgggcgttttggaagaaaaggtgttgccataaactttgtgactttggatgatgcaagaatgctgtctgatattcaaaagttctacaatgtgactgcngatcagcnacattngatggcaactcctctacagtcacattgttagaacttttgaatatgcagacagcttntngcatcatccaaagttc

SEQ ID NO: 285991 - DNA, 261 bp, Glycine max
  unsure (1)..(261): unsure at all n locations
cttgatgacgtcagtactggtttgcccagatgggaaaaccattgaagcagaggcagcccatggcactgttacccgtcattatcgggttcatcagaagggaggtgaaaccagcacaaacngtattgcttcaatttttgcctggtcgcgaggtcttgcacatagggcanaattggatggaaatgctagattgttggacttcacagagaaactggaagcagcttgcattggaacagttgantgggaaagatgacaaaggatctg

SEQ ID NO: 285992 - DNA, 259 bp, Glycine max
  unsure (1)..(259): unsure at all n locations
ggatgccatgcccgtnttgcggctccaagagctcaattgggtctaccagagctgactcttggtattattcctggatttggaggaacacagcgtcttccaaggcttattgggctgtctaaagctgttgaaatgatgctgacatctaaaccaatcacatcggaagangggaggaaattaggacttattgatgctattgtgtcttctgaggagttactaaatgcatctaggttgtgggcacttgaaattggagagaggtgca

SEQ ID NO: 285993 - DNA, 260 bp, Glycine max
ctgccacccagaagactgttgatgggccatcagccaaagactggagaggtggaagagctgcttcatttaacatcattcctagcagcactggagctgccaaggctgttggaaaagtccttcctgctttgaacggaaaattgactggtatggcattccgtgttcccaccgtggatgtctctgttgttgacctcacagtgaggctggagaaggaagcctcctacgatgaaattaaaaatgctatcaaggaggaatcagagggc

SEQ ID NO: 285994 - DNA, 262 bp, Glycine max
  unsure (1)..(262): unsure at all n locations
cgaaatggaagacgtgaagccggagtatacggcggcggattgcctgtacttcgaggcttccgactcggtgccgcggctgcacacgacggagtcganttgttcggagcaggtggtgtcggcggagtttgcgagcgaggtgcagagcgagcggaagangcagggcaanagcgagttttcgtataattanatggatgccactctcgggaataatcagatgtcgccgctccagggatatcttcatgtacctctccaggcccttctg

SEQ ID NO: 285995 - DNA, 260 bp, Glycine max
  unsure (1)..(260): unsure at all n locations
ccattccagagccaaggtaggttaaacactcttcttcatcgtcgtcgcaatgggacgtgtgatccgtgcgcangtaagggagcaggctcggtcttcaagtcccacacgcaccaccgcaagggccctgcccgcttccggagcctggatttcggagagcgcaacggctacctgaagggtgtcgtcactgacgtcatccacgatcctggccgtggcgcgcctctcgctaaggtcgccttccgccacccgttccgctacaagaa

SEQ ID NO: 285996 - DNA, 262 bp, Glycine max
gatcttgaaggtcatcagaaagaacttggttaagaagtgccttgagctcttctttgaaattgcagagaacaaggaggattacaacaagttctatgaggctttctccaagaacttgaagctaggtatccatgaggattcacagaacaagggaaagattgctgaattgctcaggtaccactccaccaagagtggtgatgaaatgacaagcctcaaggattatgtgaccaggatgaaggaaggtcagagtgacatctactccatc

SEQ ID NO: 285997 - DNA, 258 bp, Glycine max
gaagatgtcgaatcaatactgtataaactacttgtggcagcagatttcaatgttgcagcagctccaacaaggaataatttacattgatgaagttgacaaaataactaagaaggccgagagcttaaatatcagtcgggatgtttctggtgagggtgttcagcaggcattattgaaaatgctggaaggaactatagtaaatgttcctgagaaaggagctaggaagaatccacggggggataacattcagatggacacaaa

SEQ ID NO: 285998 - DNA, 261 bp, Glycine max
  unsure (1)..(261): unsure at all n locations
aaatcctgaaactgagatcataattactaagaatcaaatgatccagctgaaatgcgcantttgtggttttgtgtctgatgttgatatgagagacaagctgactaccttcatcattaagaaccctccagaggttaagaaaggatccaaagacaagaaggccatgaggagagctgagaaggagagactgaaggaaggtgaattagctgatgaggaacagaagaaagtgaagaaagaggttaagaagaaaggctcttcatctct

SEQ ID NO: 285999 - DNA, 253 bp, Glycine max
  unsure (1)..(253): unsure at all n locations
atttatacgagagctattataacgcaaacaaatccaacctgaagttgtatgttagacgtgtgttcatttcagatgaatttaatgaactgttgcctaagtacctaaactttttgctggtaggaattgttgtgctttgttattgcagataaaatatattttatgatgatcagaataattttngctaataaatgtnacttttgacgttgggaacagggtctgttgattctgacacattgccacttaatgtatcgcg

SEQ ID NO: 286000 - DNA, 258 bp, Glycine max
ggtttttgagtgcggtgcggcgatcctagcactctcttctgcagctttcgccgacagcttcattcaccatggctgagcaaaccgagaaggcttttttgaaacaaccaaaagtgtttctcagctcgaagaaaactgggaagggaaagagacccggaaagggtgggaaccgcttttggaaatccattgggcttggatttaagactcccagggaagccatcgaaggaacctacattgacaagaagtgccccttcactggca

SEQ ID NO: 286001 - DNA, 258 bp, Glycine max
  unsure (1)..(258): unsure at all n locations
gttctgcttctgtgaattctggcttcttcacaacattggttgaagcaggagatgtgaaggcagttttcactggccatgatcatgtcaatgacttctgtggcaagctaacgggtatacntctttgttatgctgggggatttggatatcacgctatggaaaagctggatggtccaggagagcaagagtggtgctagttagcctggagaaaacagataatggccgttgggaagatgtcaaatcaattaaaacatggaagcg

SEQ ID NO: 286002 - DNA, 263 bp, Glycine max
  unsure (1)..(263): unsure at all n locations
gattcagcaagtgcgttttggaagcagagaccgaaatacttcgagatggcccgtacaaagcaaactgctacgtaagtcaactggaggaaaagctcccaggaagcagcttgcaaccaaggctgcacgtaagtctgcaccaacaactggtggtgtgaagaagcctcatcgttatcgccctggaactgttgctcttcgtgagattaggananaccagaagagcangagctcctaattcaggaagcttcctctccagaggttggttc

SEQ ID NO: 286003 - DNA, 264 bp, Glycine max
  unsure (1)..(264): unsure at all n locations
cttcatcagagataacttgacaaataaaatcaccatgtctatcatcccaaacttgttcggtggtagacgaagcaacgtcttcgacccattctctctggacgtatgggaccctttcgaggggtttcctttttccacaggtcacgtgccttcctctggtggggaaagcagtgccatagccaacactcgcgtggactgnaaggagactccnccggctcacgtgttcaacgttgatcttcccgggttgaagaaggaggaagtgaaggt

SEQ ID NO: 286004 - DNA, 263 bp, Glycine max
  unsure (1)..(263): unsure at all n locations
tttgaagcctgcagacatctatctgatagatgagccangtgcgtatctagattctgaacagtgaattnttgcttccaaagtcattaagaggtttattcttcatgcanagaaaacggttttgtcgttgagcatgatttcatcatggcaacatatcttgcagacagagttattgtttatgagggtcaaccatcaattgactgtattgcaaattctccagtcattgttgactgggatgaacgttttcttatcacatcttgatatca

SEQ ID NO: 286005 - DNA, 268 bp, Glycine max
  unsure (1)..(268): unsure at all n locations
cncaactactacaagtacttccttacaatcaaaaccaacaacaactatggcnagttatcaaaagcactacgatgatcagggtcgcaaggttgacgagtatggcaacgttgagaagcaaaccgacgaatacggcaaccctgttcatgctgctagtgtcacctatgtagccaccagaactgctgctggtggttacagtgatgacattaataagcaacatgataccaccaatgcctacggcgtagacnctggtagacagcattctagtggt

SEQ ID NO: 286006 - DNA, 264 bp, Glycine max
  unsure (1)..(264): unsure at all n locations
ggagcaaacaatgagagtgagtataanangggtttaagacctgtgttgtggttgacaccagacttccctctaaaaactgatgagctgctgcctctgcttgacatcttagcaaataaggtaaggctattagaagactcagagagcttttgacaactaagctacctcatggaacttttcctgtcaaggttgctatcccaatagttcctactatccgggtgcttgtcacttttacaaaatttgaggngcttcagccagtagaggagt

SEQ ID NO: 286007 - DNA, 261 bp, Glycine max
  unsure (1)..(261): unsure at all n locations
angctgctgagcttcatggaaatcttactcaagcccagcgccttgnggctttggnacngttcaggnagcagcaagtggnttttntggttgcnacagatgtggctgcccgtggccttgacattattggtgttcanacagttatcaactttgcatgtccacgcgatcttactagctatgttcatcgagttggtcgtactgcaagagctggaagagaaggatatgcagtcacttttgtgactgacaatgaccgatcacttttaa

SEQ ID NO: 286008 - DNA, 266 bp, Glycine max
  unsure (1)..(266): unsure at all n locations
gcaagtttganaagaaacatggcatctcatcaacaaaacaagcaagagcttgatgaaagggcaaggcaaggagagactgttgttccgggtggcactggtggcaagagccttgaggctcagcaacatcttgctgaaggaaggagcaggggagggaaaacaaggaaggagcagctggggacagaagggtaccatgaaatgggacgcaaaggtgggttgagcactatggacaagtcaggagaagaacgtgctcaagaggaagccattga

SEQ ID NO: 286009 - DNA, 261 bp, Glycine max
  unsure (1)..(261): unsure at all n locations
cagtcaaatacttttctaatctgaggcagaatttnggtcctggagttgatggttgggccatctctctgaaagcaatgatgagcatngttgtgggtatggggtttgcaatctgtttcctgtactggtgggtgaacaattatgttcctcttcctactcgtagcnnnnnnnnnnnnnnnnnncccaaaatgggaacaatggagagcttgaagttcttggtgtcttcaaagtacatcagagatcttgccactttagtggttgctt

SEQ ID NO: 286010 - DNA, 263 bp, Glycine max
gaagaacaagaatttgtattagaggctctagcttatgagatggatccaatggttgtgccagaaggatatgtgtttgtaatgggcgacaatcggaataaaagctttgattctcataactggggtcccctgccggttgagaacattgttggtaggtccatgtttcggtactggcctccatccaaggcatctgacactgatacccatcgtaaactcccacctggtaacaaacctgtggcaatttcttgacatgattcccgcagctt

SEQ ID NO: 286011 - DNA, 266 bp, Glycine max
cgacaccaccggcctcatcctcaaactcaagtccttctgcctccgcatggacgcattcgggttcttcgccttcgtcagcgccaagaagaaggagctcgacggcctacgcgccgagatgcctgtggctctggcggagtgcgttgatccggcgaaattcgtgctggaggcgatctccgaggtgtttccggtcgacaagagaggggacaaggccggccacgacttgggctgggcctgcgtccttgtcctggagtcgctgattccggtcg

SEQ ID NO: 286012 - DNA, 263 bp, Glycine max
  unsure (1)..(263): unsure at all n locations
gnttccagccagttaaagtgccagagccaactgtagatganaccatacaatactgaaaggncttagagagcggtatganattcaccacaagctccgctatactgatgaggctcttgtagctgctgcacagctgtcctaccagtatatcagtgatcgatttttgccagacaaagctatcgatttgattgatgnagctggttcacgagtccggcttcaacatgcacagttacctgaagaagcaagagaacttgacaaggaggtga

SEQ ID NO: 286013 - DNA, 265 bp, Glycine max
  unsure (1)..(265): unsure at all n locations
caccaagacgacagcagcgatttcacctccgaggacgaaggcaccgaagattaccgccgcggcggctnaccacgccgtccgaatcggcgacgccttcagcgccggtcgctacgtcgttcagagtaaactcggctggggccatttctccactgtctggctcgcttgggacaccaaacattctagatacgtggctttganagttcagaagagtgctcagcactacactgaggcagctatggatgagataacaattttgcngcagatt

SEQ ID NO: 286014 - DNA, 261 bp, Glycine max
  unsure (1)..(261): unsure at all n locations
ggaaactctggtggaggcccgcagcgatactgacgtgcaaatcgttcgtctgacttgggtataggggcgaaagactaatcgaaccgtctagtagctggttccctccgaagtttccctcaggatagctggagcccgcgggcgagttctatcgggtaaagccaatgattagaggcatcggggncgcaacgccctcgacctattctcaaactttaaataggtaggacggtgcggctgctctgttgagccgcgccatggaatcga

SEQ ID NO: 286015 - DNA, 260 bp, Glycine max
ttctctctgtgtatttccctacctctcccttcaagatgcagatcttcgtcaagaccctcaccggcaagaccatcacccttgaggtggaaagctctgacaccatcgacaacgtcaaggccaagatccaggacaaggaaggaatccccccggaccagcaacgtctcattttcgccggaaagcaacttgaggacggccgtacccttgctgactacaacattcagaaggagagtactcttcacctcgtcctccgtctccgtggt

SEQ ID NO: 286016 - DNA, 263 bp, Glycine max
  unsure (1)..(263): unsure at all n locations
ggnnangttggtagcgaaaganagatgtcgatcttcgagtacaacgggagtgccctagtggctatggtggggaagaactgcttcgccatcgcgagcgatcggagactcggggttcagctccagaccattgccaccgatttccagaggatttcaaaaatccacgacaagctcttcatcggtctctccggcctcgccaccgacgcccagaccctctaccagcgcctccttttccgccacaaattgtatcagctccgcgangagag

SEQ ID NO: 286017 - DNA, 258 bp, Glycine max
  unsure (1)..(258): unsure at all n locations
cnccgtccacggcgtcacgcngttctccgatctcaccgaggacgagtttgngangctctacactggcgtcaatggcggcttcccgtcatcgaataatgccgccggcggtattggccgccgttggnggtggacgggctgccggagaattttgattggngagaganaggagctgtcaccgaagttnagttacngggtagatgtggatcatgctgggctttcagcaccncaggatctatagnnggngccaattttctgccc

SEQ ID NO: 286018 - DNA, 257 bp, Glycine max
  unsure (1)..(257): unsure at all n locations
ttcttgnngcantgtctcacngaatgcatntagatgacagcatganacgtattggaaagctcttctttggcattgaanngggtccagaactgcttagcagtgttagacctgtgggcaaccacttgttgatgactgggactgccttaaaacattggttaggacttttgagacacattgtggatccctgtctcagtatgggatgaaacatatgaggtcctttgcaaacttctgcaacgctggaatacgaaaagagcaaa

SEQ ID NO: 286019 - DNA, 259 bp, Glycine max
  unsure (1)..(259): unsure at all n locations
gtccttcaagggctacggcaaagttgacgagttggagcagcaagcctatcagaagangacacgtaagcgcctcataataatcacagtctcttcaatcgttctaattgcggtgatcatcgccgctatcgcaggggttgtcatacacaagcgcaacacctcatcatctccctcatccgactcgcccccgcaaactgagttaaccccggccgcgtcacttcaaagcggtttgcgacgtgatcagtaccctaactcgtgcttc

SEQ ID NO: 286020 - DNA, 259 bp, Glycine max
  unsure (1)..(259): unsure at all n locations
gaganttggcattnnggtcatttaanagtggcaacacccccatattggttgcnactgatgtggctgcacgtggtcttgatattcctcatgttgcccatgtggttaactttgaccttcctaatgatattgatgattatgtacaccgaattggaaggacagggcgggcaggaaaganaggccttgcaactgcgttctttaatgacaacaatgcatccctggcaagggccttagcagatctgatgcaagangcaaatcaaga

SEQ ID NO: 286021 - DNA, 260 bp, Glycine max
gtccagcttctgtgggtcaatcttgtcactgatgggccccctgcaacagctttgggatttaatcctccagataaggatataatgaaaaagcctcctcgtcacagtgatgactcataattaatttgtggattttattccgctatctggttattgggatttatgttggattagctacagttggtatcttcatcatatggtatacacatggttccttctttggtattgaccttagtggggatggacatactcttgtgacttac

SEQ ID NO: 286022 - DNA, 257 bp, Glycine max
caaagaatcaaagaaaggggtggtggctgcttcgaaagcttaataatttgtttatttccagaacatcatagttttcgcagcagcaaactaacaaattactcatatcatataataagatggcccgttctctctcgcaagccaaacgtattggtgtccttgttgctcaatctatctccctaattcccgttcatcggcgaggttacgcagtgggcatccgatgtatcggtaagagttggatgggtaatattgggcgaagg

SEQ ID NO: 286023 - DNA, 261 bp, Glycine max
  unsure (1)..(261): unsure at all n locations
gctgcaactggggcactgcctgcatcagttactgcacctatatcttcaccttctcctgctccagccccaactcctgctcctatatcttcaggaactnctgtggaagggtctgatatctatgggcaggctgcatccaatctggttgctggaagcaacttggagggaacaattcagcaaattcttgatatgggtggagggagctgggacagggataccgttgtccgtgctcttcgagctgcctacaacaaccctgagagagct

SEQ ID NO: 286024 - DNA, 263 bp, Glycine max
  unsure (1)..(263): unsure at all n locations
gaattagggttttccaattcacagagcaacacaacgaaccaaacaatggcgcagcttcaggccgcagtcgcagccgcagcacgggcaagcagcgctggagcaggtgcagtgcttcggtcgcaagaagaccgccgtggccgtgacctactgcaagcgcgggcgcggtctcatcaagatcaacggctgccccattgagctcgtggagccggagatccttccgcttcaaggccttcgagctatcctccngttgggtaagagccgct

SEQ ID NO: 286025 - DNA, 259 bp, Glycine max
  unsure (1)..(259): unsure at all n locations
gngtggntggccttcttctggtggnactgcaacttcacttgataatgcaagaacttacaacacaaacttggttcggaatgtgaagcaaggaacccctaaaaggcctggtgaccccttgaaacttatgtgtttgccatgtttgatgaaaatcagaagcagccagagtttgaaaaattttgggggctcttttctcctataactaagcagcccaaatactcgattaatttcaattaatttttagcagaagcataatttggtg

SEQ ID NO: 286026 - DNA, 256 bp, Glycine max
gctcaagagtattttggcataactcctgatataacaactctaggaaagatcattggtggaggtctgccggtgggggcttatggagggaggagggatattatggagaaggtggcaccagctggcccaatgtatcaggctgggaccttgagtgggaaccctttggccatgactgcaggaatacagaccctgcagcgtattaaggagccaggaacttatgagtacttggacaaaatcaccggtgagcttgttcagggca

SEQ ID NO: 286027 - DNA, 256 bp, Glycine max
ctttgtcgcaaagagaagagatctgcctcctttttccttcccaaatccaaatctatctcttcttcaagttgaaaatggggctgtcgttcaccaagttgttcagccggctgtttgccaagaaagagatgcgtatactaatggtgggtctcgatgctgcgggtaagaccaccattctgtacaagctcaagcttggagagattgtcaccaccattcccaccattgggtttaatgtggaaactgtggaatacaagaacat

SEQ ID NO: 286028 - DNA, 252 bp, Glycine max
  unsure (1)..(252): unsure at all n locations
ttcttttcacaaagatctgagtctctcttgaaggttcttaggtcaggtgccaggataaagaaagangcctttcaggctgcttcaattcctgttgttttggtcgagaacagtgggagatgcaacaaaaatgacagtgatgaaaaggttcttccaaatgggactgcttggattcctaatctagtccagacaatcacagaaatcgcattgaacaaaagtgagtctattcatgttgacaagaatttgattganggg

SEQ ID NO: 286029 - DNA, 254 bp, Glycine max
gttcacagcttcagttcgtttttgttgatcctgtgaacttatggctgacggggtggttctgttggatacatgggccagcatgtttgggatgagggttaggattgcattagctgaaaagggtgttgagtatgaatacaaggaagaaaatctcaggaacaagagtcctttgcttttgcaaatgaacccaattcacaagaaaattccagttctgatccataatggcaaaccaatttgtgaatctgcaattatagtgc

SEQ ID NO: 286030 - DNA, 257 bp, Glycine max
  unsure (1)..(257): unsure at all n locations
tggttcaaganagtgcaacaagattggngcatattgcagaataaccttcctgaggaaatctatgtacgagtttatgaagatagaatggatctcttgagagcagttattgtagggccatacggaaccccttaccaagatggactctttttctttgattttcaccttccgccagaataccctgatgttccaccgtcagcatactatcattctggtggttggcggattaaccctaatttgtatgaggaagggaaggtttg

SEQ ID NO: 286031 - DNA, 255 bp, Glycine max
  unsure (1)..(255): unsure at all n locations
gangaaaatcgacgagatcctcgaggacgctgttgagtttgcagacagcagccctcttccaccccgcagtcagcttctggagnntgtctttgctgatccgaaaggctttggaatcggaccagatggcaggtatagatgtgaggatccaaaattcactgaaggcacagctcatgtctaatctttcagtattgtatgagtgttcttttcatatggcttatttagtgatcaaatgttacacaatgtctaatataaaca

SEQ ID NO: 286032 - DNA, 255 bp, Glycine max
  unsure (1)..(255): unsure at all n locations
ctctggtggnggcccgcagcgatactgacgtgcaaatcgttcgtctgacttgggtataggggcganagactaatcgaaccgtctagtagctggttccctccgaagtttccctcaggatagctggagcccgcgggcgagttctatcgggtaaagccaatgattagaggcatcgggggcgcaacgccctcgacctattctcaaactttaaataggtaggacggtgcggctgctctgttgagccgcgccatggaatcg

SEQ ID NO: 286033 - DNA, 260 bp, Glycine max
  unsure (1)..(260): unsure at all n locations
gngaatatgacaaagccattgcatcttttganagagcactgaaacttaagccgcaggattactctctatggaacaagctgggtgcaacacaagcaaacagtgttcaaagtgtgatgcaataatggcttatcaacaggcactggatttaaagcctaattatgttcgtgcttgggcaaatatgggtatcagttatgcaaaccagggtntgtatgacgagtccattcgatattatgttcgagcacttgccatgaatccaaaag

SEQ ID NO: 286034 - DNA, 251 bp, Glycine max
tttcatgctttcctcctatgcaccagttatctctgctgagaaggcctaccatgaacagctctcagtggcagaaattaccaacagtgcttttgagccatcgtccatgatggccaagtgtgatcctcgtcacggaaagtacatggcgtgttgcctgatgtaccgtggtgatgttgtgcccaaagatgtaaacgctgctgttgccaccatcaagaccaagaggaccattcagtttgtggatggtgccctactgg

SEQ ID NO: 286035 - DNA, 253 bp, Glycine max
  unsure (1)..(253): unsure at all n locations
cccatttctctcttctgctcattcctttgactcctcattatcaggganatggctctcactgggttactcttgttggcctttctcacgatgttctcctctgctcatgcctatggtggagggtggactaatgctcatgccacattctatggagggagtgatgcatctgggacaatgggtggggcatgtgggtatgggaacctctacagccaagggtatggaacaaacactgctgctctgagcactgcactcttca

SEQ ID NO: 286036 - DNA, 243 bp, Glycine max
  unsure (1)..(243): unsure at all n locations
angaaaaagaaggggttctcgacaagattaaggagnagctaccagggcacaanaagacagaggaggccacagctactactcctcctccaccaccactgttgcatcattggagcatggtgaaggtgctcatcatgaaggagaggccaaggagaagaaaggtatattagaaaagataaaagagaagcttcctggttatcactccaagacagaggaggaaaaggaaaaggaaaaggagatggtgct

SEQ ID NO: 286037 - DNA, 254 bp, Glycine max
  unsure (1)..(254): unsure at all n locations
ccngggtcacntgtttggctntgccncggacgagaccccngnnttgatgccattgngtcatgttcttgcnactnanctcggtgctcgtctcaccgaggttcgcnagaacggaacctgcccntggttgaggcctgatgggaagacccaagtgactgttgagtattacnntgacaacggtgccatngttccagttcgtgtccncactgtgcttatctccacccaacntgatgngntgngaccaacgacgaaattgc

SEQ ID NO: 286038 - DNA, 253 bp, Glycine max
  unsure (1)..(253): unsure at all n locations
cacactctctctgagtcggtcgagttgaatcggtgtgagtcagtgaccgagtcgaaccatgtcggacgaagaacaccatttcgnatccaaggccgatgctggagcctccaagacctatcctcaacaagccggaaccatccgcaaaaacggttacatcgtcatcaagggtcgtccctgcaaggttgttgaagtttctacttccaagactggtaagcacggtcatgccaagtgtcactttgttgggattgatatt

SEQ ID NO: 286039 - DNA, 253 bp, Glycine max
  unsure (1)..(253): unsure at all n locations
gggnngggtggtggctcnttgttggtgntaccaaaaccaatctgttgcttgccattaaacgggtttccctgcagcggaaattaaaagccaaactggaatttgatgctcctgctgatgctggnaggaaatcctattcgctttatttcatgtgtgattcatacttgggttgtgatcaggagtatggtttcaccgttgatgttaatgctgatggcggtgatgaagatagcggcagagactgaaaagtttcatgaag

SEQ ID NO: 286040 - DNA, 257 bp, Glycine max
caacagcaacgttggagggggattcaggtcaaggttgaatcactacctctatagcggtgacaagaaacatgtcttcgttggtttaactctcatcaccgctgtctttaccatcccatggtactttatgagcagagggaccaaacaccagtctcatcaagattacttggaaaaagctgataaagccaggagccaaagactctcatccagttctgcttctgccaaatgatcttcatcaacattctgttgaagagcatact

SEQ ID NO: 286041 - DNA, 276 bp, Glycine max
gaagaagtgaagctgttgagcttttttgcgagtccatttggcaaaagggttgaatgggcattgaaactgaagggtgtggagtatgagtacatagaacaagatatcttcaacaagactagtctccttctccagttgaacccggttcacaagaaggttccggttcttgttcatgcccacaaacccatcgctgagtcattcgtcatcgttgaatacgttgatgaaacatggaagcagtatccactgttgcctcgagacccttatcaaagagcacttgct

SEQ ID NO: 286042 - DNA, 273 bp, Glycine max
gccatgtcgactctgggaaatccactaccactggtcacctgatttacaagcttggaggcattgacaagcgtgttattgagaggtttgagaaggaagctgctgagatgaacaagaggtctttcaagtatgcctgggtgctggacaaacttaaggctgagcgtgaaagaggaatcaccattgatattgctttgtggaagtttgaaacaacaaagtattattgcacagttattgatgcgcctggacatagggattcataagaatatgattactggg

SEQ ID NO: 286043 - DNA, 274 bp, Glycine max
  unsure (1)..(274): unsure at all n locations
accaccaccactcgccgatggccacgatcggaggcttacacgactcccaaggctctcaaaacagcgtcgaaaccgaagccctcgctncgattcgccgtagacgaacacaacaagaagcagaattcgcttctggagtttgctagggtggttagggcacaggaacaggttgttgctggtaccctgcatcaccttactcttgaggctattgaggctggtgagaagaagctctatgaagccaaggtgtgggtgaaaccatggctgaatttcaaagaat

SEQ ID NO: 286044 - DNA, 275 bp, Glycine max
cctttttcttctcccaccaacttcaccgtccttcttcctcgatcatgtctcacttcaagggcaagtaccatgatgagcttattgccaatgctgcttacattggcactcctggaaagggtattcttgctgctgatgagtcaacagggacaattggcaagcgtttggccagcatcagtgtagagaatgttgaatccaacagggcgtgctcttagggagctgcttttcaccgctcccggtgctcttaaatatctcagtggtgtcatcctctttgagga

SEQ ID NO: 286045 - DNA, 273 bp, Glycine max
aaagaatcaaagaaaggggtggtggctgcttcgaaagcttaataatttgtttatttccagaacatcatagttttcgcagcagcaaactaacaaattactcatatcatataataagatggcccgttctctctcgcaagccaaacgtattggtgtccttgttgctcaatctatctccctaattcccgttcatcggcgaggttacgcagtggcatccgatgtatcggtaagagttggattgggtaatattgggcgaaggaatggaatcgtgggagg

SEQ ID NO: 286046 - DNA, 270 bp, Glycine max
  unsure (1)..(270): unsure at all n locations
gttcactcttcttctcttgcggctagggttttagcgcantttcttctagatttaaggaagatgggtaaggaaaaggttcacatcagtattgtggtcatggccatgtcgactctgggaaatccactaccactggtcacctgatttacaagcttggaggcattgacaagcgtgttattgagaggtttgagaaggaagctgctgagatgaacaagaggtctttcaagtatgcctgggtgctggacaacttaaggcngancgtgaaagaggaat

SEQ ID NO: 286047 - DNA, 273 bp, Glycine max
  unsure (1)..(273): unsure at all n locations
atcttgtggaagtagagataaacaagcgtctganagaaggcacatacaaggggaagaaattcaatgccatttgccacttttttggttatcaagctcgtggatctctgccatcaaaatttgactgtgattacgcatatgttcttggacacatctgctaccacatacttgccgctggtctaaatggatacatggcaactgtaactaacctgaagaatcctgtaaacaagtggcgatgtggggctgctccaatagcatctatgatgactgtgaagc

SEQ ID NO: 286048 - DNA, 225 bp, Glycine max
tgtctttgcttcccaggtggtggtgcagacggagggaagagtgtgtgagtcacaaagccacgggttccatggtttgtgtaatagagaccacaactgtgctttggtctgcaggaacgaaggtttctccggtggcaggtgcaaaggcttccgccgccgctgcttttgcaccaggatttgttgagatctcatcaaacactactcttgccatgcaaattaataaatcat

SEQ ID NO: 286049 - DNA, 275 bp, Glycine max
cggtgcatctcatcgtctccgaaaatgaacgacgcagatgtctcgaagcaaatccagcagatggtgcggttcatccgccaggaagctgaggaaaaggccaacgagatctctgtctccgccgaagaggaattcaatatcgagaagctgcagttggtcgaagccgacaagaagaagatcaggcaagaatacgaacgcaaagagcgccaagttgaaattcgcaagaagattgagtactcaatgcagctgaatgcttctcggattaaagttcttcaagc

SEQ ID NO: 286050 - DNA, 273 bp, Glycine max
ctcacattattcactcacttcccccctcttcattttgtagtctcctttacctgcaaaaaacagcagatggctcagcttaacctcatacttatctggttatttttattgagtctgtgcctttattcatgtcctacttcggcccagttaagtagacaccactatgcaaaaacatgccccaatgttgaaaacattgtcagagaagcagtcaaaaagaagtttcatcaaacatttgttacggttcctgctaccattcgtctcttcttccatgattgg

SEQ ID NO: 286051 - DNA, 276 bp, Glycine max
gagaagaaagggatactggacaagattaaggagaagcttcctggaggacacagtgacaagtagatgcatcgtgcatgcatgcatatagtatatatataatattgttgtcttgaataaatttgctgcatatgtacttggaggatatagcatatggttatagtatattatatagaggaataaaaaatgtatgcctgtaatgtaagggttctcatatacatggctgaaatataaagcataataaaggcattgatgttgtgccaatacatatgttgagag

SEQ ID NO: 286052 - DNA, 270 bp, Glycine max
  unsure (1)..(270): unsure at all n locations
gacaggcaaatagagcagttncaagangtgtgagcctcttaaggagtctgaagtgaaggcgtttgcctcaaagccatggaaatccttgtcgaagagagcaacgttcaaagggtcgacgcccctgtcaccatatgtggtgatattcacggtcagttttatgacatgaaggagcttttcaaagtaggaggggattgccccaaaactaactatttgtttctgggggatttgttgatagagggttttactcggttganacgtttctgcttctgc

SEQ ID NO: 286053 - DNA, 270 bp, Glycine max
cagtaatcaagtccaaattcctggcattcaatctctaattaacaaaacaattgctgaacttgaagctgaactaactcgtttaggaaagcctgtagcagctgatgctgggggaaagttgtatgcaatcatggaaatatgccgctcatttgatcaaatatttaaagaccatcttgatggcgtgcggcctggaggtgataaaatttataatgtctttgacaatcagctccccgctgctttaaaaaggttgcagtttgataagcagctttcaat

SEQ ID NO: 286054 - DNA, 270 bp, Glycine max
gagaaaatggcggtgcctctgctctcaaagaagatcgtgaagaagagggtaaagaagttcaagaggcctcagagtgacaggaaaatttccgtcaagactaactggcgcagaccaaagggtatcgattctcgtgttaggagaaagttcaagggatgcactttgatgccaaacattggttatggttcagacaagaagacccgccactatctccctaatggtttcaagaaatttgttgttcacaatgtgaaggtttggaactgctcatgatgc

SEQ ID NO: 286055 - DNA, 270 bp, Glycine max
  unsure (1)..(270): unsure at all n locations
ctgactcgaaattttgcagatctggaaatggcgacggcaacgtaccctccaccgccaccttattanagactttacaaagattacttgcaaaaccctaagtctgctcccgaccctccaccgcctattgaaggcacttatctttgttttggagccaattacaccactagtgatgttctaccaaccttggaagaacaaggggtgcgccagttctattctaagggccctaatgttgatttcaagaaggagctgaggtcactcaacggagagttg

SEQ ID NO: 286056 - DNA, 269 bp, Glycine max
gcagctccggcgggacccctacgaggtcctcggcgtctcgcgcaactccacggatcaggaaatcaaaaccgcgtaccgcaaaatggcgctcaaatatcatccggacaagaatgctaatgatcctaaagcagctgatatgtttaaagaggttaccttctcttataatatcctgtcagatcctgataaacggcgtcaatacgactcagctggctttgaggctgttgaatcagacaaccaagagttggagttagatctttcaagtctgggtg

SEQ ID NO: 286057 - DNA, 243 bp, Glycine max
tggctgatacaagtggaggagatgcagtgagaccggtggtaatatgtgataacaagtgtggctgcacagttccatgcactggtggttccacttgcaggtgcacaagtgtcggcatgacaactggaggcggtgatcacgtgacatgctcgtgcggagagtactgtgggtgcaatccatgctcatgtcccaagactgcggcttctggaactggttgcagatgtggcacagattgctcatgtgcct

SEQ ID NO: 286058 - DNA, 268 bp, Glycine max
  unsure (1)..(268): unsure at all n locations
gagccagccctgcacatatgataagagcnagctatgcaagccagcccttgcgactgcattgtttagcactgtatctttcttgcttggtgctataacttcagtcctatctggtttccttgggatgaaaattgcaacctatgccaatgcaaggacaaccttggaagccagaaagggagttggaaaggcttcattactgatttaggtctggtgcagtgacgggtttccttcttgcagcaaatggtcttttggtgccctacattaccatcaa

SEQ ID NO: 286059 - DNA, 274 bp, Glycine max
  unsure (1)..(274): unsure at all n locations
gagaaataaggggaaaaaatggtgtcgctgaaactgcagaagcggctggccgcaagcgtgctcaagtntngcagacgaaaggtgtggcttnaccccaatnaagtcaacgaaatctccatggccaattctcggcaaaacatcaggaagttggttaaggatgggtttancatcaggaagncaaccaagattcactcacgctcgcgtgcttcntaggancacgnangcanagaagaagggccggcatctggntatggtaagagntagggtacaaggg

SEQ ID NO: 286060 - DNA, 267 bp, Glycine max
gtgagatttgcgaatctgagaaatggcggattcttctcgggaggagaacgtttacatggcgaaattggcggagcaggccgagcgttacgaggagatggttgagttcatggagaaggttgcaaagactgtggaggttgaggagttgacggtggaggagaggaatctcctctctgtggcttacaagaacgtgattggtgcgaggagggcttcgtggaggatcatatcctccattgagcagaaggaggagagcaggggcaatgaggacca

SEQ ID NO: 286061 - DNA, 267 bp, Glycine max
atctattgataagctaaaatccacttttcaccaatgggaaaacactgctgatgttggcgagcgatccagttctatcaaaggaagttcttgctagttgtgaaagcattgcatggcaggtggatgaattggacaaagcaatttctgtggctgctagagatcctcttggtatggcattgatgaagtggaggttgaaaaccggaggaagtggaccagtgatgctcgcacccaggtgagcaaagcaaagagaacagtggaagctggaaaggg

SEQ ID NO: 286062 - DNA, 270 bp, Glycine max
ccagcactgagctttaaccgagcttcacaaagatgaatcgggaaaaattgatgaagatggccggttcggttagaactgggggaaagggcaccgtgagaagaaagaagaaggctgtccacaagacaacaaccacagatgacaaaaggcttcagagcaccctgaagagaataggggtgaatgccatcccggctattgaggaggtcaatatctttaaggatgacgtattatccagtttctaaatcccaaagttcaagcatccattgctgctaa

SEQ ID NO: 286063 - DNA, 265 bp, Glycine max
caccttcagaatggccttaattatagctccaacaaggtggtttatttccaaagagttactgtaatactttcggatttgtctcttctttatggggtttacagacttactcggaatctggattcaagaaagcagcagttgatctggtcattggttatttggtcacctatgctttttatagtggaccatgtgcatttccagtacaatggatttctcattgggatttgttgatctcactttcatatttggaggaaggaagggatttgtt

SEQ ID NO: 286064 - DNA, 257 bp, Glycine max
gaacagctcctcttctacggcaagaacctcaaacccctcgaaccccaattcaaaaccaacgacaacaaggtccaaggctgcgtctcccaggtctgggtccgagcctacctcgacccgaaccgcaacgtcgtctacgaagccgactccgactccggcctcaccaagggcctcgccgcgctcctcgtccagggtctctcgggtcgacccgttaacgaaatcattcgggtcagcccgatttcgccacgctgttagggttg

SEQ ID NO: 286065 - DNA, 265 bp, Glycine max
cggaggtgtggctggacccacttgatttcaagcccgagaggttcatgggcctggaggcggagttttctgttctcgggtcggatctgaggctggctccattcgggtcgggtagaagaacctgccccggaaagactttgggtttgagcaccgtgactttctgggtggcgaggctttgcacgagtttgaatggctaccatctgatgaggggaaggttgatctaacggaggtgctgaggctctcgtgtgaaatggctaacccgctctat

SEQ ID NO: 286066 - DNA, 267 bp, Glycine max
gagaccggaagcagcaatggggatcgatctcaaggccggaggtaaaagcaaaaaaaccaaaagaacagcacccaagtccaatgatatctatcttaagctcttggtcaagctttatcgcttccttgttcggagaactggcagcaaattcaatgccgttatactcaagagattgttcatgagcaaggttaacaagcccccattgtctttgtcaaggttgattaagtataccaaggggaaggaagataagatgctgtggtggtgggcaat

SEQ ID NO: 286067 - DNA, 266 bp, Glycine max
ccagcactgagcttaaccgagcttcacaaagatgaatcgggaaaaattgatgaagatggccggttcggttagaactgggggaaagggcaccgtgagaagaaagaagaaggctgtccacaagacaacaaccacagatgacaaaaggcttcagagcaccctgaagagaataggggtgaatgccatcccggctattgaggaggtcaatatctttaaggatgacgtattatccagtttctaaatcccaaagttcaagcatccattgctgc

SEQ ID NO: 286068 - DNA, 263 bp, Glycine max
  unsure (1)..(263): unsure at all n locations
gtttttatttctctcttctctctgcatcgcttcaggttcttctgaaaagatgtctcgcgtgtatgttggtaacttggattcacgagtcaccgagagagatctcgaagacgaattccgtgttttcggagttattcggagtgtttgggttgcacgtagaccacctggtcatgcttttattgactttgatgaccgcagagatgcacaggatgctatccgtgaattggatggcaagaatggttggagggttganctttctcacaact

SEQ ID NO: 286069 - DNA, 265 bp, Glycine max
atcccatcttccatttccatcttcaatatttcttctcatcgagaagcttcgcgaacgaaaacaaagaaccctagacagatccattccatagccatgtcaggtgttggccctctatctcaggattgggaacccgtcgtcctccgcaagaaggctcccaccgccgccgccaagaaggacgagaaagccgtcaacgccgcccggcgctccggcgcggaaattgaaaccctaaaaaagtataatgctgggacaaataaagcagcatcta

SEQ ID NO: 286070 - DNA, 266 bp, Glycine max
ggctaaccaaccctgacactccttcttctccgcttcctcttcgatcatccgcttcagaatgccgccgaagtttcgacccctcccagatcgtcgacgtcttcgtacgcgtcaccggcggtgaggtcggcgcggcgagttccctcgccccgaagatcggtcccctcggtctctcccccaagaagatcggagaagatatcgccaaggaaaccgccaaggactggaagggcctccgcgtcaccgtcaagtcaccgtgcagaaccgtcagg

SEQ ID NO: 286071 - DNA, 261 bp, Glycine max
ctccagctatgttttgcgggtattattgtgatgtgtttggatgagctccttcaaaaaggctatggcttgggatctggaatttctctgttcattgccactaatatatgtgaaaacatcatatggaaagcatttagtcccaccaccattaacagtggacgtggagctgaatttgaaggtgctgtcattgctctattccatttgttgataactagaacagacaaggttcgtgcccttcgtgaagcattttaccggcaaaacctt

SEQ ID NO: 286072 - DNA, 265 bp, Glycine max
  unsure (1)..(265): unsure at all n locations
cgcataataaccgtcctaagtntattgagagaattttgcaagtgtgagaaacatggcatctcgtcaaaacaacaagcaacnccttgatgnaagagcanggnaangaganacngntgncccgggtggaactngtngcaanaacctngangctcancancancttgntgnaggaaggagcaacggagggcanncnaggnaggaacagctgngtacccgagggtacaggaaatnggacgcnaaggagggttnagcatgnccgacaaat

SEQ ID NO: 286073 - DNA, 264 bp, Glycine max
  unsure (1)..(264): unsure at all n locations
gcaattacagctgatgagcaagtaaagggttatggtacccgattgatgaatcacttaaaacagtttgcacgtgatatggatgggctgacacatttcctcacatatgctgacaataatgctgttngctattttatcaaacagggatttacaaaagngattcacttggagaaagatcganggnaaggttatataaaggattacgatggaggattctcatggaatgccaagattgatccaaagctcccttacactgatttgtcaact

SEQ ID NO: 286074 - DNA, 215 bp, Glycine max
  unsure (1)..(215): unsure at all n locations
gtgggtatgccaaagtgggcatgcttgatgcatcttctactacttaaaaatanaagcttatgatgcatctactgctttaaacaaaagagtgctccactacgcaacttttgtttccaacttatagttggttacgttttatgtaaactcaacccatgnatgttttggagcattccagtnaatacaaaatgtttctatacaannnanannnaaaaaag

SEQ ID NO: 286075 - DNA, 264 bp, Glycine max
  unsure (1)..(264): unsure at all n locations
aaccaagttaatgttgcaatcgcataataataaccatccaaagtttattgagagaaatttgcaagtttgaaaagaaacatggcatctcatcaacaaaacaagcaagagcttgatgaaagggcaaggcaaggagagactgttgttccgggtggcactggtggcaagagccttgaggctcagcaacatcttgctgaaggaaggagcaggggagggaaacaangnangagcagctggggacagaagggtaccatgaaatgggacgca

SEQ ID NO: 286076 - DNA, 268 bp, Glycine max
  unsure (1)..(268): unsure at all n locations
gagaganagaagaaagatggctccgaatcttgaatgtcgcatgtacgaagcgaagtacccggaggtggacatggcggtgatgatacaggtgaagaacatagcggacatgggggcctacgtgtcgctgctggagtacaacaacattcgagggaatgatcttgttctccgagctctcccgncgtcggattcggagcgtgagagcctcatcaaggttggacgaatcgagccggtgatggtgctccgtgtcgacaaggaaaaggggttacat

SEQ ID NO: 286077 - DNA, 269 bp, Glycine max
  unsure (1)..(269): unsure at all n locations
cttttgtttcgcaacatggttgccgctaagaaaactaagaagacccatgagagcatcaacaacaggctncgctcttgtcatgaagagtggcaaattcaccctcggttacaagaccgttctcaaatctcttaggaactccaaaggaaaattgattatcattgctaacaactgcccccctttgagaaagtcagagattgaatactatgctatgttggcaaaggttggagttcatncattacaatgggaacaatgtggatttgggcactgct

SEQ ID NO: 286078 - DNA, 263 bp, Glycine max
  unsure (1)..(263): unsure at all n locations
agttctttatctatgttgcttcttatttgctttgtatgtgtgtggtttaattaggccttaagagatgtgggaaaagctgtcgtcttagatggctgaattatcttcgcccaaacatcaaacatgggggtttctcagaagaagaagacaacatcatctgcagcctctatgtncagtattggaagcaggtggtcaattatagcagcacagttaccagggcgcacagacaatgatatnnagaatattgggaacactaagcnggagaa

SEQ ID NO: 286079 - DNA, 267 bp, Glycine max
tcccgcagcagccatggttctcaaaactgaactatgccgattcagtggtgccaagatctacccaggaaagggcatcagatttgttcgtggtgattctcaggttttcctgtttgcaaactcaaaatgtaagaggtatttccacaatcgcctgaagccttcaaagctcacctggactgcaatgtacagaaagcaacacaaaaaggacattgctcaagaagctgtgaggaagaggagactgctgcccaaaagcttactctagggtccatg

SEQ ID NO: 286080 - DNA, 262 bp, Glycine max
  unsure (1)..(262): unsure at all n locations
gcttcttcgtttctatccgcagcttcgcacgctgtctcaccctcttgttctctgtccaccacgcacaaggganagcccatgcttggaggcaacactttgagatttcacaaaggacccaattccttctctagttcaaggtctagaggtcggatctctatggctgttgcagttaatgtatctcggtttgaaggcatacctatggctcctcctgatccaattctcggagtttccgaggcgtttaaggcagacaatagtgatgtca

SEQ ID NO: 286081 - DNA, 265 bp, Glycine max
  unsure (1)..(265): unsure at all n locations
agggtttgcggtttcagagtttgtgacgcacgcatccatggccaccaccaccaacgccgccgcagccccgccgcgccagttctncccagaaggaagccgacatccagatgatgttagccgccgacgtccacctcggcaccaaaaactgcgacttccaaatggaacgttacatcttcaagcgcccgcaacgacgggatttacttattaacttgggaagacatgggagaagctttcagttagcagtagggttattgttgccattgag

SEQ ID NO: 286082 - DNA, 269 bp, Glycine max
  unsure (1)..(269): unsure at all n locations
cagagttcatgggatattacatacccaaagacacgcaggttttcgtgaacgcgtgggcgattgggaganaccccagcgcctgggatgaaccattggtcttcaagcccgagcgattttctgagaataataatattgattacaagggggcaccacttccgagtttattccgttcggggctggaagaagaatgtgtgccggngtgccnttggcgcatagagtggtttcaattggtgctngggatcatgcttcacgtttcgattgggactgac

SEQ ID NO: 286083 - DNA, 261 bp, Glycine max
cacctaatcacttccccacttcccctgtaaatcacgtttagttcgcacaaggttttaaaaaatggctgatgctgaggacattcaacctcttgttgttgataatggaactggaatggtcaaggcgggttttgcaggtgatgacgctcctagggccgtgttccccagtattattgggcgaccacgccataccggtgtaatggttgggatgggtcagaaggatgcttacgtgggtgatgaagctcaatcaaaaaggggtatact

SEQ ID NO: 286084 - DNA, 263 bp, Glycine max
  unsure (1)..(263): unsure at all n locations
aagaatcaaagaaaggggtggtggctgcttcgaaagcttaataatttgtttatttccagaacatcatagttttcgcagcagcaaactaacaaattactcatatcatataataagatggcccgttctctctcgcaagccaaacgtattggtgtccttgttgctcaatctatcncccctaattcccgttcatcggcgaggttacgcagtgggcatccgatgtatcggtaagagttgggattgggtaatatggggcgaagnatgga

SEQ ID NO: 286085 - DNA, 261 bp, Glycine max
  unsure (1)..(261): unsure at all n locations
ccacgttattctctctccgagcttcactctcttttcgcctctgctaaagggagaaaaatggggttctcctcctttctgggtcgtgttctctttgcctccctcttcatcctctccgcatggcagatgtttaatgaatttgatgccaatggtggacccatctcgaaaganttgattcccaaactcagtgtggtgaagaataatttatcctctaaattgggggtagcgctacccagatatgatgccggcaattcattgctaaca

SEQ ID NO: 286086 - DNA, 263 bp, Glycine max
  unsure (1)..(263): unsure at all n locations
cagaagnagcgttctttcggagagttcgaagatgtcgggcgttaccaacaacaacgaggaagacaagaagccaaccgaacagggagcacacatcaaccttaaggttaaggggcaggatgggaatgaagtttttttcaggatcaagagaagcactcaattgaagaagcttatgaatgcttacnaagancgacagtcggtggatttcaactccattgcttttctgtttgatggacgccgcctccgagtgagcagactccagatga

SEQ ID NO: 286087 - DNA, 262 bp, Glycine max
  unsure (1)..(262): unsure at all n locations
gtgagaaacaaagaaaggaaataattgatctttgaaaatgcagggaggaaagaaagctggagagtccatcaaggaaacagctgcaaacattggtgcttctgccaaggctggcatggagaaaaccaaggccactgttccaggagaaggcagaaagaatgacggcactgatccgatgccaaaangagntggcaacccagaagaaagaggcaaagatgagccaggcagagctggacagcaggcggcgcgtccagcattaacacgg

SEQ ID NO: 286088 - DNA, 261 bp, Glycine max
atgtgctgtctttcaacactgggcattggtgggatcatcaaggctctcttcaagggtgggattatatggaattaggaggcaaatactaccaagatatggatcgtttagcagctttggaaaggggtataaaaacatgggctaattgggtggactccaatattgatagtagcagaaccaaagtgttcttccgggaatttctccttcacataccaacccaaatgaatggaattctggagtgacagcaggactgacccacaaaga

SEQ ID NO: 286089 - DNA, 273 bp, Glycine max
  unsure (1)..(273): unsure at all n locations
agaaacaggttaaaaggactaaaganatacttagtgctaacacagcagctcctatttcagttgaatcgcttcatgatgacgtcgacttcaggagcacaataacccgtgaganatttgaagagctttgtgaagacatttgggaaaaatcgctcttncctgtgaaagaggtgctgagcaattctgggcctgtccatggaaacaaatattatgcagtggagtngattgnaggtgccacaagagtgcccaaattacaggnaagncttccaggatttc

SEQ ID NO: 286090 - DNA, 259 bp, Glycine max
  unsure (1)..(259): unsure at all n locations
cagtttctcctcgttgttcttcgctttcctgttttcaatttcgattctttcgttaatttaataagatgtttgggagggcaccgaagaagagcgataatacgaggtactacgaaatcctcggcgtctccaagaacgcttcgcaggatgatctgaaganggcttacaagaaagccgccattaagaatcaccccgacaagggcggtgatcccgagaagtttaaagagctggcgcaagttatgaggttctgagtgaccctgag

SEQ ID NO: 286091 - DNA, 259 bp, Glycine max
ctcattctccctttcctctccgaaccctcgatcactctcacgcgctcctatattcgctcctccaccgtcgctctctcgaacaaccacaacaccatcttcatcacatggcaaacgcagcatctggtatggcagtccatgatgactgcaagttgaggtttttggagctgaaggcaaaaaggacacaccgtttcatagtttttaagattgaggagcagcagaagcaggtcattgtggagaagcttggtgagctgcccagggc

SEQ ID NO: 286092 - DNA, 260 bp, Glycine max
gttttctcttcttcgttcgtttcgttgaaaagcgactttttctctctgcaactctcccttttcttccttcgtagatcgaaagggaatcttcttccatggcctccaagcggattctgaaggagcttaaggacctccagaaagaccctccaacctcttgcagcgccggtcctgtagcggaagatatgtttcattggcaagcgactataatgggtccccctgatagccctttatgctgggggtgttttcctagttactattca

SEQ ID NO: 286093 - DNA, 258 bp, Glycine max
  unsure (1)..(258): unsure at all n locations
ggcaatgactggtttgagaagcaaactggtggcacattggacatttcttgctcctcatggatggattggttctttggtggcttgcaattccagcttgagcaccatttgttcccaaggcttccaagggcacaattgaggaaaatctcacctttggtgattgatctttgcaagaagcacaatttgccttacaggagtttgacattgttgaggccatctttggacctcttaagaccctcaggactgtgcncttcaggccag

SEQ ID NO: 286094 - DNA, 265 bp, Glycine max
gtgcagatgaacttaacaggtcttccaagaaaaattcagtcgcaaaacactacatagaattttggaaagccattcctccaaatgaaccatatcgtgtgctactgggtgaagtaaggaataggctttaccagactcgtgaacgctcacgccatttgctagctcacggatactctgacattccagaggaagagacttttaccaatgttgaggagttcttggaaccccttgaactctgttacagatcactctgtgcttgtgggggtcg

SEQ ID NO: 286095 - DNA, 269 bp, Glycine max
  unsure (1)..(269): unsure at all n locations
agggaagaagatggtgtcaggttctggaatctgcgcaaagcgagtggtggtggacgctcgccaccacatgttgggtcggctagcgtccatcgtggcgaaagagcttctgaatgggcagaaggttgcggtggtgcgctgcgaagagatttgcatctccggcggtctggtgangcagaagatgaaatacttgagattcctncgcaaacgcatgaaccaccaaaccctccccatgggccctatccattccgggccccagccaagatctttgg

SEQ ID NO: 286096 - DNA, 268 bp, Glycine max
  unsure (1)..(268): unsure at all n locations
aaacaaaacagagcaaagagagagtgtgtgaaaagtganacaaaaaacagaccaacaatggcgacacttaaggttcctcagcctcttccccccgttgcagatgattgtgagcagctccgaaaagccttctcaggttggggaactaacgaggagctgattgtatcgatcttggctcataggaatgctgctcagaggaagcttatcagagaaacttatgcccagacctatggagaagatctcctcaaggccttggacaaagaactcacga

SEQ ID NO: 286097 - DNA, 267 bp, Glycine max
  unsure (1)..(267): unsure at all n locations
gaaaggctccgatgggaaaattgatgcatttgtttctgggataggcactggtggtacaataacaggtgctggaaaatatcttaaagagcagaatccgaatataaagctgattggtgtggaaccagttgaaagtccagtgctctcaggaggaaagcctggtccacacaagattcaagggattggtgctggttttatccctggtgtcttggaagtcaatcttcttgatgaagttattcaaatatcaagtgatgangcnatagaaactgc

SEQ ID NO: 286098 - DNA, 269 bp, Glycine max
  unsure (1)..(269): unsure at all n locations
acaaaaccaagttaatgttgcaatcgcataataataaccatccaaagtttattgagananntttgcaagtttganaaganacatggcatctcatccaacaaaacaagcaagagttgatgaaagggcaaggcaaggagagactgttgttccgggtggcactggtggcaagagccttgaggctcagcaacatcttgctgaaggaaggagcaggggagggaaaacaaggaaggagcagctggggacagaagggtaccatgaaatgggacgca

SEQ ID NO: 286099 - DNA, 270 bp, Glycine max
  unsure (1)..(270): unsure at all n locations
cacatgtgccagaagtagataggaaaaatccttctggtcgcnaaacgttatctgctgtttctgttgcaaggacatcagcatctgacggatacaactggcggaagtatggtcagaagcaagtgaagagtcctacaggttctcgaagctattacaggtgtactcattcagactgttgtgctaagaagattgaatgctgtgatgattcaggtcatgtgatagagattgtttataaaagtgagcacagtcatgatcctccgcggaagactaatt

SEQ ID NO: 286100 - DNA, 267 bp, Glycine max
  unsure (1)..(267): unsure at all n locations
aaccattcaaaatattgttgggantagactccccaaattcactagtgaagnagttaaaatcgtgaagggttcgattgattttgttggaatcaaccagtatactacgttcttcatttatgatcctcatcaatcaaaacctaaagtcccaggctatcaaatggactggaatgcaggatttgcttatgcanagaatggagtgcctattggtcctagagctaattcttattggctttacaatgtaccatggggcatgtacaaatcattgat

SEQ ID NO: 286101 - DNA, 267 bp, Glycine max
ctgcattgatctgtgtatgcatgctcacatctgttttgggttgatgatcatgataacatgaaagatggagagagggtcctattatgtcttaagcgggctttaagaattgcaaatgcagcccaacaaatggcaaatgcagcacgaggtagcaccggatcagtaatgctcttcattgagatattgaacaagtatctttacttctttgagaagggaaacctacaagtcaccgttgcggctatccagggcttaattgagttaattatgaat

SEQ ID NO: 286102 - DNA, 267 bp, Glycine max
  unsure (1)..(267): unsure at all n locations
gntgcatgtgccgtggctggaattatgtctgatgctancatcctaatcaatactgctagagttcaggcacancgctacacgtatgcttaccaagagccaatgccggttgagcagttggttcaatctctttgtgacactaagcaaggttacacacaatttggtggtcttcgtccatttggagtctcgttcctctttgctggctgggacaagaattttggctttgaactttacactagtgaccccagtggaaattatggtggttggaaa

SEQ ID NO: 286103 - DNA, 273 bp, Glycine max
  unsure (1)..(273): unsure at all n locations
tccagggctctcacccctttgatgnnatactttactgcaacattggaaatcctncagtctcttgngccagcagccaataacttttttccgagangttcttgcattatgtgaccatccagctatattagacaaaagtgaaacacagggtttgttcagtaccgacgcaatacagcgagcttggcanattgtggatcagattcctgggagagcaactggtgcctatagccatagtcagggtgtcaagggcttgcgtgatacaatagctgctggaat

SEQ ID NO: 286104 - DNA, 268 bp, Glycine max
cagaggagcaggtgaaggaacttggagttgaataccgtgttggcaagttcccgttcatggctaatagcagagctaaggcaattgacaatgctgaaggactggtgaagatattggctgaaaaggagacagacaagatattgggagtgcacattatggcacccaatgcaggagagcttattcatgaagcagcaatagcactacagtatgatgcatctagtgaggacattgcacgtgtgtgccatgcacatccaacaatgagcgaggctgt

SEQ ID NO: 286105 - DNA, 269 bp, Glycine max
  unsure (1)..(269): unsure at all n locations
ccgccacttctgaatctattgaatcaacaatcatgtcggacgaagagcaccatttcgagtccaaggccgacgccggagcctccaaaacctaccctcagcaagccggtaccatccgcaagaacggctacatcgtcatcaaaggccgcccctgcaaggttgtggaagtttcgacttccaaaactggaaagcacggtcacgctaagtgtcactttgttggnattgatattttcactgccaagaaacttgaggatattgtgccctcttctcac

SEQ ID NO: 286106 - DNA, 232 bp, Glycine max
aacagaagaacaaccaccaccacacacaatgggtcgcgtgagaacaaaaacggtgaagaaatcctcccgccaggtgattgagcgttactactcgcgcatgaccctcgacttccacacaaacaaaaagcttctcgaagaagtggccatcatcccttccaagaggctgcggaacaagatcgcgggtttctccacgcatctcatgaagcgcatccagaagggtcccgttcgcggc

SEQ ID NO: 286107 - DNA, 269 bp, Glycine max
  unsure (1)..(269): unsure at all n locations
ccactggatgccagaagaagctcgagatcgacgacgatcagaaactacgagcattttgggacaagaggatctcacaggaggnccagcggagatgcacttggtgaggaatttaagggctatgtcttcaaaattactggaggttgtgacaaacaaggattcccgatgaaacagggagtgcttactcctggtcgtgttcgacttttgcttcacaggggaactccttgcttccgtggatatggaaggcgtaatggagaacgtaggagaaagtc

SEQ ID NO: 286108 - DNA, 270 bp, Glycine max
  unsure (1)..(270): unsure at all n locations
gaaacataccgaatganagcatcaaactcttcttcttcgatttccattgcgaangttaannnnnnnnnnnnnnnnnnnnnnnnnnncttcgctcttcgatcttcgtccggggactgctccgaataccaccaccaccactcgccgatggccacgatcggaggcttacacgactcccaaggctctcaaaacagcgtcgaaaccgaagccctcgctcgattcgccgtagtcgaacacaacaagaagcagaattcgcttctggagtttgctagg

SEQ ID NO: 286109 - DNA, 266 bp, Glycine max
  unsure (1)..(266): unsure at all n locations
gcttctccgagangtcctcctccgaatcgaggcctccgaggacacgtggccgccgcggaagagcgtcgtctcctgcgccggcgtctgccgcagctggagacatatcaccaaanacattgtcaaaacgcccgaactctcctccaagatcaccttccccatttctgttaaacagcctggcccaagggagaatctcctacggtgctttataaagcgcaaccggtccacccaaacatactatttgtttctcagtttaaccagtacgctag

SEQ ID NO: 286110 - DNA, 268 bp, Glycine max
  unsure (1)..(268): unsure at all n locations
gcagcagaagcacatgccctaccagggcggaatatcgttccacaaatcaaagggtcngcacattctcaagaaccccttgctccgtcgattccattgtggagaaggccggcgtcaagagcaccgacgtcatcctcgagatcggtcccgggaccggtaacttgacgaagaagcttctcgaagccggcaagaaggtcatcgccatcgagatcgatccccggatggttctncgagctccagagacggttccagggtacccctcactccaatc

SEQ ID NO: 286111 - DNA, 265 bp, Glycine max
  unsure (1)..(265): unsure at all n locations
ggacatttgatgtgtctttactcaccattgaggagggtatctttgaggtgaaagncactgctggtgacacccatcttggaggtgcnggtnttgataacaggatggtgaaccactttgttcaagagttcaagagananaacaagaaggacattagtggnaaccccagagcacttagaaggttgangactgcttgtgagagggccnagagaacactttcatcgactgctccagaccaccattgaaattgatctctatacgagggatt

SEQ ID NO: 286112 - DNA, 263 bp, Glycine max
  unsure (1)..(263): unsure at all n locations
cttctcttgcggctagggttttagcgcanttcttctagatttnangaagatgggtaagganaaggntcacatcagtattgnggntattggccatgttgactctgggaagtccactaccactggccacctgatctanaagcttggnggcattgacaagcgtgttatnganagatttgagaangaagctgctgagatgaacaagaggtctttcaagtatgcctgggtgcttgataagcttaaggctgagcgtgaannaggatcac

SEQ ID NO: 286113 - DNA, 265 bp, Glycine max
  unsure (1)..(265): unsure at all n locations
gggtccgaagttggagatagtgattctggttctgttctgttcttctttctactcacaacaacatcagaatcagaaacaacaatggccaacactaacttggaagatgttccctctctggatctcatgactgagctccttcgtcgtctcaagtgctcttccaaacctgacaagcgtcttattctcattggcccacctggatctggaaaaggcacccagtcaccaatcataaaagatgagtactgcttatgccacttagntaccggtg

SEQ ID NO: 286114 - DNA, 266 bp, Glycine max
  unsure (1)..(266): unsure at all n locations
gcttcccttttccccttttgtgctcgcaattgaccgtcgaatccaatcctgaaatcccccantaaatagagaagcnaagaaaccaaaccaaaccatcgagtgcgttgcgcccccaccgtaagtagagctatgtcgttgcgcaggcgaaccttgctcaaggtcattgttctcggcgacagcggggttgggaagacctcgttgatgaatcaatacgtgcacaagaagtttagtcagcaatataaggctaccattggagctgnttttgt

SEQ ID NO: 286115 - DNA, 265 bp, Glycine max
  unsure (1)..(265): unsure at all n locations
gatcaaacccgcatgtggaaggttggggagcgtgtccgatctacaaggccagcaggtgatcaaggcccattatatcctttcactgctggtgtctttgtggcattgatgatggcccagattgaaatcctgaggaagaaagggcattcctactctgaaatcattaatgagagtgtcattgaggctgtnnactctttgaatcctttcatgcatgctcgtggtgtttctttcatggttgataactgttcaaccacggctaggttgggtt

SEQ ID NO: 286116 - DNA, 269 bp, Glycine max
cgagaatcatcgaataaaactagggtttccgatcgtcgtcgaggagaatgccgaagaacaagggaaagggaggaaagaaccggaagcgcgggaagaacgaggcggacgacgagaagcgggagcttgtgttcaaggaggacggccaggagtacgcgcaggtgctccggatgctggggaacggccgctgcgaggcgatgtgcattcgacggcaccaagcgcctctgccacatccgcggcaagatgcacaagaaggtctggatcgccgccgg

SEQ ID NO: 286117 - DNA, 272 bp, Glycine max
  unsure (1)..(272): unsure at all n locations
tgttctgttctgtnctgnnacatctcgtnaatcgnttanaanttcttaaccgtnttctgttgcagctgggcttctncgtttatntaccgcagcttngcacgctgtntcacnctcttgttctctgtnnaccangcacaagggaaagcacatgcttggaggcaacactttgagatttcacaaaggncccaattccttctctagttcaaggtctagaggtcggatctctatggctgttgcagttaatgtatctcggtttgaaggcatacctatng

SEQ ID NO: 286118 - DNA, 264 bp, Glycine max
aggatttcaaagtcccacacgtgaaccacgttagtcgtccatcataacggcttcctgtggcacacgtgtggtgattgttctctcggatgcggtgcatgcagtgaacgtgggtggtctagtgcccccacattgttccttaaaatcggttgtcccggatgacgcttgccctggcgcttgctttgttcaacgcgatgctactactcttagttagctagcgctggcaatgctcgtggcaggtgcttggtcataacggagctacctggt

SEQ ID NO: 286119 - DNA, 264 bp, Glycine max
  unsure (1)..(264): unsure at all n locations
ggccaccgttccagggcagctcgngtgggagatcgtcaagaaaaacaattccttcttggtcaagcagtttggaaggggcacccagagcgtcgaattcagcagagagagcaacaatctctacaacctcaattcgttcaagtactctggtttggcaaacaagaaaactgttactgttcagcctgagggcaaagatcaggctgtgttgttggctacaaccaagacaaagaagcaaaacaagcccgctgcattgctccacaaatctgt

SEQ ID NO: 286120 - DNA, 264 bp, Glycine max
caactctgcttcccctggcaaccttcttcttagttctctccgcttcttatctccagattgctggggcgaaagcacaaccgttgactagtctcaagcttaactctccgatccttcaggagtctattgctaaagagatcaatgaaaatcctgaggcaggatgggaggctgctataaatcctcatttctccaattatacagttgaacaatttaagcgccttcttggagtcaaaccaacgcctaagaaggaactgagaagtacacctg

SEQ ID NO: 286121 - DNA, 264 bp, Glycine max
  unsure (1)..(264): unsure at all n locations
cttcttctcttgcggctagggttttagcgcanttcttctagatttnaggaagatgggtaaggnaaaggttcacatcagtattgtggtcattggccatgtcgactctgggaaatccactaccactggtcacctgatttacaagcttggaggcattgacaagcgtgttattgagaggtttgagaaggaagctgctgagatgaacaagaggtcttcaagtatgcctgggtgctggacaaacttaaggctgagcgtgaaagaggaatc

SEQ ID NO: 286122 - DNA, 265 bp, Glycine max
aaattgctttgctgtaagtttctgattcctttcttcagaattccaagttttcatttcgttagggacaaaagattgtgagatagagtatggctggaaaaggcgagggtcctgctatcggaatcgatttgggaacgacgtactcttgcgtcggcgtgtggcaacacgatcgtgttgaaatcatagccaacgatcagggtaatagaactaccccatcctacgtggctttcaccgatacagaacggttgatcggcgatgcggcgaagaa

SEQ ID NO: 286123 - DNA, 261 bp, Glycine max
  unsure (1)..(261): unsure at all n locations
cttagtcccaattttctagggttttattcattttccgatggcttctgcagatgttgagtaccgttgctttgtcggtgggctcgcttgggccactgacgaccatgccctcgagagagccttctctcagtacggcgaaatcgttgaaacgaaggtctgtttgtngcaggcatcacatctgatctcacacgattcggattcggaattttctcgatcccgttctgatctgtgatctctgatctgtttgcgttacttgatcttatg

SEQ ID NO: 286124 - DNA, 264 bp, Glycine max
  unsure (1)..(264): unsure at all n locations
cgcgattcgctcttctcttggaaaagtnaaaaccagaagtacgaacgaaagagaagagcgatttagaagtgagagaagatggggttgtcgttcacgaagctgttcagcaggttgtttgcgaagaaggaaatgnggattctgatggtaggtctcgatgctgctggtaagacaaccatcttgtacaagctcaagcttggagaaatcgtcaccactatccccaccatcggatttaatgttgagactgtggagtacaagaacatcagc

SEQ ID NO: 286125 - DNA, 273 bp, Glycine max
  unsure (1)..(273): unsure at all n locations
gctgatagaagatagggtacacattgcgtgtcgtcctgatgggaaagctactggagaggcatatgtggagtttgtttctgcggaggaggctaagagggcaatgtccaaggataaaatgaccataggatcaaggtatgtggagctgtttccttctacaccagatgaagctagacgggcagagtcaagatcaaggcagtaatcgnggtattttaccttgttttaggtcttttaccttnttctnctggtgctactaataatgttctgattctngcc

SEQ ID NO: 286126 - DNA, 272 bp, Glycine max
  unsure (1)..(272): unsure at all n locations
gggtcatttggcaccgtcttctacagattctggctcatctggaaacttaatcattgatttttactgggggatggaactttatccacgcattggaaaacattttgacataaaagtcttcacaaactgcagatttggaatgatgtcatgggctgttcttgcactgacctactgcataaagcagtatgaagaaaatggaaaagtagcggactcaatgcttgtanatactgcatnaatgcngggnatatntnnaccaagttntcccggngggaacc

SEQ ID NO: 286127 - DNA, 269 bp, Glycine max
  unsure (1)..(269): unsure at all n locations
cttcttctcttgcggctagggttttagcgcanttcttctagatttaaggaagatgggtaaggaaaaggttcacatcagtattgtggttattggccatgttgactctgggaagtccactaccactggccacctgatctacaagcttggaggcattgacaagcgtgttattgagagatttgagaaggaagctgctgagatgaacaagaggtctttcaagtatgcctgggtgcttgataagcttaaggctgagcgtganagaggaatcacaa

SEQ ID NO: 286128 - DNA, 272 bp, Glycine max
  unsure (1)..(272): unsure at all n locations
gatgcattttgtggggtagttcagtactcaaatctttacggaaccgccgtaggatacacaattgcagcttctattagcatgatggcaataaaaaggtccaactgtttccattcttcaggcggaaaagtccatgtcaggtttcaagcaacccatacatgatcggttttggcataatccaaattttatttnctcaaattccagattttcatgaaacatggtggctctccatagttgcagcaatcatgtcttttgtctattccacaattgggctc

SEQ ID NO: 286129 - DNA, 270 bp, Glycine max
  unsure (1)..(270): unsure at all n locations
gtcgttgcagagctgcgcgtcgatctagaaaatggcgaggataaaggtttacgagcttaggaacaagacgaaggcggagtgctgnaccagctgaaggatctcaaggcggagttgccctgctccgcgtcgccaaggtcaccggcggcgcccccaacaagctctccaaaatcaaggtggtgaggctttcgatagcgcaggttttnacggttatttcccaaaagcagaaagcggcgctgagagaggcttacaagaagaagaagtatttgcccc

SEQ ID NO: 286130 - DNA, 265 bp, Glycine max
  unsure (1)..(265): unsure at all n locations
aagaaaacccgccattatctaccaaatggtttcaagaaatttgtcgcncatcatgagnngttccaggtctttcacattgtgcacgacctggaacttctcatgatgcataacaggacatactgtgctgagattgctcacaatgtatccacaaggaagaggaaagacatagttgagagagctgctcagcttgatgttgtcttgacgancaagacggcagactacgtagccaggaggtgantagtccatatnggnngctntncngtcc

SEQ ID NO: 286131 - DNA, 270 bp, Glycine max
  unsure (1)..(270): unsure at all n locations
gagaagaaaagaactcggaatattgggtcaaaaagtaagaggttgcttatcgatagccangatgcgctggagctgaaacttacttgggnagaggctcaagatttgctccgtcctcctccaactgttaagccaagcatngtcatgattgaggatcatgtatttgaagaatatgaagaacctcctgtctttggaaagaggagtatattcgtagttcgatcaactggggtanatgagcagtggatgcagtgtgatagttgctcaaaatggcgg

SEQ ID NO: 286132 - DNA, 271 bp, Glycine max
tctcaacctcaaggcaaccgagcttagattggggcttccaggaacagaagaaattgttgaaaaaccacttcctgcaagtgctagaattaccaacaaaaggcctttgtctgaaacctctgaggagtgtgcttcaaagggttctagtgctccacatgtggaaactgaagcagcccctcctgccaaggctaagatagtggggtggccaccaatcagatcctacagaaagaacagccttcaggagaatgatggtgctgggatttatgtgaaagtc

SEQ ID NO: 286133 - DNA, 271 bp, Glycine max
  unsure (1)..(271): unsure at all n locations
gcggctagggttttagcgcagcttcttctagatttaaggaanatgggtaaggaaaaggttcacatcagtattgtggtcattggccatgtcgactctgggaaatccactaccactggtcacctgatttacaagcttggaggcattgacaagcgtgttattgagaggtttgagaaggaagctgctgagatgaacaagaggtctttcaagtatgcctgggtgctggacaaattaaggctgagcgtgaaagangaatcaccattgatattgcttc

SEQ ID NO: 286134 - DNA, 273 bp, Glycine max
  unsure (1)..(273): unsure at all n locations
gcgtaaccctccaacaacaacacttcctcgtcagaaaatgtctctggtggcgaacgaggntttccagcacatcctgcgtgtgctgaacaccaacgtggatgggaagcagaagataatgttcgcaatgacctccatcaagggnattggaaggagattcgccaacatcgcttgcaagaaggctgatgttgacatgaacaaaagggctggtgagttgactgctgctgagttggacagtgtgatnactgtggtggcgaaccctaggcagttcaagat

SEQ ID NO: 286135 - DNA, 279 bp, Glycine max
  unsure (1)..(279): unsure at all n locations
ctccaacgctatcgagccaaacccaaacgttaactcagacgaaggcanccaacagaagaagaaganacaanatcgaacctctctaaactctccaacgtcgccacccgattcatcgcatttcgcaggctgcaatggcgacgttcgaactgtaccgcaggtcgacgattggaatgtgcctgacggagacgctggacgagatggttcagaacggcactctaagccccgagctcgcgattcaggttctggtccagttcgataagtccatgactgaggctctgg

SEQ ID NO: 286136 - DNA, 272 bp, Glycine max
  unsure (1)..(272): unsure at all n locations
ctcaaccaaccctgaagggaacgctctgcatgctttgagaagcaggctttctgatcccaacaatatgttgcagagttgggacccaacactggttaatccctgtacttggtttcatgttacctgtgactccaacaatcatgtgattcgcttagacttgggcaactctaacgtttctggaactctgggcccagaacttggccagctacagcatctgcagtacttggagctctacaggaatgagataacaggaaannntcctaaggancttggnc

SEQ ID NO: 286137 - DNA, 270 bp, Glycine max
  unsure (1)..(270): unsure at all n locations
cctacctctttttcttctctctcaacaacttcaaccttcttcctcctcgatcatgtctcacttcaagggcaagtaccatgatgagnttatcgccaatgctgcgtacattggcactcctggaaagggtattcttgctgctgatgagtcaacagggacaattggcaagcgtttggccagcatcagtgtagagaacattgaatccaacaggcgagctcttagggagtgcttttcantgctcntggtgtnctncaatatctcagtggtgtcanc

SEQ ID NO: 286138 - DNA, 269 bp, Glycine max
ctcaccgattgctagaatggaatttcgatgctcagtcatctcttttaccattctcttctctcttgctcttgcaggagagagccatgtccatgcatcgctacctgaggaagattattgggaagctgtttggccaaacactcccattcccactgcactgcgagagcttctaaagcctctccctgcaggtgttgaaatcgatgaactccctaagcaaattgatgatacacagtacccaaaaacattcttctataaagaagaccttcatccag

SEQ ID NO: 286139 - DNA, 269 bp, Glycine max
  unsure (1)..(269): unsure at all n locations
gcttttntctggttcatttgatcggacaattaagatatggaatgttgaagacagaacttacatgagtactctgtttggtcaccaaagtgaaattttangtattgattgcttacgcaaagaaagggtactgactgctggacgtgatcgtagcatgcaattgtttaaggttcatgaagagtcacgtcttgtatttcgtgctcctgcatcctccttagaatgctgttgttttgttagtaatgatgaactcttgtctggttcggatgatggac

SEQ ID NO: 286140 - DNA, 144 bp, Glycine max
  unsure (1)..(144): unsure at all n locations
gggcgaaggaatggaatcgtgggagcgtgtagaagagangcctgatacaagagatggttcaaaagcctactcaactgattgggccccagacccagtaacaggttactataggcccattaaccacacccctgaaattgacccggt

SEQ ID NO: 286141 - DNA, 275 bp, Glycine max
  unsure (1)..(275): unsure at all n locations
attcaacacagttagagactgaactgaagctgcaaagcaaggcaaagtaccagcaaactgattggnagcaagattgagcaaaaccaaaggctgttgaaaatcaaccaaattaccaaacaagagattgttctcaaggtccaaatacttgagggacttcatgtaaagcaagctctcaggtatgccaccactgaatgaacagaaaccaagatgtaacttttccagatttgcagagaagttaccactccaagcagnaagtggcccccccaaaccngggc

SEQ ID NO: 286142 - DNA, 268 bp, Glycine max
  unsure (1)..(268): unsure at all n locations
caaaagttataactgacagagactctggaagatcaaggggatttggatttgtcaacttctccaatgatgagtctgcaagttcggcactctctgcaatggatgggaaggatctagatgggcgaacattagggtatcctatgcaaatgatagaccttctggacctcaatctnnnnnnnnnnnnnnnnnnnnttatcgcagtgggggttttggcggcgggtggtgattttgcttctcgcaatggtggttggtgantcaatttttgtgtccc

SEQ ID NO: 286143 - DNA, 271 bp, Glycine max
  unsure (1)..(271): unsure at all n locations
gttgattccaagtttcttcggcaccgggcgaagaaccaacgtcttcgaccccttctccctccgacgtgtgggacccattccatgncttccccggcaccaccgccctctaccgctccgcgctccgagacggcggcnttcgccaacacgcgcatcgactggaaggagacggcggaggcgcacgtgttcaaggcagacctgccggggctgaagaaggaagaggtgaaggtggagatcgaggaggagggaagggtgctgcagataagcggacaga

SEQ ID NO: 286144 - DNA, 273 bp, Glycine max
aaccctaacgcgtgcagagcagagagagacgcagccatggggcgaagacccgcgaggtgttataggcaaattaagaacaaaccataccccaagtcacggttttgccgtggtgttcctgatcccaagatcaggatttacgatgttggtatgaagaagaagggtgttgatgagtttcctttctgtgtccatctggttagttgggagaaggaaaacgtttctagtgaggccctggaagctgctcgtattgcttgcaacaagtacatggccaaattt

SEQ ID NO: 286145 - DNA, 269 bp, Glycine max
  unsure (1)..(269): unsure at all n locations
aagaaaggggtggtggctgcttncgaaagcttaataatttgtttatttccagaacatncatagttttcgcagcagcaaactaacaaattactcatatcatataataagatggcccgttctctctcgcaagccaaacgtattggtgtncttgttgctcaatctatctccctaattcccgttcatcggcgaggttacgcatggcatccgatgtatcggnaanagttggatngggtactnttgggcnaaggaatgacntcgtgggaggtgnc

SEQ ID NO: 286146 - DNA, 266 bp, Glycine max
  unsure (1)..(266): unsure at all n locations
gtcaactttttgtttctgatatcttagggtgtcttagttttccttgccgcaaagtcagaatttgttaaggatgcagatgaagctgctctacttcaagattttttcatttgcgttgagatgcttgtngctgctgttggccacttttatgcatttccatacaaagaatacgctggggctaacataggtggatcccgtgggttgacagctagccttgctcatgctttgangttaaatgacttttaccatgatactgtccaccagtttgc

SEQ ID NO: 286147 - DNA, 265 bp, Glycine max
  unsure (1)..(265): unsure at all n locations
caggaactgtgacagtactaaagggagtgtaaggggggattcactagagagtgctaaaactagtgttagtcggccaagtgatagcagtggcctcagcgatgacagcaactggagcaacattactggtagcgccaataagcctcacaaagganatgatcntaggtggaaggctatccttgccatccgattacgggatgggatnntgggcatgagtcattttaggttactcaaacgactaggatgtggtgatattggaagtgtgtac

SEQ ID NO: 286148 - DNA, 266 bp, Glycine max
ctaattctcatttcttcatcgttcgattcttctcctcctaaagatgcagatcttcgtgaaaactttgaccggtaagaccatcacccttgaggtggagtcctccgacaccatcgataacgtgaaagctaagattcaagacaaggaagggatcccacctgaccagcagagacttatctttgcgggtaaacagcttgaggatggtcgaacccttgccgactacaacatccaaaaggaatccactctccacctcgtgcttcgcctcaggg

SEQ ID NO: 286149 - DNA, 271 bp, Glycine max
  unsure (1)..(271): unsure at all n locations
aaagaatcaaagaaaggggtggtggctgcttcgaaagcttaataatttgtttatttccagaacatcatagttttcgcagcagcaaactaacaaattactcatatcatataataagatggcccgttctctctcgcaagccaaacgtattggtgtccttgttgctcaatctatctccctaattcccgttcatcggcgangttacgcagtggnatccggatgtnaccggnaaagagttgnattgggtanattgggcgaaggaatggaatcgtgg

SEQ ID NO: 286150 - DNA, 272 bp, Glycine max
ctttgatggaaaggagccaaacaagggtgtcaaccctgatgaagcagttgcctatggtgctgcagtgcaaggaagcattttgagtggagagggtggtgaagaaaccaaagacatccttctcctggatgtggctcccctcactctcggaattgaaactgttggtggagtcatgacaaagttgattcccagaaacactgttatcccaaccaagaaatctcaggtgttcaccacctatcaggaccagcagactacagtctccattcaggttttcg

SEQ ID NO: 286151 - DNA, 268 bp, Glycine max
  unsure (1)..(268): unsure at all n locations
tgcagtgtataggagccacgacactagatgaatataggaagcacattgaaaaggatccagctctggagaggcgattccagccagttaaagtgccagagccaactgtcgatgaaaccatacaaatactgaaaggacttagagaacgctatgaaattcaccacaagctccgttatacagatgatgctctcgtagccgntgctcagctgtcacaccaatatattagtgatcgatttttgcccgacanagctatngatttnantggtgangc

SEQ ID NO: 286152 - DNA, 267 bp, Glycine max
  unsure (1)..(267): unsure at all n locations
gaagagcgtcgcagtcgcaaccctaatcagaagaagcgcanttcaagcgagtgacagccaccagccatgggtcgtatgcacagccgcggtaagggtatatcctcttctgctttgccctacaaaaggacacctcctagctggctcaagatctcttcgcaagatgtcgaagaaaatatctgcaagtttgcgaagaaaggtttgaccccgtctcagattggtgtcattctcagagattctcacggtattgctcaggtcaatagcgtcatg

SEQ ID NO: 286153 - DNA, 266 bp, Glycine max
  unsure (1)..(266): unsure at all n locations
caggttatcatcatgaaccatcctggtcagattgganatggatatgcccctgttcttgactgccacacttcccacatngcngtcaagtttgctgaactcatgaccaagattgacaggcgatctggcaaagagcttgagaaggaacccaagtttttgaagaatggtgatgctggttttgttaanatgattccgaccaaacccatggtggttgaaactttctctgagtaccccccanttggtcgctttgctgtcagggatatgcgtca

SEQ ID NO: 286154 - DNA, 263 bp, Glycine max
  unsure (1)..(263): unsure at all n locations
agggggaatgggtggatgggaggtatgatgggtatggaatagagagttgggctagggggagtaaatataaggggtgttataagcaaggtttgangcatgggtttggggtgtataagttttacactggggattcctatgctggtgagtggtgtaatgggcagagtcatggggtgggggtgcaggcttgctctgatgggagttgctatgttggggagttnaagtttggggtcaagcatggacttggatgtnaccatttcagaaac

SEQ ID NO: 286155 - DNA, 265 bp, Glycine max
gccatcgggatatcaagcctcaaaatctattggtcaatccacacactcaccaggttaaattatgtgactttggaagtgcaaaggttttggtaaaaggcgaaccaaatatatcatacatatgttctagatactatagagcacctgagctcatatttggcgcaactgaatatacttcagccattgacatctggtctgttggatgtgttttagctgagctgctgcttggacagcctctgttccctggtgagagtggagttgatcaact

SEQ ID NO: 286156 - DNA, 269 bp, Glycine max
  unsure (1)..(269): unsure at all n locations
gagccgnagatccgaatctacgacgtgggaatgaagaagaaaggcgtggacganttcncgttctgcgtgcacctggtctcgtgggagaaggagancgtctccagcgaggctttggaggcggcgcgcatcgcatgcaacaagtacatggccaagttcgccggaaaagatgccttccacctgcgcgtgagggtgcatcccttccacgtgctccgcatcaacaagatgctatcgtgcgccggggccgacaggctccagaccggcatgagggg

SEQ ID NO: 286157 - DNA, 276 bp, Glycine max
catattctcatttcaatttgcatttgcatttgcgtttcatttggcgttttgtttctttctggaagcttcgttcgggcatcaatggcgtccttcgatgaagctcctcccggaaactccaagaacggcgagaagatcttcaaaaccaagtgcgctcagtgccacaccgtcgacaaaggtgccggccacaaacaaggacccaatctgaatggtttgtttggaagacaatctggtacaactcctggatattcctattctactgctaacaaaaacatggcc

SEQ ID NO: 286158 - DNA, 275 bp, Glycine max
gaaagaattgatcgttgaaaatgcagggaggaaagaaagcgggagagtccattaaggaaacagctacaaacattggtgcttctgccaaggctggcatggagaagaccaaggccactgtccaagagaaggcagaaagaatgacagcactgatccggtgcaaaaggagttggcaacccaaaagaaagaggcaaagatgaaccaggcggagtggacaagcaggcggcgcgttcacataacacggcggccaaacagtccgccaccacggctgggcacat

SEQ ID NO: 286159 - DNA, 272 bp, Glycine max
gtttatagctatggtgttgtcttgctggaactgcttactggtaggaagcctgtggatatgtcacagccaactggacaagagaaccttgttacttgggctaggccaatccttagagataaggagcggttggaagagattgctgatccagacttgggggagagtatccaaaggaagattttgtacgtgtttgcactattgctgcggcctgtgttgctccggaagcaaaccaacgactacaatgggtgaagtggtacaatcacttaaaaggtgcc

SEQ ID NO: 286160 - DNA, 279 bp, Glycine max
  unsure (1)..(279): unsure at all n locations
ggncctttatggaattttctgcgaggnatgtcctattggtacttacaaagatgttgatggttctgatgaacacctttgcattccttgtcctcttgatcttcttccaaatcgtgcaaatttcatatataaacgagggggtgttacaagacggacttgtccatataaatgtatatcagacaaatatcgaatgcctaattgctatacacctctagaggagctcatttatacatttgggggtccctggccantttcagtattgttgtcatcatttattgcttg

SEQ ID NO: 286161 - DNA, 277 bp, Glycine max
  unsure (1)..(277): unsure at all n locations
ttgggtttggaaggcaagggcttgtnttgtcacaatccaagagagaagtaatggcgaacatagacatcgaagggatcttgaagcagcagcagccttatgatgggcgcgttccgaagacgaagatagtgtgtactttgggccctgcttctcgatccgtagaaatgaccgagaagctctgagggcagggatgaacgttgctctttcaatttctctcatggcacccacgatatccaccaggaaaccctcaacaatctcangatgccatgcacaacactgg

SEQ ID NO: 286162 - DNA, 283 bp, Glycine max
cgcttgagctctgcgagatcttgagtcgccgatttgaaaagatgagtaagcttcagagtgatgctttgcgtgaagccatctcaggaatcatgggccgattccaaggagaagaatcgcaaatttgtggagaccatcgaactccaaatcggtttgaagaactacgatccacagaaggacaagcgtttcagtggctccgtcaagttgccccacatcccttcgccccaagatgaaaatttgcatgcttggtgatgctcagcatgttgaagaggcagagaagatagga

SEQ ID NO: 286163 - DNA, 270 bp, Glycine max
  unsure (1)..(270): unsure at all n locations
gagcactttatgaagggctgaaggtaggtgcaacatctgatctgatgctggcatatctcgatttcttccttggtggggatgngaaaagacctgatctgcntcctcgtctttatcaaagatttcccatgtctataatttttggggagatggaagttacatgagtcattctctcttcatagtgataatattcttactagcatcatgagtcagtctgttccaccaactatatggtatcgattagtggctggtcntaatgctcaactacgattg

SEQ ID NO: 286164 - DNA, 273 bp, Glycine max
  unsure (1)..(273): unsure at all n locations
cctagattcagccacagttggaaaaaaaaaaaaagttgttcgagatggcacgtacgaagcaaactgcnccgtaagtccacaggnggaaaggcncctaggaagcagntcgcaaccaaggctgcacgtaagtctgcaccaactactggtgtgtgaagaagccanatcgttatcgtcctggacaccgttgctcttcgngagattaggaantaccagaagagtaccgagcttttgatcaggaagctcccttccagaggctggttcgngaattncnca

SEQ ID NO: 286165 - DNA, 272 bp, Glycine max
ggaaaatcccgccagggctaatggacatatttttaatgtgggaaacccaaacaatgaggttacagttaggcagcttgctgaaatgatgactcaggttagaggattaagtttgattgttctgtacctattagaatttcaacatggtattgggaccattcaacatttattttcgttcaattctgcaggtttattcaaaggtaagtggagaagcacctctggaaaaacctactattgatgtgagctccaaagattttatggtgagggatatgatg

SEQ ID NO: 286166 - DNA, 272 bp, Glycine max
ggaatgacaaaggtgatgctttgaatgctgcatattaccatgtagttaaccccttgaccaacactgctgttggtgctgaagtgacccatagattctcaactaatgagaacactctcactcttggtacccaacatcaattggatccttgaccacattgaaggcacgtgtgaacaactttggcaggacaagtgctctgatccagcatgagtggcgtcccaaatcgttctttaccatatctggtgaggtagacaccaaggccattgaaaagagtg

SEQ ID NO: 286167 - DNA, 274 bp, Glycine max
aggaaataattgatctttgaaaatgcagggaggaaagaaagctggagagtccatcaaggaaacagctgcaaacattggtgcttctgccaaggctggcatggagaaaaccaaggccactgtccaggagaaggcagaaaaaatgacggacgtgatccgatgcaaaaggagttggcaacccagaagaaagaggcaaagatgagccaggcagagctggacaagcaggcggcgcgtcacataacacggcggcgaacaggctgccacgggcaggcacatg

SEQ ID NO: 286168 - DNA, 280 bp, Glycine max
  unsure (1)..(280): unsure at all n locations
ttgtcgttcagttctgaacggaaaagcaccgtcgcaccttccctgaggcttctcttgtctgtncgcgagtnaccatggtgagggttagtgtgctgaacgatgctctgaagagcatgtacaatgctgagaaaaggggaaagcgccaagtctgattcggccatcctccaangtcattatcaaattccttttggtgatgcagaagcacggatacattggagagtttgagtatgttgatgacccacagggctggtaaaatcntggttganttgaacngtagncc

SEQ ID NO: 286169 - DNA, 275 bp, Glycine max
  unsure (1)..(275): unsure at all n locations
attttcttcatccttctctgttctcctagaacttgattacttgaacattccctatgacagatgaggtggttcttctggatttctggccaagtccatttgggatgagggtcaggattgcacttgctgaaaagggtatcgaatatgagtacaaagaagaggacttgaggaacaagagtcctcttctcttacaaatgaacccggttcacaagaagattcccggttctcatcccacaatgggcanacccatttccgantccctcattgctgttcagtac

SEQ ID NO: 286170 - DNA, 267 bp, Glycine max
aggaaagagcattgaaagtgactgaggaagtggagaggcaagtggctgtgactaggcctgtgagaatgcattggactggctgccccaacacttgtggccaggtgcaagttgctgacattggtttcatggggtgcatggctaggatgagaatggtaaggccactgaaggtgtggatattttcctgggagggagaattggaagtgattcacatctagctgaggtgtataagaagggtgtgccttgcaagaacttggtgcctattgtggt

SEQ ID NO: 286171 - DNA, 273 bp, Glycine max
  unsure (1)..(273): unsure at all n locations
gcaacaaatatttctctggaccatatggcgacgatgtaatctttattgccaatgattggcacactgcccttcttccatgctacttgaaatcaatgtaccagaccagggggatttaccaaaacgcaaaggttgcattttgtcttcataacatagcctaccagggtaggcatgcctttgcagacttctctctactcaatttacctcgcgaattcaagggttcttttgacttcactgatgggcatgttaagnccgtgaagggaagggaaacttaaa

SEQ ID NO: 286172 - DNA, 270 bp, Glycine max
cgtctatctgagcaaactgcttcgaagagattgaatgcattaagttacatgaaaaggcagatcaggaatcctttgtgtggaattgtattttcccggaaaatgttggagggtactgacttgggaacagaacagaaacaacttcgcgcactagtgctcagtgccagcagcagcttagtaaaattcttgatgactcagatcttgacaccatcatagatggttacttgggatcttgagatggctgagttcaccctgcatgaagttctggttacc

SEQ ID NO: 286173 - DNA, 274 bp, Glycine max
aagcaactccatccgcaatgggaatcgatttgaaggcaggaggtaagtccaagaagaccaagcgaaccgcccccaaatccgatgatatctacctcaagcttctcgtcaagctgtaccgttttcttgttcggaggactgggagtaattcaatgctgttgtcctcaagcgccttttcatgagcaaggtcaacaagcccccgctatccctctctagattgatccgttacacgaagggaaaggaggataagatagctgtggttgttggtgccgtgacc

SEQ ID NO: 286174 - DNA, 272 bp, Glycine max
aagaatcaaagaaaggggtggtggctgcttcgaaagcttaataatttgtttatttccagaacatcatagttttcgcagcagcaaactaacaaattactcatatcatataataagatggcccgttctctctcgcaagccaaacgtatggtgtccttgttgctcaatctatctccctaattcccgttcatcggcgaggttacgcagtgggcatccgatgtatcggtaagagttggatgggtaatattgggcgaggatggaatcgtgggaggtgt

SEQ ID NO: 286175 - DNA, 267 bp, Glycine max
  unsure (1)..(267): unsure at all n locations
gacaacatgagttatgaggaactacttgcacttggaganagnataggccatgtgagcacaggattgtctgaggatttgatttccaagtatttgacagaaacaatatactgttcatctgagcaaagtcaagaagaagaaactgtgcaatctgtctggaagaatacaagaacatggacgatgttgggacgctgaaagcttgtggacatgattaccatgtgggttgcataaganagtggntgtctatnaagaaagtttgtcctanctgcc

SEQ ID NO: 286176 - DNA, 277 bp, Glycine max
  unsure (1)..(277): unsure at all n locations
taccatgngacttcaaatgagggaatgtatctaatggaagttgaccgagtcttaaggcctggtggatactggattttntctgggcncccaattaattggaaaacatactatccaaacatggaagcggtccaaggnanatctgaagncagtacagacaaancttgaggagttagctgaaagtctttgttgggaaaagcagtacgaacaagggtnatattgctatttgngagaaagaaaatanatgntaaatccctgcaaaagaaantctcccaattct

SEQ ID NO: 286177 - DNA, 271 bp, Glycine max
tttgaagtctcttcaaagtgttgggcagatcattggcgaagttctcaggcctcttgacaacgaacgccttattgttaaagcaagcagcggtcccaggtatgtggttggttgccgcagtaaagtggataaggaaaaattgacttccgggacaagggtggttctcgatatgacaacactcaccataatgcgagctcttcctcgagaagttgatccagtggtttacaatatgttggcatgaagatcctggtaatatcagcttattcagctgttg

SEQ ID NO: 286178 - DNA, 262 bp, Glycine max
catgagaatgcctatggcttggccagatacgctgtcatatgccaggagaatggcctggttcccattgttgagcctgagatccttgttgatggatctcatgacattcacaagtgtgctgccgtcaccgagcgtgtcttgcagcatgctacaaggctttgaatgatcaccacgtccttcttgagggtaccctattgaagccaaacatggtcacccccggatccaattctgctaaggtttcccctcaggtggttgcggacacaac

SEQ ID NO: 286179 - DNA, 241 bp, Glycine max
  unsure (1)..(241): unsure at all n locations
gagggagagtgttgacgctccatcaagatgggtatttctagggattccatgcacaagaggcgtgccactggtggcaagaagaaggcatggagaaagaagagaaagtatgagcttgggcgtcaggccgcaaacaccaagttatcaagcaacaaaactatccggaggattcgtgttcgaggtggcaatgttaaatgganggcnttgaggttggataccggcattactcctggggtagtnaacc

SEQ ID NO: 286180 - DNA, 260 bp, Glycine max
  unsure (1)..(260): unsure at all n locations
ctattacttcatcatgtcgtcgagcacagttggtcaagtcatcaaatgcaaagctgcggtttcatgggangcagggaagccacttgtgattgaagcagtagaggtggcaccaccacaagctggtgaagtgcgtttgagatcctctacacctctntttgccacactgatgtttactctgggaagccaagggccanactccattgtntncncggtatttggtcatggaagctggagggattgtcgagaacgtagtganggtc

SEQ ID NO: 286181 - DNA, 268 bp, Glycine max
  unsure (1)..(268): unsure at all n locations
ccctaatcagaagaagcgcanttcaagcgagtgacagccaccagccatgggtcgtatgcacagccgcggtaagggtatatcctcttctgctttgccctacaaaaggacacctcctagctggctcaagatctcttcgcagatgtcgaagaaaatatctgcaagtttgcgaagaaaggtttgaccccgtctcagattggtgtcattctcagagattctcacggtattgctcaggtcaatagcgtcactggcagcaaaatcccttcgcatc

SEQ ID NO: 286182 - DNA, 110 bp, Glycine max
caagaaatcaccataactactgattatgacattaagggggatcaggagatgatatccatgagttacaagaagctgcctgtccacttgaagcctggaaacaccatattgtg

SEQ ID NO: 286183 - DNA, 268 bp, Glycine max
aagaaaggaaataattgatctttgaaaatgcagggaggaaagaaagctggagagtccatcaaggaaacagctgcaaacattggtgcttctgccaaggctggcatggagaaaaccaaggccactgtccaggagaaggcagaaagaatgacggcactgatccgatgcaaaaggagttggcaacccagaagaaagaggcaaagatgagccaggcagagctggacaagcaggcggcgcgtcacataacacggcggcgaacaggctgccacgg

SEQ ID NO: 286184 - DNA, 269 bp, Glycine max
gtgcaatctggtcctattcctggatttgggaaaaagctcagttcactccttgatacttgtttttcagagtatgatgctgaagccacctattttgatgaaggtgtgagatcttccaaacaaaagcaactacaagaaaaattgttccaacttgtccaaccagcattccaatctgcgctgggacatataagatctggaactttggataaattcaaggaggcatttgacaaggctttgaagggaggggaagggttttctgtggctgctaataa

SEQ ID NO: 286185 - DNA, 270 bp, Glycine max
tgcacacaaaaaatgggtcttcaaatcaaggaaccgctccttttcactcttgtaacaatatcacttatttcaattacaaaactcttgcattcttatttttctatacctttctctccatccaatctttccattgctattgccaccctcatttttgttctaatctcatacaaattttcctcatcctctataaaacactcttccactactctgcccccaggtcctctatctgttccaatatttggtaactggctacaagttggcaatgacctt

SEQ ID NO: 286186 - DNA, 270 bp, Glycine max
attctctctgtgtatttccctacctctcccttcaagatgcagatcttcgtcaagaccctcaccggcaagaccatcacccttgaggtggaaagctctgacaccatcgacaacgtcaaggccaagatccaggacaaggaaggaatccccccggaccagcaacgtctcattttcgccggaaagcaacttgaggacggccgtacccttgctgactacaacattcagaaggagagtactcttcacctcgtcctccgtctccgtggtggcatgcag

SEQ ID NO: 286187 - DNA, 266 bp, Glycine max
  unsure (1)..(266): unsure at all n locations
aggttaagagggtataagcttgtgcaggttagtctctttcagaagcctattgtgaagttgaagttgggggatttgatggctgctactagtaatttcagcgaggagaatgttcttttcacaaccaggacgggagcaacgtataaggctgatcttccggntgggtctgcactcgcggtgaagcggttgagtgtgtgcaggatcggggagaagcagtttgggatggagatgaatcggttggggcaggttaggcacccgaatttggcgcc

SEQ ID NO: 286188 - DNA, 266 bp, Glycine max
cctttacaggtttcaaaaaccagggggaagccctattacaagaatgtgccaggttgtggtagcatctgtccggaagcgaaatctggttgtccctgaggatagtagtctcctatatgagacgccagataagagctctgcaattgaaggaagtcggaaactagagcatagtgatgaactaaagtgtctgatagagcagctgtagcatccgctgctgagagcaaaagtggtgattattctaacaagtggagactttgcacggtgacaca

SEQ ID NO: 286189 - DNA, 264 bp, Glycine max
  unsure (1)..(264): unsure at all n locations
agcctgtcaggacattcaagtggaatagattctgtaagccttgattcctctgaagtgttggtagctgctggagctgcaagtggtactatcaaactttgggacttagaagaggcaaagattgttcgtactcttactggtcataggtccaattgtacatcagtggacttccatccttttggagagttctttgcatctggttcttagacactaatcttaagatatgggacatcaganagaagggttgtatccatacttacaaaggcc

SEQ ID NO: 286190 - DNA, 269 bp, Glycine max
aaagaaagcgggagagtccattaaggaaacagctacaaacattggtgcttctgccaaggctggcatggagaagaccaaggccactgtccaagagaaggcagaaagaatgacagcacgtgatccggtgcaaaaggagttggcaacccaaaagaaagaggcaaagatgaaccaggcggagtggacaagcaggcggcgcgtcagcataacacggcggccaaacagtccgccaccacggctgggcacatgggactggccaccacaccaccgga

SEQ ID NO: 286191 - DNA, 274 bp, Glycine max
cactcacaaacgcacactgaattcaaaaacatcgaaagagagaggcatggccgagcaaaccttcatcatgatcaagccagatggcgttcaaagaggccttattggcgagattattagcagatttgagaggaagggtttttacttgaaagggttgaaactcgttactgtggaccgtccttttgctgagaagcactatgctgatttgtctgcaaagcctttctttagtggtttggtggattacattgtctctggccctgttgttgccatgatctgg

SEQ ID NO: 286192 - DNA, 274 bp, Glycine max
  unsure (1)..(274): unsure at all n locations
caaggtacacggttcgttcctttgggattagaagaaatgagaagattgcatgctatgtcactgtcagaggtgacaaggcgatgcaacttttggagagtggtttgncncgccaaagccaaccagtatcactgaagttcccttctgagaagttcagtgatactggttgctttggctttggcattcaggagcatatgcgatttgggaatcaagtatgatcctcaactggtatttatggaatggacttctttgttgttcggagcgtcctggctatcgt

SEQ ID NO: 286193 - DNA, 268 bp, Glycine max
gaattcccaaggttcaacaactgctgcaggacttctttaatggaaaggagctgtgcaagagcatcaatcctgatgaagctgttgcatatggtgctgctgttcaggctgcaattttaagtggtgagggcaatgagaaggttcaggatcttctcctccttgatgtcacccctctatctcttggtttggagactgctggcggtgtgatgactgtcttgatccctaggaacactacaattccaaccaagaaggaacaggttttctcaacata

SEQ ID NO: 286194 - DNA, 267 bp, Glycine max
  unsure (1)..(267): unsure at all n locations
gtagaggatagtggaattgatggaagtgttacccctttttcttatcctctttgagcagtgcagtgcaaaaccaaatatgggaaacgaacaaaganaggaaataattgatctttgaaaatgcagggaggaaagaaagctggagagtccatcaaggaaacagctgcaaacattggtgcttctgccaaggctggcatggagaaaaccaaggccactgtccaggagaaggcagaaagaatgacggcactgatccgatgcaaaaggagttgg

SEQ ID NO: 286195 - DNA, 265 bp, Glycine max
accaatgccaaggggagagattgtagttggaggatttagtgtgacagctggttactttaagaatcaagaaaaaactaaagaagtgttcaaggttgatgagaagggaatgcgctggttttatactggcgatattgggcaattccatcctgatggatgtctgaaatcatagataggaagaaagatattgtcaaacttcaacatggagaatatatatctcttggaaagattgaggcagcactatcatcgtgtgatcatgtggataata

SEQ ID NO: 286196 - DNA, 269 bp, Glycine max
attgagagtacttatatctatcattgctgcacagattactgtgctgggatccgcgttttgtgttatgctttccatgcatttcacgacgcagttaatgtctcagcatctcttctattggaagaatccgaaagagcaaaaggctattatcattatcatccttatggctcctatctatgcagctgtctcctttgtgggtctcttggatatcagaggaagcaaggagtttttcacctttttagagtcagttaaagaatgttacgaagctttgg

SEQ ID NO: 286197 - DNA, 272 bp, Glycine max
aattcacaaccgaaacagtttccatctctctcacaaaatgacaacaatatcaaattgctcccttctcttcctcttcctcttcctctccaccctccacatagcttccaccctctcaacccccaccaacttcatcaagtcctcctgcagcaccacccagtacccagccctctgcatccagtccctctccgtctacgcctccaccatccagcaagacccccacgagctcgtccagacagccctctccctctccctcaaccacaccgaggccacca

SEQ ID NO: 286198 - DNA, 266 bp, Glycine max
gagagtactcttcacctcgtcctccgtctccgtggtggcatgcagatcttcgttaagacactcaccggcaagaccataaccctagaggttgaaagctccgacaccatcgataacgtcaaggccaagatccaggacaaggagggtatccccccggaccagcaacgtctcatcttcgccggaaagcagctcgaggacggccgcaccctcgccgactacaacatccagaaggaatcaacccttcacctcgtcctccgtctccgtggtgg

SEQ ID NO: 286199 - DNA, 262 bp, Glycine max
aagagtgcaagatctgggatgcctacaatgtgaaggcacaagcatttaagactgccattgaagctgcttgcatgcttctgaggattgatgatatagtgagtgggatcaagaagaaacaggcccctggagccactccttcaaaacccaaggttgagaccgaggcagatgctgacagtgagcaaatccttcccgattgagaatctgtttcaactgacattgttttttggtagagttgatgatgtgttaggttctaatctcctaa

SEQ ID NO: 286200 - DNA, 264 bp, Glycine max
  unsure (1)..(264): unsure at all n locations
tttctcttcctccctggaagaaaaagaagagtcaccgctacgacgccgttcgtgcttttttgaggtgccacagtcatgtttgggcgnngtggaccaaggaggagtgacaactccaaatattatgatattctcggggtttccaaaaatgccagtgaagatgaaatcaagaaggcctatagaaaggctgctatgaagaaccatccagataagggaggagatcctgaaaagttcaaggagttaggtcaagcatatgaagttttaagt

SEQ ID NO: 286201 - DNA, 264 bp, Glycine max
aagtggagcagctacttcaagaaattgagaagtatacacttgcaaatcatctattctggggcgtttggggaataatttcggcacaagtgaacactatcgactttgactacaaggagtatgctaaacagaggtttcaagagtactgggcaaggaaaccttatcttttaataaactctgaagcaccttctccttataatgtgcctgagggtacaggagagctagcctcagcattgcccaccaaatcgaagaactctggtatcttag

SEQ ID NO: 286202 - DNA, 269 bp, Glycine max
aagagaagagatctgcctcctttttccttcccaaatcaaatctatctcttcttcaagttgaaaatggggctgtcgttcaccaagttgttcagccggctgtttgccaagaaagagatgcgtatactaatggtgggtctcgatgctgcgggtaagaccaccattctgtacaagctcaagcttggagagattgtcaccaccattcccaccattgggtttaatgtggaaactgtggaatacaagaacatcagcttcactgtctgggatgttgg

SEQ ID NO: 286203 - DNA, 273 bp, Glycine max
ctcagaagaccaaagactacgccagtgcacactgctcagagaaccaaggaaaaactccaagacattgcatctgaagctggtcaatacagtgcagagaaagctagagaaatgaaggatgcagcagcagagaaggcaagtgacatagcaaaggctgcaaagcaaaaatcacaagaggtgaaagagaaattaggtggacaacaccgggatgccgagctttgagaattgagatgtttgaatcactttgaaccttttaattatgccacaatagttgtc

SEQ ID NO: 286204 - DNA, 267 bp, Glycine max
  unsure (1)..(267): unsure at all n locations
ctcctccgacgagatcaggaccgtctggctcggcgacctccaccattggatggacncgaactacctccacaactgctttgctcacaccggcgaggttgtttcggccaaggtcattcggaataagcaaactggtcagtccgagggatatggattcgtggagttctattcgcgagggacggctgagaaagtcttgcagaactataatggcacgatgatgcccaatacagatcaggcattccgtctgaattgggccacattcagtgccgg

SEQ ID NO: 286205 - DNA, 271 bp, Glycine max
gcacatgtcgaacgggacattgtattcattgttgcataagaatggtggcggtgcattggattggttgatgaggtttaggattgcattgggtgtggccagggggctcgcgtggctgcaccatggctgccaccctccgattatacagcagaacatttgctccagtgtgattcttgtcgacgaggagtttgatgcccggttgatggactttgggcttgcgaggctcatggcttcagactcaaatggtagttttgtgaatggtgatttgggggag

SEQ ID NO: 286206 - DNA, 270 bp, Glycine max
  unsure (1)..(270): unsure at all n locations
gcagttgcagaccgagctagctagctagcaagcaagcacagagatggaggcaaagcgaggccatgccctcatgtgcttggcacgtgtttcactcttcctctgcgctctaaccctatccgctgctcacggaagcaccacggttcaagacatcgcgaganagttgaaactcggggacaacgagcttctgcgcacggagaagaagttcaaggttttcatggagaattacgggaggagctactccacagaggaggagtatttgcgccgtttggg

SEQ ID NO: 286207 - DNA, 267 bp, Glycine max
  unsure (1)..(267): unsure at all n locations
ctccgtaccagtttcactgcataaatttgagagaaaactctgcaanccatgttggtttatcaggacctccttacaggtgatgagcttctctcggactccttccgttacaatgaaattgagaatggaatgctgtgggaagttgaggggaagtgggttgttaagggagcagttgatgttgacattggtgcaaacccttctgctgagggtggagaagatgagggagtcgatgacgcagctgttaaggttgttgacattgttgatacattc

SEQ ID NO: 286208 - DNA, 271 bp, Glycine max
gctgggccggttgtgacgttattgtaccctttgtatgcatcggtggtagcaatagagagccagtccaagttggatgacgagcaatggctagcttattggatcatctattcgttcctcacccttgcggaaatggttcttcaacctatcttagagtggataccaatttggtacgatgtgaaactattgacggtggcatggctggtgttgccacagttcgcaggagctgcgtacttatatgaaaggttcgtgagagagcatataaggaaatata

SEQ ID NO: 286209 - DNA, 274 bp, Glycine max
  unsure (1)..(274): unsure at all n locations
tttacgttacaaatcgcataataaccgtcctaagtttattgagaganttttgcaagtgtgagaaacatggcatctcgtcaaaacaacaagcaagagcttgatgaaagagcaaggcaaggagagactgttgtcccgggtggaactggtggcaagagcctggaggctcagcaacaccttgctgaaggaaggagcaagggagggcaaacaaggaaggaacagctgggtacagaagggtaccaggaaatgggacgcaaaggagggttgagcactgtgg

SEQ ID NO: 286210 - DNA, 264 bp, Glycine max
cctctttttcttctctctcaacaacttcaccttcttcctcctcgatcatgtctcacttcaagggcaagtaccatgatgagcttatcgccaatgctgcgtacattggcactcctggaaagggtattcttgctgctgatgagtcaacagggacaattggcaagcgtttggccagcatcagtgtagagaacattgaatccaacaggcgagctcttagggagctgcttttcactgctcctggtgttcttcaatatctcagtggtgtca

SEQ ID NO: 286211 - DNA, 260 bp, Glycine max
cggaaaagacggtggaagggaccaaggccgccgcccatgttgtcgagggagcggccgggtatgccggacataaggccgcggagttgcttcgatgtcggccggtgctgttaaagggctggctgcttctgctggtgagactgctaaggaatacaccgcaaagaagaaagaggaggcacagcgggaattggaggccaaaaaaccatctcaacctcaggaagctgaagagaggccatcagaaggaattggcgaaactgtgaggc

SEQ ID NO: 286212 - DNA, 227 bp, Glycine max
tgggaggttgggctatcgcggtgcatggtggcgctggtgtggaccctaatcttccactcgagcgtcaagaagaagcgaaacaacttctcacgcactgtctcaatcttggaatctctgctctaaattctaatcttcccgccatagatgtcgttgaacttgtggtgagggaattggaaacggatccgctgttcaattcgggccgtggatctgccctgacagaaaaagga

SEQ ID NO: 286213 - DNA, 266 bp, Glycine max
ctggattcggctgaaaatgctggagtggagctaccttactcatgcagagctggtgcctgctctacttgtgctggccaagttgtttcaggctctgtggatcaggcagatcaatcctttcttgatgaccatcaaattgaaaagggttaccttctgacatgtgtctcatacccgaaatcagattgtgtgattcacacccacaaggaggaagatctcgtctaggtggggttgtgtgtcttttgttagtttctctaagcttgaatattgtg

SEQ ID NO: 286214 - DNA, 266 bp, Glycine max
  unsure (1)..(266): unsure at all n locations
acaganaaaggggttagggtttgttcttgtgatcgaagctaagcgaanaaaatgggtggatcagtgagggacgtgaagtcgaagggcgaggtcgacgaggtggtggcgagtngctctccggttatcctccacttctgggcgtcgtggtgcgaacttnccaagcacatggaccaactcttctctcacctttccactgatttccccaacgcccgcttcttaagggtcgaggccgaagagcaacccgagatttctgaggcttactccgt

SEQ ID NO: 286215 - DNA, 269 bp, Glycine max
  unsure (1)..(269): unsure at all n locations
tcaaagagaggatttgggattgggaaggcgagggattgcgctgcgtctcttcctcttctctttcgattcatccctcattcataatcttccaatccaacaacctcagcctcacactcacacatacacacatctgaacgcgtatcgtccctcccatggcttcaaagcgcatcctcaaggagctcnaggacttgcagaaagacccaccaacttcttgcagcgctggtccagtagctgaggacatgttccattggcaagcaacgattatgggt

SEQ ID NO: 286216 - DNA, 272 bp, Glycine max
cgtcactctctccctgatggtctcatgagggctaccgatgttatgattgctggaaaggtggctgttgtggctggatatggtgatgttggcaagggttgtgctgctgcaatgaagcaggctggtgctcgtgtcatcgtgaccgagattgatcccatctgtgcccttcaggctctcatggaaggccttcaggttctgaccttggaggatgttgtttctgaggctgatatctttgtcaccaccaccggtaacaaggacatcatcatggttgacca

SEQ ID NO: 286217 - DNA, 267 bp, Glycine max
gcaccatctccatgatgatgctcggcgaggctgaggagatcagagacatcgctcgcgaggttcttaagatcttcggcgaatacagcctcactgacttcatctggcctttgaagtatctcaaggttggaaagtatgagaagaggattgatgacatcttgaacaagttcgaccctgtcgttgaaagggtcatcaagaagcgccgtgagatcgtcagaaggagaaagaacggagaagttgttgagggcgaggccagcggcgtcttcctcg

SEQ ID NO: 286218 - DNA, 262 bp, Glycine max
gctgaggcaatcaccaaccctggacttggtaaacgaggtatagagaaaccaccctttcagcttcctgatttcattgctgccactggaattgagaaaatcagacaggcttatattgagaaagaggatagtaagaagctgaaacaaaagcaaagggagcgcatgcaaccaaaaatggggaaatggatatagattatcaggttcttcatgatgcattctttaaataccaaacaaagcctaaactgacctctctggagactgcatc

SEQ ID NO: 286219 - DNA, 263 bp, Glycine max
ctctcgcggctctcagcaataccgcgcattgacagtgccagagctgacacagcaaatgtgggatgccaagaacatgatgtgtgctgcagatccaaggcacgggcgttacctcacggcatcagccatgttccgtggcaagatgagcaccaaggaggtggacgagcagatgataaacgtgcagaacaagaactcttcatattttgtcgagtggattcccaacaatgtcaagtcgagcgtgtgtgacattgctcctagagggctct

SEQ ID NO: 286220 - DNA, 261 bp, Glycine max
aaagatgatggaaaggctctggggtgaaaacttttttgatccagccacaaagaaatggaccagcaagaatagtggttctgctacctgcaagcgtgggtttgttcagttctgttatgagcccatcaagcagattattaacacttgtatgaatgatcagaaggataagctgtggcctatgctgcaaaagcttggggtcaccatgaaatctgaggagaaggacctcatgggtaaagcattgatgaagcgtgtcatgcaaacctg

SEQ ID NO: 286221 - DNA, 269 bp, Glycine max
gtgagctcaatgtcatgttcattgaaactagtgctaaggctgggtttaatataaaggccctatttcgaaaaattgctgcagcactacctggaatggaaacactatcttctgcaaaacaagaagacatggttgatgtaaacttaaagtctacaaatggcagtgctcagtctcaacctcagtcaagtggatgtgcttgttaagtatactttatcatgtgcggtccacctttttgtgtcatgctttttgttttatgcgggtttttctatagt

SEQ ID NO: 286222 - DNA, 269 bp, Glycine max
caatattggcgaggttgcttctatatttttaacagctgcattaggtattcctgaaggattgatacctgtccagcttctgtgggtcaatcttgtcactgatggaccccctgcaacagctttgggatttaatcctccagataaggatataatgaaaaagcctcctcgtcacagtgatgactcattaattaatttgtggattttattccgctatctggttattgggattatgttggattagctacagttggtatcttcatcatatggtatac

SEQ ID NO: 286223 - DNA, 267 bp, Glycine max
  unsure (1)..(267): unsure at all n locations
gtcagttgcaggaaaaatggtttcgctgaaactgcagaagcggctcgccgcgagcntgctcaagtgtggcagaggaaaggtttggcttgaccccaatgaagtcaacgaaatctccatggccaattctcgccaaaacataaggaagctggttaaggatgggtttatcatcaggaagcccaccaagattcactctcgctcacgtgctcgtcgaatgaaggaagccaagaggaaaggacgtcactctggatacggtaagcgtaagggtac

SEQ ID NO: 286224 - DNA, 263 bp, Glycine max
  unsure (1)..(263): unsure at all n locations
tcttgtgggaagtagagataaacaagcgtctganagaaggcacanacaaggggaagaaattcaatgccatttgccacttttttggttatcaagctcgtggatctctgccatcaaaatttgactgtgattacgcctatgttcttggacacatctgctaccacatacttgccgctggtctaaatggatacatggcaactgtaactaacctgaagaatccctgtaaacnagtgggcgatgtggggctgctccatagcatctatgat

SEQ ID NO: 286225 - DNA, 263 bp, Glycine max
  unsure (1)..(263): unsure at all n locations
gaagtttagaggagtttcaggaagagtttaaggatatcaatcaagaggaacagntttcaaggcttcataaaatgttggccccacatctcctgcnaagagtgaaganagatgtcatgaaggagctacctcctaaaaaggagcttattctacgtattgaattgagcagcaaacagaaagaatattataaggcaattttgactcgcaattatcagatattaactcgtcgtggtggtgcacagatttctcttatcaatgttgttatg

SEQ ID NO: 286226 - DNA, 263 bp, Glycine max
ccaattgtttatttcaatgagttctggttactcagggataagctgatacctttaaacgagacagtgactgaattatcacttaacctggaagttggtcccattagtatgacaaagtggcagttattcctgcagattgaccagtccttccagattcaccgtagttatggaagcatgcttgaaggcgaggctgatgaactcaagagggtattcttggaagggaatccttacctcctggcaattaccatggttgtttctcttctcca

SEQ ID NO: 286227 - DNA, 262 bp, Glycine max
gccaaccgtcgttgcctccacccctgagttgttcaagctcttcctccaaacccacgaggcaacttccttcaacacaaggttccaaacctctgccataagacgcctcacttacgacaactctgtggccatggttccattcggaccttactggaagttcgtgaggaagctcatcatgaacgaccttctcaacgccaccaccgtcaacaagctcaggcctttgaggacccaacagatccgcaagttccttagggttatggcccaa

SEQ ID NO: 286228 - DNA, 272 bp, Glycine max
  unsure (1)..(272): unsure at all n locations
gggtgggaaccgcttttggaaatccattgggcttggatttaagactcccagggaagccatcgaaggaacctacattgacaagaagtgccccttcactggcaatgtttccatccgtggccgtatcttggctggaacatgtcacagtgctaagatgaacaggactattattgttaggaggaattatctccattttatcaagaagtaccagaggtacgagaaaaggcactccancattcctgctcatatntcacctgctttccgtgtgaaggaag

SEQ ID NO: 286229 - DNA, 262 bp, Glycine max
gctgaaaagcgtattaaaaagaagggaaagaaaccaatcatagagggggacaaaataaccaagcagaccttgatggaattgactttgaccgagcaactccgggaaagacaggaaatggaaaagaaactccagaagttagcaaaaaccatggattatttggaaagagccaaaagagaagacgctgctcccctgattgaagctgcgtatcaacagcgtctagtggaagagagacttcttcatgagcgtgagcagcagcaagagg

SEQ ID NO: 286230 - DNA, 258 bp, Glycine max
acctgctgaagacttggcattttcagttgcaaggtttatacagaaagggggatcatttataaattattacatgtatcatggaggaacaaatttcggtcgaactgctggtggtccctttattgctacaagctatgattatgatgcaccacttgatgaatatggattgctcaggcaaccaaagtggggtcatctgaaggatttacacagagcaataaaactctgtgaaccagctttagtatctggagatcctactgtaac

SEQ ID NO: 286231 - DNA, 262 bp, Glycine max
cgtctatattcattttggcatcgaggttgaatctcatcggagagagaaaaaccataaccatgtctggaagaggaaagggaggcaagggtctcggaaagggaggagcgaacgacaccgtaaggttctgagggataacattcagggcataacgaagcccgcaattcgccgtctcgcgagacgtggcggcgtgaagcgtatcagtggtctcatctacgaagaaacccgcggtgttctcaagatcttcctcgagaacgtcattcgc

SEQ ID NO: 286232 - DNA, 263 bp, Glycine max
gccggagcaagtttcatcaatgtgtccatgtctaccatcacttctaagtggtttggtgaagatgagaagaatgttcgcgctttattcacacttgcagccaaggtctccccaactataatattcgtggatgaggttgatagcatgcttgggcaacggaccagagttggggaacatgaagccatgaggaaaataaagaatgaatttatgacccattgggatggacttttgacaaagcaaggggagcggatccttgttcttgctgc

SEQ ID NO: 286233 - DNA, 275 bp, Glycine max
  unsure (1)..(275): unsure at all n locations
cgagaacttccgcgcgctctgcaccggcgagaagggcgccgggcggagggcaagcccctcccactacaaaggctcgtcttccaccgcgtgatcccgaacttcatgtgccagggcggcgacntcaccgccggaaacggcaccggaggcgagtcgatctacggcgccaagttcgccgacgagaacttcgtgaagaagcacactggtcccggcatcctctccatggcgaacgccggtcccggaaccaacggatctcagttcttcatctgcacgacgaa

SEQ ID NO: 286234 - DNA, 259 bp, Glycine max
aaataaaatcaccatgtctatcatcccaaacttgttcggtggtagacgaagcaacgtcttcgacccattctctctggacgtatgggaccctttcgaggggtttcctttttccacaggtcacgtgccttcctctggtggggaaagcagtgccatagccaacactcgcgtggactggaaggagactccggcggctcacgtgttcaacgttgatcttcccgggttgaagaaggaggaagtgaaggttgaagttgaagatggg

SEQ ID NO: 286235 - DNA, 260 bp, Glycine max
  unsure (1)..(260): unsure at all n locations
gggagggagccgtagcagcggaagctctagcttgggtagcgaatcacaatggcgagaggattaaagaagcatctgaagaggcttaatgccccaaagcattggatgcttgacaaactgggtggtgcatttgctcctaagccctcatctggaccacacaaatcgaggganntgcctgccactcatactcattttgcgaaaccggctgaagtatgctctaacataccgtgaagtcattgctatnctgatgcagcgacatgtcc

SEQ ID NO: 286236 - DNA, 259 bp, Glycine max
ggggaaacttaccaggtccagacatagtaaggattgacagactgagagctctttcttgattctatgggtggtggtgcatggccgttcttagttggtggagcgatttgtctggttaattccgttaacgaacgagacctcagcctgctaaatagctatgtggaggtaaccctccacggccagcttcttagagggactatggccgcttaggccacggaagtttgaggcaataacaggtctgtgatgcccttagatgttctgg

SEQ ID NO: 286237 - DNA, 264 bp, Glycine max
  unsure (1)..(264): unsure at all n locations
ggctcgtcactccttgctcttagccctcctcctcttcgccgccgtnnnccaccgccgcgatggcggtggcggcgtccgacgccgacgncatcctgatccgtcaggtggtgccagatgttggcgaaggaagaggaggacaacctgctgaacgccgagcaccacttcganagcttcaaggccaagttcgccaagacctacgccaccaaggaggagcacgatcatcgcttcggcgtcttcaagtccaacctccgcagagccaggctg

SEQ ID NO: 286238 - DNA, 271 bp, Glycine max
gcagtggcggcaagcaactccatccgcaatgggaatcgatttgaaggcaggaggtaagtccaagaagaccaagcgaaccgcccccaaatccgatgatatctacctcaagcttctcgtcaagctgtaccgttttcttgttcggaggactgggagtaacttcaatgctgttgtcctcaagcgccttttcatgagcaaggtcaacaagcccccgctatccctctctagattgatccgttacacgaagggaaaggaggataagatagctgtggtt

SEQ ID NO: 286239 - DNA, 259 bp, Glycine max
gctatgcaagtgataatgttaacaagcttttggttggcaacaagtgtgatctggaagcaaatagagcagtgtcatatgaaacagctaaggcatttgcagatggaataggcataccttttatggaaacaagtgcaaaagatgctacaaatgtcgaacaggctttcatggcaatgactgcttcaatcaaggatagaatggcaagccaacctgcaaataatgcaaggcctccaacagtgcagatcaggggtcagccagttgc

SEQ ID NO: 286240 - DNA, 257 bp, Glycine max
gaaagatgtcgaagcgtggtcgtggtggttcggcggggaacaagttccgcatgtccgctgggtcttccagtggcggcgacggtgaactgcgccgacaacacgggggcgaagaacctctacatcatttcggtgaaagggatcaaaggccgtttgaaccgtcttccctcggcctgcgttggcgacatggtgatggccaccgtgaagaagggaaaacccgatctgaggaagaaggtcttgccagctgtcatcgttcgcca

SEQ ID NO: 286241 - DNA, 258 bp, Glycine max
  unsure (1)..(258): unsure at all n locations
ccatataattttcnnttatttganataatgtccgggatcatccacaagattgangagaccctccatgtgggagggcacaaganagaggagcacaaaggagaacaccatggtgagcacaaaggtgaacacaaaggagaacaccatggtgagcacaaaggtgaacacaaaggagaacaacaccatggggagcacaaggagggacttgtggataagatcaaggacaagatccatggtgatggccatgacaagggtgagaaa

SEQ ID NO: 286242 - DNA, 260 bp, Glycine max
agaagagaagctgtttgaattcaaaacagatgaggaacaagttgttgatggacttgatagagctgtattgactatgaagaagggtgaggttgcgttgttgaccattgcacctgattatgcttcggtacatcagagtcccaacaggagttggctgtagttcctcctaactcagccgtgtattttgaagttgagctagtgtcatttgagaaagagaaggagtcctgggatctgaacactgaagagaaacttgaagctgctgg

SEQ ID NO: 286243 - DNA, 256 bp, Glycine max
  unsure (1)..(256): unsure at all n locations
ctcaaatccaagctcgggaacagagaaggagaaagagaatggacgccattgattctgtgttcgatccgttgaganaattcgcaaaggacagcgtgaggctcgtgaagcgctgccacaaacccgatcgcaaagaattctccaaggttgccgtgcgtaccgcaattggtttcgttgtgatgggattcgtgggtttcttcgtgaagcttattttcattccaattaacaacatcatcgtcggatctggttaggatgaagg

SEQ ID NO: 286244 - DNA, 255 bp, Glycine max
agaatctgaaacttggtattcatgaggattctcagaacaagacaaaacttgctgaattgctcaggtatcactccaccaagagtggtgatgagatgaccagcctcaaggactatgttaccaggatgaaggaagggcagaatgacatctactacattactggtgaaagcaagaaagctgttgagaattcccctttccttgaaaagcttaagaagaaggggttcgaggttctctacatggttgatgctattgacgagt

SEQ ID NO: 286245 - DNA, 251 bp, Glycine max
cacgagttgggtctttgcttggcttgtggcttatctgatgggaacatatctgttttcactgcaagagcagaaggtggctgggacactgcaaggattgatcaggctcatccagttggggtcacttcggtgtcgtgggcgccatcgatggcacccggagcccttgtcggtgctgggttgcttgatcctgtacagaagctgtgctctggtggttgtgataatactgtgaaggtatggaagctaaacaatggact

SEQ ID NO: 286246 - DNA, 261 bp, Glycine max
  unsure (1)..(261): unsure at all n locations
cgaggacgaagatgaagataaacctcgtcctagtcgaccaagccaaggaaagcgtgaacaagaccaggaccaggacgaggacgaagatgaagatgaagatcaaccttcgcaagagccgcgaatggagatcgaaaaagacacaacccagaagacctagacaagaagaaccncgtgaaagaggatgcgagacaagaaacggggttgaggaaaatatctgcaccttgaagcttcacgagaacattgctcgcccttcacgcgctg

SEQ ID NO: 286247 - DNA, 262 bp, Glycine max
  unsure (1)..(262): unsure at all n locations
caaaaataggtcttcttcttctctgatctaccaaagcttcaaattctccttagtttggtttgtctgtnagtttggagtgtaatgtcgccgccgacgctggtaacggaggaggaggggcggacaccgtggcgtccgattcttcgcaatccttggactgtttctctcagaatggtgctggattgaaagaacggaattacttagggttgtctgattgctcatcagtggatagctgtgcctctactgtgccaagcttgtgtgatga

SEQ ID NO: 286248 - DNA, 269 bp, Glycine max
  unsure (1)..(269): unsure at all n locations
ccaaggcaccatgtaaaagctgcttgaaggatgctaacatctctatcaaggatgttgatgaggttcttcttgttggagggatgactcgagttcctaaagtccaagaggtggtttcagagatctttggaaagtctcctagcaaaggagtanaccctgatgaggcagttgccatgggggcagcaatccaaggtggtattctacggggggatgttaaagagctactactcctagatgtaacaccactctctctcggtattgagactttgggt

SEQ ID NO: 286249 - DNA, 254 bp, Glycine max
  unsure (1)..(254): unsure at all n locations
aagaaaggaaataattgatctttgaaaatgcagggaggaaagaaagctggagagtccatcaaggaaacagctgcaaacattggtgcttctgccaaggctggcatggagaaaaccaaggccactgtccaggagaaggcagaaagaatgacggcacgtgatccgatgcaaaaggagttggcaacccagaagaaagaggcaaagatgagccaggcagagctggacaagcaggcggcgcgtcacatancccggcggcg

SEQ ID NO: 286250 - DNA, 255 bp, Glycine max
agaaattgctttgctgtaagtttctgattcctttcttcagaattccaagttttcatttcgttagggacaaaagattgtgagatagagtatggctggaaaaggcgagggtcctgctatcggaatcgatttgggaacgacgtactcttgcgtcggcgtgtggcaacacgatcgtgttgaaatcatagccaacgatcagggtaatagaactaccccatcctacgtggctttcaccgatacagaacggttgatcggcga

SEQ ID NO: 286251 - DNA, 259 bp, Glycine max
gaacaagggaaagggaggtaagaacaggaagaggggaaagaacgaggcggacgacgagaagcgggagctggtgttcaaggaggacgggcaggagtacgcgcaggtgctccggatgctggggaacgggcggtgcgaggcgatgtgcatcgacgggacgaagaggctctgccacatccgcgggaagatgcacaagaaggtgtggatcgccgccggagacatcatcctggttggactcagggactaccaggacgacaaggct

SEQ ID NO: 286252 - DNA, 255 bp, Glycine max
  unsure (1)..(255): unsure at all n locations
ggaaaactgcccaagtaagaactgcagccgttgttttcctcctagctcaaaatcctagcaaaatgaagaaggctcaagcagaggtagatttggtgctgggtacggngaggccaacttttgaatcacttaaggaattgcagtacattagattgattgttgtggaggctcttcgtttatacccccaaccacctttgctgattagacgttcactcaaatctgatgttttaccaggtgggcacaaaggtgaaaaagatg

SEQ ID NO: 286253 - DNA, 246 bp, Glycine max
atcaaagaaaggggtggtggctgcttcgaaagcttaataatttgtttatttccagaacatcatagttttcgcagcagcaaactaacaaattactcatatcatataataagatggcccgttctctctcgcaagccaaacgtattggtgtccttgttgctcaatctatctccctaattcccgttcatcggcgaggttacgcatggccatccgatgtatcggtaagagttggattgggtaatattgggc

SEQ ID NO: 286254 - DNA, 257 bp, Glycine max
gcataataaccgtcctaagtttattgagagaattttgcaagtgtgagaaacatggcatctcgtcaaaacaacaagcaagagcttgatgaaagagcaaggcaaggagagactgttgtcccgggtggaactggtggcaagagcctggaggctcagcaacaccttgctgaaggaaggagcaagggagggcaaacaaggaaggaacagctgggtacagaagggtaccaggaaatgggacgcaaaggagggttgagcatgtg

SEQ ID NO: 286255 - DNA, 270 bp, Glycine max
ctcagccgtggcaccaaaatgggaggtgccctgatggaacaattccggtccgaaggagaaaaaggatgacatgttaagggcaagctctgttcagcattttggaaagaagaaggataggagcttccctcagccaaaacctgcaaaacctctacctgacatcatcagtcagagtggccaccagcatgccatagcgtatgtggagggagataagtattatggagccaaggcaaccataaacgtctgggacccaaaaattcaacagcccaatga

SEQ ID NO: 286256 - DNA, 300 bp, Glycine max
gaaagaacgaggcggacgacgagaagcgggagctggtgttcaaggaggacgggcaggagtacgcgcaggtgctccggatgctggggaacgggcggtgcgaggcgatgtgcatcgacgggacgaagaggctctgccacatccgcgggaagatgcacaagaaggtgtggatcgccgccggagacatcatcctggttggactcagggactaaccaggacgacaaagctgacgtcatcctcaagtacatgcccgaacgaggccaagcttctcaagggctacggcgaacttccccgttacaatcc

SEQ ID NO: 286257 - DNA, 281 bp, Glycine max
  unsure (1)..(281): unsure at all n locations
cngagttccgagttgcgagttgcagagagagcaatgagtcaggaatcgtttatatanagcttcgtggctcgggggacgatggtgttagccgagtacaccgagttcactgggaacttccctgcaattgcagctcagtgcctccagaaactaccctcttccaataacaagttcacctacaattgcgaccaccacaccttcaattttctcgtcgaagangttacgcttactgtgttgttgccaggaatctgttagcaaacaaatctctattgctttccttgaag

SEQ ID NO: 286258 - DNA, 274 bp, Glycine max
  unsure (1)..(274): unsure at all n locations
gcgatagctgataagagagataccaacaagaaaaganaaaaagaagagttgagattccctttgaagaaaagatggcatcccataggcaaagctatgaagctggtcaaactaagggccgaactgaggaaaagacgaaccagacgatgggcaatattggagagaaggctcaagctgcaaaggagaagacccaggaaatggcccaagctgcaaaggagaagacccaacaaacagcccaagctgccaaggacaagacttgcgacacttcccaagcggc

SEQ ID NO: 286259 - DNA, 271 bp, Glycine max
agatggatttggaccagtggatctccaaggtgaaggatggccagcaccttctcgaagaggagcttcaacttctttgcgaatatgttaaagagatccttattgaggagtcaaatgtgcagcctgtcaacagtccagtgacggtttgtggtgatattcatggtcagtttcatgatctaatgaaacttttccagactgggggtcatgtgccggagacaaattacatttttatgggagactttgttgatcggggttacaatagtcttgaagtatt

SEQ ID NO: 286260 - DNA, 285 bp, Glycine max
  unsure (1)..(285): unsure at all n locations
cgcatacgacgtttgcgagcgaaattgcgatttatntattaccaaagagaagaaaaaaagagaaaagaagaggcgaatggcagatcagagcgagcattcgaaaacggcgtcgcctccggaggaccaggaccgtccngttcgagtgtacgcggatggcatctacgatctcttccactttggccacgctcgctccctcgagcaagccaagaaatcgtttccgaatacatacttgcttgttgggtgttgcaacgatgaagtcacccacaaatacaaaggcaaaactgt

SEQ ID NO: 286261 - DNA, 290 bp, Glycine max
  unsure (1)..(290): unsure at all n locations
cgttgttgttctaaagcactcatccacacattctccgtcgccacgacaacaatggctccaaagaaaggtgcgaaaggtggagttgtagcagcaaagaagaaggttcaggagaaggtaacgaaccctttgttcgagaagcgtccgaagcagttcgggatcggaggcgcgctgccgccgaagcgggacctgacgcgcttcgtgaagtggccgaagaacgtccaaatccaacgcaagaagcgcatcctcaagcagaggctcaaggtccctcgggctctcaaccanttcacaaa

SEQ ID NO: 286262 - DNA, 285 bp, Glycine max
  unsure (1)..(285): unsure at all n locations
ganatggctatgcccctgtcctcgactgccacacttctcacattgctgtcaagtttgctgaactcatgaccaagattgacaggcgatccggcaaagagcttgagaaggagcccaagtttttgaagaacggtgatgctggttttgttaagatgattccaaccaaacccatggttgttgaaactttctccgagtatcctccacttggtaggtttgctgttagggacatgcgtcaaactgttgctgtgggagtcatcaagaacgttgagaagaaggatcctaccggag

SEQ ID NO: 286263 - DNA, 280 bp, Glycine max
  unsure (1)..(280): unsure at all n locations
gaagatgcggttgcaatggttgaagaacccccttcaggtgatgaggcggcaaatagcaatgattcaaattggaatatggattgctctgcagttgtgagagttagaacactacacatcagttctcctattttggctgctaaaagtcctttcttctacaagcttttctcaaatggaatgagggagtcagagcagaggcatgtcaccctaagaattaatgcttctgaggaagctgctcttatggagcttctganttttatgtatagtaataccttgagcatac

SEQ ID NO: 286264 - DNA, 277 bp, Glycine max
aatgtcgttgattccaagtttcttcggcaccgggcgaagaaccaacgtcttcgaccccttctccctcgacgtgtgggacccattccatggcttccccggcaccaccgccctctccgctccgcgctccgagacggcggccttcgccaacacgcgcatcgactggaaggagacggcggaggcgcacgtgttcaaggcagacctgccggggctgaagaaggaagaggtgaaggtggagatcgaggaggagggaagggtgctgcagataagcggacagaga

SEQ ID NO: 286265 - DNA, 276 bp, Glycine max
ccttagtcatcttcttctttcatctttctccctaacggtatcgagggaaaaatatggcggaagaacacagatgccaggcaccgcgcttctgcgccaacaattgcggtttctttggcagccctgccacgcagaatatgtgctccaagtgctaccgcgatttccagctcaaggagcagcaatcttccaacgccaagatggttctcaatcagtcgctggttccttcaccgccaccggcggtgatttctcagccgtcgtcttcttcttcggccgcggtag

SEQ ID NO: 286266 - DNA, 277 bp, Glycine max
  unsure (1)..(277): unsure at all n locations
gcctcttgatttcaagtcaactagaggagnntttgagaagcttgccgggcaaataaatactcaccgaaggaatcaggatccatcttcaaaagacatgacagtggaaganattgcacttggctttgtggatgttgctaatgagacaatgtgtcgtcctataagacagttgactganatgaagggccatgagacaaagaaccattcacttgcttgctttggtggtgctggacctcagcatgcttgtgctatagctaggtcgttaggtatganagangtg

SEQ ID NO: 286267 - DNA, 280 bp, Glycine max
gccaaggtaggttaaacactcttcttcatcgtcgtcgcaatgggacgtgtgatccgtgcgcaggtaagggagcaggctcggtcttcaagtcccacacgcaccaccgcaagggccctgcccgcttccggagcctggatttcggagagcgcaacggctacctgaagggtgtcgtcactgacgtcatccacgatcctggccgtggcgcgcctctcgctaaggtcgccttccgccacccgttccgctacaagaagcagaacgagctcttcatcgccgccgaggg

SEQ ID NO: 286268 - DNA, 282 bp, Glycine max
caacaacttctgctacttcctactccaaccgcacttctgctccgcaattatcatgggcaaggtcaagatcggaatcaacggatttggaagaattggccgtttggtagccagagtggctctgcagagagacgatgttgaactcgttgccgttaacgaccctttcatcaccaccgattacatgacatacatgtttaaatacgacagtgttcatggacactggaagcatcacgatgtcaccgttaaggacgagaagacccttctcttcggtgacaagccagtcat

SEQ ID NO: 286269 - DNA, 290 bp, Glycine max
cacctattggtatcttctacaatatcctaaagtgtttttcttcttcttcatcaccatgtctttactttcagacctcatcaacctcaatctctcagaatccacagaaaagatcattgctgagtacatatgggttggtggatctggtatggacctcagaagcaaagccaggactcttcctgggccagtgagtgaccctgcaaaacttccgaagtggaatatgatgggtctagcacagatcaagctccagggggatgacagtgaagtcatctatacccacaagttatttcaag

SEQ ID NO: 286270 - DNA, 166 bp, Glycine max
  unsure (1)..(166): unsure at all n locations
ggnaattgtgaaggaagtttcttcctatttgaaganagtaggatacaaccctggacaagattccttttgttcctatatctggttttgagggagacaacatgattgagaggtccacaaaccttgactggtacaagggtcctactctgctagatgcacttgaccagat

SEQ ID NO: 286271 - DNA, 278 bp, Glycine max
  unsure (1)..(278): unsure at all n locations
ctaagtgaganacaaagaaaggaaataattgatctttgaaaatgcagggaggaaagaaagctggagagtccatcaaggaaacagctgcaaacattggtgcttctgccaaggctggcatggagaaaaccaaggccactgtccaggagaaggcagaaagaatgacggcacgtgatccgatgcaaaaggagttggcaacccagaagaaagaggcaaagatgagccaggcagagctggacaagcaggcggcgcgtcacataacacggcggcgaanagggctg

SEQ ID NO: 286272 - DNA, 270 bp, Glycine max
ggctgagcgtgaaagaggaatcaccattgatattgctttgtggaagtttgaaacaacaaagtattattgcacagttattgatgcgcctggacatagggatttcattaagaatatgattactgggacatcccaagctgactgtgctgttcttatcattgattcgaccactggtggttttgaagctggtatttccaaggatggacagactcgtgaacatgctctgctttcattcacccttggtgtgaaacagatgatttgctgctgtaacaa

SEQ ID NO: 286273 - DNA, 273 bp, Glycine max
  unsure (1)..(273): unsure at all n locations
ccttaaggaacgttcgagaccacagaggtttctctagtcttcttctgtggagagcttgttttctcttgttcattcatctcacttccaattaaggaacaagctttccaccaatttgaatcaccaatggctcgctctttctccaacctcaaggttctctctgctcttgtcgccgacggattctccaacactctcaccaggcgtgggtacgcagtagcgacacnaagcgcaacaagaggaggagcagcctccatcagcggcaagtcaggggaagac

SEQ ID NO: 286274 - DNA, 274 bp, Glycine max
  unsure (1)..(274): unsure at all n locations
cgtacccttgctgattacaacatccagaaggagtccactcttcacttggtattccgtctacgtggtggaatgcaaatctttgttaagactctgaccggaaagacaatcacccttgaggtggagagctctgacaccattgacaatgttaaggctaagattcaggacaaagagggtatcccaccagaccaacagaggctcatctttgctggaaagcagctagaagatggccgaaccttggctgattacaacatccaaaaagcnctctancctccac

SEQ ID NO: 286275 - DNA, 277 bp, Glycine max
attttctgaacgttctcacgacacgcctactcattgcactcttcgatcgcaactctctttttcttccaaaagggaaaacgaatctcaaacttcacaagtgtttgaggcgccatggcggatcggttgacgcgtattgccatcgtcagcaacgacaggtgcaagcccaaaaagtgccgccaggagtgcaagaagagttgccccgtcgtcagaaccgggaggttgtgtattgaggttacttcctcgtccaagattgctttcatttcggaggaattgtgta

SEQ ID NO: 286276 - DNA, 289 bp, Glycine max
  unsure (1)..(289): unsure at all n locations
agctagggcaaaatgggagatcaagcgtctgtcctcgttactgaatgaggatcctgcaattatggaacgacgtagtgcgctcgcaaagagactagagttataccggagtgcacaagctgaaatagatgcagttgcttggtctaagtagagatatgtatgtcaanncacgtttatacgagagccagcagtgtcattatcatgttcactattttcttattcatactcatttttcattgtcatcttatctgttgcatcgtcctcttgaatagatgagacgattcctgaaaaa

SEQ ID NO: 286277 - DNA, 286 bp, Glycine max
  unsure (1)..(286): unsure at all n locations
cgccgtgaatctcatccctttccctcgtctgcacttcttcatggttggatttgcgcctctcacctctcgtggctctcagcagtaccgtgcattgacagttccagagctgacacagcaaatgtgggatgccaagaatatgatgtgtgccgctgatcccaggcacgggcgttacctcacggcatcagccatgttccgtggcaagatgagcacgaaggaggtggatgagcagatgataaacgtgcagaacaaaaactctttgtaattgtcgagtgggatcccnacaatg

SEQ ID NO: 286278 - DNA, 281 bp, Glycine max
  unsure (1)..(281): unsure at all n locations
gnatgatccaaataatacaactatttttgttggtaatttggatcctaatgtcactgatgatcatctgaggcaagttttcagccagtatggagaattagtgcatgtgaagattccagcaggcaagcgatgtgggtttgtccaattcgcagacaggagctgtgccgaagaggcacttcgggtgttgaatgggaccctgttgggtggtcaaaatgttcgtctttcatggggccgcagtccttcaaacaaacaggctcaggcagatccaaaccagtggaatggtg

SEQ ID NO: 286279 - DNA, 270 bp, Glycine max
cagaagtcgacaggtttgtatgctattgaacacttgaacttcaactagggctgacgtcaatcactctgaattgaattgtttgtgttttcagtcagcaccttacggagttgctggcagagcatcagaagcttggtcccttcatgcaagcccttcccatatgcagtcgtctcttaaatcaagaaatattaagagtttctggaatgctgtccaatcaaggttttggtgacttgacagactgcggcatagaagccctagtcctatggcttcttc

SEQ ID NO: 286280 - DNA, 272 bp, Glycine max
  unsure (1)..(272): unsure at all n locations
gggagttgaaaganagaaaggaaggatgggagtgacaccgaaaattgctccttcgatgctctcttccgacttcgccaatttggcttccgaggctcagcgcatgctccacttcggcgccgattggctccacatggacatcatggatgggcattttgtccccaatttaactattggcgctccagttattgaaagtttgagaaagcacacaaagggatatttggattgtcaccttatggttacaaatcctcttgattatgttgagnccttggcaa

SEQ ID NO: 286281 - DNA, 273 bp, Glycine max
  unsure (1)..(273): unsure at all n locations
gggggtcagagtgagaaagagaaagagagaattcgtaaaccctaatttcggaaagatcggcgatgactgcctccaaggatcgcgagancttcgtctacatcgccaaactcgccgagcaggccgagcgttacgaagagatggtggaatcaatgaagaacgttgcgaatctcgacgttgaactgacggtggaggagcggaatttgctttctgttgggtacaagaatgtgattggtgctcgcagacgttcctggaggatcctgtcttccattgagc

SEQ ID NO: 286282 - DNA, 276 bp, Glycine max
aagaatcaaagaaaggggtggtggctgcttcgaaagcttaataatttgtttatttccagaacatcatagttttcgcagcagcaaactaacaaattactcatatcatataataagatggcccgttctctctcgcaagccaaacgtattggtgtccttgttgctcaatctatctccctaattcccgttcatcggcgaggttacgcagtggcatccgatgtatcggtaagagttggattgggtaatattgggcgaaggaatggaatcgtgggaggtgta

SEQ ID NO: 286283 - DNA, 256 bp, Glycine max
  unsure (1)..(256): unsure at all n locations
gcnatttgccgcagaagaaatctcttccatggtgctcatcaagatgcgtgagattgctgaggcttacctaggctccacagtgaagaatgctgttgtcaccgtccctgcttacttcaatgattctcagcgtcaagctaccaaagacgctggtgtcattgctggtctaaatgtgatgcgaattatcaatgagcctactgcagctgccattgcatatggtcttgataagnaggccacgagtgttggtgagaagatgtgt

SEQ ID NO: 286284 - DNA, 289 bp, Glycine max
  unsure (1)..(289): unsure at all n locations
gacatctctggtgttaatgttgataaatttgatgacaagtactttgccaaggaagccaagaaaaagaaaacaaagggcgaaggcgagttcttcgaggcagagaaggaggagaaaaatgtgcttccccaagaaaagaaagatgaccaaaaaaccgtggacactactctgttaaaggccattgagaatgttccagacctcaagtcttacttgggtgctaggttttctttgaaggccggagtgaagccccatgagctagtcttctagagtgctaaatttatttcttcatcng

SEQ ID NO: 286285 - DNA, 270 bp, Glycine max
  unsure (1)..(270): unsure at all n locations
actccctcctcttcacacattttcttagcgcctctccaacaatccctctcgttcacactttcagattgtntgaagatgggggctggtggccgaactgctgttcctcctgccaacaggaagtcagaggctgaccctttgaagcgggtaccatttgaaaaacctcagtttagtcatcagccagattaagaaggccattccacctcactgtttccagcgctctgttctccgctcattctcctatgttgtttatgaccncaccatagccttctg

SEQ ID NO: 286286 - DNA, 269 bp, Glycine max
ggaacctgttgatggggaatcaacaaaatttttgcaaagctttgcactgaaatataacatggtgattgtaagtccaattcttgaaagggatattaaccatggagaggttatatggaacactgccgttgtaattggaaatcatggcaatataattgggaaacacaggaagaaccatataccaagagttggagacttcaatgagagcacatattatatggaaggaaacaccggccaccctgtatttgaaacagcatttggaaaaattgcca

SEQ ID NO: 286287 - DNA, 269 bp, Glycine max
agccatttcagcttcgtcctcctagagatgctcctgtaagttggtatactactgatgctctgaagaaaatgaaggaacatggtgccatctatcttactcccttttcacatcgcttagctgaagaaattgacaatcctgagtaccaaaggttgaggtgtagagtcaactatcatgctttaagatttaagccacatatcgtgaagttaagtcaatcaatagttgaaaagctacgcgaacaaggtcccttcatgtccatacatcttcggttt

SEQ ID NO: 286288 - DNA, 270 bp, Glycine max
gtagatgtgaaacctggtgtgtccttggaggaaaaacaactacccaaaggagaaacttggtctgttcacaaatttggtggaacctgtgtgggaacctctcaaagaataaaaaatgttgctgacataattcttaaggatgattcggggagaaaattggtggttgtctctgcaatgtcaaaggtgaaaaatatgatgtatgaccttatccacaaggctcaatcacgcgatgagtcttatatagctgcattggattctgtttaggagaagcac

SEQ ID NO: 286289 - DNA, 254 bp, Glycine max
  unsure (1)..(254): unsure at all n locations
caattcttagctgttttttttttttgctcaatcatttttttaagatggccaaaagaaatgtcgctgcnaattcttcttttgagaggagtaccttggcttctctggatcaaaagttggccatggccaagcgctgttcccatgagggtgtgatggcaggagccaaggctgcagttgttgctactattgcaactgccattccaactctggctagtgtaaggatgctaccttgggcaaaagccaatctcaatcacact

SEQ ID NO: 286290 - DNA, 275 bp, Glycine max
  unsure (1)..(275): unsure at all n locations
cctaattgtttaaacctaattctcatttcttcatcgttcgattcttctcctcctaaagatgcagatcttcgtgaaaactttgaccggtaagaccatcacccttgaggtggagtcctccgacaccatcgataacntgaaagctaagattcaagacaaggaagggatcccacctgaccagcagagacttatctttgcgggtaaacagcttgaggatggtcgaacccttgccgactacaacatccaaaaggaatccactctccacctcgtgcttcgcc

SEQ ID NO: 286291 - DNA, 263 bp, Glycine max
atcaaaggggatatcggtggggcattccaggaactgttatagagggctggttcaggttctgtccaaggccgagaatgcccgaaactcctcgcagtgtgactcatgctcattggtgacaatgcagctgcaaatacctatccttacattcaggtgaaaaatccaacagcaagaatcgaacatgaagctagtacgtccaaaattggtgaagatcaattgttttattttcagcaaaggggaatagactatgaaaaagcaatggctgc

SEQ ID NO: 286292 - DNA, 215 bp, Glycine max
  unsure (1)..(215): unsure at all n locations
ttgttgtttgtgtgtttgttttttctctcacctgaaaatgtcttgctgcggtggtantgtggttgcggaagcgcctgcaagtgcggcaacggctgcggaggctgcaagatgtacccagacttgagctacaccgagtcaaccaccaccgagaccttggtcatgggagtggcaccagttaaggctcaattcgagagtgctgaaatgggtgttcccgc

SEQ ID NO: 286293 - DNA, 260 bp, Glycine max
ggaaggtgagggtggggagaggaaaagaggcgcacgtttatgctgcgtgtgcaagaaatcaagagcttcggtgaagaggccgaaaaccctagagcagatatcagggagtgcttctacgatgcttttgagtctgagatccatcaggtaattcttgagaatcagctcttcagccctggtgaacgcgtcgcaatcggcgcttctggcggaaaggattccaccgtccttgcctacgtcctctccaagctcaaccgcctccacaa

SEQ ID NO: 286294 - DNA, 261 bp, Glycine max
  unsure (1)..(261): unsure at all n locations
cacttcacttcactaatacatcatggcagacgagacccagaacaagtatgagagctctgaggttgaggtccaggatcgtggtgtttttgactttctcggtagaaaaaggatgaagaagacaagcctcatcctcaggaggnggtcatcgccaccgagtttcaaaaagtcactgtctcagaccaaggagagaacaagcacagcctcttagaaaagcttcaccgatctgacagcagctctagctcttcaagtgaggaggaagga

SEQ ID NO: 286295 - DNA, 261 bp, Glycine max
  unsure (1)..(261): unsure at all n locations
gtcagttgcaggaaaaatggtttcgctgaaactgcagaagcggctcgccgcgagcgtgctcaagtgtggcagaggaaaggtttggcttgaccccaatgaagcaacgaaatctccatggccaattctcgccaaaacataaggaagctggttaaggatgggtttatcatcaggaagcccaccaagatnccgacagctcacgtgctcgtcgaatgaaggaagccaagaggaaaggacgtcactctggatacggtaagcgtaagg

SEQ ID NO: 286296 - DNA, 263 bp, Glycine max
  unsure (1)..(263): unsure at all n locations
aagaaaacctaagcttagaattagaaacaaagaaaagaagaaaggaaagaattgatcgttgaaaatgcagggaggaaagaaagcgggagantccattaaggaacagctacaaacattggtgcttctgccaaggctggcatggagaagaccaaggccactgtccaagagaaggcagaaagangcacagcacgtgatccggtgcaaaaggagttggcaacccaaaagaaagaggcaaagatgaaccaggcggagctggacaagca

SEQ ID NO: 286297 - DNA, 261 bp, Glycine max
  unsure (1)..(261): unsure at all n locations
aaaggaaataattgatctttgaaaatgcagggaggaaagaaagctggagagtccatcaaggaaacagctgcaaacattggtgcttctgccaaggctggcatgagaaaaccaaggccactgtccaggagaaggcagaaagaatgacggcacgtgatccgatgcaaaaggagttggcaacccagaagaaagaggcaaagatgagccaggcagagctggacaagcaggcggcgcgtcagcataacacggcggcgaanaggctgc

SEQ ID NO: 286298 - DNA, 261 bp, Glycine max
  unsure (1)..(261): unsure at all n locations
aaaggaaataattgatctttgaaaatgcagggaggaaagaaagctggancagtccatcaaggaaacagctgcaaacattggtgcttctgccaaggctggcatgagaaaaccaaggccactgtccaggagaaggcagaaagaatgacggcacgtgatccgatgcaaaaggagttggcaacccanaagaaagaggcaaagatgagccaggcagagctggacaagcaggcggcgcgtcacataacacggcggcgaanaggctgc

SEQ ID NO: 286299 - DNA, 259 bp, Glycine max
ggccagcggcgtcttcctcgacactttgcttgaattcgctgaggacgagaccatggagatcaaaattaccaaggagcaaatcaagggccttgttgtcgacttttctctgcagggacagattccacagcggtggcaacagagtgggcattggcagagctcatcaacaatcccagggtgttgcaaaaggctcgtgaggaggtctacagtgttgtgggcaaagatagactcgttgacgaattgacactcaaaaccttcctta

SEQ ID NO: 286300 - DNA, 259 bp, Glycine max
  unsure (1)..(259): unsure at all n locations
ggnagaaattcatcactcacacagttccattctcagagattaacaaggcttttgattacatgctgaaaggggagtccatcagatgcatcattcgaatggggggtaaatctatatcagaccaatgatgacatgacatggtccctgttgggggactgagttctctttctggttgtgaaaagaagaaaatantttcatatatgatatatatccctttaggattattgaatttgtgaaaacttgtgagtttgagtgtagagaa

SEQ ID NO: 286301 - DNA, 262 bp, Glycine max
gcatgaaggatgttccaaatgttgctgagaaggcttgtggtgctctttattttcttgcccaaggctatgaggatgctgcatctgcgtcctctccattgaccccttctttcaagatattgttcatgctcttctcactgtaactcacagagaggatgctggagaatcccgccttagaacagcagcctatgaagccttaaatgaagtagtgaggtgttctaatgatgaaacagctcctatggtggtacaacttgttcctctcatc

SEQ ID NO: 286302 - DNA, 256 bp, Glycine max
  unsure (1)..(256): unsure at all n locations
ctttctgtcacacactcacattccggtgcaaaatgaaggtcatcgccgcctacttgctcgccgtattgggaggcaatgcagccccttccgctgatgactaaggaccatccttggctccgttggagctgacgcgaatgatgacaacatcagcaacttcttgtctgangttaagggcaaagacattgcggagttatcgccgccggtagggaaaagttggcctccgtgccttctggcggtggcgccgcggtttccgtgg

SEQ ID NO: 286303 - DNA, 258 bp, Glycine max
  unsure (1)..(258): unsure at all n locations
atcacttttctactttgagtcttcttgatccttcttnttctccttgaactcaaacatggcagatgaggtggttctgctagatttctggccaagtccattgggatgagggtcaggattgcacttgctgaaaagggtatcaaatatgagtacaaagaagaggacttgaggaacaagagtcctcttctcctccaaatgaacccggttcacaagaagattccggttctcatccacaatggcaaacccatttgtgaatccctc

SEQ ID NO: 286304 - DNA, 257 bp, Glycine max
cccgttcatcggcgaggttacgcagtggcatccgatgtatcggtaagagttggattgggtaatattgggcgaaggaatggaatcgtgggaggtgtagagagaagcctgatacaagagatggttcaaaagcctactcaactgattgggccccagacccagtaacaggttactataggcccattaaccacacccctgaaattgacccggtggagcttcggcataggttgctccgatcacctccactagagcctagagga

SEQ ID NO: 286305 - DNA, 257 bp, Glycine max
gtgagaaacaaagaaaggaaataattgatctttgaaaatgcagggaggaaagaaagctggagagtccatcaaggaaacagctgcaaacattggtgcttcgccaaggctggcatggagaaaaccaaggccactgtccaggagaaggcagaaagaatgacggcacgtgatccgatgcaaaaggagttggcaacccagaagaaagaggcaaagatgagccaggcagagctggacaagcaggcggcgcgtcacataacacg

SEQ ID NO: 286306 - DNA, 255 bp, Glycine max
  unsure (1)..(255): unsure at all n locations
cgaccatcttctctcttctctcttccttttcagatcacacgcacacagttacgctcttcaaatctatctcttctcagcgattcttgcttcaagttccanaatgggtgtggctcaaaacattcccgatgcggaggagggaaccttggagattggaatggaatacagaactgtttctggagttgctgggccattggtcattcttgataaagttaagggacccaagtttcaagagattgttaacattcgcttaggaga

SEQ ID NO: 286307 - DNA, 256 bp, Glycine max
gaagaaaattatcgaaatcaatccgtatatgcttgggacaatggctggtggtgctgctgattgccagttttggcacaggaatctcgggattaagtgtcgttgcatgagttggcaaataaaaggagaatttcagtgacaggagcctcaaagctacttgccaatattttatactcttatcgtggaatgggtttatctgttggtaccatgattgccggatgggatgagacgggccctggtctatattatgttgatagtg

SEQ ID NO: 286308 - DNA, 262 bp, Glycine max
  unsure (1)..(262): unsure at all n locations
tacctaagcttagaattagaaacanagnaaagaagaaaggaaagaattgatcgttgaaaatgcagggaggaaagaaagcgggagagtccattaaggaaacactacaaacattggtgcttctgccaaggctggcatggagaagaccaaggccactgtccaagagaaggcagaaagaatgacngcacgtgatccggtggcaaaaggagttggcaacccaaaaganagaggcaaagatgaaccaggcggagtggaacaagcaggc

SEQ ID NO: 286309 - DNA, 258 bp, Glycine max
caaaattgctccaactacatgtttcgagaagctctcaagactgggttttatgatcttcaggctgctagggatgagtatagattctcatgtggggttggggttacaatcgtgacttggtgtggcgttttatggatgtgcagactcgtcttatagcacccatctgtccacattatgcagaatttatttggagagagcttttgaagaagggtggttttgtggtgaatgcgggctggccaacagctgatgctcctgatctca

SEQ ID NO: 286310 - DNA, 257 bp, Glycine max
ccgaggtcaggaggagcactagctaagttcacaatttcaaaatggctaggggactaaagaagcatttgaaaaggctcaatgctcctaagcattggatgctgacaaactgggtggtgcatttgcgcctaaaccctcatctggaccacacaaatcgagggagtgcctccccctcattcttattcctccaaaccggctgaagtatgctctgacataccgtgaagtcatgctattctgatgcagcgccatgttcttgttga

SEQ ID NO: 286311 - DNA, 260 bp, Glycine max
  unsure (1)..(260): unsure at all n locations
gcaattttggttgttgacattatgcatggnttagancaacaaacaatagaatccctaaatctattaanaatnangnatactgnattnnttgtngccttgataaggttgacaggctttatgggtggaaaacatgnnggaatgctccaatngttaaagcattgaagcagcagactaaggatgttcaaaatgngtttaatangaggctcactcagattattactgnattcaaagtacaagggctgaataccgagttgtattat

SEQ ID NO: 286312 - DNA, 257 bp, Glycine max
caaaagctcgtggaattgctagcaatggcgaggatcaaggtttacgagctgaggcagaagacgaaggctgatctgctgaatcaactgaaggacctgaagcggagttgccttgcttcgtgttgctaaggtcaccggtggtgcccctaacaagctttccaagataaaggtggtgaggttgaacattgcccaggttttgacggtgatttctcagaagcagaaggctgcgttgagggatgcctacaagaataagaagtact

SEQ ID NO: 286313 - DNA, 258 bp, Glycine max
gcccatttggatgagaaagcctgaggagatcacaaaggaggagtattctgctttctacaagagtctcaccaatgactgggaagagcatttggctgtcaacacttctcagttgagggacagttggagtttaaggctatcctctttgttcctaagagggcaccttttgacctctttgacacaaggaagaagcctaacaatattaagctttatgtccgccgtgtctttatcatggacaactgtgaggagttgattcctgag

SEQ ID NO: 286314 - DNA, 258 bp, Glycine max
cagccatcgaattccctgcaattaacataagcataacccctttccaacctttctcctcttcagatcggatcagatcagatccaccgccatggatttcataaggtcttcgatcaaaccgttcgagaaataaagagagaggtgaatctgaaggtgctcaagattccggaaatcgaacagaaggtgctggatgctactgataatgaaccttggggtcctcatggtactgtgctggcagagatttcacaggctaccaaaaaa

SEQ ID NO: 286315 - DNA, 255 bp, Glycine max
gttttatggttgagcttggatatgcaaagcctgatgctaaagaagttctgaagggtctttttgtgccaggactaaaagggagtggtgctactggtcttgcaatttctcttcttggagctatggttatgccgcacaatctcttcttgcactcagcactggtgctctctaggaaaataccacgatcagttctgggaattagggaggctgcaggttttacatgatagaaagtgctttgctctcaggtggcctcctcat

SEQ ID NO: 286316 - DNA, 256 bp, Glycine max
  unsure (1)..(256): unsure at all n locations
gagggcttgaaaaatgcactagccgctgaatcttcttcatccttgtcagcaccagcggctagtgctgacaaggatgaagaagattcagagggaagaactgctttgcattttgcctgtggatatggtgaggtgaaatgtgntcaagttctccttgaggctggagcaaaagtacnntgctttggataagnataagaacactgctctccattatgcagctggttatggcagaaaggaatgtgtggccctctccttgaaa

SEQ ID NO: 286317 - DNA, 257 bp, Glycine max
  unsure (1)..(257): unsure at all n locations
ggagggagccgtagcagcggaagctctagcttgggtagcgaatcacaatggcgagaggattaaagaagcatctgaagaggcttaatgccccaaagcattgatgcttgacaaactgggtggtgcatttgctcctaagccctcatctggaccacacaaatcgagggaatgcctgccactcatnctcattttgcgaaaccggctgaagtatgctctaacataccgtgaagtcattgctattctgatgcagcgacatgtcc

SEQ ID NO: 286318 - DNA, 259 bp, Glycine max
  unsure (1)..(259): unsure at all n locations
agatcttgatagtatcatagatggttacttggatcttgaaatggctgagttcactctgcatgaagttctggttacctcacttagtcaggtcatgacaaaagtaatggaaagagtatccgaatagtcaatgatgttgcagagcagattgtgatggaaactttatatggtgatagtcttaggcttcancaggtattggctgactttttacttatttccatcaatttcactccaaatggaggtcaggttgttgtagcaggca

SEQ ID NO: 286319 - DNA, 263 bp, Glycine max
  unsure (1)..(263): unsure at all n locations
gttgcagaccgagctagctagctagcaagcaagcacagagatngaggcanagcnangccatgccctcatgtgcttggcacgtgtttcacttcttcctctgcgtctaaccctatccgctgctcacggaagcaccacggttcaagacatcgcgaganagttgaaactcggggacaacgagcttctgcgcacggngaagaagttcaaggttttcatggagaattacgggaggagctactccacagaggaggagtatttgcgccgtt

SEQ ID NO: 286320 - DNA, 256 bp, Glycine max
cgcataataaccgtcctaagtttattgagagaattttgcaagtgtgagaaacatggcatctcgtcaaaacaacaagcaagagcttgatgaaagagcaggcaaggagagactgttgtcccgggtggaactggtggcaagagcctggaggctcagcaacaccttgctgaaggaaggagcaagggagggcaaacaaggaaggaacagctgggtacagaagggtaccaggaaatgggacgcaaaggagggttgagcatgt

SEQ ID NO: 286321 - DNA, 259 bp, Glycine max
  unsure (1)..(259): unsure at all n locations
ganacaaaatcaccaccttnaaagtcttctctctcgagaatncatcgaataaaactagggtttccgatcgtngtcgaggagantgccgaagaacaagggaagggaggaaanaaccggaagcgcgggaagaacgaggcggacgacgagaagcgggagcttgtgttcaaggaggacggccaggagtacgcgcaggtgctccggatgctggggaacggccgctgcgaggcgatgtgcatcgncggcaccaagcgcctctgcc

SEQ ID NO: 286322 - DNA, 256 bp, Glycine max
ccatgatgagcttattgccaatgctgcttacattggcactcctggaaagggtattcttgctgctgatgagtcaacagggacaattggcaagcgtttgccagcatcagtgtagagaatgttgaatccaacaggcgtgctcttagggagctgcttttcaccgctcccggtgctcttaaatatctcagtggtgtcatcctctttgaggaaactctctaccagagcacagctgcaggcaagccctttgtggaagtcttga

SEQ ID NO: 286323 - DNA, 253 bp, Glycine max
aagagaaagccgtcgctatcctagtctcttcttcccctctacccatttcagtttcaggatggaatctcaggtgaagcacgcccttgttgtcaaagtttgggtcgtactgggtctagggggcaggtgactcaggttagagtgaagtttttggatgatcaaaaccgacacatcatgaggaacgtgaagggacccgtgagagaaggagacattctcaccctacttgagtctgaaagagaagcaagaaggttgcgct

SEQ ID NO: 286324 - DNA, 256 bp, Glycine max
  unsure (1)..(256): unsure at all n locations
caagattcttaagcctgtcaagaaaaagaagattnaaagagagataaaaatacttcagaacctttgtggtggcccaaatattgtcaagcttcttgatttgtcagagatcagcactctaaaactcctagcttaatatttgagtatgtcaacagtacagattttaaagttttgtatccaaccttgactgattatgacatacgctattacatatatgagcttcttaaggccatagattactgccattctcaaggcataa

SEQ ID NO: 286325 - DNA, 253 bp, Glycine max
  unsure (1)..(253): unsure at all n locations
gcagcgggtgaggtgctgggagtaccgccagcaaccttctattgtccgtttgacaaggtctactcgcccagacaaggctcgccgcttgggtttcaagctaagcanggttatgtgatttaccgtgttcgtgtacgaaggggtggccggaagagaccagttccaaaaggtattgtttatggtaagcccaccaaccaaggtgttacncaactgaaatttcagcgcacgagaggtctgttgccgaggagcganctnt

SEQ ID NO: 286326 - DNA, 255 bp, Glycine max
  unsure (1)..(255): unsure at all n locations
gcagaatcgacaagttaatgagctaagagcagctgtaaattcccatgcaggtgatacagaacttcgcatgattatcgatggtataatggcacattatatgagatatttaggctgaaggccgatgcagctaangctgatgtcttccatttgttgtctggaatgtggaagacaccagcagagtcgtgttttctatggcttggtggttttcggtcatctgaactcctcaagctcctggtaaatcagttggaacctctg

SEQ ID NO: 286327 - DNA, 257 bp, Glycine max
gtcgactcctatgttctatctgagtccagcctctttgtttatgcctacaagatcatcatcaaaacctgtggtactactaagctattgcttgcaatccacccatattgaagttcgctgaaatgctttcccttaatgttaagtctgtgaattacaccaggggaagtttcattttccccagtgctcagccatatccccatcgcaacttttctgaggaagttgctattcttgatggctactttggcaaacttggtgcagga

SEQ ID NO: 286328 - DNA, 274 bp, Glycine max
  unsure (1)..(274): unsure at all n locations
agaaaccctagcaaaaatgccggctggtcacggtttgagntcccgcaccagagattccttctctcgtcccttcaggaagaagggtaccatcgccctcaccacatacctcagaacctaccacgtcggcgattatgtcgacgtcaaggttaacggcgccgtccacaagggaatgcctcacaagttctaccatggccgcaccggtcgcgtctggaatgtcaccaaacgtgctgttggggtcgaagtcaacaagcaggtcggcaacagaatcataagg

SEQ ID NO: 286329 - DNA, 268 bp, Glycine max
ctcaaaagaagatcggaaaccgcaccacctcgtgccagctggcctccgccggccccgttccggctccaccgccgaacgtgaccccggtgtctgagtacacccagaggaagatttttgtgagcaatgtgaatgctgagattgatcctcagaagctgcttgaattcttcaagcagtttggggaggttgaggatggtcctcttggtttggataagaacactgggaaacctaagggttttgcgctttttgtgtacaagtctgtggagagtgc

SEQ ID NO: 286330 - DNA, 229 bp, Glycine max
  unsure (1)..(229): unsure at all n locations
catggctatggctatgcaaagcggaatcggagtctccaagatcctcatcatagcaggagcaggttacaccggcaccgtcctcatcaaaaacggaaaactctcggatttaatcggcgagcttcagttgctggtgaagggattggaaaaatctggggagcatgctgaangtgaaggtgaatatgctgatgccatagctgctcaggtgcgtcgctggcgaatgaagttcggc

SEQ ID NO: 286331 - DNA, 263 bp, Glycine max
  unsure (1)..(263): unsure at all n locations
aaatggaactgctccagtgaaacctggcacagggcttacggttgctgtaaaaaccctaaaccatgatgggctccagggtcataaagaatggctggctgaagtgaattttctcggtgatctagttcatccaaaccttgttaaacttgtaggttactgcattgaagatgatcanaggttgctagtgtatgaattcatgcctcggggtagcctggaaaaccacttatttaggagatccatgcctcttccatggtccattagaatga

SEQ ID NO: 286332 - DNA, 264 bp, Glycine max
  unsure (1)..(264): unsure at all n locations
ctcattcttcaccagctcagcacgcagaggagcanaagcctaagnttcaacatggcgagagggttgaagaaacacttgaagaggctcaatgctccaaaacactggatgcttgacaagcttggtggggcctttgcaccgaagccatcatctggaccccacaagtccagggagtgtcttcctttgatcctcatcctacggaacaggctaaagtatgctctaacatatagagaagttattgccatcttgatgcagcgccatgttctt

SEQ ID NO: 286333 - DNA, 278 bp, Glycine max
  unsure (1)..(278): unsure at all n locations
cccaatcccatacacttgacggttgatacaggatttacaaatggagcgggtactattaaagcatatgtgtctaacaatttatctcttggagaacggcnaattgctgcacagtttcaagaaattccattggatcttcgtatggtggaagctgagcgaattggatttgatatgctgaaggcaaccgcagttgacaaaattccctcagntttagnanggctggaagcatcaatgcaacatctgctagtcttgattgatgacctctacaaaatatgttaacg

SEQ ID NO: 286334 - DNA, 276 bp, Glycine max
  unsure (1)..(276): unsure at all n locations
gcacgaacaaacaatcacattacacacttctctctcttcaatggccggaatccgcttgctgccggaagactccgacgtctcccaacaatcccgcgcggtgcctctctccgccgccgatctggtctccgacgacgaccgctccgtcgccgctgactcctggtccatcaagagcgagtatggcagcactctcgacgacgancagcgccacgncgacgccgncgaagctctctccaacgcgaacctccgacctccctccgattacagttctgacaagga

SEQ ID NO: 286335 - DNA, 269 bp, Glycine max
  unsure (1)..(269): unsure at all n locations
ccattctctctgtgtatttccctacctctcccttcaagatgcagatcttcgtcaagaccctcaccggcaagaccatcacccttgaggtggaaagctctgacaccatcgacaacgtcaaggccaagatccaggacaaggaaggaatccccccggaccagcaacgtctcattttcgccggaaagcaacttgaggacggccgtacccttgctgactacaacattcagaaggagagtactcttcacctcgtcctccgtctccgtggtggnatg

SEQ ID NO: 286336 - DNA, 265 bp, Glycine max
gttggtttgtctctctcatatggcttgtcattaaatgccgtgatgttctgggctatatacatgagctgtttcattgaaaacaaaatggtatctgttgagaggatcaaacagttcacaaatattccatcggaagcttcatggaacattaaggatcgcctgcctcctgcaaattggcccggggaaggccatgttgatatcaaagacttgcaggtcagatatcgtccaaacactccttggttcttaaaggcatcaccctaagcatcaa

SEQ ID NO: 286337 - DNA, 262 bp, Glycine max
  unsure (1)..(262): unsure at all n locations
cagcaactgcgattttggatcggaacctcttctgcggcgtanaatgggacactccaacgtttggaattctcacccaaaaaactacggtcctggttctcgcacttgccgagtgtgtgggaatccacatggattgatcaggaagtatggccttatgtgctgcaggcagtgcttccgtagcaatgccaaggaaattggcttcatcaagtatcgctaaaagagctgttgtcacctacggaccaatattatgttctggcactaggat

SEQ ID NO: 286338 - DNA, 267 bp, Glycine max
aattaatattctgagaaatgggggaaagaatgttcaggaatacaaaggtccccgtgaagcagatggcatcgttgactatttgaagaaacaaagtggtcctgcttcaactgaaattaaatctgctgatgaagctactgcttttattggtgaaaataaagttgctattgttggagttttcccgaaattttctggagaggagtttgacaacttttctgccttagcagagaagttgcgttctgattatgactttggtcacactctgaatgc

SEQ ID NO: 286339 - DNA, 269 bp, Glycine max
cagatattgggcttgaagctgtaggaaagggttgtccaaatctgaaaattgcacacctccacaagtgtgcatttctgtcagacaatgggttgatgtcattcgccaaggctgcttcatcacttgaaagcctacgattggaagagtgccacagaattacccaacttgggttttttggtgtcctttttaactgtggtgcaaaattgaaggctatctctttggtgagctgctatgggatcaaagatctgaacttggtgttgccaacagtatct

SEQ ID NO: 286340 - DNA, 265 bp, Glycine max
  unsure (1)..(265): unsure at all n locations
gcaaaaccctagagcatccatcacaagcagaggaagaagatggtgaagttcctgaagcctaacaaggcagtgatcgtcctgcagggccgctacgccgggcgcaaggcggtgatcgtgaggnccttcgacgagggaaccagggagcgcccctacggccactgcctcgtcgccggaataaagaagtacccaagcaaggtcatcaagaaggactccgcgaagaagaccgcgaagaaatctagggttaaggccttcgtgaagctcgtga

SEQ ID NO: 286341 - DNA, 264 bp, Glycine max
caaagaatcaaagaaaggggtggtggctgcttcgaaagcttaataatttgtttatttccagaacatcatagttttcgcagcagcaaactaacaaattactcatatcatataataagatggcccgttctctctcgcaagccaaacgtattggtgtccttgttgctcaatctatctccctaattcccgttcatcggcgaggttacgcagtggcatccgatgtatcggtaagagttggattgggtaatattgggcgaaggaatggaa

SEQ ID NO: 286342 - DNA, 272 bp, Glycine max
  unsure (1)..(272): unsure at all n locations
agcacagaagagggaaaacngcaccgccgccgtagaagaaaacaaccatggtgcacgtctccttttacaggaactatgggaagacattcaagaagccgcgtcgtccgtncgagaaggagcgtctcgacgcggagttgaagctggttggtgagtacgggcttcggtgcaagagagagctgtggagggtgcagtacgcgctcagccgcatccgcaacaacgcgcggaacctcctcaccctcgacgagaagaacccgcgccggatcttcgaagga

SEQ ID NO: 286343 - DNA, 264 bp, Glycine max
  unsure (1)..(264): unsure at all n locations
agatgaagttcaatccacgtgtgtcgagcagccgccgcaaganccgaaaggctcatttcacggcgccatcgagcgtgcggcgggtgcttatgagcgcccctctgtcggcggagctgcggtctaagtacaacgtgaggtcgatcccagtacggaaggaggacgaggtgcaggtgatgcgaggaacatacaagggtcgcgaggggaaggtgatcaggtctaccgtncgaaatgggtgattcacattgagcgcataacccgcgagaa

SEQ ID NO: 286344 - DNA, 261 bp, Glycine max
  unsure (1)..(261): unsure at all n locations
gagaaggaccctgcacttgagcgtcgtttccagcgagtttatgttgaccaaccttcagttgaggataccatttcaatactaaggggactgcgggaaagatatgagctgcatcatggagttcgcatttctgacagtgctctgtggatgctgcaattctctcagatcgatacataagtgggaggtttttgcctgataaagctattgatctggttgatgaagcagctgctaaactaaaaatgganatacttcaaaacccactgc

SEQ ID NO: 286345 - DNA, 266 bp, Glycine max
  unsure (1)..(266): unsure at all n locations
agaaggagcaaaagcaatggcgccgaagaagccgagaaccacgacaaggaaccctgatttggttagggggattggcaagtattcgaggtcgcagatgtaccacaagangggcatctgggccatcaaggccaaaaacngtggcgttttgccccgccacgatcccaagcccaagcccgaggccccggnccagaagccgcccaagttctaccccgcggacgatgttaagaagcccctcgtcaacaagcacaagcccaaacccgcgaaat

SEQ ID NO: 286346 - DNA, 260 bp, Glycine max
  unsure (1)..(260): unsure at all n locations
atggtgatgtctgagttggtggagtgctgcaaggagttggatgaagtgcatcatgctttggccggacataagaaggaggcggcatggcggttaagtagggtggagctgcagttggagtccgagaaggccggccgaaggagggagaagatggaggaaattgaagcgaagatcaaagctctgagngaggagcaaacagctgcttggatagacttgnagcagaatatagggagcattggccagggttgagaagagtgcagaaa

SEQ ID NO: 286347 - DNA, 262 bp, Glycine max
gtgggctcccagggagtgtgatttgcctcagtttgatccacacaggtttctcaacttgatgcggaacaaagcctgggcagtcattggagattccatttctcgcaaccatgcgcaatcgctggtctgcattctttccaaggtggaaaaacctgtcttagtctaccatgacgaggaatacaagtgcaaaagatggaactttccctcatacaacttcagtttgtcagttatttggtcaccattccttgtggaagctgctattttt

SEQ ID NO: 286348 - DNA, 252 bp, Glycine max
  unsure (1)..(252): unsure at all n locations
gttccatcgggagtttggatggccaccttgaatgttccccctcttcctccttcnccgagagacgatgccatacaactttacgctnccttcaaaggatttggatgcgatactagcnttgtgatcantatacttgctcatcgagatgctacccagcgtgcctacatccaacaagaatacaaagcaatgtattctggggatcttctcaaacgcttatcttcagagctttctggcaagttggagactgcactactg

SEQ ID NO: 286349 - DNA, 261 bp, Glycine max
  unsure (1)..(261): unsure at all n locations
cttgcggctagggttttagcgcanttacttctagatttaaggaagatgggtaaggaaaaggttcacatcagtattgtggtcattggccatgtcgactctgggaaatccactaccactggtcacctgatttacaagcttggaggcattgacaagcgtgttattgagaggtttgagaaggaagctgctgagatgaacaagaggtctttcaagtatgcctgggtgctggacaaacttaaggctgagcgtgaaagaggaatcacc

SEQ ID NO: 286350 - DNA, 265 bp, Glycine max
caacttctgctacttcctactccaaccgcacttctgctccgcaattatcatgggcaaggtcaagatcggaatcaacggatttggaagaattggccgtttggtagccagagtggctctgcagagagacgatgttgaactcgttgccgttaacgaccctttcatcaccaccgattacatgacatacatgtttaaatacgacagtgttcatggacactggaagcatcacgatgtcaccgttaaggacgagaagacccttctcttcggt

SEQ ID NO: 286351 - DNA, 274 bp, Glycine max
caaccctaacgcgtgcagagcagagagagacgcagccatggggcgaagacccgcgaggtgttataggcaaattaagaacaaaccataccccaagtcacggttttgccgtggtgttcctgatcccaagatcaggatttacgatgttggtatgaagaagaagggtgttgatgagtttcctttctgtgtccatctggttagttgggagaaggaaaacgtttctagtgaggccctggaagctgctcgtattgcttgcaacaagtacatggcccaattt

SEQ ID NO: 286352 - DNA, 263 bp, Glycine max
  unsure (1)..(263): unsure at all n locations
ggctattcattctctgaagaatgtttatgcccattgggttcctgaggacagaatcctttgcaccaatttgtggtctgctgaactctcaaagcttgcagccaatgctttcctggcccagaggatctcctcggtgaatgccatgtcggcactttgtgaggcatnctngtgctgatgtctcccaggtgtcacatncaatcggcacagactcaagaattggaccaaagttcctgaatgccagtgttggttttggaggatcatgcttc

SEQ ID NO: 286353 - DNA, 263 bp, Glycine max
atggtggtggtagaggtaccaaagctagggaaagaggctgcagtaaaggccataaaggagtggggccagccaaagtcaaagattacccacttgatcttctgcaccactagcggtgtggacatgcctggtgctgattaccaactcaccaaacaattgggccttcgcccttatgtgaagaggtacatgatgtaccaacaaggttgctttgcaggtggcacggttcttcgtttggccaaggatttggctgagaacaacaagggtgc

SEQ ID NO: 286354 - DNA, 261 bp, Glycine max
  unsure (1)..(261): unsure at all n locations
gggaaaaatggtgtcgctgaaactgcagaagcncctctccgcaagcgtgctcaagtgcggcagaggaaaggtttggcttgaccccaatgaagtcaacgaaatctccatggccaattctcggcaaaacatcaggaagttggttaaggatgggtttatcatcaggaagccaaccaagattcactcccgctcacgtggctcgtaggatgaaggaggcaaagaggaagggccgccactccggttatggtaaacgtaagggtacaa

SEQ ID NO: 286355 - DNA, 263 bp, Glycine max
  unsure (1)..(263): unsure at all n locations
gtccactcttcatttggtantccgtctacgtggtggaatgcaaatctttgttaagactctgaccggaaagacaatcacccttgaggtggagagctctgacaccattgacaatgttaaggccaagattcaggacaaagagggtatcccaccagatcaacagaggctcatctttgctggaaagcagcttgaggatggccgtacccttgctgattacaacatccagaaggagtccactcttcacttggtactccgtctacgtggtg

SEQ ID NO: 286356 - DNA, 262 bp, Glycine max
agcatttagaaaaagcaagacacgatgccttcggctcaagatccattctacgttgtcaagcaagaaattcaagaatctattgataagctaaaatccacttttcaccaatgggaaaacactgctgatgttggcgagcgatccagtctatcaaaggaagttcttgctagttgtgaaagcattgcatggcaggtggatgaattggacaaagcaatttctgtggctgctagagatccttcttggtatggcatgatgaagtggaggt

SEQ ID NO: 286357 - DNA, 262 bp, Glycine max
  unsure (1)..(262): unsure at all n locations
gcattctttaaaggtttccttggaggacgtttataatggcacaacaaagaaactatctctttctagaaatatattatgcccaaaatgtaaagggaaaggttcaaaaagtggaactgctggtaggtgttttggatgcaaaggcactggtatgaaaattacaancaggcagattggactaggcatgattcaacaaatgcaacatgtctgtcctgactgcagaggatctggtgaggtcattaacgagagagataaatgtcctctg

SEQ ID NO: 286358 - DNA, 265 bp, Glycine max
accgtatgttattatagtttccaaaggcacgcagcgagtttaggcgcggcgggatcatcacgagattgcaaaatgaagttcaacattgcaaatcccaccactgggtgccagaagaagctggaaatcgatgacgacctgaagcttcgggcattttgggacaagaggatctcccaggaggtccttggtgacgccctgggtgaggagtttaaaggatatgttttcaaaatcactggtgggtgtgacaaacaaggattcccaatgaagc

SEQ ID NO: 286359 - DNA, 261 bp, Glycine max
gtttcacacacacatgaaaagtgtcacatatttgcggttggatggatcagttgagccagaaaagcgttttgaaattgtcaaagctttcaattcagaccctaccattgatgtcttgctgcttacaacacatgtcggtgggcttggtttgaacctgacatctgcagatacccttgtttttgtggagcatgactggaatccgatgcgagaccatcaggctatggatagagcacacaggttaggtcagaaaaaagttgttaatgt

SEQ ID NO: 286360 - DNA, 260 bp, Glycine max
atttgagactgatctcaacctcaaggcaaccgagcttagattggggcttccaggaacagaagaaattgttgaaaaaccacttcctgcaagtgctagaattaccaacaaaaggcctttgtctgaaacctctgaggagtgtgcttcaaagggttctagtgctccacatgtggaaactgaagcagcccctcctgccaaggctaagatagtggggtggccaccaatcagatcctacagaaagaacagccttcaggagaatgatg

SEQ ID NO: 286361 - DNA, 261 bp, Glycine max
ctttgtcgcaaagagaagagatctgcctcctttttccttcccaaatcaaatctatctcttcttcaagttgaaaatggggctgtcgttcaccaagttgttcagccggctgtttgccaagaaagagatgcgtatactaatggtgggtctcgatgctgcgggtaagaccaccattctgtacaagctcaagcttggagagattgtcaccaccattcccaccattgggtttaatgtggaaactgtggaatacaagaacatcagctt

SEQ ID NO: 286362 - DNA, 257 bp, Glycine max
catgcctaagcaaatccacgagattaaggatttccttctcactgctagaaggaaggacgcaaggtcggtgaagatcaagaggagcagagatgtggttaagttcaaggtcagatgctcgaagtacctctacacactttgtgtgtttgacccagagaaagctgataaattgaagcaatctcttcctccaggtttgagtgttcaagacctgtaaaggtacagggcgagagaccaagaagaagcaattcattgattcttct

SEQ ID NO: 286363 - DNA, 258 bp, Glycine max
  unsure (1)..(258): unsure at all n locations
gtcgctccgcaccagtttcaccgcacgaatatcttgttgtttggagcgatccgagaaaaactactgtnaacatgttggtttaccaggacctccttacaggtgatgagcttctctctgactccttccgttacaaggaaattgngantggaatgctgtgggaagttgaggggaagtgggttgttaaaggagcagttgatgtagacattggtgcaaacccttcctgctgagggtggaggagaagatgagggagttgatgat

SEQ ID NO: 286364 - DNA, 257 bp, Glycine max
atgaaattgtgaaggaagtctcttcctacttgaagaaagtaggatacaaccctgacaagattccttttgttcctatctctggttttgagggagacaacatgattgagaggtccacaaaccttgactggtacaagggtccaactctgcttgatgcacttgaccagattagtgagcccaagaggccctctgacaagcccctcaggcttccccttcaggatgtgtacaagattggaggtattggaactgtgccagtggga

SEQ ID NO: 286365 - DNA, 260 bp, Glycine max
atgaagtatcattgtcattaacaaatagtataatgtctgaagcactgcatggtgatatatctcagcatcagagagagagaacactgaatggtttccgtcaaggaaaattcacagtgcttgttgccactgatgttgcagctcgtggactggatattcccaatgttgatttgattatccattatgagcttcccaatgatcctgagacttttgtgcatcgctctggtcgtactgggcgtgctggaaaacaaggtaatgccatt

SEQ ID NO: 286366 - DNA, 264 bp, Glycine max
gcagaactttgtttcccaatttccattgcctccgcttccacctcgcaaccatgatcatcccggagaagaaccgcaaggagatctgcaaatacctcttccaagagggagtttgcttcgcgaagaaggacttcaatttggccaagcaccctgagatcgacgtgccgaatctgcaggtgattaagctgatgcagagtttcaagtctcgcgagtacgtgagagaaacttttgcttggatgcactattactggttcctcaccaacgatg

SEQ ID NO: 286367 - DNA, 260 bp, Glycine max
  unsure (1)..(260): unsure at all n locations
caagaaagaaaacagagagaaactttcatttcatagattttcatcatctcagcannnnnnnnnnnnnnnnnnnnnnnggcaggcttcagtggcgacgaaaccgctcctttcttcggcttcctcggtgccgctgcggccctcgtcttctcctgtatgggagcggcgtatggaacggcgaagagtggggtgggggtggcgtcgatgggagtgatgaggccggagctggtgatgaagtcgatcgtgccggtggttatggcggg

SEQ ID NO: 286368 - DNA, 255 bp, Glycine max
gggaaaatggtcaccatgtggtggaagatcagaaaacttctgaagcacagaatgtcacacctgtgaagaagtttggtacagaatctgatggcaaattgaagagatccttcattgaacgtcaacatgagaatgttgatgcacttgtcaactgtgttatgaaaaatattggtttccatcatggaaagcctgttgctgcatttaccatttacaaatgtcttctccactggaaatcatttgaggctgaaagaacaagtg

SEQ ID NO: 286369 - DNA, 248 bp, Glycine max
aaaagatgccggtagaattgctggtcttgatgttcagagaatcatcaatgagcccactgccgctgcactttcctatgggatgaacaacaaggagggtctcattgcagtttttgatcttggaggtggaacatttgatgtgtccatcttagagatttctaatggtgtttttgaggtgaaagcaacaaatggtgacacttcttgggaggagaggatttgataatgcttattggattttctagtgaacgaat

SEQ ID NO: 286370 - DNA, 255 bp, Glycine max
  unsure (1)..(255): unsure at all n locations
gaaangaanaaaagaagagttgagattccctttgaagaaaagatggcatcccataggcaaagctatgaagctggtcaaactaagggccgaactgaggaaaagacgaaccagacgatgggcaatattggagagaaggctcaagctgcaaaggagaagacccaggaaatggcccaagctgcaaaggagaagacccaacaaacagcccaagctgccaaggacaagacttgncgacacttcccaagcggcaaaggagaa

SEQ ID NO: 286371 - DNA, 260 bp, Glycine max
  unsure (1)..(260): unsure at all n locations
cgactcttagccgccgatctctcagggcttgcatcttctcagctgtgaagatgtacacatcaaggaagaaaatccacaaggataaggatgctgaaccaactgaatttgaagagtcagttggacaggcattgtttgatctggnaaataccaatcaggagcttaaaagtgatctgaaggatttatacataaactcagccgtgcaagttgatgtttctggaaaccgcaagctgttgttattcatgtcccttacagattaagga

SEQ ID NO: 286372 - DNA, 259 bp, Glycine max
  unsure (1)..(259): unsure at all n locations
gtgataacaaatccttccttgtttgcaaaaagaagatgggaacatctcctgagatgctatgctgtttttgcccngctccttttaggcagttccttgngattgtagtaaacatgaagtttgatgaagaacctaactattccaggctaatatctttgttngatggtatgcttggaccgaatcctgcattgaggccaattaacactgaaggtgctcaaaaggttgggcagaagangggtagattgaatnttgaggaagagga

SEQ ID NO: 286373 - DNA, 252 bp, Glycine max
  unsure (1)..(252): unsure at all n locations
gaagctgctgagatgaacaagaggtctttcaagtatgcctgggtgctggacaaacttaaggctgagcgtgaaagaggaatcaccattgatattgctttgtggaagtttgaaacaacaaagtattattgcacagttattgatgcgcctggacatagggatttcagtaagantatgattactgggacatcccaagctgactgtgctgttcttatcatngattcgaccactggtggttttgaagctggtatttcc

SEQ ID NO: 286374 - DNA, 252 bp, Glycine max
  unsure (1)..(252): unsure at all n locations
agggaaagtacgatgtcgacaaaaacggcgctgcctttgccaacatcgccgtcaacgccggcgacgtcaagttccgagcctccgtaacggaagccactttccattaacggtcccagcttcaccggcttggcgctcgccgtacgagaaacgggttcctcatcgtcgactacnacgttcccaaaaaggactttcggtntcagtntntgancacggttngggttggngngangccgttgaatttgacctacgcgc

SEQ ID NO: 286375 - DNA, 252 bp, Glycine max
gcaaaactcattgttgtactgacacgtggcgggtctacagctaagttggttgctaagtataggccagcggttccaatattatcggtggtggttccagtgttgagcacagactcatttgattggacatgcagtgatgagacgccagcaaggcacagcttgatatataggggcttgattccaatattgggggagggatccgccaaggctactgatgcagaatctacagaggtcatctcgaagctgctcttaagt

SEQ ID NO: 286376 - DNA, 253 bp, Glycine max
  unsure (1)..(253): unsure at all n locations
cgacgtgaganagattgtgaagtaagtagaaatcggtgcaaganattctccgctttatctacaaaatttaagtgagtttgtgaagacaaaaaatcactagctactaaaaaatggccacagttggaaggaacgcagcagctccattgctgtttcttaacttgatcatgtattttattgttcttggctttgctagttggtgcctcaacaagttcatcaatggccaaacttaccaccctagcttggtggaaatggt

SEQ ID NO: 286377 - DNA, 196 bp, Glycine max
  unsure (1)..(196): unsure at all n locations
gttctagatcgcgagcnggccgcccttttatgttttaaattttgtgtttttctttgttctaatgtgagtgatatgcgtgggaaaaatgtagtgggagttgtgattgtataaagaaataagtcgttgtcgtgcgttggtgagatattatgtgtgaattttaatgtagcgcatgaaactttgcaatggagaagctaaa

SEQ ID NO: 286378 - DNA, 254 bp, Glycine max
gttgctgcagagtgaggcgttcgattaacgtttggcgatcacagaagagaagggaatggagttttctcaagatgattttgatcggttactgttattcgaacacacgcgaaagactgctgaagcaaactacgcagagaatcctcaagacgctgataatctgaccaggtgggggggagctttgatcgagttgtcgtcattccaagctcctagggatgccaaggcgatgattgatgatgccctttcgaagctggagg

SEQ ID NO: 286379 - DNA, 256 bp, Glycine max
  unsure (1)..(256): unsure at all n locations
agtaggacaaaaatatgagcctcactatgattacttccttgatgagttcaacactaagaatggaggccaacgtattgctacagttcttatgtacctttcagatgttgaagaaggcggtgagactgtatttccggctgccaatgcaaattttagttctgtgccttggtggaatgatttatcccaatgtgcaagaaagggtctctcagtgaaaccaaaaatgggtgatgctctgcnattttggagcatgaggccgatg

SEQ ID NO: 286380 - DNA, 255 bp, Glycine max
gaagaaagttcatccaatctccgaagcccttcaccgcattgcaaccatgtcgagaagaaaggttagagagccaaaggaagaaaacgtgactctgggcccagctgttagagatggcgaacatgtctttggcgtcgctcgcatctttgcctccttcaatgataccttcattcatgtcactgatctgtccgggagggaaacacttgtccgcattcacaggtggaatgaaggttaaggctgacagagatgaatcgtctt

SEQ ID NO: 286381 - DNA, 252 bp, Glycine max
gtttcttctggtgagaaccctaataaatcaaagcgaaggaagaagaagaacttgttcgaggtggctcagttcttacctaactggggaatcggctaccacatggctaagactcactggaatgaagtttcttacgaaatcactaaaatcaatctctacaaggatggaagacatggaaaagcatggggggttgcttttaaaaatggcttgccattagcggatgctcccaaaaaattagtggagttcacaagcgct

SEQ ID NO: 286382 - DNA, 252 bp, Glycine max
gctctgaaaccggcatggatttgcagcagagcgagttcgatcgcctcttgttcttcgagcacgctacgcaaggccgcagaagctgaatacgagaagaaccctctcgatgccgataacttaacaagatggggtggagctctattagagttgtctcagtttcagagttttcctgaatcgaagaaaatgacccaagaggctgtttcgaagctagaggaggcgcttgcagtgaatcccaagaagcatgacactctt

SEQ ID NO: 286383 - DNA, 250 bp, Glycine max
  unsure (1)..(250): unsure at all n locations
ctcccattctctcgcatctcaatacccttttgatttgtgaaaggaaagcaaacatgcttgatcaggtccaacaccctacaatcatggacaaggttgctggccagctccatctccgttctggtgtttctggtattaggagttatgaaggagcctactgccaccccacaatgtaccaaagaccctcttttgggaattactcgaatgctgcantgcagtatcctgtgatgccctcatgcaaagctactatgga

SEQ ID NO: 286384 - DNA, 252 bp, Glycine max
  unsure (1)..(252): unsure at all n locations
gcaatttccattgctaaggaggaagccacaaaattggggacggtcatcgggattgatcttggaacgacctattacatgtgttggtgtttacaagaacggccatgttgaaatcatagccaatgatcaaggtaaccgtatcaccccatcgtgggttgctttcaccggcagtgagagactaattggagangctgccaagaatctggcagctgtcaacccagaaaggaccatctttgatgtcaagagacttattgg

SEQ ID NO: 286385 - DNA, 254 bp, Glycine max
gcactgtggcagaagtcttaggagtgtaaaacagagacgcaaaatgaagacgattctatcgtccgagaccatgaatattcccgacggcgtgagcatcaaggttcacgctaaggttatcgaggttgagggccctcgtggaaaactcgtgcgagacttccaccatctgaacttggacttccaacttattaccgacgatggcggtaaaaggaagctcaagattgattcttggtttggttctcgtaaaacctccgccg

SEQ ID NO: 286386 - DNA, 259 bp, Glycine max
  unsure (1)..(259): unsure at all n locations
gnngaggggtttgggattggagggattgacgctgcgtctcttcctcttctctttcgatccatccctcattcctaatcctccaatccaaccacctcagcctcacactcacatatacacatatctgaacgcgtatcgtccctcctatggcttcaaagcgcatcctcaaggagctcaaggacttgcagaaagacccaccaacttcttgcagcgctggtccagtagctgaggacatgttccattggcaagcaacaataatggg

SEQ ID NO: 286387 - DNA, 249 bp, Glycine max
  unsure (1)..(249): unsure at all n locations
gcttgtgaccatattagagattgggttcttggaactcctcagggcacctgggtgtcaatgggagtatattctgatggttcctacaatgttccagctggactgatctattcantccctgtcacttgtgccaatggggaatggacaatagttcaaggacttcccattgatgagttctcaaggaagaagttggacttgaccgcagaagagcttctgaggagaaggcattggctactcatgcctaaatagaga

SEQ ID NO: 286388 - DNA, 252 bp, Glycine max
gccaagtcgtaaaagggtttcaagggatggaaaacatgcagagcttctggcaattgggtgatgaactccgtgggcactcaaaagcatcggaggatcacaagtggttaatggttgcctcgaaactggccgaacagacaagattgaagggggagcgtgtgaacaaccttgatctttcaaagggacccattgaaacaaggtcaagggataaatttgggttccaggaagagaacaaatttgattctcttaacttga

SEQ ID NO: 286389 - DNA, 254 bp, Glycine max
  unsure (1)..(254): unsure at all n locations
ctcttctccgccacttctnaatctattgaatcaacaatcatgtcggacgaagagcaccatttcgagtccaaggccgacgccggagcctccaaaacctaccctcagcaagccggtaccatccgcaagaacggctacatcgtcatcaaaggccgcccctgcaaggttgtggaagtttcgacttccaaaactggaaagcacggtcacgctaagtgtcactttgttggaattgatattttcactgccaagaaacttga

SEQ ID NO: 286390 - DNA, 263 bp, Glycine max
  unsure (1)..(263): unsure at all n locations
gggaaggataaagttcggtttgatcgtaatggcccagctgccatagccaagtatcaagctgataacgctattccggggaagaatgatggatgcaatccaatcggtccaacaccacacactttgcaagagctgcaggacacaaccttgggttctctcttgtcggcactcatgcagcactgtgatccccctcagaggcggtttccgttggagaagggcgtttgtccaccatggtggctactgggaatgaagatggtggncccaaa

SEQ ID NO: 286391 - DNA, 280 bp, Glycine max
  unsure (1)..(280): unsure at all n locations
gcaaaaaccacgaagttgaccggggggcaaaatttcaaccaacggcttgccaagacctagccacgggccaaaaccgaccaccgggcacatggaaaaacttaagcaatggctaaaccaagcagccccgcaaacttggcatcagccatcatttgtttctttgcctcaaagaagttcccccatagactaanagcatcaccgggaangttttgcaaggcaaaacccttcacnanaccctttccgtcatggtccatgttcatggatttttcaaagtctgccttgc

SEQ ID NO: 286392 - DNA, 273 bp, Glycine max
  unsure (1)..(273): unsure at all n locations
ctaattgaagtgattagattctctaccaagtcaattgagagggagattaactcagtcaatgacaaccctttgattgatgtgtcaaggaacaaggcacttcatggtggtaacttccaaggaactcctattggagtctccatggataatacacgtttggctcttgcttcaattggtaaactcatgtttgctcaattctctgagctgtcaatgattattacaacaatggtttgcctcaaatctcactgcnagcagaaaccccagcttggattatgg

SEQ ID NO: 286393 - DNA, 283 bp, Glycine max
gaggacatcgctctgcctgcaatttaagccacatcatattgcggcaggtgccattttccttgctgccaagttcttgaaagtgaagcttccatcagatggtgagaaggtttggtggcaagagtttgatgtcaccccacgccaattagaggaggtttgcaatcaaatgttggaactctatgagcagagtagacttccaccagcacagggaagtgaagtagaaggaagtgctagaggaacaagagctgcttcaaaggctcctctgcaaatgaggagcaggcctcaa

SEQ ID NO: 286394 - DNA, 276 bp, Glycine max
  unsure (1)..(276): unsure at all n locations
cctctctctctgagatggcanagaatgtggggattctcgctatcgacatctacttccctcccacctgtattcagcaggaattgctggaggctcatgatggngccantnaagggaaatatactattggactnggtcaagattgcatggcgttttgtacagaagtagaagatgtcatctcgatgcgcttgacagtagtttcttcccttcttgaaaagtatgcgattgatcctaaacacattggtcgtncggnatnaggcatgagacgtgatngacaaa

SEQ ID NO: 286395 - DNA, 279 bp, Glycine max
  unsure (1)..(279): unsure at all n locations
gagcagtttcagacacagngagaggggtttgggattggagggattgacgctgcgtctcttcctcttctctttcgatccatccctcattcctaatcctccaatccaaccacctcagcctcacactcacatatacacatatctgaacgcgtatcgtccctcctatggcttcaaagcgcatcctcaaggagctcaaggacttgcagaaagacccaccaacttcttgcagcgctggtccagtagctgaggacatgttccattggcaagcaacaataatgggtc

SEQ ID NO: 286396 - DNA, 277 bp, Glycine max
  unsure (1)..(277): unsure at all n locations
ctgcnaaggagcaggtagcaggtagtgcagaggatccgacaaagnaccaagcagcgggtggtgcagaagatcccccaaaggaccacgtggcaggtggtgcagaaaatcctttnaatgacctgatagatcttgcacaaaatcctgatantgancaancaggtantgaggaaaatctgttaaacaaccaagcnggtggtgtagaanattctgncanagaaccatgcagcagctggtgcaggagatcctccaaatgaccaagcagcagatggttcngaga

SEQ ID NO: 286397 - DNA, 270 bp, Glycine max
  unsure (1)..(270): unsure at all n locations
ccctatttatgcacaatatgtgcatccgacccactcctgaagagctagaggaatttggaactccagacttcactatatacaatgcaggacagttcccttgtaatcgttacacacactacatgacttcatcaactagtattgacatcaacattgcaaggaaagaaatggtcatcctggcacacaatatgctggggnatgaagaaaggtctctttggtttatgcactacctcatgcccaagcgcaatattctctccctnacattcgggtgca

SEQ ID NO: 286398 - DNA, 274 bp, Glycine max
cccaatactaaaaatgatattgttaagaacaaagagcccaagacaaccaagaaggctcctactaacaacttcccttcaaatgtcaaaagtctactgtcaactggtatttttgatggtgttcaggtgaaatatgtttcatggtcacgggagaaaagtcttaaggggatcataaaaggaactgggtatttgtgttcatgtgacaactgcaaccagtcaaaggctcttaatgcatacgagtttgagcgtcatgctggtgccaagacaaaacatccta

SEQ ID NO: 286399 - DNA, 273 bp, Glycine max
ggggaacccaaaccgaaaccctaaccctaacggagagatggcggagcacttggcatcgatattcgggacggagaaggacagggtgaactgtccgttctacttcaagatcggcgcgtgcaggcacggcgaccggtgctcccggcttcacaccaagccgacaattagcccaacattggttctgtcgaacatgtaccagaggcccgacatgaacatgagcattatcaccaaccccgatcagccacaaccccaatcccttgaccccgacaaggtgca

SEQ ID NO: 286400 - DNA, 273 bp, Glycine max
  unsure (1)..(273): unsure at all n locations
cgagcttttgatcaggaagctcnccttccagaggctggttcgngaaattgctcaggacttcaagactgatctgcgtttccagagccacgccgtgcttgcattncaagaagctgctgaggcataccttgttgggctctttgaggacactaacctgtgtgccattcacgctaagcgggtaaccattatgcccaaggatatccagctggcaagaaggattcgcggtgaacgtgcttgaggtggtggttgtgaagatgaagatgaagatgggttgct

SEQ ID NO: 286401 - DNA, 276 bp, Glycine max
  unsure (1)..(276): unsure at all n locations
caacaacttctgctacttcctactccaaccgcacttctgctccgcaattatcatgggcaaggtcaagatcggaatcaacggatttggaagaattggccgtttggtagccagagtggctctgcagagagacgatgttgaactcgttgccgttaacgaccctttcatcaccaccgattacatgacatacatgtttaaatacgacagtgttncatggacactggaagcatcacgatgtccaccgttaaggacgagaagacccttcttcttcggtgacaa

SEQ ID NO: 286402 - DNA, 274 bp, Glycine max
  unsure (1)..(274): unsure at all n locations
ctttcatttgttgtgcaatcttacaagttccaaacttctctatnttgttattatttgttctcacntctcacacatacagaanngnancctttatattatcatggcttctaaggtggtntcggttttggttatagcgatgatgttgtttgccatgaactgtaactgcactagtgttggccacatgccttcaaccaaagaggaaggtcacgattttcaggagtctaaagccaagaccacacaaactgcgaacaaggccatggaaactggtaaagag

SEQ ID NO: 286403 - DNA, 277 bp, Glycine max
caacaattcatttgggtcgttaggaaaagcggagaagaaaagggagagaaatggttacatgatggatttgagaaaagaatggaaggcaagggactaatcataagagggtgggcgcctcaagtgttgattcttgaacaccaagcgattggcacgtttgtgacacattgtggatggaattcaacgttggaagcagtgactgcaggggttcccatggtcattggcctattttcgccgaccaatttttcaatgagaagttggtgattgaggtccttaaaat

SEQ ID NO: 286404 - DNA, 274 bp, Glycine max
  unsure (1)..(274): unsure at all n locations
cgtcttcataaacgcctttnttctccgtttccgtttcctcgttcgaattcgctttttgatctgcgaaaatgagagagtgcattctcgatccacattggtcaggctggtatccaggtcggaaatgcttgctgggagctctactgcctcgagcacggcatcgggcccgatgggcaaatgccaagtgacaagaccagttggcggtggtgatgatgcttcaatatttctttnagcgagactgntgtggaaagcacgtgccacgtgcagtgtttgtaga

SEQ ID NO: 286405 - DNA, 274 bp, Glycine max
  unsure (1)..(274): unsure at all n locations
caacctttgggagttattgaccgaaagcntctttctgcaagaaagaacagtaccacatactgctacgattttcctccttgcatttgaaacggccttggaacagtcatgggcaatccaacagccaggatttcaaagggccaaagataaaaatcttttaaaggtaacagagctcaaatttgcggataaagaaggtagctggggtgctcctcttgttcctgtggagcgttaccctggactcaacgatgttggcatggtagcctggtttatggaaatg

SEQ ID NO: 286406 - DNA, 268 bp, Glycine max
gcgacgacgatccaagtgatagacactcgtcgcgatggaacgtgtagctgaatccgagcgaactctgtacccatacgtgactggatcctctgtagtcgctatcaaatacaaagatgggattctaatggccgctgacatgggaggttcgtatggatctaccctgcggtacaagagtgttgagcgtatcaagcctattggaaagcattctctcttggtgctagcggggagataagtgactttcaggagattctgcgttacctgatgagct

SEQ ID NO: 286407 - DNA, 270 bp, Glycine max
cttagattttgtgaatggctgaagtggaagagggacaggtcatcggcgtccacaccgttgatgagtggaagctgcaactccagaatgcaaaagactccaaaaaactgattgtggtggattttactgcttcctggtgtggtccatgccgttttatggccccagttcttgcagagattgcaaagaaaactcctgaattgatcttcctcaaagtggatgtggatgaagtgaggcctgttgctgaggaatattcccatgaggccagccaacctt

SEQ ID NO: 286408 - DNA, 275 bp, Glycine max
gaatcaaagaaaggggtggtggctgcttcgaaagcttaataatttgtttatttccagaacatcatagttttcgcagcagcaaactaacaaattactcatatcatataataagatggcccgttctctctcgcaagccaaacgtattggtgtccttgttgctcaatctatctccctaattcccgttcatcggcgaggttacgcagtggcatccgatgtatcggtaagagttggattgggtaatattgggcgaaggaatggaatcgtgggaggtgtag

SEQ ID NO: 286409 - DNA, 272 bp, Glycine max
  unsure (1)..(272): unsure at all n locations
ggagaggcttggctccaccttggnggcccacaggggcagagaattggtggggtgaacaaggncttctggcccatgaacatggcccacctccttataagangccccatgacctcaaaaaggcttggaaagtgtctctcttggctgcagtcatcaaacacatgtctcctgattngnataaacttagaaggtcggtgactcagtccaagnctttgcaagataagatgacaaccagggacacggcaattggtccaaggtcatgaaccngaaganac

SEQ ID NO: 286410 - DNA, 272 bp, Glycine max
  unsure (1)..(272): unsure at all n locations
catccgcagctgctgttattcgcaccgcaaacaaacagtgagccatggccgtcggaaagaacaagcgcatctccaaagggaaaaagggtggcaagaagaaggcagctgatccctttgccaagaaggattggtatgacattaaggccccttctcttttcaagtgaaaaatgttggcaaaaccctcgtctctcgtacgcgggtaccaagattgcttctgaaggacttaaacatagantgtttgaggtctccttgngctgatcttcaagggatgg

SEQ ID NO: 286411 - DNA, 273 bp, Glycine max
  unsure (1)..(273): unsure at all n locations
gaataaggaagacggtgatgcagatgctgagggacagaaattttctggttggtgacttcgagatcaacatgtnccaagcacgagttcaagtccaagtacggcgaacacatgaagcgcgaggacctcgtcatcaacaaatccaagaaggacaactccggcgaccagatctacgttttcttccccgacgaacccaaggtcggcgtcaagaccatgaagacctacaccaaccggcatgaactccgaaaacgtctacagagccatcctcgtcaccca

SEQ ID NO: 286412 - DNA, 268 bp, Glycine max
aacaacttctgctacttcctactccaaccgcacttctgctccgcaattatcatgggcaaggtcaagatcggaatcaacggatttggaagaattggccgtttggtagccagagtggctctgcagagagacgatgttgaactcgttgccgttaacgaccctttcatcaccaccgattacatgacatacatgtttaaatacgacagtgttcatggacactggaagcatcacgatgtcaccgttaaggacgagaagacccttctcttcggtg

SEQ ID NO: 286413 - DNA, 265 bp, Glycine max
  unsure (1)..(265): unsure at all n locations
gctcaggctgccaatgctgatcctttgtatttgtactttaaatccgggtggaaggagtttaagcctgtgaagtcgagcactacatttgcctctnccattcaaattggtgatcctgtttccattgacagggcggttcacgcgctaaagagttgcgatgggattgtggaggaggccacggaggaggagttgatggatgctacagcgcagcggattctactgggatgtttatttgcccccacaccggggttgctttaactgcatgttt

SEQ ID NO: 286414 - DNA, 268 bp, Glycine max
caaaggatgaccctgcaaaggaggctgctaacttcacagcccaagtcatcatcatgaaccaccctggtcagattggaaatggctatgcccctgtcctcgactgccacacttctcacattgctgtcaagtttgctgaactcatgaccaagattgacaggcgatccggcaaagagcttgagaaggagcccaagtttttgaagaacggtgatgctggttttgttaagatgattccaaccaaacccatggttgttgaaactttctccgagta

SEQ ID NO: 286415 - DNA, 141 bp, Glycine max
  unsure (1)..(141): unsure at all n locations
aatagaacatggaattngtctctagaaantcaccataaggctttgtgagccttttattctatgcgtgtgctttctgttactggagactggagttgagatttgcatggtgtttggctgtaatttagtgaattcttcattttg

SEQ ID NO: 286416 - DNA, 271 bp, Glycine max
  unsure (1)..(271): unsure at all n locations
gttgaaaagaaaccctagcaagtggagcaatggcagacgttgaagttcgatgtgnnnnnnnnnnnnnnnnnnnggctgccgaagaagagaacgttcaagaagttcagttttcgaggcgtggatctcgatgcacttctcgacatgtccaccgatgaactcgtcaagatgttcagtgcccgcgctcgtagaaggttccagagaggcctcaccagaaagcccatggccttgatcaagaagctccgtaaagcgaaaagggaagctccaccaggtg

SEQ ID NO: 286417 - DNA, 268 bp, Glycine max
  unsure (1)..(268): unsure at all n locations
aaacaccgcaatggacgagctatccatgttggtggaacaaggctatgacttgttgggcacccttaattggggagaccatatccctttcctgaaagactttgacctacagaaaatccggttcacctgctccaaattagtccctcaagtgaaccggttcgttggttcaatcatcgccgaccaccaggccgacacaacccaaaccaaccgcgatttcgttcatgtnttgctctctctccaaggtcccgataaattgtctcactccgacatg

SEQ ID NO: 286418 - DNA, 263 bp, Glycine max
cttctgttgatgaagtcactgttcctggtgcccttgctctggatctgattgagcaggctgaagtggaagttgagagacttgatcagctgaaagccagcaggatgaaggaaattgctttcaagaagcaagcagagctcgaagagatatttgtctgtgctcatatagaagtagatccagatgctgcccgggagaagattatggcctgattgattcaggaaacattgaaccaatgaattactggctgacatggacaatcagatagg

SEQ ID NO: 286419 - DNA, 263 bp, Glycine max
agaatcagaagatgaagaaagaagacacagtgaagctgatcagttccgaaggtttcgaatttgtggtcgacaaagaagctgcaatagtttcacagaccatacataacatgcttacttctccagggagtttcgctgagaggcagcacggcgaagttacctttcctgagatcagcaccaccattctcgagaagatttgccagtacttttattggcatctccaattcgccagtgggaaggagacggaattttccatgaacctgaat

SEQ ID NO: 286420 - DNA, 263 bp, Glycine max
agttacagtgatgagaattctgattataatgtacttgctggagagaagatgaggtatggaaatgacttgctgcaaaggaaagatgacaatggctttttcctgaagggttggtggaatgatcttcttcatggaaaaatttataaagagattgatcacagtggcaaaatggttttgctgatggagatactaaccatgagttctgatgtgggtgataaggtgttagtttttagtcagagcataccaaccctagacctcatgaactt

SEQ ID NO: 286421 - DNA, 262 bp, Glycine max
cttgacactaagggacctgagattcggactggttttctgaaagatggaaaacctattcaacttaaggaaggacaagaaatcaccataactactgattatgacattaagggggatcaggagatgatatccatgagttacaagaagctgcctgtccacttgaagcctggaaacaccatattgtgctctgatgggacgattactctcactgtctatcttgtgatcctgatgctggtactgttagatgtcgttgtgaaaacactgc

SEQ ID NO: 286422 - DNA, 265 bp, Glycine max
gaggcactgtggcagaagtcctagggagtgtaaaacagagacgcaaaatgaagacgatcttgtcgtctgagacctgaatattcccgacggcgtgagcatcaaggttcacgctaaggttatcgaggttgagggccctcgtggaaaactcgtgcgagacttccaccatctgaacttggacttccaacttattaccgacgatggcggtaaaaggaagctcaagattgattcttggtttggttctcgtaaaacctccgccgccatccgc

SEQ ID NO: 286423 - DNA, 269 bp, Glycine max
  unsure (1)..(269): unsure at all n locations
cttctattcaagtcattcttttggatcttcacatgcctgatatagacggcttcgaagttgccaccaggattcgaaagtttagaagtggaaaccggcctatgattgttgccttgactgcaagtgcagaagaagatttgtgggacagatgcatgcaagttggtattaatggagttatccgtaagccagttttgttgcatggaattnctagtgaactcagaagaatcctgatgcagggaaatattgtcctgtgagaatggaatggagggtgc

SEQ ID NO: 286424 - DNA, 264 bp, Glycine max
gaaagggtgtggcttcttacaaagcgctttgtcgttttctgatgagtgtgaaacctttgattggaatatgggttcatcaaaatcctgagcttgggaacgtggtgtatgtgatgccgggttttgtttctgttgttgggtgcaggataatccctcaggagcttggtccttggggatcgaagagggtcctatactgtgggcttctgtgtttgaggttgttagtgacttggatggttccatgatgtttttccttcatggggagggaga

SEQ ID NO: 286425 - DNA, 263 bp, Glycine max
ggaaactctggtggaggcccgcagcgatactgacgtgcaaatcgttcgtctgacttgggtataggggcgaaagactaatcgaaccgtctagtagctggttccctccgaagtttccctcaggatagctggagcccgcgggcgagttctatcgggtaaagccaatgattagaggcatcgggggcgcaacgccctcgacctattctcaaactttaaataggtaggacggtgcggctgctctgttgagccgcgccatggaatcgaga

SEQ ID NO: 286426 - DNA, 262 bp, Glycine max
ggcaactgggatcaataatagctgaaacttctactgtacagggttcggcttgcccaactgtccaagcttgagatctattttagaatatgcttaacacaacacatgcaattcgaacgttgttttctcgaatttcataagagaagaaagctgctagcagagggaagttctacacttttttgtttggattgatcgagtgtactttttctttcgagattggcttggtgtgcagtggaaagagggtggaaaagagtggtaaggggga

SEQ ID NO: 286427 - DNA, 262 bp, Glycine max
gacggcagcacgcgcaaaaatggtgaagtttctgaaaccaaacaaagccgtcatcgtccttcagggacgctacgccggcaaaaaagccgtgatagtgcgaaccttcgatgaaggcacgcgcgagcgcccctacgggcactgcttggtggcagggataaagaagtaccctgcgaaggtgatcaagaaggattcggccaagaagacggccaagaagtcgcgtgtgaaggcgttcgtgaagctcgtgaactaccagcacctcatg

SEQ ID NO: 286428 - DNA, 144 bp, Glycine max
gaatcaaagaaaggggtggtggctgcttcgaaagcttaataatttgtttatttccagaacatcatagttttcgcagcagcaaactaacaaattactcatatcatataataagatggcccgttctctctcgcaagccaaacgttt

SEQ ID NO: 286429 - DNA, 261 bp, Glycine max
aagaaaacaccaattaaccaccacctgataggctgatacaatacaatctcctttcctttttcgacaacaagaatggctgcgaaatctagttcgagttcgacaacaacaaacgtggtgactctgaaggcggcgtgggttctcccgcagcgcacgcagaacatccgtgaggtgtacgaggttgggcggaagctcgggcagggccaattcgggaccaccttcgagtgcacgcgccgtgcgagtggtgggaagttcgcgtgcaag

SEQ ID NO: 286430 - DNA, 145 bp, Glycine max
ccaaaatattttggtacgtaagtcttttaaaaagtttgcatctcctctttggttttccttagttctgaaagttatctcctaagaagacaatcatatgtactgtacgtagtgtgaagatatagtattgtatgctgcagaaaaaaaa

SEQ ID NO: 286431 - DNA, 263 bp, Glycine max
  unsure (1)..(263): unsure at all n locations
ctagttcacagcttcagttcgtttttgttgatcctgtgaacttanggctgacggggtggttctgttggatacatgggccagcatgtttgggatgagggttaggattgcattagctgaaaagggtgttgagtatgaatacaaggaagaaaatnctcaggaacaagagtcctttgcttttggcaaatgaacccaattcacaagaaaattccagttctgatccataatggcaaaccaatttgtgaatctgcaattatagtgcagta

SEQ ID NO: 286432 - DNA, 263 bp, Glycine max
gaaacttaatcgatcatcacttcacttcactaatacatcatggcagacgagacccagaacaagtatgagagctctgaggttgaggtccaggatcgtggtgtttttgactttctcggtaagaaaaaggatgaagaagacaagcctcatcctcaggaggaggtcatcgccaccgagtttcaaaaagtcactgtctcagaccaaggagagaacaagcacagcctcttagaaaagcttcaccgatctgacagcagctctagctcttc

SEQ ID NO: 286433 - DNA, 269 bp, Glycine max
  unsure (1)..(269): unsure at all n locations
ggagaagaggaacgaggagtgggctttngagaagaagcaggaactcgatgccgcaaagaaaaagaggttcgaaacgcggaagctgatttttaacagagccangacagnactacccaggaatatcgacgagacagcaaaaggagttnattaggttgaagcgtgaagccaagcttaagggagggttttatgttgaacctgaagctaagctcttgttcancatcaggatccgtggtatcangccatggatcctaaaacaaggaagntctgcc

SEQ ID NO: 286434 - DNA, 264 bp, Glycine max
  unsure (1)..(264): unsure at all n locations
gttatactctctctctctttgtcgcttggatcactgatctcatctcaattttcagatatgtcgacatctgataagccagaagtggtggaaaggggtagcaaggatgaanaacacaaggaagatgatcaagaggaggggaagggtggattcattgagaaggtgaaggatttcattcatgacattggtgagaagattgaggaagctattgggtttgggaagccaactgctgacgttactgcgattcacattccatcgattaatctt

SEQ ID NO: 286435 - DNA, 264 bp, Glycine max
  unsure (1)..(264): unsure at all n locations
atggctctcccagactcttcttcccgtcgcaactccctgatcccctccttcatctactcctcttcctccaaaacgctccctttccaccacatgctcaacannnnnnnnnnnnnnnnnnnnnnnnnnnnnnnnccgccgccggccaatctcgacgccggatcgcgtggcctcatgattncctctcncagcgagtcacgcaagatcgagttgtactcccccgccttctacgccgcctgcaccgncggtggaatcctcagctgtggc

SEQ ID NO: 286436 - DNA, 263 bp, Glycine max
  unsure (1)..(263): unsure at all n locations
cagaggtggaacaattgcacaagatatacaaactatgtggttcaccttcagatgagtattggaagaagtcaaagttgcctaatgctacctcgtttaaaccacgagatccatacaagagacacataagagagacatttaaagattttccaccttctgctctacccctcattgatacacttcttgcaattgatccggtagaacgncaaactgcctcagatgctctaagaagtgagttctttaccacagaaccttatgcttgtgat

SEQ ID NO: 286437 - DNA, 262 bp, Glycine max
  unsure (1)..(262): unsure at all n locations
cngagcctccggtgactatgctattgttataagccacaaccctgataacgacacctctaggatcaagcttccttctggtgcgaagaagattgtgccaagtgggtgcagggcgatgattgggcaggttgcaggtggagggaggactgagaagcctcttctgaaggctggtaatgcttaccataagttcagagtgaagaggaattcatggcctaaggtgcgangtgtggcgatgaacccagttgagcatcctcacggaggaggt

SEQ ID NO: 286438 - DNA, 257 bp, Glycine max
  unsure (1)..(257): unsure at all n locations
ccatgatacatctcctggtacactcaccgcctctgtctgcgcctctgatgttgacctcatcacacaagtagcaggtgctgaatggcttggagatacaattgtttatgcttacagatcaggtgaggtgattcggctaccaaaaggggtttcaattccagtgacactaaaagttctggagtttnagcttttccacttctgtccaatccangaaatagctccaagtatatcatttgcagcaatagggctactggatatgt

SEQ ID NO: 286439 - DNA, 264 bp, Glycine max
  unsure (1)..(264): unsure at all n locations
cagagcaggccaagnnccgggccgggntcaactcggccatcataaggggggagcncaacgtgaagtggaacgacgtcgcagggttggagagcgccaaacaggccttgcaggaggctgtgatttnccctgtnaagttccctcagttctttactggganaacacgaccctggagagctttcttgttgtatggacctcctggnnngggaaaatncatatttagccaaggcagttgcaacagangctgagtccacgtttttcatgttt

SEQ ID NO: 286440 - DNA, 261 bp, Glycine max
  unsure (1)..(261): unsure at all n locations
gggaagttgtggaagttgttgggcgttctcaacggtggccacagtggnagcaataaacaagatngtgacagggaagtttgtgtccttatctgaacaagaacttgtggactgtgacagagcctacaatcaaggatgcaatggtggccttatggactatgcattcgaattcatcattcaaaatggtggcattgacacagacaaagattacccataccgtggctttgatggcatctgtgatccaactaagaaaaatgcaaaggc

SEQ ID NO: 286441 - DNA, 258 bp, Glycine max
  unsure (1)..(258): unsure at all n locations
cttcaaggcgttttnagaagtggtgaaaagccgtagcttgccgtgggagaatgcggaaatggatgcaattcactctttgcagcttattctgcgtgactcgtttaaagatgctgagcatagaaattctaaggctgttgtggatccccatgtgtcagaacaagagttgcaaggggtggatganctaagttctgtggccagagagatggttagattgataganacagccactgctnccaatatttgctgttgatgtcgatg

SEQ ID NO: 286442 - DNA, 257 bp, Glycine max
acttagggttgggcctttttttgaggttttcagcgcttctttctcacaatggttcttcagaatgatattgatttgctgaatcctccagctgagttggagaagagaaagcacaaactcaagcgtcttgttcagtcaccaaactctttcttcatggatgttaagtgccagggatgcttcaacataacaactgtgtttagccactctcaaactgttgtggtgtgcggaaactgccagactgttttgtgaccaaccaacag

SEQ ID NO: 286443 - DNA, 253 bp, Glycine max
  unsure (1)..(253): unsure at all n locations
gtgcgatcccgagaaggagnatttgtgtctatatgggtttccaaatgaaacatgggaagtgaatttgcctgttgaggaagtgcctcctgaacttcctgagccagcattaggtataaactttgccagggacggcatgcaagagaaggactggctatcactggttgcagttcacagtgactcatggctgcttgctgttgctttctattttggtgcccgctttggatttggtaagaatgaaaggnaaaggcttttc

SEQ ID NO: 286444 - DNA, 254 bp, Glycine max
  unsure (1)..(254): unsure at all n locations
atattcntgtcatttgtnatgtgtanaccccagctggtgagccacttccaancaacaagaggtatggtgctgccanaattttcagtcaccctgatgttgctgctgaggaaccatggtntggtattgagcaagagtataccttattgcaganagatgtaaattggccacttgggtggccccttggtgggtttcctggaccacagggcccatactactgtggaatggtgctgataaagcctatggccgtgatattg

SEQ ID NO: 286445 - DNA, 264 bp, Glycine max
cattgttgagggtttgatgaccactgttcattccatcactgccacccagaagactgttgatgggccatcagccaaagactggagaggtggaagagctgcttcatttaacatcattcctagcagcactggagctgccaaggctgttggaaaagtccttcctgctttgaacggaaaattgactggtatggcattccgtgttcccaccgtggatgtctctgttgttgacctcacagtgaggctggagaaggaagcctcctacgatga

SEQ ID NO: 286446 - DNA, 259 bp, Glycine max
  unsure (1)..(259): unsure at all n locations
ggacanttcccttcacccaacctaattggtacttgcaattagtgtagaagatgagtacgttggatgcaacaagggctgaacttggtcttcttgttttatatttgggcaaggctgaagcaagggncaaaatatgcagggcaatacaatatggttccnaatttttgagtaacggggaacctggtactgctcagaatgtcgacaaaacaaccagcttggcacgaaaagtcttccgtctttttaagtttgtcaatgacctaca

SEQ ID NO: 286447 - DNA, 253 bp, Glycine max
  unsure (1)..(253): unsure at all n locations
gtctatgcctcatgtctcatcctcaacccaaacaatgcattnttgaacatatttactttgcacttcccaattncggttgttctttgggaggtctgtgtatgagtctcggagacaatttggggagattttggctactgngagtcctgtggactgtgatgttgtgattgctgtgcctgattctggtgttgtggctgcgcttggttatgccgccaaagctggggttccgtttcagcagggtttgattaggtcacac

SEQ ID NO: 286448 - DNA, 252 bp, Glycine max
  unsure (1)..(252): unsure at all n locations
ccaatgcctacngcgnagacacctggtagacagcattctagtggtggctacgatggtgacactaataaacatcatggaactactggtggctataatgatgacaccaatagacatcatggaactaccggtgtctatggtatagacaccgntaggcaacaacatgggactactggtggctatgccggtgacactggtaggcaacatgggaacatcgntggcccttactatggaaccaacaccgcagacaccggt

SEQ ID NO: 286449 - DNA, 259 bp, Glycine max
actaaagccgagcagcgagagagagaaaccctagcaaaaatgccggctggtcacggtttgagatcccgcaccagagattccttctctcgtcccttcaggaagaagggtaccatcgccctcaccacatacctcagaacctaccacgtcggcgattatgtcgacgtcaaggttaacggcgccgtccacaagggaatgcctcacaagttctaccatggccgcaccggtcgcgtctggatgtcaccaaacgtgctgttggggt

SEQ ID NO: 286450 - DNA, 250 bp, Glycine max
  unsure (1)..(250): unsure at all n locations
angctttctctannaacttaaagcttggtatccntgnngattcccagaacaagggcnagattgctgaattgctnnggtaccactccaaccaagagtggtgatgagctgacaagcctcaaggattatgtgnccaggatnnaggaaggtccgagtnncatctactacatcaccggtgaaagcaagaaggctgttgagaactccccattcttggagaagttgaagaagaaagggtatgaggttcttntcatgg

SEQ ID NO: 286451 - DNA, 259 bp, Glycine max
  unsure (1)..(259): unsure at all n locations
cacggttcttcttagaggtcccaagaatgcgcgtgaggctgtcaagcactttggaccagctcctggtgngccccatagccacaccaagccctatgtccgtgcaaagggaaggaaatttgagcgggccagaggaagaaggaatagcagaggctttagagtttgagttctggagctcaaacatgaancacttttccttttaacttatgatcattatgtattgttttcttgttttttggaacaatctgttaattttagtttt

SEQ ID NO: 286452 - DNA, 236 bp, Glycine max
  unsure (1)..(236): unsure at all n locations
cntcttcgtctcanacctcttcgtacccttcgattcattccacttcttccaaaatggccaaanacccagttcgcgttctcgtcactggagccgcagggcaaattggatatgctcttgtccctatgattgctaggggagtgatgctgggtcctgaccagcccgtgatcctccacatgcttgacattcctccagcagcagagtcgttgaatggggttaaaatggaattggtggatgct

SEQ ID NO: 286453 - DNA, 256 bp, Glycine max
  unsure (1)..(256): unsure at all n locations
agagaaaccagtgactgacttttcgagaaaganaaacaaaaatgagtttccgtcattccatcatgaacgctcttcccattctcctcttcttcctcttcgtttctgcattagtttctgcgaagaaaactggtgatgtgacggagctgcaaattggcgtgaagcataaaccagtatcatgtgaagttcaggcacacaaaggtgacagagtcaaagtacactataggggaaaactcactgatggaactgttttcgattc

SEQ ID NO: 286454 - DNA, 255 bp, Glycine max
gcaataccacttgtgtatcctaggatgatggctatccatgatcttgactcaaaggaagatgatgactctgttattcctccctttcttcctctttctagtgaacacatcagtgatgatggaatatatcttcttgagaatggtcatgattgtttgatatatgttggagactctgtgaatccagacatcgtgcagaaactgtttggtgttcgctacagttgacaaagtccctaccctgtttgtattgcagcagtacga

SEQ ID NO: 286455 - DNA, 253 bp, Glycine max
  unsure (1)..(253): unsure at all n locations
caacaacttctgctanttcctactccaaccgcacttctgctccgnaattatcatgggcaaggtcaanatcggaatcaacggatttggaagnattngccgttnggtanccagagtggctctgcanngagncgatgttgaactcgttgccgttaacgaccctttcatcatcaccgattacatgacatacatgtttaaatacgacagtnttcntggacactggaagtntcacgatgtcaccgttaaggncgagnag

SEQ ID NO: 286456 - DNA, 251 bp, Glycine max
ggcttcaactctgcttcccctggcaaccttcttcttagttctctccgcttcttatctccagattgctggggcgaaagcacaaccgttgactagtctcaagcttaactctccgatccttcaggagtctattgctaaagagatcaatgaaaatcctgaggcaggatgggaggctgctataaatcctcatttctccaattatacagttgaacaatttaagcgccttcttggagtcaaaccaacgcctaagaagg

SEQ ID NO: 286457 - DNA, 247 bp, Glycine max
  unsure (1)..(247): unsure at all n locations
caaaaccaatcgttaacaacaagcnatcctgntggaantngacttggcctggcaatttgtaggaggtttgtaaatcntatggaaggacatatttgggttgaaagcgaagggttagcaggacantaacaaagggacttcttatgcatttaggatgtgatgtaaccacagcaagctcaagtgaagaatgtctgcgtgttgtttctctggaacatgaagtggtctcatggatgtttgtgcagggttagat

SEQ ID NO: 286458 - DNA, 247 bp, Glycine max
  unsure (1)..(247): unsure at all n locations
gcactggcgcagtaaccctgaggcttctctnctcttctcttctctgtcgtgagtcaccatggtgagggttagtgtgctgaacgatgctctgaagagcatgtacaatgctgagaaaaggggaaagcgccaagtcatgattaggccatcctccaaagtcattatcaaattccttttggtgatgcaaaagcacggntacatcggagagtttgagtatgttgatgaccacagggctggtaaaatcgtggtt

SEQ ID NO: 286459 - DNA, 245 bp, Glycine max
  unsure (1)..(245): unsure at all n locations
taacaagctagctattagttcgattttgtagtaagtgaggtgccaatatggtgaagatagctcttggtactttggatgactcttttagcgctgcctctcttaaggcttatttcgcagagttccacgcaactctgatttncgtgttcgctggtgttggatcagccatacgcttacaacgagcttacaaaagatgcagccttggatccaacggggctggtggcagtagctgtggcacatgcatttgc

SEQ ID NO: 286460 - DNA, 251 bp, Glycine max
  unsure (1)..(251): unsure at all n locations
gnggctgcttantgggattagagagangcttgatggggtggtggtgaatgggagcttggagaggcgctatgtggggaatttgaatttgtcatttgcttatgttgaaggggagagcttgctcatgggtttgnaggaggtggctgtgtccagtggcagtgcctgcactagtgctagtttggagccttcgtatgtgttgagggcgttgggagttgaggnggacatggctcacacttctattaggtttggnattg

SEQ ID NO: 286461 - DNA, 251 bp, Glycine max
ctacaagtacttccttacaatcaaaaccaacaacaactatggcaagttatcaaaagcactacgatgatcagggtcgcaaggttgacgagtatggcaacgttgagaagcaaaccgacgaatacggcaaccctgttcatgctgctagtgtcacctatgtagccaccagaactgctgctggtggttacagtgatgacattaataagcaacatgataccaccaatgcctacggcgtagacactggtagacagctt

SEQ ID NO: 286462 - DNA, 248 bp, Glycine max
  unsure (1)..(248): unsure at all n locations
ctttctctctctaccattgccatggatccctacaagcaccggccntccagcgccttcaattctcccttctggactacaaattctggtgctcctatttggaacaacaactcctctttaaccgttggagctagaggtccaattctgctggaggattatcatcttgtggagaagcttgcaaattttgatagggaacgtatcccagaacgtgttgtccatgccaggggcgctagtgcaaagggtttctttga

SEQ ID NO: 286463 - DNA, 250 bp, Glycine max
ccccttgatcatgaagcatttgcagttccaaagggttataatgcacctcaacaagtgcacatcacgcaaggtgactatgatggaaaagcagtaatcatctcatgggtgaccacagaagagccagggcacagccatatacagtatggcacatcagagaataaatttcaaactagtgaagaaggcacagttacaaactatactttccacaaatacaagtctggctacattcatcactgtcttattgaaggcc

SEQ ID NO: 286464 - DNA, 246 bp, Glycine max
ctttctatctcatttccaatctcattttcgttcggttcaaacactctcatggcatcagacaagaagattaggatcggcatcaacggatttggaaggattggccgtttggtggccagggttgctcttcagaggaatgacgttgaacttgttgctgtcaacgatcctttcatcaccactgattacatgacatacatgttcaagtacgacaccgttcatgggcagtggaagcattttgatgtgaagctg

SEQ ID NO: 286465 - DNA, 250 bp, Glycine max
gcactcttcgttcttcgactgtctacgatctgctttctctgaattgtgaaaatgtcgctcggagaaactgcttgttcatacgcagctctcatccttcatgaagatggaattagtgtaactgctgacaagatcagcaccttgttgaaaactgcaaaggttccagtagactcttattggccaaccttgtttgctaaacttgctgagaagaaaaatcttggcgatttgatagcaaatgcggcaggcggtggtg

SEQ ID NO: 286466 - DNA, 253 bp, Glycine max
ctcagttcctactgttcaagtttcacaccaacactctcttcaatcagttttctaacaacaggacagaacaaccgttcaagaatagtcttccaaggccggaggacttttccaaggccctatacacctttgatattggacaaaatgatcttgcctttggtcttcaacacacttcacaggaacaagttataaagtcaattcctgaaatcttaaaccagttcttccaagcagtgcagcaactatacaatgtaggggc

SEQ ID NO: 286467 - DNA, 257 bp, Glycine max
  unsure (1)..(257): unsure at all n locations
cnacaatgagcttgtgcgtactcagactcttgtcaaaagtgctatcgttcaggttgatgctgctccattcaaacagtggtatcttcagcactatggtgttgagattggtaggaaaaagaagacagctgccaagaaggaaactgcagaggagggtggtgatgctgctgcagctgcagaagaagccaaaaagagtaaccatgtgcagagaaaattggagaagcgccagaaagatcgaaagcttgatgctcacattgagg

SEQ ID NO: 286468 - DNA, 248 bp, Glycine max
ccaccgcctcccttatcagccgccgtccccaccggagcggcgatcccaactggtccgccattcaggccgccgtcaacctctcctccgacggccgcctccacctccgccaccttaagctcctccgccacctcggctccggcaacctcggccgcgtcttcctctgccgcctccgtgactacgacggcgcccacttcgccctcaaggtcgtcgacaaagacctcctcaccccgaagaaactctcccacgcg

SEQ ID NO: 286469 - DNA, 245 bp, Glycine max
  unsure (1)..(245): unsure at all n locations
gatatatagaaaaacaaaggagaaaagataganatggagaagtttccagttgttgacatggggaaccttaataatgaagagagatcagcaaccatggagataatcaaagatgcctgtnagaactggggtttctttgagttggtgaaccatgggatatccatagagttgatggacaccgtggagaggatgacaaaagagcactacaaaaagtgtatggagcaaaggttcaaagaaatggtagcaag

SEQ ID NO: 286470 - DNA, 244 bp, Glycine max
  unsure (1)..(244): unsure at all n locations
acagtcncgattgcagccgaagttttcaaaagagctggtanttacgatcccaagagacttttnggagtcactatgcntnatgttgttagngccaatncgtntgtggcagaagttctgggtgttgatccaagggatgtggatgtcccagttgntgggggacatgctggaatcacaattttnnctcttctttctcagattaaacctccttgctctttcancccaaaagagattgagtacctgnctg

SEQ ID NO: 286471 - DNA, 257 bp, Glycine max
  unsure (1)..(257): unsure at all n locations
gngacaccgatagatagagngcgcggcataacctaaacctatctttcttctctctctgtgtgtgcgcttcaacggcaaccagaagcagccatggccactgcaaggactgtgaaggatgtttcacctcatgagttcgttaaggcgtactcctctcacctcaagcgatccggcaagatggagctgccagagtggactgatattgtgaaaactggcaagatttaaggngttggctccttatgatcctgactggtactatg

SEQ ID NO: 286472 - DNA, 245 bp, Glycine max
ttaggcagtgagttgctccgagatcattaaagattccattttggaggcccctgcgatgaatcttgtcccaaatgtgcgttctggtagctatgctgagatgggaccgcgggtttctatggatgacgaacacatctgtattgatgacctaggtgctcaacttggatttgtgttcaagtgcccgataccgagtgcattttatgcagtttttgatggtcatggagggcctgatgcagctgcttttgtta

SEQ ID NO: 286473 - DNA, 243 bp, Glycine max
atatactacagccattgacgtctggtctgttggatgtgttttagctgagctgcttcttggacagcctttgttccctggtgagagtggagttgatcaacttgttgagattatcaaggttctgggcactccaacaagggaagagattaagtgcatgaaccctaattatacagaatttaaattcccacagattaaagcacatccatggcacaagatcttccataagcgcatgcctccagaggctgt

SEQ ID NO: 286474 - DNA, 243 bp, Glycine max
  unsure (1)..(243): unsure at all n locations
gacaacttgnttatcantgnntacaacagcttggacgancctttcctcttatcntggaatggagtgctgcagaggagaaactcgtggcaggntggngtgtatggtaccaattgtccaattctaccagggcataacttcacttatgttcttcangtgaaggatcagataggtagctacttctactacccttcccttgcttttcacaaggcagcaggaggttatggtggattcaaaattgctagt

SEQ ID NO: 286475 - DNA, 244 bp, Glycine max
  unsure (1)..(244): unsure at all n locations
ggnggngtcttcatatccctacactggggngagaggtgaatgcaagtttgatccagagaaaatagcagttaagatcacaaatttcaccaatatccctgctgatgagaaccaaattgccgcatatttagtaaaaaatggtccacttgctatgggcgtgaatgcaattttcatgcaaacatacattggtggtgtctcatgccctctcatatgtagcaagaaaaggctgaaccatggtgtgttactt

SEQ ID NO: 286476 - DNA, 242 bp, Glycine max
  unsure (1)..(242): unsure at all n locations
ctcttttctactccgtgantcttccattcattgctttctttggngctttcgggtttgtgttgtaccctctcagcaactatattcaccctgaggcgtttgcggacaagcttctcaacatcctcggacctaggttccttggtccccttgcgatcatgaggatttggagcttctgtttgttctatgtcatggctgagttgtgggggagtgtggttatttccgtgctcttttgggggtttgccaat

SEQ ID NO: 286477 - DNA, 254 bp, Glycine max
  unsure (1)..(254): unsure at all n locations
cnngggttcagcangnntattctagnggcctcatacgacaccaaattcgaggngataaacanggttctgtttggtagagnggnggggcngcaacanggggnggngnggctgcaagagngtgtgattgtggaaatctcaaagaaacaaattcgggaactgagcaaacatgccaaatctagttcaaggaaaaccatttcttctgaagataaacctttcaacttgagaagccgcgaccccatctattccaacaagct

SEQ ID NO: 286478 - DNA, 243 bp, Glycine max
  unsure (1)..(243): unsure at all n locations
gttcgggatttttgcgcttcgtcctcaatttgcagcgcgtgagtgagggaacatggacggtgccgaattgtccaacataaagaaatggattgtgatgtatcctgtttacataaactccaaaaaaacgatggccgaaggaagacgcattggcctcgccaaagcctgcgaaaaccctacttgcgctgaaatcggtgattgctgcagctatctgaagcttccttttgcnattgagatagacaaggc

SEQ ID NO: 286479 - DNA, 241 bp, Glycine max
  unsure (1)..(241): unsure at all n locations
aganaggnaataattgatctttgaaaatgcagggaggaaagaaagctggagagtccatcaaggaaacagctgcaaacattggtgcttctgccaaggctggcatggagaaaaccaaggccactgtccaggagaaggcagaaagaatgacggcacgtgatccgatgcaaaaggagttggcaacccagaagaaagaggcaaagatgagccaggcagagctggacaagcaggcggcgcgtcacat

SEQ ID NO: 286480 - DNA, 242 bp, Glycine max
  unsure (1)..(242): unsure at all n locations
gggnaaggtatganctacatcatggagtccgaatttctgacagtgcacttgtggaagctgcaattctctcagatagatatatcagtggaagatttttgcctgacaaagctattgacctggttgatgaggcggctgcaaaactgaaaatggaaatcacttctaaacctactgcacttgatgagatcaacagatcagtcctgaaactagagatggagagactctctctcatgaatgatacagat

SEQ ID NO: 286481 - DNA, 241 bp, Glycine max
cttcttttgttgtttgtgtgtttgttttttctctcacctgaaaatgtcttgctgcggtggtaactgtggttgcggaagcgcctgcaagtgcggcaacggctgcggaggctgcaagatgtacccagacttgagctacaccgagtcaaccaccaccgagaccttggtcatgggagtggcaccagttaaggctcaattcgagagtgctgaaatgggtgttcccgctgagaacgatggctgcaaa

SEQ ID NO: 286482 - DNA, 243 bp, Glycine max
  unsure (1)..(243): unsure at all n locations
gnagagcacgctgagaganaggnagatgatcatccccgttcgttgtttcacctgcggaaaggtcattggaaacaaatgggatacctatttggaccttctgcagtcagattacagtgaaggagatgcactggatgctttgggactggttcgatattgctgtaggcgcatgcttatgacccatgtcgatctcattgagaagttactgaattacaacactctgggacaagtctgatcccagttaag

SEQ ID NO: 286483 - DNA, 246 bp, Glycine max
  unsure (1)..(246): unsure at all n locations
gnngangnggnngnntcagagctcagcgntnngcagaaagtggngatcgcgaaatggttcctcctcaactctcctcccggagaaatccaatacgttgccaaagatgtgaaatcgattctcaacaacgacgatttgtacaaggaagccgcttccgaggcttttccctattacaacaaatcgcacttgatttccattccaatgcccaaccgaagcggagacgtactggttacttcgttcggtgagctt

SEQ ID NO: 286484 - DNA, 242 bp, Glycine max
gtccaacctacccctttttcttctcccaccaacttcaccgtcttcttcctcgatcatgtctcacttcaagggcaagtaccatgatgagcttattgccaatgctgcttacattggcactcctggaaagggtattcttgctgctgatgagtcaacagggacaattggcaagcgtttggccagcatcagtgtagagaatgttgaatccaacaggcgtgctcttagggagctgcttttcaccgctc

SEQ ID NO: 286485 - DNA, 240 bp, Glycine max
  unsure (1)..(240): unsure at all n locations
gcatctagtacatggngcaangcagcatcacaatgtgaaanatgtatatgtatggcatgcactagctggttattggggtggggtgaagccagcggcaaccggcatggaacattatgacactgccttggcatatccagtgcagtcaccaggcgtgctaggaaaccaaccagacattgtcatggacagcttggctgtacatggccttggcctagtgcacccaaaganggttttcaatttcta

SEQ ID NO: 286486 - DNA, 238 bp, Glycine max
  unsure (1)..(238): unsure at all n locations
gggatggagaaagtgaaggtgcttcggcgactcctcgagacaccaggggttcaccaggggccagcctgtttcgacgctctgggtgcgaanttcatagaatccgctggcttcccctactgcatcaccagtggcttctccatcgccgcttccaggttggctctgcccgacaccggcttcatctcctacggcgaaatgctggagcagggccaactcatcacccaagccgtttccattcccg

SEQ ID NO: 286487 - DNA, 240 bp, Glycine max
  unsure (1)..(240): unsure at all n locations
ctgatggtgctggcattcagaagcaaagatctatgtatcactgggataagaggggtaaaaagtgcatcaagttaaacaatggtgatcgtgttgctgcaaatggaaagataaagacagagagtggtgcaaaaacaaaggcaaacaagactggtatatataagangtggaaagagcgctcacatggtaggatatcacttaaagggacaaataatggtgatcctcaggaatcaacaatttggc

SEQ ID NO: 286488 - DNA, 238 bp, Glycine max
  unsure (1)..(238): unsure at all n locations
gggtttttgtgatctgcagctacgatgggtaagggaacggggagtttcggtaagaggaggaacaagacccacaccctctgtgtgnggtgtggccgccgcagcttccacctccagaagagtcgttgctctgcgtgcgcttaccccgctgcgcgcaccaggaaatataactggagcgtgaaggccattaggagaaagaccaccggaactggnaggatgcggtacttgcgtancgtgcctc

SEQ ID NO: 286489 - DNA, 233 bp, Glycine max
  unsure (1)..(233): unsure at all n locations
gctgtatactggaagcactgatgagactgcaaggntttgggactgccaatctggaaagtgtgtaggtgtgatcaatcttggtggtgaagtaggttgtatgatcagtgaaggcccctgggtttttgttgggatacccaattttgtcaaggcctggaacacacaaaatttatcggagctaagtctaaatggtcctgttggacaagtttatgcacttgttgtgaataatgatatgc

SEQ ID NO: 286490 - DNA, 237 bp, Glycine max
  unsure (1)..(237): unsure at all n locations
cgcataataaccgtcctaagtttattgagagaattttgcaagtgtgagaaacatggcatctcgtcaaaacaacaagcaagagcttgatgaaagagcaaggcaaggagagactgttgtcccgggtggaactggtggcaagagcctggaggctcagcaacaccttgctgaaggaaggagcangggagggcaaacaaggaaggaacagctgggtacagaagggtaccaggaaatgggacg

SEQ ID NO: 286491 - DNA, 237 bp, Glycine max
  unsure (1)..(237): unsure at all n locations
gtcgtcgcgtgtactttcttgcgaaacagaagggcgaaggggcanacacaacttttttgtttttttgtagagcgagagagaaaaaaatgttggggatcttcagcagttccgtggtgtcgccgccggaggagctggtggctgccggcagcagaacgccgtcgccgaagacgacggcggggaagctgctgaaccggttcgtggagaacaaggcgtcggcggtgtcgctgcaggtgggag

SEQ ID NO: 286492 - DNA, 240 bp, Glycine max
  unsure (1)..(240): unsure at all n locations
gcaaaacttgtccgcgatgcctttcagctggcaaaagagaagtctccatgcattatatttatggatgnnattgatgcaattggaacaaagcgtttcgatagtgaagtangtggngacngggagttacagcgaacaatgttagaattgctcaatcagcttgatggttttagtagtgatgatcgtgttaaggtgattgcagcaacaaaccgtgctgatattcttgatcctgcccttatgtgt

SEQ ID NO: 286493 - DNA, 281 bp, Glycine max
  unsure (1)..(281): unsure at all n locations
gganacactcaacaacaggtgctgatccattctattggatgcgagtnattctcgcttcaaatccgtggaactgtcatggagcttggaatcactcccattgtgacttctgggctagtaatgcaacttctggctgggtcaaagatcattgaagtggacaacaatgtacgagaggatcgagccctgttaaacggggcacagaagctacttggtattttgatagctgttggtgaggcagttgcctatgttcttcggggatgtatggcagtgtggggcaattggag

SEQ ID NO: 286494 - DNA, 262 bp, Glycine max
ttttacatcaggatggagtctcaggtgaagcacgcacttgttgtcaaagtaatgggtcgtactggatccagaggacaggtgacccaggttagagtgaagtttctggatgatcagaaccgtcacatcatgaggaatgttaaaggaccagtgagagaaggagacattctcaccctacttcgagtctgaaagggaagctagaaggttgcgctaagagggtctttctttcttgatctttatggtagttactcggtgctaaaggtta

SEQ ID NO: 286495 - DNA, 271 bp, Glycine max
atctgatctgagagaatggctcctcggtctagcagcaaggacgcccaagaccttttccgcgctctttggtctgcttatgctgcaacccccactaatctcaagatcattgatctctatgtcatctatgccgtattcaccgctttcatccaggttgtttacatggctttggttggatcatttccatttaactccttcctatcaggagtactttcttgtgtaggaactgctgttcttgctgtttgtctcaggatccaagtgaataaagagaata

SEQ ID NO: 286496 - DNA, 272 bp, Glycine max
agagataccaacaagaaaagaaaaaaagaagagttgagattccctttgaagaaaagatggcatcccataggcaaagctatgaagctggtcaaactaagggccgaactgaggaaaagacgaaccagacgatgggcaatattggagagaaggctcaagctgcaaaggagaagacccaggaaatggcccaagctgcaaaggagaagacccaacaaacagcccaagctgccaaggacaagacttgcgacacttcccaagcggcaaaggagaagacc

SEQ ID NO: 286497 - DNA, 271 bp, Glycine max
gggatttgaggttcttggggataatgattctccagtaatgccaatcatgctttacaacccggccaaaatccctgccttttcaagagagtgcctcaagcagaatgttgctgttgtgacagtggcatttcctgcaaccccactgctactggctagagcacgcatatgcatatctgcagctcattcaggggaagaccttatcaaagccttgcaggttattagcagagtgggtgatcttgttggcataaaatatttccctgctgaaccaacaaag

SEQ ID NO: 286498 - DNA, 270 bp, Glycine max
agaaggtggaattacacatgtccagttttccagagatggaaattatttatatactggaggtcggaaggatccttacatactctgctgggatgtgcgcaaatctgttgattgtgtctacaagttatacagatcatcagaaaacaccaatcagcggatactgtttgatattgacccttctggaaagtatcttggtacaggtggccaggatggtttagtacatatatataatctccaaactgggcagtgggtgtcaagtttcgaggctgcttt

SEQ ID NO: 286499 - DNA, 270 bp, Glycine max
acggcaagaactacaagttcgcttacatctgggtcggaaactccgaaacccaatgcccggggcaatgcgcttggccattccaccaacccatttatgggccccagagcccacccttggttgctcccaacaacgatgtgggacttgacggaatggtcataaacctcgctagcctccttgccggaaccgccaccaacccattcggaaacggttacttccagggtcccgcggaggctccgctcgaagctgcgtcggcttgccctggggtttatg

SEQ ID NO: 286500 - DNA, 270 bp, Glycine max
aaaagcttgaaatgttggtagatcctgatctacaaaccaactatatagaaactgaggtagaacagttaatccaggttgcactactctgcacacaaggttccccgatggaccgacctaagatgtcagaagtggtgagaatgcttgaaggtgatggcttggcagaaagatgggatgagtggcaaaaggtggaagttctccggcaggaggtggagctggcccctcatcctaattccgattggattgtcgactcaaccgaaaatctgcatgcag

SEQ ID NO: 286501 - DNA, 269 bp, Glycine max
  unsure (1)..(269): unsure at all n locations
attttcattatcttaccactttcaattccaaattcactctcagaaattagaatggctagccaatcaaacactaaatcagttcacgatttcacagttaaagatgccaggggaaatgatgttaatctcgccgattacaaaggaaaggtccttctccttgtcaatgttgcctcacaatgcggcttgactaattcaaactacacagagcttaatcaattgtatgagaantccaangggaaaggcttgnaatccnggnatccccgggaatngtt

SEQ ID NO: 286502 - DNA, 271 bp, Glycine max
ctttatagaaatccgaattttgtgcagccatctttccgtttaaatgaggttcaaagttggatcaaaagtggcttgagggacttttccatttcccgagcatcagttgagtggggcattcctgttcctgatgacaagacccagactatatatgtatggtttgatgctttactaggctatatatcagcactatctgatgatcaggaacaacctgatttacttaaaactgtttcttcaggttggccagcttcactgcacttgattggtaaggata

SEQ ID NO: 286503 - DNA, 275 bp, Glycine max
caaaaagtttacgttacaaatcgcataataaccgtcctaagtttattgagagaattttgcaagtgtgagaaacatggcatctcgtcaaaacaacaagcaagagcttgatgaaagagcaaggcaaggagagactgttgtcccgggtggaactggtggcaagagcctggaggctcagcaacaccttgctgaaggaaggagcaagggagggcaaacaaggaaggaacagctgggtacagaagggtaccaggaaatgggacgcaaaggagggttgagca

SEQ ID NO: 286504 - DNA, 278 bp, Glycine max
ggtttggagaaggattacatcaagaaagcattttctggaagtggtgagggtcctgctgtgggaacaaaagtggccaagtaccctcagtgttccacgtccagaacttgtgaggggacttagagagcacacagatgcgggtggcatcattctactgctccaagatgacaaagtgcctggtctggaattcttcaaagatggcaaatgggtcgagattccaccacccaagaacaatgccgtttttgtgaacacgggtgatcaagtggaagtgttgagcaatg

SEQ ID NO: 286505 - DNA, 269 bp, Glycine max
acttgggaggttaaagagacggcaacgttgtgctgtccgccttgaccgagccagagcttcgtcttggccctcgattttgccctgtaaaactaatcccagtcacaacagaaataatcaatggcaccgaaacagaccaaggctgagaagaagatcgcttacgatgcgaactgtgcgacctaatggaggagtacggccaaatcctcgttgtaaactccgacaacgtgggatcgaaccagctccagaacattcgcaagggtctccgcggcgat

SEQ ID NO: 286506 - DNA, 269 bp, Glycine max
gcagaggccaggtaccccactatacaacatcaaggcatacctccctgtcatcgagtcctttggtttctcgagcacattgagggctgcaacatcaggccaggccttcccacaatgtgtgtttgatcactgggacatgatgtcttctgacccattggaggctggatcacaagctgcacagcttgtcactgacattcgcaagaggaagggcttgaaggaacagatgactcctctctccgagtttgaagacaagctttaaatttgtttcatga

SEQ ID NO: 286507 - DNA, 267 bp, Glycine max
  unsure (1)..(267): unsure at all n locations
ctaactaaagccgagcagcgagaganagaaaccctagcaaaaatgccggctggtcacggtttgagatcccgcaccagagattccttctctcgtcccttcaggaagaagggtaccatcgccctcaccacatacctcagaacctaccacgtcggcgattatgtcgacgtcaaggttaacggcgccgtccacaagggaatgcctcacaagttctaccatggccgcaccggtcgcgtctggatgtcaccaaacgtgctgttggggtcgagt

SEQ ID NO: 286508 - DNA, 267 bp, Glycine max
ataatttcagctattgtgtctttcttcacatccacttatgtgatgagatggaaagatttcttcccacaaagtgagttaaagtaccctccttcctttgatggacgagctgtgtgctatccatctaccgagattctacgggactacctttcatggagacaagtggattgtcacatcaacaatcaatataactcttgtttctggaagttagttgcatctgggaaaagcaaaagggaagcccagaacagtttaaaaggtggtcagttgcaa

SEQ ID NO: 286509 - DNA, 228 bp, Glycine max
  unsure (1)..(228): unsure at all n locations
gagagagtattggcgcttcatcaagatgggtatttctagggattccatgcacaagaggcgtgccactggtggcaagaaaaangcttggagaaagaagagaaagtatgagcttgggcgtcaggcagcaaacaccaagttatcaagcaacaagacaatcaggaggattcgtgttagaggtggcaatgttaaatggagggcattgaggctggatactggcattactcatgg

SEQ ID NO: 286510 - DNA, 271 bp, Glycine max
gaacgctgctgccgaaacccttcccgatccctaaggtaagtgagtaatcggtggttgagaatggtggagaaggcgaagggtaggaaggaggaggtggttaccagagagtacaccattaacctccacaagcgcctccatggctgcacatttaagaagaaagctcctaaagctattaaggagataaggaaatttgcccaaaaggccatggggaccaatgatgtgagggtggatgtgaagttgaacaagtttgtctggagccagggaatcagga

SEQ ID NO: 286511 - DNA, 274 bp, Glycine max
gtcttgttggtaaagaaagaaagagaagagaagaatcgaagacgaagatggaggacgcatcagcatcaaagttcattccacaccaaatcggaggggtccaaaacgacgcgcttcgattcggtctccatggagtcaagagcgacatcgttggttctcaccctcttcaatcttcactccaatctacaaggagaatggatgaagcgatgaagaggcaatgcaaagttaacctgtacggaactgcttttcccatgaaggaggagcttgacaggcaaat

SEQ ID NO: 286512 - DNA, 273 bp, Glycine max
  unsure (1)..(273): unsure at all n locations
tgtggacaaatcaggagaagaacgtgctcaagaggaaggcattggcatcgatgagtccaagttcaggactggtaataacaagaaccagaatcagaacgaagaccaggataagtgataatgtaacacccttcactagcatgtgtagtgtgttcttatgctagcttaaatgtgagtgtcaagtgttttaggaagtaggaaaagaataggttntaaaaaataangtttaggcaatagttatataggtcaaagtgtcatgtcangtgtgtcgtgaaa

SEQ ID NO: 286513 - DNA, 269 bp, Glycine max
gtcggttcttccttctcaaatattcttgagatccccattttctccgaagcaaagccatggctaagggtcctggtctctactctgacatcggcaagaaagctagggatctgctgttcaaggactaccacagtgaccagaagttcaccatcaccacctactcaccgactggagtggctattacagcatcaggaaccaggaaaagtgaactgtttctggctgatgtcaacacccagttgaagaacaaaaacatcactactgatatcaaagtt

SEQ ID NO: 286514 - DNA, 267 bp, Glycine max
acaaaaccttaacccaaccggaccgggtatcaaaggcagagaagagagtaacaaggttgcttcgaacagtttagaatcatgtcttggtgcaccattgagtccgatcccggtgtgtttacagaactcattcagcaaatgcaagtgaaaggagtacaggttgaggaactgtattcattggaccttgactctctcaacagccttaggcctgtttatgggttgatttttcttttcaaatggcgtccaggagaaaaggatgatcgtgtcgtt

SEQ ID NO: 286515 - DNA, 267 bp, Glycine max
aagccaccgtaccgtgttgcctctctgcaatctacagccaaaatgcctttcaagaggtacgttgagatcgggagggttgcccaaatcaactacggcaaggaatatggcaggctcgtcgtcattgtcgacgtcattgatcagaacagagctcttgtcgatgcccctgatatggtgaggtcccaagtcaatttcaaaaggctttccctaaccgatattaagattgacattaagagggtccctaagaagaaagatcttgtcaaagccatg

SEQ ID NO: 286516 - DNA, 272 bp, Glycine max
aagaatcaaagaaaggggtggtggctgcttcgaaagcttaataatttgtttatttccagaacatcatagttttcgcagcagcaaactaacaaattactcatatcatataataagatggcccgttctctctcgcaagccaaacgtattggtgtccttgttgctcaatctatctccctaattcccgttcatcggcgaggttacgcagtggcatccgatgtatcggtaagagttggattgggtaatattgggcgaaggaatggaatcgtgggagg

SEQ ID NO: 286517 - DNA, 265 bp, Glycine max
agaggaatggcaattgaggatccatcgtgccctcatggcattcgccttgtgatagaggactacccttatgctgttgatggacttgagatatgggatgctatcaagacatgggtccatgaatacgttttcttgtactacaaatcagatgacacacttagagaagatcctgaactccaagcctgctggaaagaactcgtagaggtgggtcatggagacaagaaaaatgagccatggtggcctaagatgcaaactcgtgaagagctag

SEQ ID NO: 286518 - DNA, 262 bp, Glycine max
  unsure (1)..(262): unsure at all n locations
aattctgggaaaatccagtgcatgctgttaagaaagcatgtaaagccacggatgatgagattttagaaaacatagctgattcacgtggaggatcaacagctgttgcagcaatactaattaatngagtaaagctactggtagccaacattggtgattctcgagcaatatcgtgcaaaaatggtcgagcaaaaccacttactgtggatcatgaaccagagaaggaaaaagatcttattgagagtagaggaggttttgtgtctaa

SEQ ID NO: 286519 - DNA, 262 bp, Glycine max
  unsure (1)..(262): unsure at all n locations
gagccaaggtaggttaaacactcttcttcatcgtcgtcgcaatgggacgtgtgatccgtgcgcaggtaagggagcaggctcggtcttcaagtcccacacgcaccaccgcaagggccctgcccgcttccggagcctggatttcggagagcgcaacggctacctgaagggtgtcgtcactgacgtcatccacgatcctggccgtggcgcgcctctcgctaaggtcgccttccgcnacccgttccgctacaagaagcagaacgag

SEQ ID NO: 286520 - DNA, 264 bp, Glycine max
  unsure (1)..(264): unsure at all n locations
gaacgaggagaagcagaaggagcaaaagcaatggcgccgaagaagccgagaaccacgacaaggaaccctgatttggttagggggattggcaagtattcgaggtcgcagatgtaccacaagaggggcatctgggccatcaaggccaaaaacngtggcgttttgccccgncacgatcccaagcccaagcccgaggccccggnccagaagctgcccaagttctaaccccgcggacgatgttaagaagcccctcgtcaacaagcacaa

SEQ ID NO: 286521 - DNA, 268 bp, Glycine max
gaatcatcggagaaagagttcgtactcacattggatcactctaactttcacgacactgtcagcaagcacgatttcatcgtcgtcgagttctacgctccatggtgtggccactgtaagaagcttgctcccgagtatgagaaagctgcttctatcttgagtagtcatgatcctccggttgttttggctaaaattgatgccaatgaggagaagaacaaagaccttgcatctcaatatgatgttaggggatacccaacaattaagattctga

SEQ ID NO: 286522 - DNA, 268 bp, Glycine max
  unsure (1)..(268): unsure at all n locations
cancacatnaagggtnnaatttntggacacaaacaaggtagtggcaggtcctaagtttnaacctttgangtgcaacctcagggagaggaattgggggctgaaagtgagtgcccctttgagggttgcttccattgaagangaccaaaagagtgttgatttaaccaatgggactaatggggttgagcatgagaagcttccagaatttgaccctggtgctccgccaccattcaacttggctgatattagagcagccattccaaagcattgc

SEQ ID NO: 286523 - DNA, 272 bp, Glycine max
  unsure (1)..(272): unsure at all n locations
gttaactggatggaagcgacnangaggtgatggataaaatgcttttgggagagctttttggcacccatatggctgcttgtcgcctaaagaatcaagaagcttttgttaatttgggtgttgtacttaataaagccatgactggtttggaaacagagaaggttccttttggtttctttgctcggaatggcaagtatgtggaatgcctgctttctgtgagtaagaaattggacgtagagggcctagttactggggtcttctgcttcttacagcta

SEQ ID NO: 286524 - DNA, 269 bp, Glycine max
  unsure (1)..(269): unsure at all n locations
aatatattccattctctctgtgtatttccctacctctcccttcaagatgcagatcttcgtcaagaccctcaccggcaagaccatcacccttgangtggaaagctctgacaccatcgacaacgtcaaggccaagatccaggacaaggaaggaatccccccggaccagcaacgtctcattttcgccggaaagcaacttgaggacggccgtacccttgctgactacaacattcagaaggagannactcttcacctcgtcctccgtctccgtg

SEQ ID NO: 286525 - DNA, 265 bp, Glycine max
  unsure (1)..(265): unsure at all n locations
aagaaaggaaataattnatctntgaaaatgcagggaggaaagaaagctggagagtccatcaaggnaacagctgcaaacattggtgcttctgccaaggctggcatggaganaaccaaggccactgtccaggaganggcagaaagaatgacggcacgtgatccgatncaaaaggagttggcaacccagaanaaagaggcaaanatnngccaggcagagctggacaagcaggcggcgcgtcancataacacggcggcgaagangctgc

SEQ ID NO: 286526 - DNA, 260 bp, Glycine max
ggaagagttctgttattgcattgattgagagattctatgaccctattgctggaaaagtgatggttgatggaaaggacattaggaagttgaacttgaagtctttgaggctcaagatcgggttggtgcagcaagagccagcactttttgcagcaagcatttttgagaacattgcatatgggaaagaaggtgcaactgaggctgaggtgattgaggccgcacgtgctgccaacgtgcacgggtttgtgagtggtttgcccgag

SEQ ID NO: 286527 - DNA, 261 bp, Glycine max
  unsure (1)..(261): unsure at all n locations
agaaagaagagggaaatgtcttgtttaaagcnagtaaatatgcaagagcttccaaaagatatgaaaaggccgtgaagtacatagaatatgattcctcctttggtgaggaggagaaaaagcaggccaagaccttgaaggttgcctgcaatctgaacaatgctgcttgcaagttgaagttaaaagactacaaagaagcagagaaattgtgtactaaggtgttggaccttgagagtacaaatgtgaaagccctctatagaaggg

SEQ ID NO: 286528 - DNA, 257 bp, Glycine max
aatatattccattctctctgtgtatttccctacctctcccttcaagatgcagatcttcgtcaagaccctcaccggcaagaccatcacccttgaggtggaaagctctgacaccatcgacaacgtcaaggccaagatccaggacaaggaaggaatccccccggaccagcaacgtctcattttcgccggaaagcaacttgaggacggcgtaaccttgtgactacaacattcagaaggagagtatcttcactcgtctcgtt

SEQ ID NO: 286529 - DNA, 265 bp, Glycine max
acctcaccaaaggaactaagaatttcattgaggctagagaaagtggtgatcaatatgtcaaagaatccaaaagttttctttgatattctaattggaaagatgaaagctggacgagtagtgatggagttgtttgccgatgcaaccccaaaaacagctgaaaacttcagggctctctgcactggggaaaaggggattggacgatctgggaaacctttacactacaaaggttctgtatttcatcgtattattccagaatttatgtgtc

SEQ ID NO: 286530 - DNA, 267 bp, Glycine max
  unsure (1)..(267): unsure at all n locations
aaagaaagganataattgatcnttgaaaatgcagggagganagaaagctggagagtccatcaaggaaacagctgcaaacattggtgcttctgccaaggctggcatggagaaaaccaaggccactgtccagganaaggcaganagaatgacggcacgtgatccgatgcaaaaggagttggcaacccagangnnagaggcaaagatgagccaggcagagctggacaagcaggcggcgcgtcacataacacggcggcgaanaggctgcca

SEQ ID NO: 286531 - DNA, 264 bp, Glycine max
  unsure (1)..(264): unsure at all n locations
aaagaatcaaagaaaggggtggtggctgcttcgaaagcttaataatttgtttatttccagaacatncanagttttcgcagcagcaaactaacaaattantcatatcatataataagatggcccgttctctctcgcaagccaaacgtattggtgtccttgttgctcaatctatcnccctaattcccgttcatcggcgaggttacgcagtggcatccgatgtatcggtaagagttggattgggtaatattgggcgaaggaatggaa

SEQ ID NO: 286532 - DNA, 260 bp, Glycine max
  unsure (1)..(260): unsure at all n locations
cggagtcccccttgtcgtcagcnactccgccgaaggagtcgagaagacaaaagaagcgatcaaagtcctcaagcagatcggagcattcccggacgccgaaaaggctaaagacagccgcagcattcgtcccggcaagggaaaaatgcgtaaccgccgctacatctctcgccggggaccacttgtggtgtacggaaccgaagtgcgaaggccgttaaggcttccgtaacgtccccggcgtcgaggtcgccaacgtcgagagg

SEQ ID NO: 286533 - DNA, 260 bp, Glycine max
tctcgctccgcatggcgaaaacgaggccaggcagaaaggacgtggacttcgtacaccataagaggaaccagcaagatcgtccgagctggagactgtgttctgatgcggccctcggacacgtcgaagccgccttacgtggcgcgcgtggagaagatcgagcaggacaacaggagcaacgtgaaggtgcgtgtgaggtggtactaccggccagaagagtcgattggtggtcggagacagttccacggggctaaggaatgttc

SEQ ID NO: 286534 - DNA, 259 bp, Glycine max
  unsure (1)..(259): unsure at all n locations
agattctggtgaatgcgtagaaaaggaaaataaagaaattagcgtgaaaaatgttgggtgtgttcagcagctccatagtgtcgccgccggaggagcttcgttgccgccggcngccgtacaccgtcgccgaagatgacggcggcggcgctgcggaagtggttcgaggagaagaacccctccgcagtgtcggtggaggtcggagagcatgtccagctcgcttatacccaccagaacgagtcgccgtttcagcgcagatcct

SEQ ID NO: 286535 - DNA, 262 bp, Glycine max
atgtattttcactgttcagacagtacaccacaacgcataccacgaagatccttatgctaaagaatttggaatcaagattagcgagaaacttgctcaagttgaagctcgcatccttcctgctccatggctcaaatatcacgatacgggcagagaaaaggattgtcttcctcaagttgggcaatggaatatgatgaataagaaaatggttaatggggggacagttaacaactggttctgcataaacttttcaaggaatgttcaa

SEQ ID NO: 286536 - DNA, 284 bp, Glycine max
  unsure (1)..(284): unsure at all n locations
ctgatgtatgagcgtcacaagagctggtattcttggattttgtcttcgctcacaagttgtgtatacatgtttggttttattatgatgtgccctcaattgttcatcaactacaagctcaaatctgttgctcatctaccttggaggcaaatgacttacaagtttctcaacaccataattgatgacctttttgcctttgtcattaaaatgccaacactccatcggctttctgtcttccgtgatgatcttatctttgtcatatacttatnccagaggtggatttataa

SEQ ID NO: 286537 - DNA, 281 bp, Glycine max
catatctccatttccatttcctctctctcagtttccaagaatcttaagctatgggaaagtcttacccaaccgtgagcgctgattaccagaaggccgttgagaaggcgaagaagaagctcagaggcttcatcgctgagaagagatgcgctcctctaatgctccgtttggcatggcactctgctggaacttacgacgtgagctcgaagaccggtggtcccttcggaaccataaagcacccctccgaactcgctcacggcgctaacaacggtcttgacatcgct

SEQ ID NO: 286538 - DNA, 280 bp, Glycine max
  unsure (1)..(280): unsure at all n locations
gtgangtactcaagggagcctgaanaatccaaccaagtcttgcaaggctagaggcgccgancttagggttcattttaagaacactagggaaactgcctttgcaatcaggaagttgcccttggttaaagctaaaaggtacttggaagatgttcttgcgcacaagcaggccattccgttcagacgtttctgtcgtggtgttggaaggacagnttcaagcanagantagacactctaatggccaaggaaggtggcctgtcaagttcagcaaaattcatcctga

SEQ ID NO: 286539 - DNA, 277 bp, Glycine max
  unsure (1)..(277): unsure at all n locations
gtttacgttacaaatcgcataataaccgtcctaagtttattgagaganttttgcaagtgtgagaaacatggcatctcgtcaaaacaacaagcaagagcttgatgaaagagcaaggcaaggagagactgttgtcccgggtggaactggtggcaagagcctggaggctcagcaacaccttgctgaaggaaggagcaagggagggcaaacaaggaaggaacagctgggtacagaagggtaccaggaaatgggacgcaaaggagggttgagcactgtggac

SEQ ID NO: 286540 - DNA, 283 bp, Glycine max
ccgtgtcgcagcaaaaccaaaccacatattaacttgtttgctcctaagtcatggctctgatcttgcacgcaaccaaagcaaacaagaatgctttcaagactctgattgcggcagagtacagtggcgtccaagtggaattggcccctaatttcgagatgggtgtctctaatagaactcctgaattccttaaaatgaatcccataggaaaggttcctgtcttggaaacgcccgatggtccagtctttgagagcaatgccattgctcgttacgttgctcgactcaa

SEQ ID NO: 286541 - DNA, 276 bp, Glycine max
catcaattgacttggaagacatcaaatttcatcagtgtgtgcgtttggcccgatttgagaatgatcgaacgatttcatttatccctcctgatggatcatttgatttaatgacatataggctcagtacacaggttaagcctttagtttgggtggaagcacaagttgaaaaacattcaaaaagccggatcgagattatggtaaaagctaggagtcaatttaaggaacgcatactgccacaaatgttgagttgagttgcctgttcctgctgatgcaaca

SEQ ID NO: 286542 - DNA, 280 bp, Glycine max
  unsure (1)..(280): unsure at all n locations
ctttaccagtcaaacttaaccccccttctctccccctctgaaaccncaggaagaagatcaaatcgaagaaggcttaaaaaaaatgaagggttcgaacaaccggttcttcacggtggcgctggtggcggcgtggtactcctcaaacattggggtgcttctcctgaacaagtacttgctcagcaactacggcttcaagtacccaatcttcctcaccatgtgccacatgacggcgtgctccttgctcagttacgtcgccatagcgtggatgaaggtcgtgcct

SEQ ID NO: 286543 - DNA, 276 bp, Glycine max
gccaattcagatggatttcatcgcagatgaaccgtgtgaggaatggagagctctaccgcgtgatctgcgacaccaggggtgctttcgtgcagcctgctgtatacgaggcttttggtttgacagtggttgaggccatgacttgcggcttgccaacattcgccacatgcaatggtggtcctgctgagatcattgtgcacggcaagtctggcttccacattgaccctaccatggtgaccgtgctgctgatctcctgttgacttctttgagaagtgcaag

SEQ ID NO: 286544 - DNA, 283 bp, Glycine max
ctgagaccaaaataaatcttttgaattgattgttgtaagactttgtaattgaggtgctgcaatggcttcaagtccaggaagaggtgactcttttgggagtaattggaagcccatttgcttgcagggtgaagattgcccttaagttgaagggagttgaatacaaatatgtggaagaaaatttggccaacaagagtgatttgcttctcaaatccaacccagttcacaagaaagttccagtttttattcacaatgagaagcccatagcagagtctcttgtgattgt

SEQ ID NO: 286545 - DNA, 287 bp, Glycine max
  unsure (1)..(287): unsure at all n locations
cagaaccgaaaatggttgcnactttgagtcttccgatcatagacctctcttctccccatcgtctttccacagccaattccattncgtcaggcatgcgtggaatatggtttcttttaccttgtgaaccatggggtggacaccgattttgtgagcaaagtcttcgaccaaagttgcaagttcttctcgcttcnggtccaacgcaaaatggacctggcccgcaaggaatatagaggctacactcctcctctatgctgagacattgatcctacttcactntccaaaggtga

SEQ ID NO: 286546 - DNA, 287 bp, Glycine max
  unsure (1)..(287): unsure at all n locations
gttnttgtcaaagggcctagcagctttgatatcctacaaggtcattcaaaagccacaatgcttttgatagcaaacaatgctgcccaagggattttatcctctttcttcttcaaatatgcagatacaattttgaagaagtactcatcaacagtagcaacaatcttcaccgntatagcatctgctgtactatttggacatactttaacaatgaacttcgttattggcatttctattgtgtttatctcaatgcaccaattcttttcgccatttcaaaagttaaagatgac

SEQ ID NO: 286547 - DNA, 273 bp, Glycine max
  unsure (1)..(273): unsure at all n locations
aatataccttgttgcagaaagatgtaaatncngccacttgggtggccacttggtgggtttcctggaccacagggcccatactactgtggaactggtgctgataaagcatatggccgtgatattgtagatgcacattacaaagcttgtatttatgctggcatcaatattagtggcatcaatggagaggttatgcctggtcagtgggaatttcnngttggtccttctgttggtatatctgctggagatgaggtgtgggcanctcggtacatttgg

SEQ ID NO: 286548 - DNA, 276 bp, Glycine max
  unsure (1)..(276): unsure at all n locations
gtgtagcaggaagaagcagcaatggcgccgaagataacacgtaaggttagcagaaaccctgaattgataaggggaatcggaaagtactcgaggtcgcagatgtaccacaagangggcatttgggctatcaaggccaaaaaccgtggcgttttacctcgccacgaccctaaacccaagcctgaagctcctgctgaaaaaccacccaaattttaccctgctgatgatatcaagaagccccttgtcaacaagcacaaaccgaaaccagctaagctcagg

SEQ ID NO: 286549 - DNA, 274 bp, Glycine max
  unsure (1)..(274): unsure at all n locations
caggtttattcaaaggtaagtggagaagcacctctggaaaaacctactattgatgtgagctccaaagaattttatggtgagggatatgatgatagtgacaagagaattcctgacatgaccataattaataggcagcttggctggaatcctaaaacctcactttgggacctgcttgaatcaactctcacctatcagcacaggacttatgctgaagccgttaagaaagtcattgcaaagcccgtggcaagttaaacttgtatngtttgaattgcat

SEQ ID NO: 286550 - DNA, 277 bp, Glycine max
  unsure (1)..(277): unsure at all n locations
gctanatccctagtaagccgccatggtgaagtactcaagggagcctgacaatccaaccaagttcttgcaaggctagaggcgccgaccttagggttcattttaagaacactagggaaactgcntttgcaatcangaagttgcccttggttaaagctaaaaggtacttggaagatgttcttgcgcacaagcaggccattccgttcagacgtttctgtcgtggtgttggaaggacagntcaagcaaagantanacactctaatggccaaggnaggtggcc

SEQ ID NO: 286551 - DNA, 277 bp, Glycine max
  unsure (1)..(277): unsure at all n locations
gagtgaagtccctcagcagcgcggcgaagaccaccgcggaccgccaggnggcgtgcagttgcctgaaaaaccttgccaataatatgggacagagtttgaatgccggcaacgcagcctctctccctggcaaatgtggcgtcaacatcccttacaagatcagcacctccaccaactgcgccaccatcaagttctgaagggcaatttttcagttcgcagaattctatatatgatatagtngtgctgtagaatttaactattgtgtaaaataaagggaggg

SEQ ID NO: 286552 - DNA, 277 bp, Glycine max
agtgtttggattgaaatcatcttcctttagagtgtcagcaatggcggtatataaagtgaagctgattggaccggacggtgaagagaatgaatttgaagcccctgatgacacttacattctggattcggctgaaaatgctggagtggagctaccttactcatgcagagctggtgcctgctctacttgtgctggccaagttgtttcaggctctgtggatcaggcagatcaatcctttcttgatgaccatcaaattgaaaagggttaccttctgacatgt

SEQ ID NO: 286553 - DNA, 274 bp, Glycine max
  unsure (1)..(274): unsure at all n locations
gtggttcctgcattcaagtctgctgctgaagagcttttgaacagttctggtttaccagtccattgaattactggcaaaggctcttgccaaggctgttggttataccgatgtaaagcaaagatcacttctcacttccatggagaactatgttacattagtccttgagactgggaaaccantctatacccaatcttatggctattcaatcttgaggagatttttgcctgaagagaaggttgaggcgtgaaaggtctttcactcantgctgnggaaa

SEQ ID NO: 286554 - DNA, 275 bp, Glycine max
atcttaaaccgtccaactcttagtaggcgattcatgcctgagaaaggttctgctgagtatgaggagctgaggaagaatccccagaaggcttacttgaagactattacaccaaagtttcagacccttattgacctttctgttatagaaatcttgtcaaggcatgcatctgatgaggtgtaccttggggagagggacaatccaaattggacatctgatacaagagcattagaggctttaaaaggtttggaaataaactggcacaaattgagaataaa

SEQ ID NO: 286555 - DNA, 279 bp, Glycine max
  unsure (1)..(279): unsure at all n locations
ctcttagagaganaaaaaaatggctgatacaggtggaggagatgcagtgagaccagtggtaatatgtgataacaagtgtggctgcacacttccatgcactggtggttccacttgcaggtgcacaagtgctggcactgccacaggagggggtgatcacgtgacatgctcgtgcggagagcactgtggttgcaatccatgctcatgtcccaagattgcggctnctggaagtggttgcagatgtggcacagattgtgcatgtgcctcctgccgcacttagna

SEQ ID NO: 286556 - DNA, 280 bp, Glycine max
  unsure (1)..(280): unsure at all n locations
cataaatccaaaacttttgcnatactttgcctttggttctagggcagtattgaatcctatggctgccatgtttggtggaattgttggacaagaggttgtcaaagcatgctctgggaagttttacccactttttcagttcttctactttgactctgtggagtcactgccttcagagccagtggacccaaatgatttcngaccagtaaatggtcgttatgatggcacagatttcagtatttggacagaaattacagaagaaattagaggattctaaagtgtt

SEQ ID NO: 286557 - DNA, 281 bp, Glycine max
  unsure (1)..(281): unsure at all n locations
gnagngtcttaataaacgctcttctctgaaaaacctncatttcttctcttcttctcttctctttcgtttcgatcttcgatctctcaaaatgaganagtgcatttcaatccacatcggtcaggccggtattcaggtcggaaacgcctgctnggagctctactgcctcgaacacggcattcagcctgatgggcagatgccaagtgataagactgtnggtgnaggtgatgatgcttcaacaccttcttcagtgaaactggggctggaaagcacgtgcctcgtgc

SEQ ID NO: 286558 - DNA, 275 bp, Glycine max
caaggagaaggttcaagatcttttagggtatatgctttctcttgaaggtgaagatgaacaaaggcccttctacgctgtttgctttctgctacctatgttgtctcaaattactatggagattgaaggatgcaaagctttggcttcatgtaaaggacttgaggctgttttagattgcttcagtaaattagttgggtcacatgcttttctggttgaggataatggttgcatctttatggcatgtgatacaataatgaatcttttattaaagaaagacc

SEQ ID NO: 286559 - DNA, 273 bp, Glycine max
  unsure (1)..(273): unsure at all n locations
gagagaaaganaaccaaaccaaataaagctcttggttggttcacccttgtgcttattttttgttgctgagaaagagcannnnnnnnnnnnnnnnnnnnngttttgatcggatgcgatgagcacacaaggacaagtgattgatgaggcggttctggatgacataatccggcgcctaacggaggtccgattggcccgacccggaaagcaggttcagctctccgagtctgagatcaagcaatttgcgtcgttccagagacatcttcattaaccagc

SEQ ID NO: 286560 - DNA, 270 bp, Glycine max
  unsure (1)..(270): unsure at all n locations
agagatcgnagngcaaggctttggagggtggtnttgggttggatgtggtttcanaggcagagttaacggtgaagggttttgcggggttgaggaagaccaagctcgtgtgcactgttggtcctgcttgcagctctatggaggatcttgagaacttggctcttggaggcatgagtnttgccaggctcaacatgtgccatgggaccnnggagtggcaccgtgatgtgattaggaagatcaagaagttgaatgaggagaaagggttctntgttt

SEQ ID NO: 286561 - DNA, 272 bp, Glycine max
cgaacccaatgagggagataaaagtgcagaagctcgtcctcaatatctctgttggcgagagtggagatcgtctcaccagagccgccaaggtgttggaacaacttagtggccaaaccccagtgttttccaaagcaaggtacactgttcgttcctttgggattagaagaaatgagaagattgcatgctatgtcactgttcagaggtgacaaggcaatgcaacttttggagagtggtttgaaggtgaaggaatatgaacttctcagaaggaattc

SEQ ID NO: 286562 - DNA, 272 bp, Glycine max
  unsure (1)..(272): unsure at all n locations
cttctttttactctctctctgtctctctctacgctttctcgttcgannatccctcaagggatccactaactgaaggagaaatggggttgacattcaccaagcttttcagccggcttttcgccaagaaggaaatgcgaattctgatggtgggtctcgatgcagctggtaagaccaccatccngtacaanntcaaacttggagagatcgttaccacaattcccaccattgggttcaatgtggagatgtggaatacaagaacattagtttcnngt

SEQ ID NO: 286563 - DNA, 206 bp, Glycine max
gagaaagaaaagaatggcaaagttaataaaattctttgagttgaacacaggggccaagattccttctgttgggttaggcacttggcaagctgagcctggtgttgtagccaaagctgtcaccacagccattctggttggatacaggcatattgattgtgctcaagcgtataacaatcaagcagagttggttctgctcttaagaagct

SEQ ID NO: 286564 - DNA, 279 bp, Glycine max
  unsure (1)..(279): unsure at all n locations
gtcactctaactggagctgtaagaagcctctgggggattacctagctgaaaggantatcatgggaatttatgatgttgatnctcgtgcaatcacncggcgattgnggcaagatngcagtcttattggtgttttgagcactgacaattccaacaangatgaggaatgctnncntgtctnantcctggaacattgttggtnatgatcncataggtngngtatcatgcaaaactccncatgantgggttgatanaacaacnacaccatgggganttnannaa

SEQ ID NO: 286565 - DNA, 272 bp, Glycine max
ccagcaggggctccaattcctactcttagccgcagatctctcagggcttgcatcttctcaggtaagttgtgaagatgtacacatcaaggaagaaaatccacaaggataaggatgctgaaccaactgagtttgaagagtcagttggacaggcattgtttgatctggaaaataccaaccaggagcttaaaagtgatctgaaggatttatacataaactcagctgtgcaagttgatgtttctgggaaccgcaaggctgttgttattcatgtccct

SEQ ID NO: 286566 - DNA, 272 bp, Glycine max
  unsure (1)..(272): unsure at all n locations
aataattcgaatgggctttcattcttacctccacatcgagaatgctctcatttccatgtattctaaatgtggggcaattgatgatgccttgcacatatttganaatatggtgagcagggatgttgtcacgtggaacaccatgatcagtggctatgcacagcatgggcntgcacaagaggcaattaatctctttgaagagatgataaagcaaggtgttaatcctgatgctgttacttaccttggtgttttatcctcatgtcggcatggaggnc

SEQ ID NO: 286567 - DNA, 273 bp, Glycine max
aaaaaatggctgatacaggtggaggagatgcagtgagaccagtggtaatatgtgataacaagtgtggctgcacacttccatgcactggtggttccacttgcaggtgcacaagtgctggcactgccacaggagggggtgatcacgtgacatgctcgtgcggagagcactgtggttgcaatccatgctcatgtcccaagattgcggctgctggaagtggttgcagatgtggcacagattgtgcatgtgcctcctgccgcacttagtatcacacct

SEQ ID NO: 286568 - DNA, 274 bp, Glycine max
  unsure (1)..(274): unsure at all n locations
cactagtgttggccacatgccttcaaccaaagaggaaggtcacgattttcaggnggctaaagccaagacaacacaaactgcgaacaaggccatggaaactggtaaagatgggaaagaagccgcagagtcatggacagaatgggctaaagagaaactcactgaaggtcttggcttcaaacatgatcaagaatccaccactaagaaagtctctgactatgccggtgatgctgctcagaaatcaaaggactatgccggtgacactgctcagaaaacc

SEQ ID NO: 286569 - DNA, 275 bp, Glycine max
  unsure (1)..(275): unsure at all n locations
aaaagtagtctctgaagccgatccagtgtcttgtgaatttggaattggtagtgaatttanatctaaaaagccatagcaatgtcttttatcggtacccagcaaaagtgcaaggcttgtgagaaaacggtttatccagttgatcagctttctgctgatggcactgcttatcacaaagcttgcttcagatgttctcactggcaaaggaacattaaagctgagcaactattcctcaatggaaggtgttctttattgtaagcctcactttgagcagctct

SEQ ID NO: 286570 - DNA, 252 bp, Glycine max
  unsure (1)..(252): unsure at all n locations
cttggaaggactttcaatgagtcattacagattcaagatgctcatnaatctgttcttgcttctgaggagaatgatatctataatgtgaatgaggaaaaattatgtgaagcaatgaaagatcaagagacaaacataaatatgacgtgcttgaaaaaatctgcaacttttccaattcctaatacaatgttgccttcaagcccatctgataaggaggctgatacttcagtcacaggaccactcaatgagcattct

SEQ ID NO: 286571 - DNA, 251 bp, Glycine max
cagtagccgagattccgtgagttgcaaaaatgaagacgattctttccaccgagaccatgaacatcccggacggcgtgagcatcaaagttcatgccaaggtcatcgaagttgagggcccccgcggaaaattggtgcgagacttcaagcatttgaatctcgattttcagctcattactgacgaaaacggtaaaagaaagctgaaaatcgacgcgtggtttggttctcggaaaacatccgccgccattcgcacc

SEQ ID NO: 286572 - DNA, 249 bp, Glycine max
cgacaatgtcgactcctgctaggaagaggctgatgagagacttcaagaggctgcaacaagacccgcctgcagggatcagtggtgccccccaggataacaacataatgctgtggaatgctgtcatatttggtcctgatgatactccatgggatggaggcacgttcaagttgacactccaatttactgaggactatccaaataaaccaccgactgtacgatttgtgtctcgcatgtttcatccaaatattt

SEQ ID NO: 286573 - DNA, 250 bp, Glycine max
cttgggctgggcctgcgtccttgtcctggagtcgttaattccggccgtcgtcgaccccgtcatcggaaaatcgaggttgttggttacccctaccgtgaaggagcatgccacggagatcgcggagacttggaagagcagcctggaggatcgtggcggcgtggaaaacctgaagacacctgacgtccacactttcttgcagcacgttgttaccttcgggattgtcaagaacgatgactccgatttgtaccgg

SEQ ID NO: 286574 - DNA, 249 bp, Glycine max
  unsure (1)..(249): unsure at all n locations
gtgganaagactctactcaaacaccaagaccaacttccgggaggttgcaatcaaaggattttgggacatgtacgatccagagggatattctctgtggttctgtgattacaaatacaatgatgagaactcagtttcctttgttacattaaacaaggttggtggatttcttcagaggatggacctggctcgcaagtatgcgtttggaaagatgctggtgattggatcacaggcaccatttaaggtgaaggg

SEQ ID NO: 286575 - DNA, 253 bp, Glycine max
  unsure (1)..(253): unsure at all n locations
caaaaagtttacgttacaaatcgcataataaccgtcctaagtttattgagagaattttgcaagtgtgagaaacatggcatctcgtcaaaacaacaagcaagagcttgatgaaagagcaaggcaaggngagactgttgtcccgggtggaactggtggcaagagcctggaggctcagcaacaccttgctgaaggaaggagcaagggagggcaaacaaggaaggaacagctgggtacagaagggtaccaggaaatg

SEQ ID NO: 286576 - DNA, 210 bp, Glycine max
  unsure (1)..(210): unsure at all n locations
tntcaagatgtctttgctttcggatctcatcaacctcaatctctcagaatccacagaaaagatcgttgctgagtacatatgggttggtggatctggtatggacctcagaagcaaagccaggactcttcctgggccagtgagtgaccctgcaaagcttccaaagtggaactacgatggctctagcacagaccaagctccaggggatgacag

SEQ ID NO: 286577 - DNA, 260 bp, Glycine max
  unsure (1)..(260): unsure at all n locations
caaatcggacagaagcancgnngctgannnncananngnaactgnncgcactgtaactcctaacttnccanatcgtcttctncctcntttctctccggtgattgtnggaactcagagagttctttgatggaacagtacgagaaggttgagatnataggcgaaggaacatacggcgtcgtttacaagggtcgcgaccgcgtcaccaangagancatcgcgttgangaagattcncctcnagcangaggntgagggggttcc

SEQ ID NO: 286578 - DNA, 256 bp, Glycine max
  unsure (1)..(256): unsure at all n locations
ctttccacttgagagtcagggtgcacccattccatgttcttaggatcaacaagatgctttccgtgtgctggtgctgataggctccaaactggaatgagaggtgcttttggaaagccacagggtacttgtgctagantggctattggacaggtccttctttctgtccgctgcaangacagcaacagccatcatgctcaggaggctcttcgccgtnccaagttcaagttccctggtcgtcaaaagatatagttagcag

SEQ ID NO: 286579 - DNA, 251 bp, Glycine max
aaagaatcaaagaaaggggtggtggctgcttcgaaagcttaataatttgtttatttccagaacatcatagttttcgcagcagcaaactaacaaattactcatatcatataataagatggcccgttctctctcgcaagccaaacgtattggtgtccttgttgctcaatctatctccctaattcccgttcatcggcgaggttacgcagtggcatccgatgtatcggtaagagttggattgggtaatattgggc

SEQ ID NO: 286580 - DNA, 250 bp, Glycine max
caaaaccaagttaatgttgcaatcgcataataataaccatccaaagtttattgagagaaatttgcaagtttgaaaagaaacatggcatctcatcaacaaaacaagcaagagcttgatgaaagggcaaggcaaggagagactgttgttccgggtggcactggtggcaagagccttgaggctcagcaacatcttgctgaaggaaggagcaggggagggaaaacaaggaaggagcagctggggacagaagggt

SEQ ID NO: 286581 - DNA, 252 bp, Glycine max
gctggtttcatttcattggaaaacctactattctttgcgaagacattctcaacttcttttcagcggctactgaagaaacaaggaggaaaaggagctgtttgggagtatccctttgctgttgctggcgttaacatcacatttatgattatgcaaatgctggaccttgatgccagtacgtcatgaaatttcttttgcaccaaaacatagttgttgacttattttagtaacacattctcatatttaattagacat

SEQ ID NO: 286582 - DNA, 248 bp, Glycine max
  unsure (1)..(248): unsure at all n locations
agcagaatattcgttcaggaaattagggttagggttggagagtccttcattcagcatccgnatataaatacccttttctctcacacttgttctaccgtattccttacgctctctcactcacaaacacacactgaactaaaaaacatcaaaagagacatggctgancaaaccttcatcatgatcaagcctgatggcgtccaaagaggccttattggcgagatcattagcagatttgagaagaaaggttt

SEQ ID NO: 286583 - DNA, 252 bp, Glycine max
  unsure (1)..(252): unsure at all n locations
ccaggaacagatccataagataaggatcaccctttcttccaancacgtcaaaaacctgcgagaaggtttgtgcggacttggttcgtggtncaaaggacaagcgcctcagggttaagggacctgttangatgcccactaatgttcttcacatgcactaccaggaagtccccctgtggtgaaggtaccaacacatgggatanatttgnacttcgtgtnnacaagagagtgattgaccttctacagttccccngg

SEQ ID NO: 286584 - DNA, 254 bp, Glycine max
  unsure (1)..(254): unsure at all n locations
gcagcggcaacagaggagagaagatgaagttcaatccacgagtnntcgagcagccgccgcaagagccgaaaggtcactttcacggcgccgtcgagcgtgcggagggtgctgatgagcgcccctctgtcggcggagtccggtcgaagtacaacgtgcggtcgatcccagtccgcaaggaggacgaggtgcaggtggtgcgcggaacatacaagggtcgcgaggggaaggtgacgcangtgtacctcgcaatgggt

SEQ ID NO: 286585 - DNA, 258 bp, Glycine max
  unsure (1)..(258): unsure at all n locations
caaaatagcagcagcagtagctgaggaaaccaatctgccttttgttacggcagaaaataagtttgangccttggctgcccatgatgcttttgttgaaactagtggagcccttaacactattgcggcttctttgatgaagattgctaatgacatacggttgttaggaagtggtccacgctgcggtcttggtgaactcattcttcctgaaaacgaaccagggagcagtatcatgcctgggaaggttaaccctacccagtg

SEQ ID NO: 286586 - DNA, 258 bp, Glycine max
  unsure (1)..(258): unsure at all n locations
ccaggaacagatccataagataaggatcaccctttcttccaagcacgtcaaaaacctcgagaaggtttgtgcggacttggttcgtggtgcaaagganaagcgcctcagggttaagggacctgttaggatgcccactaaggttcttcacatgcactaccaggaagtccccctgtggtgaaggtaccaacacatgggatagatttgaacttcgtgtccacaagagagtgattgacctctacagttccccagatgtggtta

SEQ ID NO: 286587 - DNA, 247 bp, Glycine max
  unsure (1)..(247): unsure at all n locations
gcctctgtctgcgcctctgatgttgacctcatcacacaagtagcaggtgctgaatggcttggagatacaattgtttatgcttacagatcaggtgaggtgattcggctaccaaaaggggtttcaattccagtgacactaaaagttctggagtttgagcttttccacttctgtccaatccaagaaatagcnccaagtatatcatttgcagcaatagggctactggatatgttcaacactggaggagcag

SEQ ID NO: 286588 - DNA, 248 bp, Glycine max
  unsure (1)..(248): unsure at all n locations
gtcaaaccctgcttaccattttcacttctctctctctctttagggttttggnnnnnnnnnnnnnnnnnnnnncttattcctttctacctctcacacccttctcaatgaccaacaacaacgacaacatcgccgtgacagatctcacttccgccctcaatgaagagaatcgcgccgacctagtcaatgctctcaagagcaagattcagagtctggctggggctcattctgatgttctggagactctatcc

SEQ ID NO: 286589 - DNA, 246 bp, Glycine max
  unsure (1)..(246): unsure at all n locations
cccagagctccttcgcctcatcgatagtttaaagtctcgttttgacaatggtgagggttagtgtgttgaatgatgctctgaagagcatgtacaacgccgagaagcgcgggaagcgccaggtcatgattaggccatcctccaaggtcatcataaaattcctattggtcatgcagaagcacgggctgggaaaatcgtggttgaattgaatgggcggctgaataagtntggggttattagccctcgctt

SEQ ID NO: 286590 - DNA, 247 bp, Glycine max
  unsure (1)..(247): unsure at all n locations
gcagcatcgtagagaaataagggaaaaatggtgtcgctgaaactgcagaagcncctctccgcaagcgtgctacaagtgcggcagaggaaaggtttggcttgaccccaatgaagtcaacgaaatctccatggccaattctcggcaaaacatcaggaagttggttaaggatgggtttatcatcaggaagccaaccaagattcactcccgctcacgtgctcgtaggatgaaggaggcaaagaggaagggc

SEQ ID NO: 286591 - DNA, 246 bp, Glycine max
  unsure (1)..(246): unsure at all n locations
cnananaggaaataattgatctttgaaaatgcanggaggaaagaaagctggagagtccatcaaggnaacagctgcanacattggtgcttctgccaaggctggcatggagaaaaccaaggccactgtccaggagaaggcagaaagaatgacggcacgtgatccgatgcaaaangagttggcaacccagaagaaagaggcaaagatgagccaggcagagctggacaagcaggcggcgcgtcacataac

SEQ ID NO: 286592 - DNA, 255 bp, Glycine max
  unsure (1)..(255): unsure at all n locations
agaaaggggtggtggctgcttcgaaagcttaataatttgtttatttccagaacatcatagttttcgcagcagcaaactaacaaattactcatatcatataataagatggcccgttctctctcgcaagccaaacgtattggtgtccttgttgcccaatctatctccctaattcccgttcatcggcnaggttacgcagtggcatccgatgtatcggtaagagttggattgggtaatattgggcgaaggaatggaatc

SEQ ID NO: 286593 - DNA, 252 bp, Glycine max
  unsure (1)..(252): unsure at all n locations
ctgtctgctgttagatctgtacccgcctagccattgatttggaaaantccaacttcaaggatgagtaagcttcagagtgatgctctaagagaagctatctcaggaatcatggctgattccaaggaaaagaacaggaaatttgtggagaccattgaactccaaattgggttgaaaaattatgatccccagaaggacaagcgtttcagtggctctgttaagttgcctcatattcctcgccccaagatgaagatt

SEQ ID NO: 286594 - DNA, 249 bp, Glycine max
  unsure (1)..(249): unsure at all n locations
gaatcaaagaaaggggtggtggctgcttcgaaagcttaataatttgtttatttccagaacattcatagttttcgcagcagcaaactaacaaattactcatatcatataataagatggcccgttctctctcgcaagccaaacgtattggtgtccttgttgctcaatctntctccctaattcctttcatcggcgaggttacgcagtggcatccgatgtatcggtaagagttggattgggtaatattgggcg

SEQ ID NO: 286595 - DNA, 248 bp, Glycine max
cattttctctcttctctgcttcttcttgttcaaatcttaggagctgaggagaatcaatcgagagaaatatgtcctggtatcgctcgtggacgccttgctgaggaacgaaagtcatggcgcaaaaaccatccacacggtttcgttgccaagcccgagactctacctgatggcaccgtaaatttgatggtctggcattgcactattcctggcaagaccgggactgattgggagggtggatatttcccact

SEQ ID NO: 286596 - DNA, 246 bp, Glycine max
  unsure (1)..(246): unsure at all n locations
aatcgcactantggctgtcaccttctcagatctacacaccgaagagggcatcaaatccctncgatcaattcctttctgggaaaacctatatttctggggatcagttgacaaaggatgatattaaagtgtatgcagctgttgttgaaaagccaggggacacttttcctaatgctgccaagtggtacgatgctgtctcttctcaacttgctccaagctttcctggccacgctcaaggggtaagattca

SEQ ID NO: 286597 - DNA, 245 bp, Glycine max
  unsure (1)..(245): unsure at all n locations
gccgaaggttcatccaatctccgaaggccttcaccggattgcaaccatgtcgaggaganaggttagagagccaaaggaggaaaacgtgactctgggcccagctgttagagatggtgaacatgtttttggagtcgctcgcatctttgcctccttcaatgacaccttcattcatgtcactgatctgtctgggagggaaacacttgtccgcatcactggcgggatgaaggttaaagctgacagagatg

SEQ ID NO: 286598 - DNA, 252 bp, Glycine max
  unsure (1)..(252): unsure at all n locations
ggaagaagatcaggcaagaatacgaacgcaaagagcgccaagttgaaatttcgcaagaagattgagtactcaatgcagctgaatgcttctcggattaaagttcttcaagctcaagatgacgtgatcagttccatgaaagaagctgcatccaaggaacttttgactgtgagtcatcatcatgatgatcatgtgtacagaaaccttctganagattctcattgttcagtgtctgctaagactgaaagaaccttc

SEQ ID NO: 286599 - DNA, 250 bp, Glycine max
gtactgcagttgttatagtcatgctggttacaacactccttatgattttaatcatgatactagtgtggcgctgccattggattctcgtcctaatcttcactggcttatcattgattgtggaatgcacatacttctcctcagtactcttcaaagttgatcaaggtgggtgggttccacttgcaattgctggagcatttcttattattatgtccgtttggcattacggcaccgtgaaacgtatgagtttgac

SEQ ID NO: 286600 - DNA, 262 bp, Glycine max
aagaaaagtgtgagtgcagaaaagaagagtggtgggcgagctcggaagaacgtgtacagaggaatcaggcaaaggccgtggggcaagtgggccgcggaaataagggacccacataagggcgtccgcgtctggctcggcaccttccccaccgccgaggaagccgcccgagcctacgacgacgccgccaagcgcatccgcggcgacaaggccaagctcaattcccggccaccgctccgccaccctccaaaaaacaaggtgcctc

SEQ ID NO: 286601 - DNA, 258 bp, Glycine max
  unsure (1)..(258): unsure at all n locations
cctctttgacacaaggaagaagcctaacaacattaagctctatgtccgccgtgtctttattatggacaactgtgaggagttgattcctgagtatttgggctttgtcaagggtattgttgattctgaagatctcccactcaacatttcaagagaaatgttgcaacagaacaagatcttgaaggtcatccgtaagancttggtcaagaagtgccttgagctcttctttgaattgcagagaccaggaggnttncaccagtc

SEQ ID NO: 286602 - DNA, 260 bp, Glycine max
acctaacgcagcatcgctatactcttcattccatggctttgcccaatcagcaaaccgtggattaccctagtttcaaactcgttatcgtcggtgatggtggcacaggaaagacaacctttgtgaaaaggcatctcaccggagaattcgagaagaaatatgagccaaccatcggtgtggaggttcacccattggattttttcacaaactgtggaaagattcgattctactgctgggatactgctggacaggagaagtttggt

SEQ ID NO: 286603 - DNA, 270 bp, Glycine max
gaaaagatagctaaggagaacagaggcatgctgattaagggatgggcgccgcagccgttgatcctgaaccaccctgcggtgggaggatttttaacgcactgcgggtggaacgcggtggcggaggcgatcagctccggggttccgatggtgacaatgccgggtttcggggaccagtactataacgagaagctgataacggaggtgcacgggttcggggtggaggtgggggcggcggagtggagcatttcgccgtacgaggggaagaagaag

SEQ ID NO: 286604 - DNA, 269 bp, Glycine max
gaatcttatccgcaacaattctattgtatatggtggtggttcagctgagatttcttgctctatagccggggaggcagctgctgatagataccctggagtagaacagtatgctattagagcatttggggatgctttggaggccatcccaatggcccttgctgaaaatagtgggctgcaaccaattgaaacattatctgctgttaagtctcagcaaataaaggataataaccctcactttggcattgattgtaatgatgttggcactaatg

SEQ ID NO: 286605 - DNA, 210 bp, Glycine max
  unsure (1)..(210): unsure at all n locations
anccaccaagttggggacggtcattgggattgatcttggaacaacctattcatgtgttggtgtttacaagaacggccatgttgaaatcatagccaatgatcaaggtaaccgtatcaccccatcgtgggttgctttcaccgacagtgagagactaattggagacgctgccaagaatctggcagctgtcaatccagaaaggaccatctttgc

SEQ ID NO: 286606 - DNA, 263 bp, Glycine max
gccttcaccttcccttcactctcagttctgccacatattaacattccggcgcaaaatgaaggtcatcgccgcctacttgctcgccgttttgggaggcaacgcagccccttccgccgatgacttgagggacatccttggctccgttggagctgacgcgaacgatgacaacatcagcaacttcttgtctgaagttaagggcaaagacattgtggagcttatcgcctccggtagggaaaagctggcctccgtgccttctggcggtg

SEQ ID NO: 286607 - DNA, 260 bp, Glycine max
ctttaacgttcgcacactccgtcttcaaaccaagatccgtgttcttcacccacgtctctctcccgcttcagatcgtaaacgtctcgctgttccaagatgggtgtggctgagaacattcccgatatggaggagggtaccttggagattggaatggaatacagaactgtatctggagttgctggaccattggtcattcttgacaaagttaagggacccaaatttcaagagattgttaatattcgtttaggagatggaactac

SEQ ID NO: 286608 - DNA, 261 bp, Glycine max
  unsure (1)..(261): unsure at all n locations
ggtggatggaattctgtcttctgtttctaaagtaccttatgaacttccttctcaagaggagctcattcggcaagcttttgctggggatgatgtagatgatgattttgaaaaagataagcaggagatcctcaacgaagaaaatcctgagccagagaagcctctattacttcctggctggggccagtggacacatgtacagcaaaagaaaggtttaccatcttggatgctgaaaaaacatgaagatgncccagaaaaaaaggg

SEQ ID NO: 286609 - DNA, 259 bp, Glycine max
  unsure (1)..(259): unsure at all n locations
cttgtngtttggagcnatccgagananactctgtaaacatgttgctttaccaggacctccttacaggtgatgagcttctctctgactccttccgttacaaggnaattgagaatggaatgctgtgggaagttgaggggaactgggttgttaaaggagcagttgatgtagacattggtgcaaacccttctgctgagggtggaggagaagatgagggagttgatgatgcagctgtnaaggttgttgacattgttgacacatt

SEQ ID NO: 286610 - DNA, 263 bp, Glycine max
gttatttccatggatgctgacaacatctctagatccagtaacacttacattggaaagctgagatcaaattttcttggtacaagattcattatatgcgatacacagcctccatactcttctgcccatatatgccctcctatgactgggaagacgagccgtagattttattccaaaaaggtctcgcctaaggtcccatctgggagttacaacatagctcaggtaacatatgaattaaatgtgcttggaactcgaggcccaagaaa

SEQ ID NO: 286611 - DNA, 216 bp, Glycine max
  unsure (1)..(216): unsure at all n locations
cacctaagtgaganacaaagaaaggnaataattgatctttgaaaatgcagggaggaaaganagctggagagtccattcaaggaaacagctgcaaacattggtgcttctgccaaggctggcatggagaaaaccaaggccactgtccaggagaaggcagaaagaatgacggcacgtgatccgatgcaaaaggagttggcnncccagaagaangaggcc

SEQ ID NO: 286612 - DNA, 213 bp, Glycine max
  unsure (1)..(213): unsure at all n locations
cagcaaactaacaaattactcatatcatataataagatggcccgttctctctcgcaagccaaacgtattggtgtccttgttgctcaatctatctccctaattcccgttcatcggcgaggttacgcatgggcatccgatgtattcggtaaggttggattgggtaatattgggcgaaggaatggaatcgtgggaggtgtagaanagaagcctgat

SEQ ID NO: 286613 - DNA, 262 bp, Glycine max
  unsure (1)..(262): unsure at all n locations
gcagcggcaacagaggagagaagatgaagttcaatccacgagtntcgagcagccgccgcaagagccgaaaggtcacttncacggcgccgtcgagcgtgcggagggtgctgatgagcgcccctctgtcggcggagttccggtcgaagtacaacgtgcggtcgatcccagtccgcaaggaggacgaggtgcaggtggtgcgcggaacatacaagggtcgcgaggggaaggtgacgcaggtgtaccgtcgcaagtgggtcatccc

SEQ ID NO: 286614 - DNA, 256 bp, Glycine max
  unsure (1)..(256): unsure at all n locations
cgtgaaggtgcgtgtgaggtggtattataggcctgaagagtctattggangacgcaggcagttccatggagcaaaggaactgtttttgtctgaccattatgatgttcagagtgctcacacaattgaagggaagtgtattgtgcactctttcaagaattataccaagcttgagaatgtaggtgctgaggattactattgtaggtttgagtacaaagctgccactggggctttcacgcctgaccgtgttgctntgnat

SEQ ID NO: 286615 - DNA, 257 bp, Glycine max
ttcatcatctagaaaacagggatttgtggttgtggaaacaaattttagagtttatgcttactcaacttctaaattacattgtgagatattgcggctattctcaagggtagagtatcaacttccaaatcttattgttggggctattacgaaagaaagcttatatagtgcttatgaaaatggcattacagcagagcagatagtcactttccttcagcaaaatgctcatcctcgtgttgcagagagggtaccatctgtgc

SEQ ID NO: 286616 - DNA, 200 bp, Glycine max
tctcttccgctcttcgatcctcgtccgggggctgctccgaataccaccaccaccacgcgccgatggccacgataggaggcttacgcgactcccaaggctctcagaacagcgtccaaaccgaggccctcgctcggttcgccgtcgatgaacacaacaagaagcagaattcacttctggagttttctagggtggtgaggaca

SEQ ID NO: 286617 - DNA, 205 bp, Glycine max
  unsure (1)..(205): unsure at all n locations
cagaagactaaggactatgcaagtnaagctagtgatgttgcacagaacacaaaagattatgctgctcagaagaccaaggactatgccagcggtggtgcgcagaagaccaaggattatgccagcggtggtgcgcagaagaccaaggactatgcaagtgatgctgcgcagaagaccaaggactatgcaagtgntggtngctccaaaa

SEQ ID NO: 286618 - DNA, 256 bp, Glycine max
ccagcatcagtgtagagaatgttgaatccaacaggcgtgctcttagggagctgcttttcaccgctcccggtgctcttaaatatctcagtggtgtcatcctctttgaggaaactctctaccagagcacagctgcaggcaagccctttgtggaagtcttgaaggaggctggtgtgcttcctggcatcaaggttgacaagggcacagttgagcttgctggcactaatggagaaaccaccactcagggtctagatggctt

SEQ ID NO: 286619 - DNA, 202 bp, Glycine max
  unsure (1)..(202): unsure at all n locations
acaaggatagaccagaactgaaaacacgaaccagagaggtaataggnagaacggagaaaganagaggaagagaaagtggaggacaagtagtggcagagaaaggaagagaaacagaaactggcaaggggaagggttggtgctgaaaatgaaggtgcaagaacaaccgctgttataacttgcacgttggaaaaaggtggtggta

SEQ ID NO: 286620 - DNA, 257 bp, Glycine max
  unsure (1)..(257): unsure at all n locations
cttttgatcagagtttaaaatggtgttgtgattctacgagggtctncgcatgcccctttgagtttcaagtttcaagtttgagccccctttctgtaatccataaccatagctttggttgagttgagggatttgattatggataagtatgaggctgtcaaggatttgggagctgggaattttggggtggctaggctcatgaggaacaaggagaccaaggagcttgttgccatgaaatacatcgagcgtggccaaaagat

SEQ ID NO: 286621 - DNA, 260 bp, Glycine max
  unsure (1)..(260): unsure at all n locations
caactgaaccagcagcaacatttgcgcaaatcgaaattgattctctgccacttaacctaaaatggaaatctttccgattcccgccgaatcctacactctcggcttcatcggcgccggaaaatggccgagtccattgcccgaggcgccgtccgctcccggcgtcctgccgccttctcgcattcgncaccgccgtccacttcaacctcgcccgccgtggcgccttcgagtcttcggcgtcaccgttctcccttcanacgacg

SEQ ID NO: 286622 - DNA, 211 bp, Glycine max
  unsure (1)..(211): unsure at all n locations
ggcatatccagtgcagtcaccaggcgtgctaggaaaccaaccagacattgtcatggacagcttggctgtacatggccttggcctagtgcacccaaagaaggttttcaatttctacaacgagctccatgcttacttagcttcttgtggagtagatggagtgaaggttgatgtgcagaacattattgagcaccttggtgcggnacatggtgnc

SEQ ID NO: 286623 - DNA, 260 bp, Glycine max
  unsure (1)..(260): unsure at all n locations
gaggattccaatccccgtgttattcaccgtgacttcaaagctagcaatgtgttactagaagatgactttactcccaaagtttctgattttggcttggcaagagaagcaactgaaggaagtaatcatatttcaacgcgggtgatgggaacttttgggtatgttgccccagaatatgcgatgacaggccatttactcgtcaaaagtgagtttatagttatggtgttgtgctgctganttctcacaggcagaannccatggnt

SEQ ID NO: 286624 - DNA, 260 bp, Glycine max
cgcataataaccgtcctaagtttattgagagaattttgcaagtgtgagaaacatggcatctcgtcaaaacaacaagcaagagcttgatgaaagagcaaggcaaggagagactgttgtcccgggtggaactggtggcaagagcctggaggctcagcaacaccttgctgaaggaaggagcaagggagggcaaacaaggaaggaacagctgggtacagaagggtaccaggaaatgggacgcaaaggagggttgagcatgtgga

SEQ ID NO: 286625 - DNA, 258 bp, Glycine max
cgcaaaacatttctcattcctttgaagcatgccggggttaacgtgcaacgcttgtaacaccgaattcaaagatgacacagagcaaaagctccattacaaatccgagtggcatcgatacaatctcaagcgcaaggtggctggggttcctggggtgactgaagctctatttctggctagacaatctgtgcttgctcaagagaaaaataaactgggtgaaatcccatgctctactgctgtggtcttgtggaaaggattata

SEQ ID NO: 286626 - DNA, 258 bp, Glycine max
  unsure (1)..(258): unsure at all n locations
gactttcgggacggcgtacaaggcggtgttggaggcggggccggtggtggccgtgaagaggttgaaggatgtgacaatttccgagaaggaatttaaggagaagattgaggcggtgggagcgatggatcacgagagtttggtgcctctcagggcttactatttcagcagggatgagaagctccttgtctatgattatatggcccatggggaagcttgtcctgccccttttacatgnaaacaaagganctggtcngnacc

SEQ ID NO: 286627 - DNA, 255 bp, Glycine max
agcgtttttggatccagggaatctagagggggatctccaggctggggccatcgcgggctactcgcttctatggctcctcatgtgggccaccttcatgggcctcttgatccagcttctctccgccagggtcggcgtcgccacgggccgccacctcgccgagctctgcagggacgagtatcccaattgggcccgcctcgtgctctggttcatggccgagctcgccctgattggcgccgacattcaagaggttattgg

SEQ ID NO: 286628 - DNA, 259 bp, Glycine max
gacaaaactcccccaccagttaccttcccacaagattatgacatcttcaaccctcctgtgaaccctaatacaactattggcaatggggtatacatgttcaaccttaacgaagttgttgatgttatcttgcagaatgcaaaccaattatctgggagtggtagtgagattcacccttggcacttgcatggacatgacttttgggttttggggtatggagaagggaaattcaaaccaagtgatgagaagaaattcaatttga

SEQ ID NO: 286629 - DNA, 293 bp, Glycine max
  unsure (1)..(293): unsure at all n locations
ttttttctttgagaagtaaaagatcttagtgcaagtaattaacatggaatctcagcaagcaaaccgtgaagaacttgatgagaaggcaaggcaaggtgaaactgttgttcctggaggaactggtgggaagagtcttgaggctcaagaacatcttgctgaaggaaggagccgtggagggcagacgaggaagcagcagctagggtcagaggggtatcatgaaatggggaccanaggagggcagacaaggaaggaacagatggggagagaagggtaccangagatgggacgcaaag

SEQ ID NO: 286630 - DNA, 283 bp, Glycine max
ccaaaaatggaggtacaggcactgataaacctaagaacaagcctggaaacaaagtaccaggaaaatggaccaaaagggccactgtgggaggagatctcagcgttgatgaggaaaatggggtacaaccggaatgccaaaaggtgcaaagagaagtgggagaacatcaacaagtacttcaagaaggtcaaggaaagcagcaagaagaggccagaagattccaagacttgtccctattttcaccagttggaggtctatacagggagaagaacaagagagaggggca

SEQ ID NO: 286631 - DNA, 276 bp, Glycine max
cgcaacctctctctcttcttttcttcagttcggtggagggagggagccgtagcagcggaagctctagcttgggtagcgaatcacaatggcgagaggattaaagaagcatctgaagaggcttaatgccccaaagcattggatgcttgacaaactgggtggtgcatttgctcctaagccctcatctggaccacacaaatcgagggaatgcctgccactcatactccattttgcgaaaccggctgaagtatgctctaacataccgtgaagtcattgcta

SEQ ID NO: 286632 - DNA, 276 bp, Glycine max
gtctggttcttgcaggttctctccttggcttcttagggcagatggggtcctctgctagagcaagccactttcaggaaccgtcaccgtctctatctttccgaacagactgatggcagtgttcccaatactcttgttaaacccagggttgctgcagagtttaatgaagaagctcgctctccctttttcaagaagtacaaaactgtattacatcctggcgaggtgaatagaatcagggagtttcagcaaaacagtaagatagtagctactcacacggat

SEQ ID NO: 286633 - DNA, 284 bp, Glycine max
gacgcaaacgcaaacgcaaacgcaaacgcaaacgcagagcgtgatccattgacgaagatggtgcagcgtctcacctaccgcaagcggcacagctatgccaccaagtccaaccaacacagggtcgtcaaaacccctggtgggaagctcgtttatcagactaccaagaagagggccagcggacccaagtgccccgtcactggcaagaggattcaggggattccacacttgaggcctgcagagtacaagaggtcaaggttacccagaaaccgtaggactgtcaaccg

SEQ ID NO: 286634 - DNA, 288 bp, Glycine max
gtcagagaaaccctaggtaagaagaaaagatgccggctggtcatggtttgagatcccgcaccagagattccttcttctcgtcctttcaggaagaagggaaccatcgccctcaccacatacctgagaacctaccacgtcggcgactatgttgacgtcaaggttaacggtgccgttcacaagggaatgccccacaaattctaccatggccgcaccggacgcgtctggaatgtcaccaaacgtgctgttggcgtcgaatcaacaagcaggttggcaacagaattataagga

SEQ ID NO: 286635 - DNA, 280 bp, Glycine max
ataagattgagttttcattccaattgtatgatctcaaacagcaaggttttattgaaaggcaggaggtaaaacaaatggtagtggccactctagccgaatctggcatgaatctttcagatgatgtgatcgaaagtattattgacaagacatttgaggaagctgataccaaacatgatgggaagattgacaaggaagaatggcgaaaccttgtcttgcggcatccatcccttctgaaaaatatgactcttcaatatctcaaagatatcaccactacatttcc

SEQ ID NO: 286636 - DNA, 274 bp, Glycine max
aatgcttagaagtgttttccatgcaccaatgtctttctttgactctacaccagctggaaggattttgaatcgggtatcaattgatcaaagtgttgtggatcttgacattccttttagacttggtgggtttgcttcaacaacaatacagcttattggtattgttggtgtaatgacagaagttacgtggcaagttttgctcttagttgtcccaatggctgttgcttgtttgtggatgcagaaatactacatggctcctcaagggaactggttcgaa

SEQ ID NO: 286637 - DNA, 275 bp, Glycine max
  unsure (1)..(275): unsure at all n locations
gaaaatggaggaaacatcaggactaaaaagatatttgttggagggttgcctcccaccctgactgaagaaaaatttcgtctgtactttgagtcttatggacatgttactgatgtagtagtcatgtatgaccagaatactgggcgtccacggggttttgggtttatttcatttgatactgaggaggcagttgatagggttttgcacaaatcattncatgatttanatggtaaacaagttgaggtaaagcgtgcacttcccaaggatgccaatcctgg

SEQ ID NO: 286638 - DNA, 271 bp, Glycine max
gctcaagccagattctgggtagattacattgacaaaaaggtgtatgacacttggaggaaaatgtggctttctaaaggagaggagcatgaggcagggaagaaggagtttatctctatctttaagcagctagaagagacactgagtgacaaagcttattatggaagtgacacctttgggttcctgatattggtttgatcccttctacagttggttttataccttgagacatatggtaacttcaaaatggaagaagagtgtcctaaactcgttg

SEQ ID NO: 286639 - DNA, 273 bp, Glycine max
  unsure (1)..(273): unsure at all n locations
gtgaatgcgtagaaaaggaaaataaagaaattagcgngaaaaatgttgggtgtgttcagcagctccatagtgtcgccnccggaggagctcgttgccgccngcagccgtacaccgtcgccgaagatgacggcggcggcgctgcggaagtggttcgaggagaagaacccctccgcagtgtcggtggaggtcggagagcatgtccagctcgcttatacccaccagaacgagtcgccgtttcagcccagatcctttgctgtgaaggatgnggtatnc

SEQ ID NO: 286640 - DNA, 272 bp, Glycine max
  unsure (1)..(272): unsure at all n locations
attgagtaataagatggggttggangccgcagtggaggcagcggcggaattccttaacaaggcagtgaaaccagtgctggtaggtggtcctaaactgagggtggcaacagcatctgatgcctttntcgaactggctgatgcgtgtggttatgcgcttgctgtgatgccgtcggctaaagggcaggttccagagcaccatccccattttatcggaacttattggggtgctgtgagcactgccttctgtgctgagattgtggagtctgcggatg

SEQ ID NO: 286641 - DNA, 275 bp, Glycine max
gcttcagctacggctgcagcatcaaaatacactggtatgcttcaggcaaccaaggatattcttagagaagaaggcgtacaggggttttggcggggaaatgtgccggcattgctcatggttatgccatatacagctatacaatttacagttttacacaagttgaagacttttgcctctggttcttccaagacagagaatcacattaatttaagcccttatctatcctacatcagtggggcattagctggatgtgcagctacagtaggttcatatcc

SEQ ID NO: 286642 - DNA, 287 bp, Glycine max
  unsure (1)..(287): unsure at all n locations
cacgaatatcttgttgtttggagcgatccgagaaaaactctgtaaacatgttggtttaccaggacctccttacaggtgatgagcttctctctgactccttccgttacaaggaaattganaatggaatgctgtnggnanttgaggggnagtgggtngttaaaggnncagttgatgtagacattggtncaaacccttctgctgagggtggacagagaagatgaggnagttgatgatgcagctgttaaggttgttgacattgttgacanattcagacttcaggaggcaac

SEQ ID NO: 286643 - DNA, 276 bp, Glycine max
  unsure (1)..(276): unsure at all n locations
gtcgccggggttgattttcaacgaggattcgccgcagtggttgctgaagctggtggaggggtggtttccgtggtgttacttgcacgttggagaggagttgcagttggaccataaganatccccgtttctcaaccctgacggggatgcttcctgcgcccataacttggaggctcacttgcacttgctagatggataccatgggaagaatcgtggatttgagcgaacaagtgagagggaccttgctctggtgaacaaggactgtgacttcttnaaaga

SEQ ID NO: 286644 - DNA, 269 bp, Glycine max
gggatatttcttgttgtttgagaatatgttaaattctgtgctctatgctcgtgacaaatggctgtggatggtggagttgtgctaccagacaaagcatccctacatctcactgctattgaagatgctgactataaagaagataaaattgagttttggaacaatgtatatggatttgacatgagctgcatcaagaagcaagccataatggagcctctgttgacacagttgaccagaatcagattgctacaaactgccagctactcaagaca

SEQ ID NO: 286645 - DNA, 268 bp, Glycine max
ccaagattgacaggcgatctggtaaggagcttgagaaggagcccaaatttttgaagaatggtgatgctggtatggttaagatggttccaaccaagcccatggtggttgaaactttctctgagtatcctccccttggtcgttttgctgtgagggacatgcgtcagaccgtagctgttggagtcatcaagagtgttgagaagaaagaccccaccggagccaaggtcacaaaggctgccgccaagaagaatgattgcattttgggcaattt

SEQ ID NO: 286646 - DNA, 275 bp, Glycine max
  unsure (1)..(275): unsure at all n locations
gcgaagtcgtgcaactatcccagattatgcttataaggcaattgatgcattgcctgtttctgctcatccaatgactcaattcacaactggtgtcatggcccttcaggtgcagagtgagtttcagaaggcatatgagggtgggataactaaggcaaggtactgggagccaacttatgaggatacantgaatttaattgctcgtttgccagccattgctgcttatatttatcgacggaaatataaggatggaaaaatcataccatggacgattcttt

SEQ ID NO: 286647 - DNA, 274 bp, Glycine max
cctaacgcgtgcagagcagagagagacgcagccatggggcgaagacccgcgaggtgttataggcaaattaagaacaaaccataccccaagtcacggttttgccgtggtgttcctgatcccaagatcaggatttacgatgttggtatgaagaagaagggtgttgatgagtttcctttctgtgtccatctggttagttgggagaaggaaaacgtttctagtgaggccctggaagctgctcgtattgcttgcaacaagtacatggccaaatttgctg

SEQ ID NO: 286648 - DNA, 273 bp, Glycine max
  unsure (1)..(273): unsure at all n locations
ctctgcttcccctgggcaaccttcttcttagttctctccgcttctnatctccagattgctggggcgaaagcacaaccgttgactagtctcaagcttaactctccgatccttcaggagtctattgctaaagagatcaatgaaaatcctgaggcaggatgggaggctgctataaatcctcatttctccaattatacagttgaacaatttaagcgccttcttggagtcaaaccaacgcctaagaaggaactgagaagtacacctgctatatctcac

SEQ ID NO: 286649 - DNA, 268 bp, Glycine max
ctctgctgagaaggcctaccatgaacagctctcagtggcagaaattaccaacagtgcttttgagccatcgtccatgatggccaagtgtgatcctcgtcacggaaagtacatggcgtgttgcctgatgtaccgtggtgatgttgtgcccaaagatgtaaacgctgctgttgccaccatcaagaccaagaggaccattcagtttgtggattggtgccctactggtttcaagtgtggtattaactaccagccacctaccgttgttcctgga

SEQ ID NO: 286650 - DNA, 269 bp, Glycine max
  unsure (1)..(269): unsure at all n locations
cgcagatcgctatactcttcattccatggctttgcccaatcagcaaaccgtggattaccctagtttcaaactncgttatcgtcggtgatggtggcacaggaaagacaacctttgtgaaaaggcatctcaccggagaattcgagaagaaatatgagccaaccatcggtgtggaggttcacccattggattttttcacaaactgtggaaagattcgattctactgctgggatactgctggacaggagaagtttggtggcctcagagatgga

SEQ ID NO: 286651 - DNA, 274 bp, Glycine max
  unsure (1)..(274): unsure at all n locations
ggagaaaccctaggtaagaagaaaagatgccggctggtcatggtttgagatcccgcaccagagattccttctctncgtcctttcaggaagaagggaaccatcgccctcaccacatacctgagaacctaccacgtcggcgactatgttgacgtcaaggttaacggtgccgttcacaagggaatgccccacaaattctaccatggccgcaccggacgcgtctggaatgtcaccaaacgtgctgttggcgtcgaagtcaacaagcaggttggcaaca

SEQ ID NO: 286652 - DNA, 275 bp, Glycine max
  unsure (1)..(275): unsure at all n locations
ctgggatgaaggggaccgnngaaatggacggtgcagcaggcggcagcagctttcgatagccgcgcccncgattgcngcgtcgttggattgccggtacttgagtnggttgaaggaggagagggagagtgccgcggcggtgctgaaggaagcggggttgagtgatgaattggggagggtaaatgtgagtggggtggataanaagaggttgattgatgatgtgaggcaggctctgtatgcttccaagatttgtagttatgcttcagggatganttgtt

SEQ ID NO: 286653 - DNA, 276 bp, Glycine max
cagaaagaggagacgaagcaatggcgccgaagaagccccgaaccacgtccgaggaaccctgatttggtcaggggaattggcaaatattcgaggtcgcagatgtaccacaagaggggcatctgggccatcaaggccaaaaacggcggtgttttgcccctccacgatcccaagcccaaacccgaggccccggcccagaagccgcccaagttctacccggccgatgacgtgaagaagcccctcgtcaacaagcacaagcccaagcccgcgaaactcagg

SEQ ID NO: 286654 - DNA, 274 bp, Glycine max
  unsure (1)..(274): unsure at all n locations
cttctgcagtggtggatagggaagttgggagctgggacggtacgactgggaagaaaagtagagtgtcgggaagtacttacaaatacgagctgtttgtcaggtggaggactgcagtgctgatctnagcaaagctaaggattatcacagacggcataaagtttgtgagatgcactccaaggccagtagggcgcttgtgggaaatgcaatgcagagattctgtcaacaatgtagtaggtttcacctacttcaagagtttgatganggaaagagaagc

SEQ ID NO: 286655 - DNA, 269 bp, Glycine max
tcggctccatcttctccgatctcctcaaactctatcagcgcagaaccaagcctctatcaccatggggaagacacatggaatgggagctgcccgcaagctgaagtctcaccgtaggagacaaaggtgggctgacaagtcatacaaaaagtctcatctgggaaatgaatggaagaagccttttgctggttcatcccatgccaagggtattgttcttgaaaagattggtattgaggctaagcagcccaactctgccatcgaaaatgtgccag

SEQ ID NO: 286656 - DNA, 270 bp, Glycine max
  unsure (1)..(270): unsure at all n locations
gcggaagctaatgatgaagatggatttanagatttagtgcgacatacaatgttcgaaaagggtcagagtaaacgcatatggggtgagctttacaaagtgatagattcttccagacgtggttgtccaggttttagatgcaagggatccacaaggaacaagatgctatgcatttagagaagcatttganggaaaattgtaagcacaaacacatggtggcttttntgaacaagtgtgatcctagttcctgcttgggcaacaaaaggatggctt

SEQ ID NO: 286657 - DNA, 270 bp, Glycine max
  unsure (1)..(270): unsure at all n locations
agcagcggcaacagaggagagaagatgaagttcaatccacgagtgntccgagcagccgccgcaagagccgaaaggtcacttgcacggcgccgtcgagcgtgcggagggtgctgatgagcgcccctctgtcggcggantccggtncgaagtacaacgtgcggtcgatcccagtccgcaaggaggacgaggtgcaggtggtgcgcggaacatacaagggttcgcgaggggaaggtgacgcaggtgtaccgtcgcaagtgggtcatccacatc

SEQ ID NO: 286658 - DNA, 263 bp, Glycine max
  unsure (1)..(263): unsure at all n locations
gggtgacaacatgattganaggtccaccaaccttgactggtacaagggaccaactctccttgaggctcttgaccaaatcaatgagcccaagaggccctcagacaagccactcaggcttccattgcaggatgtctacaaaattggtggtattggtaccgtgccagtgggacgtgttgagactggtgtcgtgaagcccggtatggtggtgacttttggtcccactgggctgacaactgaggttaagtctgttgagatgcaccatg

SEQ ID NO: 286659 - DNA, 267 bp, Glycine max
caaaaactcaatattctcaacaacacactactttccttcttccaataatgtcttcttcattctctgttcgttttcttgctcctccatcatcatgcttccccagctctcggcccaagacatggctctgcgccgccaccaccccaacggtggctccggcaactgcctcctcggaggtggaggcttcaaggttggagcctagagtggaggagagagatgggttctgggttttgaaggaagagtacaggggaggcatcagccctcaggaaa

SEQ ID NO: 286660 - DNA, 277 bp, Glycine max
gagagctaagagataaagaaatggatcttaaggcgcagatatctgcacttatagaaaaaggcaaggagatgagtaaggcagaaagtgaggcaggagatgaaggtcccatggtcactgaagttgacatacaacatattgtctcctcctggactggtattcctgtggagaaagtctcgactgatgaatctgatcgcctcctcaaaatggaagagactttacacaagcgagtcataggtcaggatgaagcagtgaaagccataagcagggccatccgtcc

SEQ ID NO: 286661 - DNA, 237 bp, Glycine max
  unsure (1)..(237): unsure at all n locations
ttcgcaaaccctaatttcggaaagatcggcgatggctgcctccaaggatcgcgcnaacttcgtctacatcgccaagctcgccgaacaggccgagcgatacgaagagatggtggaatcaatgaagaacgttgcgaatctcgacgttgaactgactgtggaggagcggaatttactttctgttgggtacaagaatgtgattggngctcggagacatcgtggaggatcctgtcttccatt

SEQ ID NO: 286662 - DNA, 263 bp, Glycine max
caaagaatcaaagaaaggggtggtggctgcttcgaaagcttaataatttgtttatttccagaacatcatagttttcgcagcagcaaactaacaaattactcatatcatataataagatggcccgttctctctcgcaagccaaacgtattggtgtccttgttgctcaatctatctccctaattcccgttcatcggcgaggttacgcagtggcatccgatgtatcggtaagagttggattgggtatattgggcgaaggaatggaa

SEQ ID NO: 286663 - DNA, 258 bp, Glycine max
gcaattattgatggaactgtgctttgtgttcatgggggcctttctcctgacattcgaacaattgatcagataagggtcattgaccggaactgtgaaattcctcatgagggtcctttctgtgatctaatgtggagtgatccgaagatattgaaacatgggcagtcagtccccgtggagcaggttggcttttggatccagggtcacttcggagttcaatcacataaataaccttgatctgtttgtcgagcgcaccaactc

SEQ ID NO: 286664 - DNA, 260 bp, Glycine max
cgagttcggaaaaaacgcctcaatattgatcctgaatctttaaagccaaagcttccaagtcgaaaagagcttaagccttatcccacaacttgctatatcgagtataaaggccatgaagatgctgttacatcaatttcactcgaagcttcaggacaatggatggcttcaggttcacgtgatggaactgtccgtatctgggaggttgaaactggcagatgtcttaggcggtgggaggttggtgaatctgttagctgtgttgc

SEQ ID NO: 286665 - DNA, 267 bp, Glycine max
caatcatccatttattattcatcatgttcgtcggcgaagaaaatcacgctgaagagttcggacggcgaggcttttcgaggtggaggaggcggtggcgctggagtcgcagacgattaaagcacatgatcgaggacgactgcgccgacagcggcatccctctgccgaacgtgacgagcaagatcctggcgaaggttatcgagtactgcaagaagcacgttcgaggccgcgaatcccgaagacaaaccctccgaggacgatcttcaaggc

SEQ ID NO: 286666 - DNA, 263 bp, Glycine max
  unsure (1)..(263): unsure at all n locations
gtcgtattcgagtgggattgtggtgtcgggtgggcaaggcgcgacgcagttgtgtgggatggatcgggaagcgagggtgctgcgatacagagagaaaaggaagaaccgaaaatttgagaagacgattcgatacgcatcgcgaaaggcttatgcggaaacccggcccaggataaaaggccgttncgcgaaacgaaccgaaattgactcggatgtggagcgtctatagccctggcgctgcggcctcatgctggacactccatacg

SEQ ID NO: 286667 - DNA, 272 bp, Glycine max
  unsure (1)..(272): unsure at all n locations
accgtcctaagtttattgagagaattttgcaagtntgagaaacatggcatctncgtcaaaacaacaagcaagagcttgatgaaagagcaaggcaaggagagactgttgtcccgggtggaactggtggcaagagcctggaggctcagcaacaccttgctgaaggaaggagcaagggagggcaaacaaggaaggaacagctgggtacagaagggtaccaggaaatgggacgcaaaggagggttgagcactgtggacaaatcaggagaagaacgt

SEQ ID NO: 286668 - DNA, 282 bp, Glycine max
  unsure (1)..(282): unsure at all n locations
cacagcccaagtcatcatcatgaaccaccctggtcagattggaaatggctatgcccctgtcctcgactgccacacttctcacattgctgtcaagtttgctgaactcatgaccaagattgacaggcgatccggcaaagagcttgagaaggagcccaagtttttgaagaacggtgatgctggttttgttaagatgattccaaccaaacccatggttgttgaaactttctccgagtantccacttggtaggtttgctgttagggacatgcgtcaaactgttgctg

SEQ ID NO: 286669 - DNA, 281 bp, Glycine max
cacaattgaaagggtccgtagtgactggccacgatgccattccgaattggacgatttcggggttcgttgaatacataaaatcaggacaaagacagggtgacatgttactagttgtgcctgagggtgactatgcagttagacttggcaatgaagcttccattaagcagaagctgaagctgattaaggggtccttctactccatcaccttcagtgccgctcgaacctgtgcacaaaggagaagctcaacgtgtcagtggttccaaccactgagaagagggatg

SEQ ID NO: 286670 - DNA, 278 bp, Glycine max
aaagatgccatgactcccatatcaaaggcattttcccttgatctggatgcaactctaaatttggagacactgaattcaataatgacaattggtcatagtagagttccagtttatgcaggagaaaaaaccaatattattggacttgttctggttaaaaatctctttatggttgattcaaaggctgcagttcccctaagaaaaatgctcatcagaaaaattcctcgtgtttcagaacatgcctctgtacgatatactgaacgaatttcagaagggtcaca

SEQ ID NO: 286671 - DNA, 276 bp, Glycine max
gtccaacctacccctttttcttctcccaccaacttcaccgtcttcttcctcgatcatgtctcacttcaagggcaagtaccatgatgagcttattgccaatgctgcttacattggcactcctggaaagggtattcttgctgctgatgagtcaacagggacaattggcaagcgtttggccagcatcagtgtagagaatgttgaatccaacaggcgtgctcttagggagctgttttcaccgctcccggtgctcttaaatatctcagtggtgtcatcctc

SEQ ID NO: 286672 - DNA, 280 bp, Glycine max
caaggatctccaaaaggatcctcctacctcatgcagcgccggtcctgttgctgaagacatgtttcactggcaagcaacaattatgggtcctccagacagtccttatgctggaggtgttttcctagtcactattcatttccctccagattatccctttaagccacccaaggttgcattcaggacgaaggtatttcacccaaatataaatagcaatggaagcatttgccttgactattgaaggagcagtggagccctgcgctaactatttcaaaggtgttgc

SEQ ID NO: 286673 - DNA, 281 bp, Glycine max
  unsure (1)..(281): unsure at all n locations
ctcgtgtgggagatcgtcaagaaaaacaattccttcttggtcaagcagtttggaaggggcacccagagcgtcgaattcagcagagagagcaacaatctctacaacctcaattcgttcaagtactctggtttggcaaacaagaaaactgttactgttcagcctgagggcaaagatcaggctgtgttgttggctacaaccaagacaaagaagcaaaacaagcccgctgcattgcncacaaatctgtgatgaagaaggagttcaggaggatggcaaaagctgtt

SEQ ID NO: 286674 - DNA, 283 bp, Glycine max
ctaattctcatttcttcatcgttcgattcttctcctcctaaagatgcagatcttcgtgaaaactttgaccggtaagaccatcacccttgaggtggagtcctccgacaccatcgataacgtgaaagctaagattcaagacaaggaagggatcccacctgaccagcagagacttatctttgcgggtaaacagcttgaggatggtcgaacccttgccgactacaacatccaaaaggaccactctccacctcgtgcttcgcctcaggggtggcatgcaaatctttgt

SEQ ID NO: 286675 - DNA, 287 bp, Glycine max
gcagggtatgttttgtcagtcctgctggttttagggattgatacaacaaatgagaacttccgcctgctgtatgacaccaaaggtcgattccgtctccactcagtcagggatgacgaggctaagttcaagctttgcaaagttcgctcagtgcagtttgggcaaaagggtatcccatacttaaatacctacgacggtcgcactatccgctacccagaccctctcatcagggctaatgaccattaagctggatttggaggagaacaagattgttgatttcatcaaatttg

SEQ ID NO: 286676 - DNA, 284 bp, Glycine max
gaggcgtcaagtgcgaggcaggagacaccgccgttgaagtggctcctattactgatgcaaattggcaatcacttgtgcttgaatctgagtctccagtattggttgaattctgggctccatggtgtggtccctgccgtatgatacatccgataattgatgagctggcaaaggaatatgttggtaggcttaagtgctacaaactcaatactgatgaaagcccttcaaccgctactcgtacgggatccgaagtatcccaactgtcattattttcaagaatggtgaga

SEQ ID NO: 286677 - DNA, 283 bp, Glycine max
gtttttacagaaagggggatcatttataaattattacatgtatcatggaggaacaaatttcggtcgaactgctggtggtccctttattgctacaagctatgattatgatgcaccacttgatgaatatggattgctcaggcaaccaaagtggggtcatctgaaggatttacacagagcaataaaactctgtgaaccagctttagtatctggagatcctactgtaacaaagattggaactatcaagaggctcatgtctttaaatcaaagtcgggagcctgtgctg

SEQ ID NO: 286678 - DNA, 275 bp, Glycine max
aacaatgcctcctttgactttgtggctggtgctgccttttctcgtgttgctagcggcggcaacaacgtctccaacacgcgccacgacggtcgcctcgtcgttccacggtcaacgagagtttgactatttcgctttcgcgttgcaatggcccggtacttactgcaaacgcacccgcagttgctgccccaccaacggttgctgcagaggctccaattttccaacagtgttccatacatggactctggcctgactataatgatggaacctggccgtcc

SEQ ID NO: 286679 - DNA, 274 bp, Glycine max
  unsure (1)..(274): unsure at all n locations
gctatattgactggtgctgagttccaagctagtgatctgggtctgcttgttgaaaacacctcagtggagcagcttngtttggctaggaaaattaccatctccaaggattctaccactgtcattgctgatgctgcgacaaaggatgagttgcaagccagggttgctcagttaaagaaggagctgtctcagacagactcagtatatgatactgagaaactggctgagaggtagctaaactgtctggtggagttgcagtcatcaaggttggtgctgc

SEQ ID NO: 286680 - DNA, 273 bp, Glycine max
gtggagatcttacctcactgctgggtcctctgcgctgtaccttttcctctactcaattttctacttctttaccaagttggagatttcaaagctggtctcgggcatcctttactttggatacatgataattgtttcatatgccttctttgtgttgacgggaactatcggcttctatgcatgcttctggtttgttcgcaagatctactcgtcggtgaagattgactgattcaggcatcaatcatataatatgacggatgagtacaaccggaacct

SEQ ID NO: 286681 - DNA, 281 bp, Glycine max
  unsure (1)..(281): unsure at all n locations
attctcatatcctcaatcaccccccctcgcactcgctcttcccttcctctggtggcgacaatgtcgactctgctaggaagaggctgatgacanacttcaagacgctgnaacanganncgcctgnngggatcagtggtgccccccaggataacaacataatgctgtggaatgctgtcatantntgtnctgatgatactccatgggatggaggcacgttcaagttgacactccaatactgaggactatccaaataaaccaccgactgtacgatttgtgtctcg

SEQ ID NO: 286682 - DNA, 282 bp, Glycine max
attacaaacctctttgaaaaatttccaaacccagatgatgttagtgaagcagacattggagatcttcaggcattctataaggcttcaaaagtgaggtttgatagtgatcctgagtttaagttgagggcacagcaggcagttgtccgcctccagagtggagaaatcaagtatcgcaaggcatggaaacaaatttgtgatgttagtagggctgaatttgataaagtctatcaacgcttggagttcaattggaggaaaggggagagagcttctataatccatata

SEQ ID NO: 286683 - DNA, 274 bp, Glycine max
agccactcaggcttccattgcaggatgtctacaaaattggtggtattggtaccgtgccagtgggacgtgttgagactggtgtcgtgaagcccggtatggtggtgacttttggtcccactgggctgacaactgaggttaagtctgttgagatgcaccatgaggctctcacagaggctcttccaggtgacaatgttggctttaatgtgaagaatgttgcagtcaaggactcaagcgtggttttgttgcatccaactccaaggatgaccctgccaag

SEQ ID NO: 286684 - DNA, 272 bp, Glycine max
caaagaatcaaagaaaggggtggtggctgcttcgaaagcttaataatttgtttatttccagaacatcatagttttcgcagcagcaaactaacaaattactcatatcatataataagatggcccgttctctctcgcaagccaaacgtattggtgtccttgttgctcaatctatctccctaattcccgttcatcggcgaggttacgcagtggcatccgatgtatcggaagagttggattgggtaatattgggcgaaggaatggaatcgtgggag

SEQ ID NO: 286685 - DNA, 273 bp, Glycine max
accatctagactgcaatcatgggctgatggaccacagcatccatcagttgttcagaagctagctggacagtcttacctggtgtccaggcttagccccaactttaactctaggaattattctgcaactggttcttacgtcaatggcggaatgcactcgcctgggttggctgttgtgtcacctgtatctccagttactgtgcatgctccagcagagaaaggagtgagtgatttctagtggattttctgatgggtggagtatccgctgctgtatcg

SEQ ID NO: 286686 - DNA, 275 bp, Glycine max
  unsure (1)..(275): unsure at all n locations
gcgcaagangcagtctgatgttatgagattcttgcagcgggtgaggtgctgggagtatcgccagcaaccttctattgtccgtttgacaaggtctactcgcccagataaggctcgtcgcttgggtttcaaggctaagcagggttacgtgatttaccgtgttcgcgtacgcnggggtggccgtaagagaccagttccaaagggtattgtttatggtaagcccaccaaccaggtgttactcaactgaaatttcaacgcagcaagaggtctgttgccga

SEQ ID NO: 286687 - DNA, 286 bp, Glycine max
gttctgagtattctgatcgctccctgagagagctcgtcgcggcggttgcagaagaagattgcaagatgaagttcaacatcgcgaatcccaccactggatgccagaagaagctcgagatcgacgacgatctgaaactgcgagcattttgggacaagaggatctcacaggaggtcatcggagatgcactcggtgaggaatttaagggctatgtcttcaaaattaccggaggttgtgacaacaaggatttccaatgaagcagggagtgctgactcctggtcgtgttaga

SEQ ID NO: 286688 - DNA, 280 bp, Glycine max
  unsure (1)..(280): unsure at all n locations
gttctctgaagtgttctcaaagcctctcagatctcttccttatgattcgcctgggcaaacatttgtgggttttgagaagcctgagggattgtcaattgctggaaaattttctaacgttctgaaatttattgttaaagaggttgacccaaccactggngagacagaagatgatggcgttgaagatgaataccaactagaggatttagaggttgtcaccgcagactacatgttaaagtgggagtgtctaatttcaggagtgcatgggaaagcattggccctg

SEQ ID NO: 286689 - DNA, 278 bp, Glycine max
gtttccggattcttgcgttttaatctttgcaattcaaaagcatggggcactccaatgtgtggaactctcatccaaagaactacggacctggttctcgcacctgccgtgtgtgtgggaatcctcatggattgatcaggaagtatgggcttatgtgttgcaggcagtgcttccgtagcaatgccaaggaaattggcttcattaagtatcgctgaaggattagtgtccaactgcccattcggtttggattcttgcattaggctgggttgattttactgtct

SEQ ID NO: 286690 - DNA, 273 bp, Glycine max
  unsure (1)..(273): unsure at all n locations
gtttctgagaaaaagatcaaagattattgagattgtagcagcacgcgatattgtttttgctcttgcacaatcgggtgtttgtncggcatttagccgagagaccaatcaacggatatgctttttgaatgttagtcctgatgaagttataagaagtctgttttataacaaaaataacgactcacttatcacagtttctgtatatgcttcanacagttacagttctttangtgcagaagcacaaggattgaatatataaggaggggtacaccagat

SEQ ID NO: 286691 - DNA, 273 bp, Glycine max
  unsure (1)..(273): unsure at all n locations
ctaatgaagaatactggaataatatttgcaaatganatgaaggtaccaaggctcaagtcattgactggaaatttgcatcgcatgggtgtatctaatactgtagtgtgtaactatgatggaaaggagcttccaaaggttttaggtgtcaatgttgttgatagagtattattggatgctccttgcagtggaactggggttatatccaaagatgagtcagttaaaaccntaaaagtctggaagatatacagaaatgtgcgcatctacaaaaggagc

SEQ ID NO: 286692 - DNA, 270 bp, Glycine max
agctggcgcaagcttatgaggttctgagtgaccctgagaagcgtgagatatatgatcagtatggtgaagatgcgcttaaggaaggaatgggtggtggcggtggccatgatccatttgatatcttttcatctttctttggcggtgggagtccctttggatcaggtggaagtagtcgaggtaggaggcagaggcgcggagaagacgtggttcaccctctcaaggttctttggaggacctttatcttggaacttccaagaagctctccctctc

SEQ ID NO: 286693 - DNA, 271 bp, Glycine max
gtgaatttgcttctagggaatcttagacgtgctctcacagattctaatgaggccctcaagttgtgcccttcaaatattaaggcaatttatagagcttccaaggcttctctttcgctagatatgttggctgaagctagagagtattgcttgaagggtcttcagtttgatcccaataatgaggacttgaagaagcttgaccggctgataggtctcaagatatcagcaaggagaagcacgaggctgaattctccaaggccgttgcggagacaaa

SEQ ID NO: 286694 - DNA, 277 bp, Glycine max
gcccctttgagtttcaagtttcaagtttgagccccctttctgtaatccataaccatagctttggttgagttgagggatttgattatggataagtatgaggctgtcaaggatttgggagctgggaattttggggtggctaggctcatgaggaacaaggagaccaaggagcttgttgccatgaaatacatcgagcgtggccaaaagattgatgagaatgtggcaagagagttatcaaccacagatcccttcggcaccccaatataattcgcttcaagga

SEQ ID NO: 286695 - DNA, 273 bp, Glycine max
gtttttcatctgcttcaatggggaagggaacagggagttttggtaagagaaggaacaagactcacactctctgtgtgaggtgtggccgccgcagcttccatctccagaagagtcgttgcgccgcttgtgctttccccgccgcacgcactaggaaatataactggagcgtcaaggcaatccgcagaaagaccaccggaactggcaggatgaggtacttgcgtaacggcctcgccgattcaagagtggcttcagagaaggtaccgaagctgcacc

SEQ ID NO: 286696 - DNA, 272 bp, Glycine max
  unsure (1)..(272): unsure at all n locations
gcgcaagaagaagacctacaccaagcccaagaagatcaagcacaagcacaaganggtcaagctcggcattcttcagttctacaaggtcgacgattctggaaaagtccagaggctccgcaaggcgtgccccaacgccgagtgcggcgccggcaccttcatggccaaccacttcgaccgccactactgcggcaagtgcggcttgacctacgtctaccagaaggccgngcttaatttgcggttttaattttattttagtatttaanagttttggt

SEQ ID NO: 286697 - DNA, 268 bp, Glycine max
caaggttttaaaaaatggctgatgctgaggacattcaacctcttgttgttgataatggaactggaatggtcaaggcgggttttgcaggtgatgacgctcctagggccgtgttccccagtattattgggcgaccacgccataccggtgtaatggttgggatgggtcagaaggatgcttacgtgggtgatgaagctcaatcaaaaaggggtatactcaccttgagtatcctatagagcatggcatagtcagcaactgggatgatatggag

SEQ ID NO: 286698 - DNA, 268 bp, Glycine max
cacacacaactactacaagtacttccttacaatcaaaaccaacaacaactatggcaagttatcaaaagcactacgatgatcagggtcgcaaggttgacgagtatggcaacgttgagaagcaaaccgacgaatacggcaaccctgttcatgctgctagtgtcacctatgtagccaccagaactgctgctggtggttacagtgatgacattaataagcaacatataccaccaatgcctacggcgtagacactggtagacagcattctagt

SEQ ID NO: 286699 - DNA, 280 bp, Glycine max
  unsure (1)..(280): unsure at all n locations
gccaagtaaagttgatccattggtcaatctgatganagttgagaaggttcccgattctacttacgacatgattggtggtttagaccagcaaattaaagaaataaaagaggtcattgagttaccaatcaaacatcctgagctgtttgaaagtcttggaattgcacaaccaaagggtgtcctgctctatgggccacctggtacaggaaaaacattgttggctagggcagtggccatcatactgactgtacattcatcagggtgtctggttctgaattagttc

SEQ ID NO: 286700 - DNA, 275 bp, Glycine max
  unsure (1)..(275): unsure at all n locations
cttgcggctagggttttagcgcanttcttctagatttaaggaagatcggtaaggaaaaggttcacatcagtattgtggtcattggccatgtcgactctgggaaatccactaccactggtcacctgatttacaagcttggaggcattgacaagcgtgttattgagaggtttgagaaggaagctgctgagatgaacaagaggtctttcaagtatgcctgggtgctggaaacttaaggctgagcgtgaaagaggaatcaccattgatattgctttgtg

SEQ ID NO: 286701 - DNA, 272 bp, Glycine max
  unsure (1)..(272): unsure at all n locations
cagagtggttctagtaatccggtgctgctagaggatgggaactagtgaatggcatatcgagcgaagatctagcttcggcactgaatcccccttagcnaagacangcagganatgtgcctgaaactgggtcactctctattgtngtgcttggcgcttctggggatcttgctaagaagaagacatttcctgcacttttccatctataccggcagggattcttaccacagatgaagttcacatttttggctatgcaaggacnaanatatctgatg

SEQ ID NO: 286702 - DNA, 269 bp, Glycine max
gccatcaataatgactttaatgagcctggatcacttgctccaactggattgtatatcggtggcaccaaatacatggtcatccagggtgagcctggtgctgtcattcgagggaagaagaccggtgcggccttgatcattggcatttatgatgaaccaatgactccaggtcaatgcaacatggtagttgaaaggcttggcgattatctcattgatcagggtcttaatctttgctttatgtcttgttatcgtgcatatttcattggcttctg

SEQ ID NO: 286703 - DNA, 267 bp, Glycine max
gggtcgtggaaagggaggcaagggtttgggaaagggaggagccaagaggcacaggaaggtgcttcgtgacaacatccagggtatcaccaaacccgcaattcggcgtttggctcgcagaggtggtgttaagagaatcagtggtctcatctacgaggagacacgtggcgtcctcaagatcttcctcgagaacgttattcgcgacgctgttacctacaccgagcgctagaagaaagaccgttaccgctatggatgttgtttatgctctca

SEQ ID NO: 286704 - DNA, 262 bp, Glycine max
atcacacacactctgaacaacgcccaccatgcaggccagtgataggtttaacatcaattcccagcttgagcatctccaagccaaatatgttggaactggccatgccgatttgaacagatttgagtgggcagtgaaattcaacgagatagctatgcatcatatattggacactaccctttactgggattctttgctattgctgaaaatgaatctattggaagagaacgctacagctttatgcagaaaatgctcctgccttgtg

SEQ ID NO: 286705 - DNA, 257 bp, Glycine max
  unsure (1)..(257): unsure at all n locations
ctaagttgaattttgatgataatgctgcatatcgccaganagagatattttctctccgtgatacaacacaagaggaccctcgagaggtgactgctgcaaaggcagatttaaattatattgggttagatggagattggctgcatggtgaatggagcagggttagcaatggccacaatggatataattaaattgcatgggggtactcctgccaattttctggatgtaggtggcaatgcctctgaaaaccaggttgttga

SEQ ID NO: 286706 - DNA, 257 bp, Glycine max
tttcaggaacttcatgacatggactctcaggagcgagctgaccttcttattcaaacaggtgggttatcttccgctgaagtggaagacattgagacggtactggacatgatgccttccttgacacttgaggtaatgtgagactgaaggtgaagagggtatacaagagggggacattgtgactctccatgcttggataaatgttaaaaggggtaatagcctgattggtgctcttccacatgccccctactacccatttc

SEQ ID NO: 286707 - DNA, 256 bp, Glycine max
gcggcaagacagaggaaaccaaagagaaggtctcggagacggcagaggcgacggctaataaggcggcggagatgaaggaggccaccagggagaaggctgccgggactgcggaggcggccaagaacaaggccgcgaggtaaaggacagagctgcagaaaccgcggaggcggccaagaacaagactgccgagactgctgaggcagcgaacagaaaaccgcacaggcaaaggacaacgccaaggaaaatgtgagtggtg

SEQ ID NO: 286708 - DNA, 260 bp, Glycine max
gggatacacagaacttagaggatttaaccatggaagatgaggataaatacaacattagtgaagcagctagcagttacagacatattgaagatggacaaggctctgttgtatcatcacttgtagatgtgaacattcggccaagaaagcgtcggtatctgttggtaggaaatcaaagatagtaagtgatgaagttaaacctaagatcattcccccacctggcactggacagaaaatatatgagatagatccatctttgctag

SEQ ID NO: 286709 - DNA, 262 bp, Glycine max
ctcaaaaccctagagaggacgagagagcgtgcaactttcggcaaccacagaccatgacattcaagcgcaggaatggaggtcgcaacaaacacggccgcggccatgtcaaattcatccgatgctccaactgcggaaatgctgccccaaggacaaggccatcaagaggtttttggttaggaacattgttgaacaggctgcagtcagagatgtgcaggaagcttgtgtctatgaacaatatacacttccaaaactctatgtgaag

SEQ ID NO: 286710 - DNA, 257 bp, Glycine max
gacagacagagaagagaatggacgctattgattctgtgttcgatccgctcagggaattcgccaaggacagcgtcaggctcgtcaagcgatgccacaagcccgatcgcaaagaattctccaaggttgctgtgcgaccgcgatcggtttcgttgtgatgggattcgtgggttttttcgttaagctcatcttcattccaattaacaacatcatcgtcggatctggttaggatgaggggaatcgcaatcgcctcaggaatt

SEQ ID NO: 286711 - DNA, 256 bp, Glycine max
ctctcttccaccgcacactctctgctcctagggtttctccttcgagtgagggaaatggctcccaaaccgcctagtacgggtctgtttgttggactgaacaagggtcacgtcgtcaccaagaaggaattgccccacgcccctcagatcgtaaggggaaaacaagcaagagggtgcactttgtgaggaacctcataagagaggttgctggttttgcaccctatgaaaagcgtataactgagttgctgaaggttgggaa

SEQ ID NO: 286712 - DNA, 256 bp, Glycine max
gtggtggcatgcagatcttcgttaagaccctcaccggcaagactataaccctagaagtcgagagctccgacaccatcgacaacgtcaaggctaagatccaggacaaggagggtatccccccagaccagcagagctgatcttcgccggcaagcagctcgaggacggacgtacccttgctgactacaacatccagaaggagtcaactctccacttggtgttgcgtcttcgtggtggtatgcagatcttcgtcaagacc

SEQ ID NO: 286713 - DNA, 260 bp, Glycine max
gtgttatgtgtgaatacacatgaaaatgcagaagttcaaattgcttctagtgctattcttcgctacttgccactcctctttgtccatcacagatggtttgttgccaaatggagacttcgaggttggtccaaaacatcagagttgaaaggttcaatagtgactacccccaatggcattccacattggacaatctcaggaatggttgaatacataaaatcagggcagaagcaaggtgacatggtgctggttgtgcctcatgg

SEQ ID NO: 286714 - DNA, 255 bp, Glycine max
ggatcggataaaagggccatggagtcctgaagaggacgaagcgttacggaggttggttcagacttacggccctaggaactggtccgttataagcaaatccattccgggtcggtctgggaaatcgtgccgctgcggtggtgcaaccagctgtctccggaggtggagcgccggcctttcacggcggaggaagacgaggcgatcctgaaggctcacgccaggttcgggaacaagtgggccaccatcgcgcgcttcctc

SEQ ID NO: 286715 - DNA, 256 bp, Glycine max
cctacctctttttcttctctctcaacaacttcaccttcttcctcctcgatcatgtctcacttcaagggcaagtaccatgatgagcttatcgccaatgctgcgtacattggcactcctggaaagggtattcttctgctgatgagtcaacagggacaattggcaagcgtttggccagcatcagtgtagagaacattgaatccaacaggcgagctcttagggagctgcttttcactgctcctggtgttcttcaatatct

SEQ ID NO: 286716 - DNA, 255 bp, Glycine max
gcagaaggagcaaaagcaatggcgccgaagaagccgagaaccacgacaaggaaccctgatttggttagggggattggcaagtattcgaggtcgcagatgtaccacaagaggggcatctgggccatcaaggcaaaaacggtggcgttttgccccgccacgatcccaagcccaagcccgaggccccggcccagaagccgcccaagttctaccccgcggacgatgttaagaagcccctcgtcaacaagcacaagccca

SEQ ID NO: 286717 - DNA, 195 bp, Glycine max
tcattgaagtgctgctctagtttgaggcacaatgagattggagaaatgctggttttgctcttcaaccgataccctggacatggaatccagtttgttcgtaatgatgcaaagatttttcggttttgtagatcaaaatgccacaagaactttaaaatgaagagaaatcctcgtaaggtaaagtggaccaaggcatat

SEQ ID NO: 286718 - DNA, 257 bp, Glycine max
gaaaatgggtgatatcatccacacattaacaaacagaaggtggctggaaaaatgtgtagcttatgctgaaagtcatgaccaggccttggttggtgacaagacaattgcattctggttgatggacaaggatattatgacttcatggctttagacagaccatccactcctattatagatcgtggtatagcgttgcacaaaatgattaggcttattaccatgggccttggtggtgaagggtatttaaattttatggggaa

SEQ ID NO: 286719 - DNA, 257 bp, Glycine max
  unsure (1)..(257): unsure at all n locations
agggatgcacactatttgcgtgggctcctgcctcccacagtcagcactcagcaacttcaggagaagaaactgatgaacagcatcaggcaatatcaggttcccttgcaaaagtacgtggccatgatggaccttaggagaggaatgaaaggctattttacaaacttctcattgataatgttgaggaattgctccctgttgtatatactcctaccgttggtgaggcttgccaganatatgggagcatattcaggcgtcct

SEQ ID NO: 286720 - DNA, 256 bp, Glycine max
ccagaagcatttatgtgcaatgagagtgatgcaagtggaaacatcataaaatgtggtcggccatcagatatctggtccctcggctgcattctttatcaaatggtttatgggagaacaccctttgcagattaggacattttgggcaaaattcaaagttataactgatccaaatcatgaaattacgtacgaaccagtttcaaatccatggcttctggatcttatgaaaaggtgtctagcatggcatcgcaatgaaagg

SEQ ID NO: 286721 - DNA, 255 bp, Glycine max
cgatgataaagttacaattgaaagtgcagaagcaactctcaagtacaatgtagcaatcaagtgtgcaactatcactccagatgaagctcgtgtgaaggagtttggcctgaagtcaatgtggaagagtccaaagggactattaggaacattttgaatggaactgtcttcagagaaccaattctttgcaaaaacattccccgccttgttcctggttggacaaaggcaatatgtattggaaggcatgcgtttggtgat

SEQ ID NO: 286722 - DNA, 256 bp, Glycine max
  unsure (1)..(256): unsure at all n locations
ggaagtttgaaacaacaaagtattattgcacagttattgatgcgcctggacatagggatttcattaagaatatgattactgggacatcccaagctgactgtgctgttcttatcattgattcgaccactggtgttttgaagctggtatttccaaggatggacagactcgtgaacatgctctgctttcattcacccntggtgtgaaacagatgatttgctgctgtaacaaaatggatgctactacacccaagtattcc

SEQ ID NO: 286723 - DNA, 255 bp, Glycine max
catcattgatagaactattgatcagattgctcctgtgatacatgaatggacatatgatgccatgtgccgtgatttgttgaatatggagggaaataaatatgttcatgaggttcctagcaagactggtggtcacctgagcgaaaagaggttctcttggacgatcatgatcctatatggcttgaacttcgtcatgcacatattgcagatgctagtgaacggctgcacgagaagatgaccaacttcatttcaaagaat

SEQ ID NO: 286724 - DNA, 254 bp, Glycine max
ccaaactccatttctcactcgccgtcgtctcttccgtctagggtttctcctcttcacaaaaatggttgccgcaaaaaaaactaagaagacccatgagagcatcaacaacaggctcgctctcgtcatgaaggtggcaaattcaccctcggttacaagaccgttctcaaatctcttaggagctccaaagggaaattgattatcattgctaacaactgcccccctttgaggaagtcagagattgaatactatgctat

SEQ ID NO: 286725 - DNA, 253 bp, Glycine max
cgccgtcgtcgctgtttttgtgtgtcgcttcttcgtaggtgcagctgcaatggtgaagggacgccaaggagaacgtgtcagactctacgtgaggggtacaatccttggatacaaaaggtccaagtcaaacagtatccaaatacatccctgatccaaattgagggtgtgaatgccaaagaagaagtagcatggtatgctggcaagaaaatggcctatatctacaaggctaaggtgaagaagaatggaagccatt

SEQ ID NO: 286726 - DNA, 257 bp, Glycine max
  unsure (1)..(257): unsure at all n locations
ggaaccaagtttggaagaagtcaaaacactatagtgtcaatncatacagagtgagctctgatccccatgatatcatgncggaagtttacaagaatgggccagttgaagttgcattcactgtttatgaggattgctcactacaaatcaggagtttacaaacacatcacaggttatgaactaggtggtcatgcagtaaagctaattggatggggaacaactgaagatggggaggattattggcttcttgcaaatcagtg

SEQ ID NO: 286727 - DNA, 257 bp, Glycine max
cactggagtggaatagaagattgacaattgccttggatgtggcaaggggtgttgagtacctgcatagcttggcccatcaaagcttcatacatagggatttaaaaccttcaaacattctccttggagatgattgagggcaaaggttgcagattttggtcttgtccgtcttgctccagaaggaaaagcctctatagaaacaagaattgcaggaacttttggatatttggcgccagagtatgcagttactggccgtgtga

SEQ ID NO: 286728 - DNA, 254 bp, Glycine max
caggatttgcatgaccaacctctagtaattcaaaatagccgttgggccagcttacccccggaattactatttgatatcattagacggctagaggagagtgagaatacatggcctgctcgaaagcatgttttgcatgtgctgcagtttgccagtcttggaggaatatgtgcaaggacatcgttaagagcccagagttttgtggcaaacttacattccctgtgtccttgaagcagcctgggccacgggatggaatc

SEQ ID NO: 286729 - DNA, 255 bp, Glycine max
catttcctctcagaaccctcgatcactcccacgcgctcctatatcctctccttcaccgtcgctctctccaacgatcacaacaacatcgtcatcccatggcaaacgccgcatctggtatggcagtccatgagactgcaagttaaggtttttggagctgaagacaaagaggacacaccgtttcatagtttttaagattgaggagcagcagaagcaggtcattgtggagaagcttggtgagccagcccaaggctatga

SEQ ID NO: 286730 - DNA, 185 bp, Glycine max
gagttggcaacaacattaaatatttgttagagttgcagacgtgcaaagagtacgataaggatgtgattttggattacctgaaagaactaatccttttcttgcaatattatgttgtgtgtacccataactcatgaatgcaactcgttgacctatctcaataaatgccgtttgtatttgttagtatt

SEQ ID NO: 286731 - DNA, 243 bp, Glycine max
  unsure (1)..(243): unsure at all n locations
attaaaagcactgcccttaataactaaaatctcaaagttagggggcaagctttctactgcgtcatctgttccagaagtgcaattagctcagtatgttccagcactggaaagactggctacatgaggttgctgcaacaggtgtctaatgtgtaccaatctatgaagattgagnccttatcagggatgatccccttctttgactttgctcaagtgggagagatttctgtagatgctgttaagcag

SEQ ID NO: 286732 - DNA, 252 bp, Glycine max
caagaaatagctccaagtatatcatttgcagcaatagggctactggatatgttcaacactggaggagcagtggagcaggttgagattcataaccgagcagcaacgaaaacaatagctcttagtgtaagggaagaggcagatttggagtttactcctcccagagaccactgaagtgtgtggtaggtggcgctgaaaccgacttcaactatgactcagagaccgggttgacaaccttctccattccagtttctc

SEQ ID NO: 286733 - DNA, 250 bp, Glycine max
  unsure (1)..(250): unsure at all n locations
atgtacctatggncccaccctacgagtggcaagtgtacaacactctcggtggcagtcacggtgtacctcaagtacactacaagggcaggcagggtgactattatgtcatggttatggatatgctgggactagcctctgggacgtttggaataatagcaatcatcacatgaccactgaaatggttgcttgtattgccattgaagcaatatctatattggaaaanatgcactctcgagggtatgtgcatggg

SEQ ID NO: 286734 - DNA, 250 bp, Glycine max
caaacttgagaggaagataaaggtctttaacatggatggaaggaggttcattaaagctatgtatgacagtgatatttctcagtccatcacacaagtggttatgaacttgccaagtgaagctgcagaatctagatgcatttcggggaatatacaaaaatagacccaaggatggggaatatactttgccattgatccatgtttatggattctccaaagcacgagatccagaatttgattttcacgagagaat

SEQ ID NO: 286735 - DNA, 253 bp, Glycine max
tgagaagaaaaggttgccatcttgtcttgactggtttggatggtgcacatgggatgctttctatactgatgtcacagctgagggtgttgaggaaggcctgaaaagtctatcacagggaggtacacctcccgattcctcatcatagatgatggttggcaacagattgaaaataaagcaaaggatgctactgaatgtttggtacaagaaggagcacagtttgctactaggttgactggtattaaagagaatacta

SEQ ID NO: 286736 - DNA, 252 bp, Glycine max
tttgttgttcctcactgacctcaccatggcgaccagagccaagctttctttagctatcttccttttctttcttttagccttgatttcaaacctagccttgggcaaacttaaagaaaccgaggtcgaagagatcccgagctcgtaacatgcaaacaccagtgccaacagcaacggcaatacactgagagtgacaagcgaacatgcttgcaacaatgtgacagtatgaagcaagagcgagagaaacaagtcgaa

SEQ ID NO: 286737 - DNA, 254 bp, Glycine max
ggagaatggcctggttcccattgttgagcctgagatccttgttgatggacctcatgacattcacaagtgtgccgccgtcaccgagcgtgtccttgcagcatgctacaaggctttgaatgatcaccatgtcttcttgagggtaccctattgaagccaaacatggtcacccctggatcccaatctgctaaggtttcccctcaggtggttgccgagcacactgtcagagcccttcagagaaccgtgcctgctgcagt

SEQ ID NO: 286738 - DNA, 251 bp, Glycine max
gtacttggcttttaatgtttctggaaggccttatgatagatttgcttgccactatgacccttatggtcccatttactctgaccgagaacgacttcaaatatatatatcagatgcaggagtacttgcagatgctatggccttttctgtcttgccatggcaaaagggcttgcctgggtggtgtgtgtttatggagttccattgcttgtggtcaatggatttttggtgttgattacatttttgcagcacactca

SEQ ID NO: 286739 - DNA, 252 bp, Glycine max
accggatcccccttcgaagtgaattatattgcagcgaatcacacacactctgaacaacgcccaccatgcaggccagtgataggtttaacatcaattcccagcttgagcatctccaagccaaatatgttgaactggccatgccgatttgaacagatttgagtgggcagtgaacattcaacgagatagctatgcatcatatattggacactaccctttactgggattctttgctattgctgaaaatgaatctat

SEQ ID NO: 286740 - DNA, 249 bp, Glycine max
  unsure (1)..(249): unsure at all n locations
gaagagattgtggaatttcttcgcagtccagacagatatgtacgactaggagctcggcctccccgaggtgttctcttggtgggtctncctgggacaggtaagactttactggcaaaggctgtggcagggaagctgatgtgccatttataagttgttctgctagtgagtttgtagagttatatgttggtatgggtgcttcccgtgtgagagatctctttgcaagggcaaaganagaagcaccatccatat

SEQ ID NO: 286741 - DNA, 253 bp, Glycine max
  unsure (1)..(253): unsure at all n locations
cctaaaccctactcattctccatacctcaacgaagaggttaaagagacggcaacactttgctgtccgccttgaccgagcagagcttcgtcttggccctcgattttgccctaaagtactctcagtcacaannnnnnnnnnnnnnnnnnnnnnnnnnnnaatggcaccgaagcagaccaaggctgagaagaagatcgcttacgatgcgaantgtgcgacctaatggaggagtacggccagatcctcgttgtgaat

SEQ ID NO: 286742 - DNA, 263 bp, Glycine max
ccagagtcccacagaagaaaaacaaaaccctcactgagcgctgctgctttgagagagagatggctccgaaccttgaatgtcgtatgtacgaagcgaagtacccggaggtggacatggcggtgatgatacagggaagaacatagcggacatgggggcgtacgtgtcgctgctggagtacaacaacatcgagggcatgatcttgttctcggagctctctcgccgtcgtattcggagtgtgagcagcctcatcaaggttggccgca

SEQ ID NO: 286743 - DNA, 263 bp, Glycine max
aacatttgataaattggttgaagatgggaagatcacaccaatcaaggaaatcacacctccaccaatccctgaggaccttagtactgcaattaagagtggaaaagtccgtgctccaactcatattatttccacatttctgatgacagaggagaggagccatgctatgctggtgtacccatgtcttccattattgaaaaaggttatggtgttggtgatgttatctctcttttgtggtttaaacgaagccttccccgttactgtac

SEQ ID NO: 286744 - DNA, 262 bp, Glycine max
caacatcctgtgatttgaaggagttggtccgcaagtttattcctgagattattggaaaagagattgagaaggcgacatctagtatttaccctctgcagaatgtgtttgttcgtaaagtcaagatcctgaaacccctaagtttgatcttgggaaactgatggaggttcatggagattactcagaggatgttggtgccaaggtagacagacctgctgatgaaatagtggcagaggaacccactgaaattgttggagcttgattt

SEQ ID NO: 286745 - DNA, 265 bp, Glycine max
  unsure (1)..(265): unsure at all n locations
agtgttttgcttttgctgttgtacaagatgagtgatgagaatggcgaagaacctcgagaaaaccgtccggttccacgcttgaatgaaaggattctttcatctctgtctaggagatcagttgctgctcacccttgcatgatcttgaaattggacctggagcgcctatgattttcaattgtgttgtggagatcactaagggaagcaaggtcaaatacgaacttgacaaaaagacnggattaattaaggttgatcggattctgtactc

SEQ ID NO: 286746 - DNA, 264 bp, Glycine max
caaacatgggaggacatggaagaaaactcagatcttttagacatcggcctggacaagggaacatcaaatccttcattgatgctttctttaccgcatgtacttgtggcgaccatttcttcattcctttttggaaccatctgggggttgttaatgaaccacttgagagcatttctgtggatcttggcttccgtggaaatacattggcagaaggtctggtggtgagcatatgccttggtggtgccttgattggatgtctactaagtg

SEQ ID NO: 286747 - DNA, 260 bp, Glycine max
  unsure (1)..(260): unsure at all n locations
ggcatggaaacgtctcacagtgaaacaagctccaaatattctcacaattgccttgaaaagatttcagagtgggaggtttggaaagcttaacaagagagtaactttccctgagactttagatcttagtcctacatgagtgaagttggagatggatctgatatttataagctatatgccgtcgtagtacatnttgatatgctgaatgcttcattttttggtcattacatctgctacatcaaagatttctgtggaaactggta

SEQ ID NO: 286748 - DNA, 259 bp, Glycine max
ggagtctgaatatggaggtggtcagtctgttcctgttggtggtattgcatactacatcactgcaccttccagcttagctgatatggcagccaatcctttccatgcattattctaccttgtgtttatgtgtcagcctgtgccttgttctctaaaacttggattgaagtctctggttcatctgctagagatgttgcaaagcagctgaaggaacaacaaatggtaatgcctggacatcgggaatcaaacttgcagaaagaac

SEQ ID NO: 286749 - DNA, 261 bp, Glycine max
gagattaaatgcattaagttacatgaaaaggcaaatcaggaatcctttgtgtggaattatattttcccggaaaatgttggagggtactgccttgggaacagagcagaaacaacttctacgcactagtgctcgtgccagcagcagcttagtaaaattcttgatgactcagatcttgatagtatcatagatggttacttggatcttgaaatggctgagttcactctgcatgaagttctggttacctcacttagtcaggtcatg

SEQ ID NO: 286750 - DNA, 259 bp, Glycine max
cgggcgcatgagttgtacgaggggcttcactctcatctggaatcggtgggaattgatggtgtcaagattgatgtcacgcatattctagagatgctatcggaggaatatggtggtcgtgtcgaactcgcaaagcatattacaaagcactcactgcttccgtgaggaagcatttcaaaggcaatggtgtcatttcaagcatgcagcagtgcaatgatttcatgttccttggtacggaaaccatatcacttggacgagtcgg

SEQ ID NO: 286751 - DNA, 260 bp, Glycine max
ggaagacacatggaatgggatctgctcgcaagctcaagtcccaccgcaggaggcaaaggtgggctgacaagtcatacaagaaatcacatcttggaaatgaatggaagaaaccttttgctggttcatcccagccaagggaattgtccttgaaaagataggtattgaggctaagcagcccaactctgccattcgtaagtgtgccagggttcaacttatcaagaatgggaagaagattgccgcttttgtccctaatgacggtt

SEQ ID NO: 286752 - DNA, 263 bp, Glycine max
ggagctttaatgttcccaacatgcccggtacactcacatcaagaaactcaactataaataatgtaccatcggggggtgttcaacaacccactggaagcctttctagtggaagatttacatccaacaatctccagttgcattgtctcagctatctcatggaagctcccttggacattcaggagtcaccaatagaggaggtataagtgttgtaggaaaccctggatttagtagtagcacaaatggagttggtggttctattccgg

SEQ ID NO: 286753 - DNA, 261 bp, Glycine max
gagaaacaaagaaaggaaataattgatctttgaaaatgcagggaggaaagaaagctggagagtccatcaaggaaacagctgcaaacattggtgcttctgccaaggctggcatggagaaaaccaaggccctgtccaggagaaggcagaaagaatgacggcacgtgatccgatgcaaaaggagttggcaacccagaagaaagaggcaaagatgagccaggcagagctggacaagcaggcggcgcgtcagcataacacggcggc

SEQ ID NO: 286754 - DNA, 258 bp, Glycine max
ggaaaaaatggtgtcgctgaaactgcagaagcggctggccgcaagcgtgctcaagtgtggcagaggaaaggtgtggcttgaccccaatgaagtcaacgaaatctccatggccaattctcggcaaaaatcaggaagttggttaaggatgggtttatcatcaggaagccaaccaagattcactcacgctcgcgtgctcgtaggatgaaggaggcaaagaagaagggccggcactctggttatggtaagagaaagggtaca

SEQ ID NO: 286755 - DNA, 258 bp, Glycine max
  unsure (1)..(258): unsure at all n locations
ctggcacaggaaaaacaatgcttgcaaaggctgtagcaactgangctggagcaaattttattaacatttcaatgtccagcattacgtccaagtggtttggtgaaggagaaaaatatgtcaaagcagtttttctctggccagcaaaattgctccaagtgttatttttgttgatgaggttgatagtatgttaggaagacgtgaaaatcctggtgagcatgaggctatgcgtaaaatgaagaatgaattcatggttaattg

SEQ ID NO: 286756 - DNA, 258 bp, Glycine max
  unsure (1)..(258): unsure at all n locations
gtctaacaaggatagtgtctcanctaatgacttgaggnatgtgaagctcaagaaggcgacactcgaaagcncggcgaggcggctagggggaggaaaagaagccatgaagcagttgctgaagctgattttgngtgggttcaaaccagccatcttcagaataagcgccgaaaggagaataatggtagtagtattagcagtgtacttcaggcacagtttcaggatcctagtggccagaacaacaaccagaatacacaaagt

SEQ ID NO: 286757 - DNA, 259 bp, Glycine max
tttgatatacttcaaaggcatgtgaggtgatgtcaaaaccacagaaatcacttgcttatttgcttgaaacttactgtggtgtgacaacaaataaattattacagcgtgaagactggaggcagcgcccctctcagcagaaatggtacattatgcacaaacagatgcacactatctattgtatattgcaaactgtctgatcaatgaactcaaacaactggacaatgaaaactcttcttccgatgacaaattccattttgtt

SEQ ID NO: 286758 - DNA, 259 bp, Glycine max
caaaacaaaaagtttacgttacaaatcgcataataaccgtcctaagtttattgagagaattttgcaagtgtgagaaacatggcatctcgtcaaaacaacaagcaagagcttgatgaaagagcaaggcaggagagactgttgtcccgggtggaactggtggcaagagcctggaggctcagcaacaccttgctgaaggaaggagcaagggagggcaaacaaggaaggaacagctgggtacagaagggtaccaggaaatggg

SEQ ID NO: 286759 - DNA, 259 bp, Glycine max
ttgagaggatcaaacagttcacaaatattccatcggaagcttcatggaacattaaggatcgcctgcctcctgcaaattggcccggggaaggccatgttgatatcaaagacttgcaggtcagatatcgccaaacactcctttggttcttaaaggcatcaccctaagcatcaacggaggggaaaagattggagttgttggtcgaacaggaagtggaaaatcaactttaattcaagttttcttcaggctggtggaacctaca

SEQ ID NO: 286760 - DNA, 263 bp, Glycine max
ctcacctgaaaatgtcttgctgcggtggtaactgtggttgcggaagctcctgcaagtgcggcaacggctgcggaggctgcaagatgtacccagacttgagctacactgagtcaaccaccaccgagaccttgtcatgggagtggcacctgttaaggctcaatttgagggtgctgaaatgggtgtgcccgctgagaacgatggctgcaaatgtggaccaaactgctcctgcaacccctgcacttgcaagtgaggtgttgggagag

SEQ ID NO: 286761 - DNA, 254 bp, Glycine max
ttacactttctatctcatttccaatctcattttcgttcggttcaaacactctcatggcatcagacaagaagattaggatcggcatcaacggatttggaaggattggccgtttggtggccagggttctcttcagaggaatgacgttgaacttgttgctgtcaacgatcctttcatcaccactgattacatgacatacatgttcaagtacgacaccgttcatgggcagtggaagcattttgatgtgaagctgaagg

SEQ ID NO: 286762 - DNA, 252 bp, Glycine max
aaaatggtttcggggtcagggatctgtgccaagagggtaattgtggacgcacgacaccacatgctggggaggctggcatcgatcgtggcgaaagaacttctgaatgggcagaaggtggtggtggacgctgcgaggagatttgcatctccggtgggctcgtcaggcagaagatgaagtacttgcgtttctccgcaagcgcatgaacaccaagcctctcacggccccatccatttccgtgcacccggcaagatc

SEQ ID NO: 286763 - DNA, 257 bp, Glycine max
  unsure (1)..(257): unsure at all n locations
caagaaaaagcatggaaaggatattagcaaggacaacagagcacttggcaagctgaggagagangctgagcgtgcaaagagggctctcagcagccagcaccaggtccgcgtggaaattgaatcacttttgatggtgttgatttttctgagccactcacccgagctcgttttgaggagttgaacaatgatttgttccggaagaccatggggccagtgaagaaggctatggaagatgcaggattacagaagagtcagat

SEQ ID NO: 286764 - DNA, 255 bp, Glycine max
cattcccataagtgaaggtgttctgaggactgcacttgacatggggtgtggggttgctagttttggaggatatatgctgtctaagaatattttaaccatgtcttttgcaccaagagattcacataagctcaaatacaatttgccttggaaagaggagtaccagcttttgttgctatgcttggcacccgcagacaaccttttcctgcgtttggatttgacttggttcattgctctaggtgtttgatcccgtttaca

SEQ ID NO: 286765 - DNA, 255 bp, Glycine max
acaaacccgaggtgcatcctctgaatcaattaatgctctgccgacttataagttcaaaatgaagagaaataaaagcaaaggggaaagcaactcagctgttggtgaaggtggagttgtggctgcagaactgaaaaggaacgtatgatctctggagaagatgcagcttgctgcatctgcctggctaagtatgaaaataacgatgagctgagagaattgccttgttctcacctatttcataaagattgtgtcgacaag

SEQ ID NO: 286766 - DNA, 254 bp, Glycine max
ctcagattaaagatgctgttcgtgatggtttgagggctgttaagaatacccttgaagatgaatctgttgtcttaggtgctggtgcatttgaagttgctgctagacaatatctgatgaatgaagttaggaaacagttcaagggcgtgcacaacttggtgttgaggcttttgctgatgcacttcttgtgtgcctaagacacttgctgaaaactctgggcttgacactcaagatgtgattattgcccttacgggaga

SEQ ID NO: 286767 - DNA, 256 bp, Glycine max
ccaaaaggctctctcacgcagtcgcagtgagtgaaaaggaaaaccctaattgcggtattctcagtgccttcgagagaaagaaaaaatggcagataatcttgttctccgtggcaccatgcgcgccccaccgacgttgtgacggcgattgccactcccatcgacaactccgacatgatcgtcaccgcctcacgcgacaaatccatcatcctctggcatcttaccaaggaggacaagacttacggtgtcccccgccgcc

SEQ ID NO: 286768 - DNA, 259 bp, Glycine max
  unsure (1)..(259): unsure at all n locations
ggagccgtagcagcagcggaagctctagcttgggcagcgaatcacaatggcgagaggattgnagaagcatttgaagaggcttaatgccccaaagcattggatgcttgacaaactgggtggtgcatttctcctaagccctcatctggaccacacaaatccagggaatgcctgccactcatactcattttgcgaaaccggctgaagtatgctctgacataccgtgaagtcattgctattctgatgcagcgacatgtccttg

SEQ ID NO: 286769 - DNA, 250 bp, Glycine max
cttccgcaaatggcttctcacgacagcatctccgcttctccaacctccgcttctgattccgtcttcaatcacctcgttcgtgctcccgaagatcctatcctcggggtaactgtcgcttataacaaagatccaagtccagttaagctcaacttgggagttggtgcttaccgaactgaggaaggaaaacctcttgttttgaatgtagtgaggcgagttgaacagcaactcataaatgacgtgtcacgcaaca

SEQ ID NO: 286770 - DNA, 248 bp, Glycine max
  unsure (1)..(248): unsure at all n locations
gttaatgcaagtggtcaattttgtggggttgctgagatgattggacctgttgacttcaataaggacatggacttttggcagcaagataaatggagtgggagcttccctgtaaagtggtacatcataaaagatgtgtcaaatgcaaattttaggcacattatactagagaacaatgagaacaaacctgttactaatagcagagacacacaagagataatgtatagtaaaggtttggaaatgctaanata

SEQ ID NO: 286771 - DNA, 250 bp, Glycine max
  unsure (1)..(250): unsure at all n locations
cttcgctggcaagactgttttggatgtggggactggaagtggcantcttgctatatggtcggcacaggcaggtgcgaggaaggtgtatgcagtggaagctaccaagatgtcggaacacgcacgtgcactcatcaaagcgaataatctccaggacgtagttgaggtcatcgagggatcgatggaggaagttaccttgccagagagagttgatgtgatcatctctgaatggatgggttattttcttctgcgt

SEQ ID NO: 286772 - DNA, 247 bp, Glycine max
cttaaaccatttccaagcaggctatatgccattcctcccagaattgctagtggcttagttcctggagtttcctctgagacataccaggatgataacaaaaagtggaaaaaacacgtaaaagcttacaagaaaactaatagactgttggactcgggaaggtatcgcaacattatggatatgaatgctggattgggtagttttgcagcagctattcattcttcaaagttatgggtcatgaatgttgtgc

SEQ ID NO: 286773 - DNA, 246 bp, Glycine max
ggaaaatggcgggtacggtttcgacttgtttcttcttcgtgtttcttctttctctccttcttccttttcagatctccgctgaggaatcctcggagaaggagttcgtactcacattggatcactctaactttcacgacactgtcagcaagcacgatttcatcgtcgtcgagttctacgccccatggtgtggtcactgtaagaagcttgctccggagtatgagaaagctgcttctatcttgagtagtc

SEQ ID NO: 286774 - DNA, 250 bp, Glycine max
gcaagtaaaaattaaagttgaaaatcagggtgctagtaatattccaagatacttgaatcttgaaccatcacttgcaatggattggcttgagataccatgggatgatttacgaatcaaagagcgtgttggtgctggatcctttgggacagtgtatcgtgctgaatggcatggatcagatgttgctatcaaggttttaacagttcaggatttccaagatgatcaattgaaagagtttctaagagaggttgca

SEQ ID NO: 286775 - DNA, 255 bp, Glycine max
gcattgaagacctagcagagaaatttccggacatgattataaaggtacctgttgatgtttttgaaggaattactgatgaagatgctgcaaaggttgttgatggtttggctctcaaagtggctgatagaaataagtcgattgaacaagtgaagaatttgtataaactttttgttgattgtgactgcacccttttggaaatcaatcccattgcggagacagctgataaccaattggtggctgctgatgctaagttga

SEQ ID NO: 286776 - DNA, 248 bp, Glycine max
cacgctctctaataacatttctaatctcattctccttctgttcaaacactctctctcatggcatcagataagaagattaggatcggcatcaacgggtttggaaggattggccgtttggtggccagggttgcccttcaaaggaatgatgttgaacttgttgctgtcaacgatcctttcatcaccactgattacatgacatacatgttcaagtacgacaccgttcatggccagtggaagcattttgatgt

SEQ ID NO: 286777 - DNA, 230 bp, Glycine max
gcgaaatgcgatacttggtgtgaattgcagaatcccgtgaaccatcgagtctttgaacgcaagttgcgcccgaagccattaggccgagggcacgcctgcctgggtgtcacacatcgtttccccaacgcaaacatgtaacaatgttgctgcgcggggtgtatgctgacctcccgcgagcacccgcctcgtggttggttgaaatctgggttcatggccgacttcgccgtgat

SEQ ID NO: 286778 - DNA, 247 bp, Glycine max
catgaatctcttacagagggcacatcctggtgacaatgtgggattcaatgttaagaatgttgctgttaaggatttgaagcgtggttatgttgcctcaaactcaaaggatgaccctgcaaaggaggctgctaacttcacagcccaagtcatcatcatgaaccaccctggtcagattggaaatggctatgcccctgtcctcgactgccacacttctcacattgctgtcaagtttgctgaactcatgacc

SEQ ID NO: 286779 - DNA, 244 bp, Glycine max
  unsure (1)..(244): unsure at all n locations
cccgctcgcnatctagaactaggtaaatactgacattgaaggtgttgattcaactaatgcatgctatggaggaacggctgctttgttcaactgtgtgaattgggtggagagtagctcatgggatggacgttatggacttgttgtttgtacagacactgcggtatatgctgaaggacctgctcgtcccactggaggagctgctgcaattgccatgcttgtagggccagatgctcctattgctttg

SEQ ID NO: 286780 - DNA, 247 bp, Glycine max
gtcaagcctgattcatacaaggctataaatgatgagggaatgcccatgtatcagaggtcattcatgaaggggaagctttacattcacttcactgtggagttcccagattccctaaaccctgaccaggttaaggccttggaagctgttctgccaccaaagccttcttcacaattgacagacatggagctggatgaatgtgaggaaacaacactccatgatgtcaacatggaggaggagactaggagga

SEQ ID NO: 286781 - DNA, 244 bp, Glycine max
caaaaatggcggcgaaacttcaaatatttacgggattgccccccgcgccatttcaatcttcttcttcctccactctctgcgtactcaagaagcctctcactacctccttcttcggcaccgcgcgagtggaagttctgaaacttagagtgatgaggattgtgaagcctacgcgtggcggaggtgctctcggtgctcgcatgaacctctttgacaggttcgccagagttgtgaagtcgtacgcaaa

SEQ ID NO: 286782 - DNA, 244 bp, Glycine max
caacacgatcgtgttgaaatcatagccaacgatcagggtaacagaactaccccatcctacgtggctttcaccgacacagaacggttgatcggcgatgcggcgaagaaccaggtcgctatgaacccaaccaacaccgtttttgatgctaagcgtttgattggaaggcgtttttccgatgcatcagtacaaggtgacatgaaattgtggccgttcaaggtgattcctggccctgctgagaaaccta

SEQ ID NO: 286783 - DNA, 243 bp, Glycine max
atatgccaagcaactggctgaagaaacatggggcaagcacaaggatgttgagaagacagcatttgaagaggctgagaagaagagggaagaggaggaatcaaaggatgacccagttgactctgatgctgatgaggaagaggaagatgctgatgaagctggcaatgactccgatgctgaatcaaagacggaagctggggaagacaccaaggaagagggtgtacatgatgaactctaggaagtttg

SEQ ID NO: 286784 - DNA, 247 bp, Glycine max
ggattctcgctatcgacatctacttccctcccacctgtattcagcaggaattgctggaggctcatgatggtgccagtaaagggaaatatactattggacttggtcaagattgcatggcgttttgtacagaagtagaagatgtcatctcgatgagtttgacagtagtttcttcccttcttgaaaagtatgcgattgatcctaaacaaattggtcgtctggaagtaggcagtgagactgtgattgacaa

SEQ ID NO: 286785 - DNA, 247 bp, Glycine max
  unsure (1)..(247): unsure at all n locations
ctccctggaaccaacatcaagaaacatgtttctcagctcattgggnggactccacttgtttatcttaacaaagtcactgaaggatgtggagcttatgttgctgtcaagcaagagatgatgcaacctactgccagcatcaaagacagaccagcatatgcaatgatcacagatgctgaggaaaagaatctgataactcctggaaagacaactctgattgagcccacgtcaggcaatatgggtatcagca

SEQ ID NO: 286786 - DNA, 245 bp, Glycine max
cagtgaaagagaatccgaggcgaagagaagagaaaaattaagatggaggggaaggagcaggatgtgtcgctgggagcgaacaagttcccggagagacagccgattgggacggcggcgcagagccaagacgacggcaaggactaccaggagccggcgccggcgccactggttgacccgacggagtttacgtcatggtccttttacagagcagggatagcagagtttgtggccacttttctgtttct

SEQ ID NO: 286787 - DNA, 246 bp, Glycine max
  unsure (1)..(246): unsure at all n locations
caaagaaaggggtggtggctgcttcgaaagcttaataatttgtttatttccagaacatcatagttttcgcagcagcaaactaacaaattactcatatcatataataagatggcccgttctctctcgcaagccaaacgtattggtgtccttgttgctcantctatctccctaattcccgttcatcggcgaggttacgcagtggcatccgatgtatcggtaagagttggattgggtaatattgggcga

SEQ ID NO: 286788 - DNA, 242 bp, Glycine max
gatgaccctgccaaggaagctgccaacttcacatctcaagtcattatcatgaaccaccctggccagattggaaatggatacgcaccggtgcttgattgccacacttctcacattgctgtcaagttttctgaaatcttgaccaagattgacaggcgatctggtaaggagcttgagaaggagcccaaatttttgaagaatggtgatgcaggtatggttaagatgattccaaccaagcccatggt

SEQ ID NO: 286789 - DNA, 242 bp, Glycine max
gttgtcgttcagttctgaacggaaaagcaccgtcgcaccttccctgaggcttctcttgtctgtcgcgagtgaccatggtgagggttagtgtgctgaacgatgctctgaagagcatgtacaatgctgagaaaaggggaaagcgccaagtcatgattcggccatcctccaaagtcattatcaaattccttttggtgatgcagaagcacggatacattggagagtttgagtatgttgatgaccac

SEQ ID NO: 286790 - DNA, 244 bp, Glycine max
cgcaaagagaagagatctgcctcctttttccttcccaaatcaaatctatctcttcttcaagttgaaaatggggctgtcgttcaccaagttgttcagccggctgtttgccaagaaagagatgcgtatactaatggtgggtctcgatgctgcgggtaagaccaccattctgtacaagctcaagcttggagagattgtcaccaccattcccaccattgggtttaatgtggaaactgtggaatacaag

SEQ ID NO: 286791 - DNA, 249 bp, Glycine max
  unsure (1)..(249): unsure at all n locations
aagaatcaaagaaaggggtggtggctgcttcgaaagcttaataatttgtttatttccagaacatcatagttttcgcagcagcaaactaacaaattactcatatcatataataagatggcccgttctctctcgcaagccaaacgtattggtgtccttgttgctcaatctatccccctaattcccgttcatcggcgaggttacgcngtggcatccgatgtatcggtaagagttggattgggtaatattggg

SEQ ID NO: 286792 - DNA, 249 bp, Glycine max
  unsure (1)..(249): unsure at all n locations
ttttctcacagtcacacagcaatggaagcaatcacagagggagtgaacaacatcaacatctccgattcttacaagaagaatcgcattcaggtctccaacaccaaaaagcccctcttcttctacgtcaatctcgccaagaggtatatgcaacagcataatgaagttgagctctcagcactaggaatggctattgctacggtggtnactgttgctgaaatcttgaaaaacaatgagcttgctgttgaaaag

SEQ ID NO: 286793 - DNA, 245 bp, Glycine max
atcgtaagcagcggctaccctaatcctctcctcttcctctctactaatttcagctatggccgacgaagctgtggttgttccagatcccacccagatcgatgtcaagctctttaaccgctggagcttcgacgatattgagattactgacatttctctggctgattatatcggagtggcgacatccaagcacgccacgtatgtgcctcacaccgccggcaggtactcggtgaagcggttcaggaagg

SEQ ID NO: 286794 - DNA, 240 bp, Glycine max
  unsure (1)..(240): unsure at all n locations
gattccgcacgagtgaccttcttcgtttctcgcaaagtntaagtaatcatgggtanggaaaaggttcacatcaacattgtcgtcattggacatgtcgactctgggaagtcaactaccactggtcacttgatctacaagcttggaggtattgacaagcgtgtgattgagaggttcgagaaggaggctgccgagatgaacaagaggtcattcaagtatgcctgggtgctcgacaagctcaaa

SEQ ID NO: 286795 - DNA, 241 bp, Glycine max
  unsure (1)..(241): unsure at all n locations
cttgcggctagggttttagcgcantttcttctagatttaaggaagangggtaaggaaaaggttcacatcagtattgtggttattggccatgttgactctgggaagtccactaccactggccacctgatctacaagcttggagncattgacaagcgtgttattgagagatttgagaaggaagctgctgagatgaacaagaggtctttcaagtatgcctgggtgcttgataagcttaaggctg

SEQ ID NO: 286796 - DNA, 248 bp, Glycine max
  unsure (1)..(248): unsure at all n locations
ctggaactctacaccatcccaagctcttcaagatggttcgcgtgggaagaaattcacgaaacggagagagcagcattcaaggaatacttcgacggaagctcgatatcgcgaanccgaagatatacaaagagtaccgagacttcatcatcaacaagtacagagaagagccctccagaaggctcacattcagcgaggttcgaaagtcgctcgtgggagacgtcacgttccttcacaaggtcttcctcttc

SEQ ID NO: 286797 - DNA, 248 bp, Glycine max
ctggctcatcgtcatggagaatcccggtggtgagggcgccaacaagcagcagatgatcgattgctacatccaaaccctagccaaggttctcggcagtgaggaggaagctaagaagaagatttacaatgtttcctgtgagaggtactttggattcggctgcgagattgatgaagaaacttctaataagctcgaagggttgcctggtgttctgtttgtgctgccggattcgtatgttgatcctgagaaca

SEQ ID NO: 286798 - DNA, 244 bp, Glycine max
atacaaacctctctaatttttgaagcttattatacccaatctcgatatgcagatcttcgtgaaaaccctaactggcaagacgatcaccttggaggtggagtcctctgacaccatcgacaacgtgaaggccaaaatccaagacaaggagggcattcctccggatcaacagcgtttaatcttcgccggaaaacagctcgaagacggcagaaccctcgccgactacaacatccaaaaggagtccacg

SEQ ID NO: 286799 - DNA, 243 bp, Glycine max
caaggatggaaaaccttacatacaagtgaaaattaaggatggtgagaccaaggtgttcagccctgaggaaatcagtgccatgattctgactaagatgaaggaaactgcggaagcattccttggaaagaaaattaatgatgccgtggtcactgtcccagcttacttcaatgatgctcagaggcaggccaccaaggatgctggtgtcattgctggtctcaatgttgctagaattatcaatgaacc

SEQ ID NO: 286800 - DNA, 242 bp, Glycine max
cagtgaaagagaatccgaggcgaagagaagagaaaaattaagatggaggggaaggagcaggatgtgtcgctgggagcgaacaagttcccggagagacagccgattgggacggcggcgcagagccaagacgacggcaaggactaccaggagccggcgccggcgccactggttgacccgacggagtttacgtcatggtccttttacagagcagggatagcagagtttgtggccacttttctgtt

SEQ ID NO: 286801 - DNA, 265 bp, Glycine max
  unsure (1)..(265): unsure at all n locations
gggcttcaaggcaaaangccctttattttgtcccgctccacttatgtcggatcaggcaaatatgctgcacattggactggtgacaatcagggaacatgggagaacttgaggtactcaatatccacaatgctcaattttggcatatttggggtgccaatggtgggttcagatatatgtggcttctatccacagcccactgaagaattatgcaatagatggattgaagtaggtgctttctacccgttttcaagggatcatgcaaact

SEQ ID NO: 286802 - DNA, 264 bp, Glycine max
  unsure (1)..(264): unsure at all n locations
ggatgtctcacaggaagttcgagcacccaaggcacgggtcactgggatttctccccaggaagcgtgctgctcgtcacaggggaaaagtgaaggcattccccaaggatgacccatccaaggcacccaagctcactgcattcttgggttacaagggctggtatgacntcacattgttagagangtcgagaagccaggatcaaagcttcacaagaaggaaacattgagcctgttaacattattgaggacccttccatgggtattgtt

SEQ ID NO: 286803 - DNA, 258 bp, Glycine max
  unsure (1)..(258): unsure at all n locations
agcatttgttgttcagtgtaacagaaccgcagtttagagtgaagcctgccggtgtatcagatatcatgtgggcggaggcaatggggaagcttganggtatggaaagtgctgatagagaacgtctgtggccacaacttgttcagggttttaaggatctttcacaacgccttaagatacaagatgaagtcattgtttctgatgcagagagattgcgtataacccaaagcaacgttaaaatgctccaaagacattttcaag

SEQ ID NO: 286804 - DNA, 259 bp, Glycine max
aattaccaacaaaaggcctttgtctgaaacctctgaggagtgtgcttcaaagggttctagtgctccacatgtggaaactgaagcagcccctcctgccaaggctaagatagtggggtggccaccaatcagatcctacagaaagaacagccttcaggagaatgatggtgctgggatttatgtgaaagtgagcatggatggagctccttacctcagaaagatagacttgaaggtctatggaggctacacacaactcctcaaa

SEQ ID NO: 286805 - DNA, 261 bp, Glycine max
  unsure (1)..(261): unsure at all n locations
gcttgctcatcaagtccaagaaccaacctaccttttgcaatctcaattcaatggcgtcctctctcattgcgaanggcttcctctcctcttccctcctctccaggtccctccttcgccccgccgcttccgcttcccaccgctctttcaacaccaacgccatgcgccagtatgacaaccgcgccgacgaccacagcaccgacatcgatcgtcactccgaacgctctttccctagcactgcgcgccgcgacgatatcttctcag

SEQ ID NO: 286806 - DNA, 269 bp, Glycine max
  unsure (1)..(269): unsure at all n locations
aaanaaagctacctagagcttgcacctattggtatcttctacaatatcctctccatagtgcnnnnnnnnnnnnnnnnnnnnnntatcaagatgtctttgctttcggatctcatcaacctcaatctctcagaatccacagaaaagatcgttgctgagtacatatgggttggtggatctggtatggactcagaagcaaagccaggactcttcctgggccagtgagtgaccctgcaaagcttccaaagtggaatacgatggctctagcacag

SEQ ID NO: 286807 - DNA, 268 bp, Glycine max
gtggtgaccttggaatggaaattccaatagagaagatatttcttgcacagaaagtgatgatttacaagtgcaacatccaaggaaaaccagttgtcactgcaacccagatgttggagtcaatgatcaaatctcccaggccaaccagggctgaagctactgatgttgccaatgcagttctggatggcacagactgtgtgatgcttagtggtgaaaccgctgctggagcctatccagaccttgctgttcgaacaatggctaaaatatgcat

SEQ ID NO: 286808 - DNA, 262 bp, Glycine max
  unsure (1)..(262): unsure at all n locations
cgangaggttatatggaggtgactgggttttctgcagaagtgagggaacaaatntataaagtggcatctgtcaacctttgctctantatctctggtcaaattcttgctagcttantcatgagtcntcctaaggttgganatnagtcctangagtcattcaatgctganaaggagaatattttggagtcccttgctaggcgtgccaagacactagaagatgcatcaacaaattagagggtgtaacatgccacanancagaagg

SEQ ID NO: 286809 - DNA, 261 bp, Glycine max
  unsure (1)..(261): unsure at all n locations
gaagagaagatggtgtcaggttcggggatctgcgcgaanntnngntggtggacgcccggcaccacatgctgggtcggctcgcctncgattgtggcaaaggagctgctgaacggacaaaaagtggtggtcgtgcgatgcgaagagatttgcatctccggtggtctggtgagncannanntgaagtacttgaggttcctccgcaaacgcatgaacaccaagccttcccacggccccattccacttccgcgcaccctccaagat

SEQ ID NO: 286810 - DNA, 256 bp, Glycine max
ggctaccaaaaggggtttcaattccagtgacactaaaagttctggagtttgagcttttccacttctgtccaatccaagaaatagctccaagtatatcatttgcagcaatagggctactggatatgttcaacactggaggagcagtggagcaggttgagattcataaccgagcagcaacgaaaacaatagctcttagtgtaaggggaagaggcagatttggagtttactcctcccagagaccactgaagtgtgtggt

SEQ ID NO: 286811 - DNA, 258 bp, Glycine max
  unsure (1)..(258): unsure at all n locations
gcgtcgcagtcgcaaccctaatcagaagaagcgcanttcaacgcgagtgacagccaccagccatgggtcgtatgcacagccgcggtaagggtatatcctcttctgctttgccctacaaaaggacacctcctagctggctcaagatctcttcgcaagatgtcgaagaaaatatctgcaagtttgcgaagaaaggtttgaccccgtctcagattggtgtcattctcagagattctcacggtattgctcaggtcaatagcg

SEQ ID NO: 286812 - DNA, 257 bp, Glycine max
ctctattctcaaaaccctaagccgacatcaccattcatccgatgagttcgagaggagcgaccgcggtgctatctcgtgccagcaggattcggtcgaagctgcaaacggcgctggaagccaccgttttggaggtggacgacgtgtcgtaccagcacgcgggccacgccgccgtgaagggtagttccgacaaagaaacccacttcaacctcaacatcgtctcccccaagttcgagggccagagccttgtcaaacgacac

SEQ ID NO: 286813 - DNA, 264 bp, Glycine max
aaagaatcaaagaaaggggtggtggctgcttcggaagcttaataatttgtttatttccagaacatcatagttttcgcagcagcaaactaacaaattactcatatcatataataagatggcccgttctctctcgcaagccaaacgtattggtgtccttgttgctcaatctatctccctaattcccgttcatcggcgaggttacgcagtgggcatccgatgtatcggtaagagttggattgggtaatattgggcgaaggaatggaa

SEQ ID NO: 286814 - DNA, 266 bp, Glycine max
  unsure (1)..(266): unsure at all n locations
gaggaacaatggcgggtagggtttcgacgtgcttcttcttcgtgtttgctctttctctccttcttccttttgcagatctccgctgaggaatcatcggagaaagagttcgtactcacattggatcactctaactttcacgacactgtcagcaagcacgatttcatcgtcgtcgagttctacgctccatggtgtggccactgtaagaagcttgctcccgantatgaganagctgttctatcttgagtagtcatgatcctccggttgtt

SEQ ID NO: 286815 - DNA, 262 bp, Glycine max
  unsure (1)..(262): unsure at all n locations
gttgcaattgctggagcagattactgcgtcatcgccgcggatacgaggatgtccaccggttacaatatcctncactccgcgattactccaaaatctcccaactggcggagaagtgtgttatggcttcttctggttttcaagctgatgtcaaagctttgcagaaggttttgtctgctaggcatttgatttatcagcatcaacacaacaaacaaatgagctgccctgcgatggctcagttgctctcaaacactctttattacaa

SEQ ID NO: 286816 - DNA, 259 bp, Glycine max
  unsure (1)..(259): unsure at all n locations
gcaccctgccacttttgaaacactcgctatggatcggagaaagaaggaggatatacttaaagaccttgtgaagtttaagaagggaaaggattattatgcnaagataggtaaagcttggnagcgtggctatcttttgtacggtcctccggggactggtaagtctaccatgattgctgctattgctaatttcatgaactatgatgtgtatgatcttgagttaaccgcggtgaaggacaacactgagctaaggaagctgttg

SEQ ID NO: 286817 - DNA, 258 bp, Glycine max
ctagtggcggatgctcatttattaccggccaccgcagttgggcagaaagccggtgacgctattaagaagtatttggtttccgatgcgaaaccgacggtgaagattttttttgagggaaccaaggtggggattcagccatcgccggtggttgctgcgtttagctcaagaggtcccaactcgatcacgccacagatcctgaagccagatctcatcgcgccaggtgtcaacatcctagcggggtggtctaaagccgtgggg

SEQ ID NO: 286818 - DNA, 253 bp, Glycine max
gccttggctattccataccaccactggaccatgaagggcaaccaaattgggtttgttgtgctgtactcattgaccttcttctttgccaattttggtccaaatgccacaacattcgtggtgccggcagagattttcccagcaaggctaaggtctacatgccatggtatatcggctgcagcagggaaagctggggcaatggtaggggcttttggctacctgtatactcaaaatgccattggactgagaaatacac

SEQ ID NO: 286819 - DNA, 256 bp, Glycine max
  unsure (1)..(256): unsure at all n locations
cnttagtcgtttgtaacgcctttgtttgcnttttttgcacagaagaattaacacgtatatagcaagcatggcagtcacactctacgaccttagctctgcctctgggttgaagaagcttgatgagtaccttctcccacgcagctacatcaccgggtaccaagctacaaaggatgatcttactgtttatgcagctttgccaactgctccatcagatgaatatggaaatgtttccaggtggtacaagcacattgatgct

SEQ ID NO: 286820 - DNA, 263 bp, Glycine max
  unsure (1)..(263): unsure at all n locations
cattctctctgtgtatttccctacctctcccttcaagatgcagatcttcgtcaagaccctcaccggcaagaccatcancccttgaggtggaaagctctgacaccatcgacaacgtcaaggccaagatccaggacaaggaaggaatccccccggaccagcaacgtctcattttcgcccggaaagcancttgangacggcncgtacccttgctgactacaacattcagaaggagagtactcttcactcgtcctccgtctccgtgg

SEQ ID NO: 286821 - DNA, 262 bp, Glycine max
cgcataataaccgtcctaagtttattgagagaattttgcaagtgtgagaaacatggcatctcgtcaaaacaacaagcaagagcttgatgaaagagcaaggcaaggagagactgttgtcccgggtggaactggtggcaagagcctggaggctcagcaacaccttgctgaaggaaggagcaagggagggcaaacaaggaaggaacagctgggtacagaagggtaccaggaaatgggacgcaaaggagggttgagcactgtggac

SEQ ID NO: 286822 - DNA, 258 bp, Glycine max
  unsure (1)..(258): unsure at all n locations
gcacgantatcttgttgtttggagcgatccgaganaaactctgtaaacatgttggtttaccaggacctccttacaggtgatgagcttctctctgactccttccgttacaaggaaattgagaatggaatgctgtnggaagttgaggggaagtgggttgttcaannagcagttgatgtagacattngtncaaacccttctgctgagggtngaggngaagatganngagttgatgangcagctgttaangttgttgacatt

SEQ ID NO: 286823 - DNA, 259 bp, Glycine max
aaagaatcaaagaaaggggtggtggctgcttcgaaagcttaataatttgtttatttccagaacatcatagttttcgcagcagcaaactaacaaattactcatatcatataataagatggcccgttctctctcgcaagccaaacgtattggtgtccttgttgctcaatctatctccctaattcccgttcatcggcgaggttacgcagtgggcatccgatgtatcggtaagagttggattgggtaatattgggcgaaggaa

SEQ ID NO: 286824 - DNA, 257 bp, Glycine max
  unsure (1)..(257): unsure at all n locations
gtggccttgacattattggngttcaaacagttatcaactttgcatgtccacgcgatcttactagctatgttcatcgagttggtcgtactgcaagagctggaagagaaggatatgcagtcacttttgtgactgacaatgaccgatcacttttaaaagccattgcaaagagggcaggttcaaagctgaaaagccgcattgttgccgagcaatctatacataagtggtctcatataattgagcaaatggaagaccaaatt

SEQ ID NO: 286825 - DNA, 258 bp, Glycine max
  unsure (1)..(258): unsure at all n locations
ctgggcccagagtatgcaagcaagtacaagaccttgatctaccttgnctggttcagcatctgctgaggttattgctgatattgctctttgcccatttgaggctgtgaaggtccgtgtccaaactcagcctggttttgcaaggggtttgtctgatgggctcccaaaatttgtcagatctgaaggaaccttagggctgtacaaggggttagtgcctctctggggacgacaaattccatacacaatgatgaagtttgcttc

SEQ ID NO: 286826 - DNA, 253 bp, Glycine max
  unsure (1)..(253): unsure at all n locations
ctcttagccgccgatctctcaggggcttgcatcttctcaggtaagctgtgaagatgtacacatcaaggaagaaaatccacaaggataaggatgctgaaccaactgaatttgaagagtcagtnggacaggcattgtttgatctggaaaataccaatcaggagcttaaaagtgatctgaaggatttatacataaactcagccgtgcaagttgatgtttctggaaaccgcaaggctgttgttattcatgtccctta

SEQ ID NO: 286827 - DNA, 263 bp, Glycine max
tggttttctgggtcgtcttggaattcaaaaaagattccaactttgaggatgggtaggggcggaaccgccgcggcggcggtggagatcgccgaacccggttcaaggccggtttttttcaaagaaccgcgttataggggcgtcagaaaaagaccgtggggccggttcgccgccgaaatcagagaccctttgaagaaagccagggtttggctcggaaccttcgacaccgccgaggaggcggcgcgtgcctatgacacgggcggcga

SEQ ID NO: 286828 - DNA, 259 bp, Glycine max
  unsure (1)..(259): unsure at all n locations
cgaaaccctaggttttagtgagtggcgaaaatggcggtgattttttcaagtgcaataccaggaggggcagcaccagcagcaatcgagcaagtgcagtgcttcgggcggaagaagacggcggtggcagtgacctactgcaancgcggccgaggcctcattaagatcaacggctgcccgatcgagctggtggagccggagatcctccgcttcaaggccttcgagccaatcctcctcctcggtcgccaccgnttcgccggcg

SEQ ID NO: 286829 - DNA, 254 bp, Glycine max
  unsure (1)..(254): unsure at all n locations
ggtttcaagatttcttttgggtgacagctttcctgtgccagtctatctgtctttaattccaatcattggtggatgtgcacttgctgctgtgactgagctcaatttcaatatgatcggttttatgggggccatgatatcgaatttggcatttgtattccgtnatatcttttcgaaaaagggcatgaagggaaagtctgttagtggaatgaattactacgcatgtttatctattttatctctgctattctcacacc

SEQ ID NO: 286830 - DNA, 255 bp, Glycine max
  unsure (1)..(255): unsure at all n locations
gggatcagatctgctctctccgtttggnttcaattcgacactttcctgcgcctcaaagattaagcgaacaacatggttgtccttgctgcatccattgtgagcaaatctgggaaagtgntagtttctagacagtttgtggatatgactcgcataagaattgaaggtcttctagcagcatttcccaagttggtagggactggaaaacaacacacatatgttgagactgagaatgtgcgctatgtttaccagccaata

SEQ ID NO: 286831 - DNA, 256 bp, Glycine max
  unsure (1)..(256): unsure at all n locations
caaattagttcattctctttgcgcagttccctacctctcctttcaagatgcagatcttcgtcaagacccttcaccggaaagaccatcacccttgaggtggaaagctctgacaccatcgacaacgtcaaggccaagatccaggacaaggaaggaattcccccggatcagcaacgtctcatcttcgccggaaagcagctncgaggacggccgtaccctcgccgactacaacatccagaaggagtcaacccttcacctt

SEQ ID NO: 286832 - DNA, 228 bp, Glycine max
  unsure (1)..(228): unsure at all n locations
gcaaaacaaaaatgtctcacttcggacgttcgggtcccccagacatttccgacacttactctcttctcgttctgaacatcaccttccgtaccaccgccgacgacctattccctctcttcgacaagtatgggaaggtcgtcgacatcttcatccccaaggatcgaaggactggtgaatcgaggggttttgcgttcgtgcgtnacaagtatgctgatgaggctcagaagg

SEQ ID NO: 286833 - DNA, 253 bp, Glycine max
gtcaactgttcttagaattacagggacttggatcaaaaagggttggattgattggtcttggtcagtcaccttccactcctgcaccttttaagagtcttggcgaggccattgtggcggctgccaagtcttctcaagcaagcagtgttgctgttgctcttgcctcttctgaaggactctccgcacaatcaaagcttagcactgcttatgcaattgcttctggggctgtgctgggattatttgaagataatagata

SEQ ID NO: 286834 - DNA, 274 bp, Glycine max
  unsure (1)..(274): unsure at all n locations
ggatntctcacaggaagttcgagcacccaaggcacgggtcactgggatttctccccaggaagcgtgctgctcgtcacaggggaaaagtgaaggcattccccaaggatgacccatccaaggcacccaagctcactgcattcttgggttacaaggctggtatgactcacattgttagagaggtcgagaagccaggatcaaagcttcacaagaaggaaacatgtgagcctgttacaattattgagacccctccaatggttattgttggtgttgtggg

SEQ ID NO: 286835 - DNA, 272 bp, Glycine max
cagaacattattgagacccttggtgcgggacatggtggccgagtgtcacttactcgcagctatcatcacgcgcttgaggcttccattgctagcaattttactgataacggatgcattgcgtgtatgtgtcacaacactgatggactttatagtgctaagcagactgctattgtgagagcttctgatgatttttaccctcgtgatcctgcttcccataccatccatatttcttctgttgcatacaactcactattccttggagaatcatgcaa

SEQ ID NO: 286836 - DNA, 269 bp, Glycine max
  unsure (1)..(269): unsure at all n locations
ctgcaaaaaagctgatgtcgacatgaacaagagagctggtgaattgagtgctattgagttggatagcgttatgactgtggttgccaaccctcggcaattcaagatcccggattggtttttgaataggaagaaagactacaaggatgggaagtattctcaggtggtgtcaaatgcactggatatgaagttgagggatnntttggagcgctgaagaaaatcagaaatcaccgtggtttgaggcatactggggtctcgtgttcgtggtcagc

SEQ ID NO: 286837 - DNA, 269 bp, Glycine max
  unsure (1)..(269): unsure at all n locations
ggacagcatcagatctggcccctacggcaagatcttccgccccgacaacttcgtcttcggccagtnccggcgccggtaacaattgggccaaaggtcattatactganaggcgccgagctgatcgactccgttctcgacgtcgttcgcaaagaggctgaaaactgcgattgcttgnaaggttttcaagtttgccactctcttggaggaggcacaggttctggcatgggaacactgttgatatcaaaaattagggaggaatacccagacag

SEQ ID NO: 286838 - DNA, 263 bp, Glycine max
  unsure (1)..(263): unsure at all n locations
cactttcgcattgtaagggaagtagaagcaattngtggtaatgtaggnnnntcannttcttgnnntcnaatngnttatacatntgangccttanaganctatgtnccacaaatggttganttnctggttgactgtgtaaggcacccagccttcttggattgggaagtcaatgaagagctcggaaannaaaagcagagcttggangactctctaacaatccccagggcttgctttggaagcaattcactctgctggttattctg

SEQ ID NO: 286839 - DNA, 276 bp, Glycine max
  unsure (1)..(276): unsure at all n locations
caaacacaacaaaactctccaattctgaagattttcttatctcttgtctttgaaactagaancctccgtgattgatccaatggcgacaaaaganggcaaagccataggcatagacctcggcacgacctacagctgcgtgggcgtgtggcaaaacgaccgcgttgagatcatccccaacgaccaaggcaaccgaaccaccccctctatgtcgccttcaccgacaccgagaggctcatcggagacgccgcgaagaaccaagtcgcgatgaacccgcag

SEQ ID NO: 286840 - DNA, 273 bp, Glycine max
  unsure (1)..(273): unsure at all n locations
gctcttgccccagangtggcaggtccatctgccctagccacaagtgatccaacagaaagggcaaacatggttcttgagcaggcagagaaattagattgcaagagatacctcactccaaaggacatagtggaggggtcacctaatcttaatcttgcatttgttgctcaaattttccagcataggaatggccttacaacagttgacagccagaaaatgtcctttgctgagatgatgactgatgatgcagagacatctcgggnagaacgatgnttc

SEQ ID NO: 286841 - DNA, 271 bp, Glycine max
gagagaagagagaagagagatggatccagacgcgttggcaaaggcattcgtggagcactactacagcaccttcgacaccaaccggaacggtttagcgaatctgtatcaggagggttccatgctgaccttcgaagggcagaagatccagggcgcttccagcatcgtcgctaagctcacttccctccctttccagcagtgccaccactccatctccaccgtcgactgccagccctccggtgtcaacgctggcatgcttgtctttgtcagcggc

SEQ ID NO: 286842 - DNA, 268 bp, Glycine max
  unsure (1)..(268): unsure at all n locations
cctttctctctcttctttttactctctctctgtctctctctacgctttctcgttcganatccctcaagggatccactaactgaaggagaaatggggttgacattcaccaagcttttcagccggcttttcgccaagaaggaaatgcgaattctgatggtgggtctcgatgcagctggtaagaccaccatcctgtacaagctcaaacttggagagatcgttaccacaatcccaccatgggttcaatgtggagactgtggaatacaagaac

SEQ ID NO: 286843 - DNA, 269 bp, Glycine max
  unsure (1)..(269): unsure at all n locations
ctccctttctttctttccgatcccaccgtcaaacttgtcattctatatgctttgcagggtccattgaatatgtctccgtcgttggatcttcctcccaagggtggcttcagttttgatctatgcncaagaaacgcaatgcttcaaaacaagggcctcaaagccccaacctttctcaaaactggcaccactattgtcggtttagttttccaggatggtgtcattcttggtgctgatactagggcaactgaaggacctatagtggctgataa

SEQ ID NO: 286844 - DNA, 261 bp, Glycine max
catttgtggaatcaaacttgactgaccttccattctttgcttcaagggtgaaacttggtaggacaggagttgaggctttaattccatctgacctccaagggttgactgactatgagcagaaggctttggaagcacttaagcctgaactcaaggccagcatagagaaggggattgcttttgctcagaagcaaactgttgctgcttaaatttcctgtcagcaggtggtttctgggttatggattattgagcataaatactact

SEQ ID NO: 286845 - DNA, 265 bp, Glycine max
  unsure (1)..(265): unsure at all n locations
gagcagagagagacgcagccatggggcgaagacccgcgaggtgttataggcaaattaagaacaaaccataccccaagtccacggttttgccgtggtgttcctgatcccaagatcaggatttacgatgttggtatgaagaagaagggtgttgatngagtttcctttctgtgtccatctggttagttgggagaaggaaaacgtttctagtgaggccctggaagctgctcgtattgcttgcaacaagtacatggccaaatttgctgga

SEQ ID NO: 286846 - DNA, 267 bp, Glycine max
atttgcagatattggtgcgttggatgagattaaagaatcacttcaagagctggtaatgcttccccttagaaggccagacctcttcaaaggtgggcttctgaagccatgtagaggtatattgctttttgggcctcctggtactggaaaaacaatgctagcaaaggcaattgcaaatgaagctggtgcaagtttcatcaatgtcctcaatgtcaaccatccacatcaaaatggtttggagaggatgaaaagaacgtccgagctctgttc

SEQ ID NO: 286847 - DNA, 271 bp, Glycine max
  unsure (1)..(271): unsure at all n locations
gcttcaagcaccaggtgccacaagttatataggttgcataggaaaggacaaatttggagaggagatgaagaagaaatgtacactagatggtgtaaaggttaactattatgaaatcgacaatacacctacaggaacttgtgctgtttgtgtggttggtggtgaaaggtccctgttgccaacttatcagctgcaaattgctacaagtctgagcatttgacgagaccggaaaattgggcntagttgaaaaggccaagtattactacatttctgg

SEQ ID NO: 286848 - DNA, 269 bp, Glycine max
catactaccttgaagagacagcaaattggggtcttgatgttaatgaacttcgtcaatcagttgagcaggctcgctttaaaggaataactgttaaagcaatggtgatcataaatcctggaaaccctactggtcaatgccttagtgaagctaatctaagagaggttttgcaattctgttatcaagaaaatttagccttgcttggagatgaggtttaccagacaaatatatatcaggatgaacgaccctcattagttctagaaaggttttga

SEQ ID NO: 286849 - DNA, 269 bp, Glycine max
  unsure (1)..(269): unsure at all n locations
caaacacaacacacacacactgtgtttgtgaaactctcacacagacaagtcacaacaacaagtttctgttggtccaatggcatcagcaanaccccatttnaaagatgagctggacatcgtgatcccaacgatcaggaacctggatttcttggagatgtggaggccattctttgagccttaccatctcattattgtgcaagatggagacccttcaaagatcatcaaggtccctgaaggctttgactatgagctctacaaccgcaatgaca

SEQ ID NO: 286850 - DNA, 264 bp, Glycine max
  unsure (1)..(264): unsure at all n locations
gggtgacaacatgattganaggtccaccaaccttgactggtacaagggaccaactctccttgaggctcttgaccaaatcaatgagcccaagaggccctccgacaagcctctaaggcttccattgcaggatgtctacaagattggtggtattggtactgtgccagtgggacgtgtagagactggggttgtgaagcctggtatggtggtgacttttggtcccactgggctgacaactgaggttaagtctgttgagatgcaccatga

SEQ ID NO: 286851 - DNA, 260 bp, Glycine max
  unsure (1)..(260): unsure at all n locations
gttgaaaacatgggagaaaaccaaaaggctatcttttacctagcaactgacagcttgaagagtgcaaagactgctccatttttggagaaattggttcaaaaagatattgaggttctttatttggttgaacctattgatgaggttgccattcagaacctacagacctacaaagaaaaganatttgttgatatcagcaaggaggatttggaattaggtgatgaggatgaggtcaagagaggganaacaagcaagaatacnnc

SEQ ID NO: 286852 - DNA, 263 bp, Glycine max
ggcgattaccaccgctatctcgcagagtttaaggttggggatgagagaaaaaccgctgctgaggataccatgttgtcttacaaggctgcccaggacattgcttctggggatcttccccctactcaccccatcagattgggtctcgctctcaacttctccgtcttctactatgaaatcctcaaccagtctgacaaagcgtgtgccatggctaaacaggcttttgaggaagcaattgctgagctggacaccttgggagaagaatc

SEQ ID NO: 286853 - DNA, 265 bp, Glycine max
ctcccctttgccgctgttgttgttgctgcaccaccgaacaacttcccctgtaaatccgcgtttcgtttgtgcaaggttttaaaagatggctgatgctgaggacattcaacctcttgttgttgataatggaactggaatggtcaaggctggttttgcaggtgatgatgctcctagggccgtgttccccagcattattgggagaccacgccatactggtgtaatggttgggatgggtcagaaggatgcttacgtgggtgatgaagcc

SEQ ID NO: 286854 - DNA, 269 bp, Glycine max
gacaagcaaggatttccaatgaagcaaggagtgttgacccctggtcgtgttcgcctcttgctgcatagaggaactccttgtttccgtggttatggaaggcgcaatggagagcgtaggaggaagtctgttcgtgggtgcattgtcagccctgacctctctgttctcaacttggtgattgtgaagaagggtgaaagtgatttacctggcctgacagatgttgaaaagccaaggatgaggggtccaaagagagcttccaagattcgcaagct

SEQ ID NO: 286855 - DNA, 268 bp, Glycine max
  unsure (1)..(268): unsure at all n locations
gtgggctcacaccctattggaaccagcagangcccgggtgggactgctacggcccataatacccgtgcggggggaaacccaaatgattatgggtatggaactgggggtacttacaattaaataatgatgatttagaaaaggaaagctacgacccataagaaggtttagttaagagtatgacttttgttgtggttatcttcttgtttggttatctttttgtttgtgtctccttttctctccatttttgttgtggagaattgggtgtggt

SEQ ID NO: 286856 - DNA, 270 bp, Glycine max
  unsure (1)..(270): unsure at all n locations
attcaagataaggagggtatccccccagaccagcagaggcttatctttgctggtaaacagcttgaagatggacgaacccttgcagattataacatccagaaggaatctaccctgcacttggttttgaggcttcgtggtggcatgcaaatctttgttaagactttgaccggaaaaacaataactttagaagtncaaagttctgataccatcgatcaacgtgaaggcaaagatacaggacaaagaggggattccaccagaccagcagaggct

SEQ ID NO: 286857 - DNA, 267 bp, Glycine max
caaaaaccaagaagttttgatgatgatatgaaggatcttgaggcattgttgaataagaaatcatttagggagatgcaaaaatcgaaaactggtgaggagcttttggacctaattcaccgaccaactgcaaaggaaactgctgtagccgctaagttcaaaacaaaaggtggttctcaggtgaggcaatactgtgacttactgacaaaagaggattgccgacgtcaaactggttcctttatagcatgtgataaggttcattttagaagg

SEQ ID NO: 286858 - DNA, 264 bp, Glycine max
  unsure (1)..(264): unsure at all n locations
cgcaatcttcactacattcaccgagcatttgcattcacattgaatatggctgagactacacaatctaatgctgagttgttggagtggcctaagaaagataagcgccgcttcctgcatgttgtgtatcgtgttggtgatctgatcgcaccattaagttttatactgaatgttttgggatgangcttttgaggaaaagagatattccagaggagaaatatgccaatgcttttcttggattggccctgaacaatcccattttgttgt

SEQ ID NO: 286859 - DNA, 263 bp, Glycine max
  unsure (1)..(263): unsure at all n locations
ccttttgttcctatctctggttttgagggaggcaacatgattganaggtccacaaaccttgactggtacaagggtccaactctgcttgatgcacttgaccagattagtgagcccaagaggccctctgacaagcccctcaggcttccccttcaggatgtgtacaagattggangtattggaactgtgccagtgggacgtgttgagaccggtgtcttgaagcctggaatggtggtgacttttgcaccaactggactgacaactga

SEQ ID NO: 286860 - DNA, 264 bp, Glycine max
  unsure (1)..(264): unsure at all n locations
gtcgaagagaggacgcggtggttcggcggggaacaagttccggatgtcgctgggtctgccggtggcggcgacggtgaactgcgccgacaatacgggggcgaagaacctctacatcatatcggtgaaagggatcaaagggcgtttgaaccgtctcccctcngcttgcgttggcgacatggtgatggccaccgtgaagaaggggaaacccgatctgaggaagaaggttttgccagctgtcattgttcgccagcgcaaccatggcgc

SEQ ID NO: 286861 - DNA, 267 bp, Glycine max
ctttagagtcagtgtacgcagaagagtaaaatcgattggcgatgatggagttgaaagagattcagagactcgaaggccacaccgataaggtttggagcttggcctggaacccgaccaccggtcacgccggtatcccactcgtcttcgcttcttgcagcggcgacaaaaccgtccgaatctgggagcagaacctctcctctggcctctgggcctgcacggcggttctggatgaaacgcacactcgaactgttcgatcttgtgcttggt

SEQ ID NO: 286862 - DNA, 268 bp, Glycine max
  unsure (1)..(268): unsure at all n locations
gttttaccctactgatgacagtgtcgcaatagtaattcaacctagtacgagaggaaccgttgattcgcacaattggtcatacgcgcttggttgaaaagccagtggcgcgaagtaccgtgcgttggattatgactgaacgcctctaagtcagaatccgggctagaagcgacgcgtgcgcccgccgtccgtttgccgnccagcagtagggggcctcggccccccaaaggcacgtgccgttggtgacccttcgtgangcggattagcccta

SEQ ID NO: 286863 - DNA, 263 bp, Glycine max
aaaacttggaaaaatttctataatgtttttagcatgtgatgtccaatcaattataaatcgtgtattcctctttaaattgaatgctctattctgttctgctgggcaggtacctattttgttgttcatatactcacaatgttgctccaaagggaaaatttattgcatttgtatcaaccgaggcagagacagatcagccagcaattgaactaaaacctggaatgaccttctaggacctgttgatgagatattttttgatatctatg

SEQ ID NO: 286864 - DNA, 258 bp, Glycine max
aatatgattactgggacatcccaagctgactgtgctgttcttatcattgattcgaccactggtggttttgaagctggtatttccaaggatggacagactcgtgaacatgctctgctttcattcacccttggtgtgaaacagatgatttgctgctgtaacaaaatggatgctactacacccaagtattccaaggccaggtatgatgaaattgtgaaggaagtctcttcctacttgaagaaagtaggatacaaccctgac

SEQ ID NO: 286865 - DNA, 254 bp, Glycine max
cgcgtgcatagcagagtcagagacagagacgcagccatggggcggagacctgcgaggtgttataggcaaattaagaacaagccataccccaagtcacgtttctgccgtggtgttcctgatcccaagatcaggatttatgatgttggtatgaagaagaagggtgttgatgagtttccttctgtgtccatctggttagttgggagaaggaaaatgtttcaatgaggcccggaagctgctcgcattgctgcaacaag

SEQ ID NO: 286866 - DNA, 261 bp, Glycine max
gagacacacacttttgcagtcacattgagaatggggcgtgttcgcacgaagacggtgaagaaatcctcgcggcaagtgatagagaggtactactcccgcatgacgctggacttccacacgaacaagaaggttctggaagaggtggccatcattccctccaagaggctccgcaacaagatcgcggggttctccacccatctcatgaagcggatccagaagggtcccgtgccgtggaatctccctgaagctgcaggaggagga

SEQ ID NO: 286867 - DNA, 261 bp, Glycine max
ctctctctcggatttcttgcgcggtttatcatgggggatagtcagtattcgttttctctcaccacatttagcccttctggaaagcttgttcagattgagcatgctttgacggctgtcgggtctggacaaacgtctttgggaattaaagctgcaaatggagttgtcattgctaccgagaagaaattgccatctatattggttgatgaagcatcagtccagaaaattcagttattaacaccaaatataggtgtcgtatatagt

SEQ ID NO: 286868 - DNA, 260 bp, Glycine max
gcaaggtgtagaaaagtcaaactcagggccaaatcataataagttgtatttggatcatgttgatgagaggtgggcaagggatatggatcaaatggacctgattgtgttatcaattgggcactggtttttgcatcctgcagtgtactatgagggtggttcagttttaggttgccattactgtcctggccttaattacactgaaattgggttttatgatgtgctaagaaagggcctaaggactacccttaatagcataattg

SEQ ID NO: 286869 - DNA, 256 bp, Glycine max
gagctcacccagcaaatgtgggattccaagaacatgatgtgtgctgctgaccctcgacacggccgctacctcactgcctcagccatgtttagaggaaagatgagcaccaaggaggtcgatgaacaaatgatcaatgtgcagaacaagaactcctcatactttgtggaatggattccccacaatgtgaaatccacagtctgtgacattcccccaaccggcttgaagatggcttcaacattcatggcaactctacctc

SEQ ID NO: 286870 - DNA, 261 bp, Glycine max
cgagaaagagaagaagcatatatatcaaaatggctgcagagatggagagggagtcattgataactgaagctcctaatgcaccagttactgcacagagaagggtcagaaatgacttagaaaattctctaccaaaaccatacttgccaagagcattgaaagctcctgatacgggtcacccaaatggaacagcaggccacaggcaccacaacttatctgttcttcagcagcattgtgctttttttgatcaagatgacaatggaa

SEQ ID NO: 286871 - DNA, 258 bp, Glycine max
  unsure (1)..(258): unsure at all n locations
ctggaaccatggacagcatcagatctggcccctacggcaagatcttccgccctgacaacttcgtcttcggccagtnccggcgccggtaacaattgggccaaaggtcattacaccgaaggcgccgagctggtcgactccgttctcgatgtcgttcgcaaagaggctgaaaactgcgattgcctgcaaggttttcaagtttgccactctcttggaggaggcacaggttctggcatgggaacactgttgatatcaaaaata

SEQ ID NO: 286872 - DNA, 259 bp, Glycine max
gtaagcaagcaaaaccctagcggcgcctgctttctttgttcgtgttttgcatcaggatggagtctcaggtgaagcacgcacttgttgtcaaagttatgggtcgtactggatccagaggacaagtgacccaggttagagtgaagtttttggatgatcagaaccgtcacatcatgaggaatgtgaaaggacctgtgagagaaggagacattctcaccctactcgagtctgaaagggaagcaagaagattgcgctagatggt

SEQ ID NO: 286873 - DNA, 260 bp, Glycine max
gcagattatcatgctgcagctcgtgcaattggtggatgtcctatttatgttagtgacaagccaggcaatcacaattttgatcttcttaagaagctggttctcccggatggttcggttctccgtgctcagttacctggcaggccaactcgtgattctctatttgtggatccagccagagataggactagcttgctcaaaatatggaacctgaacaaatgctctggagttgttggtgtatttaactgccaaggtgctggatg

SEQ ID NO: 286874 - DNA, 263 bp, Glycine max
caagattgacaggcgatctggtaaggagcttgagaaggagcccaaatttttgaagaatggtgatgctggtatggttaagatggttccaaccaagcccatggtggttgaaactttctctgagtatcctccccttggtcgttttgctgtgagggacatgcgtcagaccgtagctgttggagtcatcaagagtgttgagaagaaagaccccaccggagccaaggtcacaaaggctgccgccaagaagaagtgattgcattttggca

SEQ ID NO: 286875 - DNA, 262 bp, Glycine max
aaggggtggtggctgcttcgaaagcttaataatttgtttatttccagaacatccatagttttcgcagcagcaaactaacaaattactcatatcatataataagatggcccgttctctctcgcaagccaaacgtattggtgtccttgttgctcaatctatctccctaattcccgttcatcggcgaggttacgcagtggcatccgatgtatcggtaagagttggattgggtaatattgggcgaaggaatggaatcgtgggaggt

SEQ ID NO: 286876 - DNA, 260 bp, Glycine max
  unsure (1)..(260): unsure at all n locations
gaggcacagagagaaaatggtttcggggtcagggatctgtgccaagagggtaattgtggacgcacgacaccacatgctggggaggctggcatcgatcgtggcgaaagancttctgaatgggcagaaggtggtggtggtacgctgcgaggagatttgcatctccggtgggctacgtcaggcagaagatgaagtacttgcgtttcctccgcaagcgcatgaacaccaagccctcttcacggccccatccattccgtgcaccc

SEQ ID NO: 286877 - DNA, 259 bp, Glycine max
  unsure (1)..(259): unsure at all n locations
cttttattgctgcttgcaaganacctcctgtgttttgcataattactgaatatttggctggaggttctctgggaaaattcctgcatcaccaacaaccaaatatacttccactcaaacttgttctgaagttagccctcgacattgcgcggggaatgaaatatcttcattctcaagggattcttcatagggatctcaaatcagagaatcttcttctgggggaagatatgtgtgtaaaagtagcagattttggtatctcatg

SEQ ID NO: 286878 - DNA, 259 bp, Glycine max
cagaaagtccactgcctaaatactctattttctaagctgcaaataaaccagtctatccatcttctgcaattccagtgaatcgggttgaactccttgccaagaaaatcacagaacttgggtattcatgtttctacattcatgcaaagatgttgcaagaccatcgtaacagagtgtttcatgatttccgcaatggtgcatgtcgaaatcttgtttgtatgatctttttactagaggaatagacattcaagcagttaacgtt

SEQ ID NO: 286879 - DNA, 261 bp, Glycine max
  unsure (1)..(261): unsure at all n locations
gaaatctgaagctaagtttcgttgccactgaggaatgaaatggcccaatggtaacaacattagtccatttcttcaagctcttgcttttccttctaactttccactcttgtctcgctnngattttcttccaagagagattcgaagatggatggaagagccgttgggtgctatccgattggaaaaggagcganggaaaagcgggtaccttcaagcacacagcagggaaatggtctggggatcctgatgacaaaggtcttcaga

SEQ ID NO: 286880 - DNA, 248 bp, Glycine max
  unsure (1)..(248): unsure at all n locations
ggttcatccgttggattttttcactaactgcggaaagattcgattctattgntgggatactgctgggcaagagaagtttggcggcctcagagatggatattatatccatgggcaatgtgcgattatcatgtttgatgttactgcccgtctaacatacaagaatgtccctacctggcaccgtgatctttgcagggtctgtgaaaacatcccaattgttctttgcggtaacaaggttgatgtcaagaaca

SEQ ID NO: 286881 - DNA, 251 bp, Glycine max
  unsure (1)..(251): unsure at all n locations
cgacattcctgaactgattcgaagtcttgaagatcttggagcacctgagtataatccaatatttttnaagaagctaataactcttgctatggaccgaaagaacagggaaaaggaaatggcctctgtactgctctctgctcttcatatagagatcttctcaacagaggatatagttaatggttttntattgcttctggaaagtgcagaagatacagcatggatatanggatgctcaatgagctggctctgta

SEQ ID NO: 286882 - DNA, 258 bp, Glycine max
gaccggtgtcttgaagcctggaatggtggtgacttttgcaccaactggactgacaactgaagtcaagtctgtggagatgcaccatgaatctcttacagaggcacatcctggtgacaatgtgggattcaatgttaagaatgttgctgttaaggatttgaagcgtggttatgttgcctcaaactcaaaggatgaccctgcaaaggaggctgctaacttcacagcccaagttcatcatcatgaaccaccctggtcagattg

SEQ ID NO: 286883 - DNA, 257 bp, Glycine max
aattatgcgcatgttcaaagcaccggctgcatctggtggggagtggcaattcccccaagcagtagcatttgctgtctctggaattagaagccaagctattgtttctataacaagcaacaaagaagttattactggtgggcatgctgataatagtattaggctaatatcctcagatggagctaaaacattagaaacagcttatgggcactgtgctcctgtaacttgccttggtctttcacctgatagtaattacctag

SEQ ID NO: 286884 - DNA, 260 bp, Glycine max
aaagaatcaaagaaaggggtggtggctgcttcgaaagcttaataatttgtttatttccagaacatccatagttttcgcagcagcaaactaacaaattactcatatcatataataagatggcccgttctctctcgcaagccaaacgtattggtgtccttgttgctcaatctatctccctaattcccgttcatcggcgaggttacgcagtggccatccgatgtatcggtaagagttggattgggtaatattgggcgaaggaa

SEQ ID NO: 286885 - DNA, 264 bp, Glycine max
cggaagaatttctcatcaaagatttcacttgttacctcaagagaaaaatgcctttacagggtcggttgtttctttcagcaaggattctggggtttcatgccaatttgtttggacataaaaccaagtttttcttcctttgggaagatattgaagagatacaagtgcttcctccatcattggcaacattaggaagccctacattggtcataattctgcgaagaggtcggggtcttgatgcaaggcaggtgcaaagacttcaagatg

SEQ ID NO: 286886 - DNA, 261 bp, Glycine max
  unsure (1)..(261): unsure at all n locations
cgggtgaggtagaacccttccactgtggtgactctgcgatgggtgcctacaagtatgtttcagagctatggcgcaagaagcagtctgatgtcatgcgcttcttgcagcgggtgaggtgctgggagtataggcagcaaccttccattgttcgtttgacaaggtctacccgccctgacaaggcttcgtcgcttgggttcaaggtaanagggctatgtgatttaccgtgtncgtgttaggagggtggccgaaagagaccagttc

SEQ ID NO: 286887 - DNA, 257 bp, Glycine max
agaaggcaagatgtcgaagagaggacgcggtggttcggcggggaacaagttccggatgtcgctgggtctgccggtggcggcgacggtgaactgcgccgacaatacgggggcgaagaacctctacatcatatcggtgaaagggatcaaagggcgtttgaaccgtctcccctcggcttgcgttggcgacatggtgatggccaccgtgaagaaggggaaacccgatctgaggaagaaggttttgccagctgtcttgttcg

SEQ ID NO: 286888 - DNA, 256 bp, Glycine max
gttcttttcatggttgatgccattgatgaatatgctgttggccagctcaaggaatttgagggcaagaagcttgtctctgccaccaaggagggtctcaaacttgacgagagtgaagatgagaagaagaagcaagaggagttgaaggagaagtttgacaacctatgcaaggtgatcaaggatgttttgggtgacaaggttgagaaggttgtagtctctgaccgtgttgttgattcaccatgctgtctggtgactggag

SEQ ID NO: 286889 - DNA, 254 bp, Glycine max
  unsure (1)..(254): unsure at all n locations
gncacttgtcacatctttgagggatggaatgaatcttgtaagttatgaatttgtggcctgccaagataaaaagaaaggggttctcattctcagcgaatttgctggtgctgcacagtcacttggngctggggctattctggtcaacccttggaacatcacagaagttgctactgcaattgccaaggctctgaatatgccatcggcagaacgagagangagacataagcataactatgaacatgtaaaaatcacat

SEQ ID NO: 286890 - DNA, 263 bp, Glycine max
tttcttcaagattcaggtactgcgtttcggaagcagacacagatggctcgtacgaagcaaaccgctcgtaagtccacaggaggaaaggctcctaggaagcagcttgcaaccaaggctgcacgtaagtctgcaccaactactggtggtgtgaagaagccccaccgttatcgtcctggtaccgttgctcttcgtgagattaggaaataccagaagagtaccgagcttttgatccggaagctccccttccagaggctggttcgtga

SEQ ID NO: 286891 - DNA, 260 bp, Glycine max
ggtgccatagatctgcagagtggaatacttcatgctgaagagaaggattataaaactgcttatagttatttctttgaagcttttgaatcattcaatgctcttgatgaccccaaggctgtttttagcctgaagtatatgttgctgtgtaagatcatggtgaatcaagctgatgacgtaggaggaattatttctctaaagcaggcctgcaatatcttggccctgacttggatgctagaaagctgttgctgatgcacatctaa

SEQ ID NO: 286892 - DNA, 263 bp, Glycine max
gatgaaaatgagagaacgagggcaatgactgaaatgaatggtgtttattgttctagtaggcccatgcgaataggtgttgcaactcccaagaaaacttatggctaccaacaacaatattcttctcaagctgtgctattggccggtggacacgcagctaatggtgctgtggcccaaggttcccattctgaaggggatttaaacaacaccactatatttgttggagggttgattctgacaccagtgatgaggatctcagacaacca

SEQ ID NO: 286893 - DNA, 256 bp, Glycine max
  unsure (1)..(256): unsure at all n locations
gatttacaagcttggaggcattgacaagcgtgttattgagaggtttgagaaggaagctgctganatgaacaagaggtctttcaagtatgcctgggtgctggacaaacttaaggctgagcgtgaaagaggaatcaccattgatattgctttgtggaagtttgaaacaacaaagtattattgcacagttattgatgccgcctggacatagggattcattaagaatatgattactgggacatcccaagctgactgtgcg

SEQ ID NO: 286894 - DNA, 254 bp, Glycine max
gaagaagatggagatgtatcagatctggagcaggagaatagcgttgggagcgttcgcgtttgttctgcttttcctatcggcctcagcagacgacgtcgttgtgctctctgaagataacttcgagaaggaagttggtcaggacagaggagctctcgttgagttctatgctccttggtgtggacactgcaaaaagcttgctccagaatatgaaaagcttggtagcagcttcaagaaagccaaatctgttttaatcg

SEQ ID NO: 286895 - DNA, 255 bp, Glycine max
cactgtcttccttctctagggtttttagctcctccaaattcttcgcccaacatggttcttcaaaatgatattgatttgctaaatcccccggctgagcttgagaagaggaaacacaagctcaagcgtcttgttcagtcaccaaactctttcttcatggatgttaagtgccagggttgcttcaacataaccactgtctttagccactctcagactgttgttgtatgcggaaattgccagaccgtcttgtgccagccg

SEQ ID NO: 286896 - DNA, 257 bp, Glycine max
  unsure (1)..(257): unsure at all n locations
ctcaatctttgataagttcgaatgttgtctaagtggtgatggattgcgcttagcaactggttcttacagcaatctatttcgtgtgtttggttgtgctcctggaagtgctgaggctacaactctaggnagccagtaaaaatccaatgagacggctagttccaaccccttcaaggccttcgagatcactgggaaatagtataacacgtgttgtaagacggggagcagaaacccctggagtggatgctaatgggattctt

SEQ ID NO: 286897 - DNA, 261 bp, Glycine max
  unsure (1)..(261): unsure at all n locations
gagagagagaaaatgttggggatcttcagcagttcagtggtgtcgccgccggaggagctggtggccgctggcagcagaacgccgtcgccgaagacgacggcggggaagctgctgaaccggttcgtggagagcaaggcgtcggcggtgtcgctgcaggtgggggaacantgcagttggcttacacacaccacaacgaatcaccgtggcatcccagatcatttgctgttaaggatgagatattctgcttgtttganggggctc

SEQ ID NO: 286898 - DNA, 245 bp, Glycine max
  unsure (1)..(245): unsure at all n locations
cccggtcctctctctttcgtggcatggccaatctattgggctgtccagggttncatccttactggtgtttgggtcattgcccatgantntggtcaccatgcatncngtgnctaccagctgcttgatgatattgttggncttatnctccactccgctctcctagtcgcgtacttttcatggaantacagccatngccgtgcancactccancacnggttctnttnagcgagatgaagtntttgtgc

SEQ ID NO: 286899 - DNA, 190 bp, Glycine max
aaatggcaaaggatattcgattcttcgacctcaacacgggcgccaagatcccttcagtcggcttgggaacttggcagtctgatcctggccttgttgctgaagccgtcgcggcggccatcaaggttggttaccgccacattgattgtgctcaaatctatggcaatgagaaggagattggctctttgttgaa

SEQ ID NO: 286900 - DNA, 253 bp, Glycine max
aaaaaatgactcttatgttatgtctgcctgtggtggaaaggtttctctatttaacatgatgacattcaaggtaatgacaacattcatgccaccgcctcctgcttctaccttcctagctttccatccccaggataacaacattattgccattgggatggacgattcaaccattcacatctataatgtcagagtggatgaggtgaaatcaaaattgaaaggccaccagaagcgtattactggtttagctttttca

SEQ ID NO: 286901 - DNA, 254 bp, Glycine max
aaacaaagaaaggaaataattgatctttgaaaatgcagggaggaaagaaagctggagagtccatccaaggaaacagctgcaaacattggtgcttctgccaaggctggcatggagaaaaccaaggccactgtccaggagaaggcagaaagaatgacggcactgatccgatgcaaaaggagttggcaacccagaagaaagaggcaaagatgagccaggcagagctggacaagcaggcggcgcgtcacattaacacg

SEQ ID NO: 286902 - DNA, 255 bp, Glycine max
gctagtggaagatattgtttggttgagagagtcatacactactctgaacttgctacgattttacgtggtctgtaccccacattacaaattccagataagtgtgaggtagatgagccgtatatcccaacataccagatttccacagaaaaggcaaaaaaggacttgggaatagagtttactcctttggaagtgagtctcagggagactgtggaaagctttagagaaaagaagattgtcaatttaatccgtgatcta

SEQ ID NO: 286903 - DNA, 263 bp, Glycine max
gagaaacaaagaaaggaaataattgatctttgaaaatgcagggaggaaagaaagctggagagtccatcaaggaaacagctgcaaacattggtgcttctgccaaggctggcatggagaaaaccaaggccactgtccaggagaaggcagaaagaatgacggcacgtgatccgatgcaaaaggagttggcaacccagaagaaagaggcaaagatgagccaggcagagctggacaagcaggcggcgcgtcacattaacacggcggcg

SEQ ID NO: 286904 - DNA, 247 bp, Glycine max
cgagacggcagcacgcgcaaaaatggtgaagtttctgaaaccaaacaaagccgtcatcgtccttcagggacgctacgccggcaaaaaagccgtgatagtgcgaaccttcgatgaaggcacgcgcgagcgcccctacgggcactgcttggtggcagggataaagaagtaccctgcgaaggtgatcaagaaggattcggccaagaagacggccaagaagtcgcgtgtgaaggcgttcgtgaagctcgtg

SEQ ID NO: 286905 - DNA, 242 bp, Glycine max
catttattaaagttgctgaagttgatgaaacaggcattcagccttttataaaaagcttgtccagctgtcccaaacatggtgtacacaatccttttaaggcaccagagagatatcttatgtatggagatatatctactaaggcagctcatatgctatcacttcctaaggtttcggatttctttacaaagttaatacaaagagtttctccaaagagttaccagcaggctttggggaagtttatg

SEQ ID NO: 286906 - DNA, 243 bp, Glycine max
  unsure (1)..(243): unsure at all n locations
ggaagtctcttcctacttgaagaaggttggttacaacccagacaagattccatttgtgcccatctctggtttcgagggtgacaacatgattganaggtccaccaaccttgactggtacaagggaccaactctccttgaggctcttgaccaaatcaatgagcccaagaggccctcagacaagccactncaggcttccattgcaggatgtctacaaaattggtggtattggtaccgtgccagtgg

SEQ ID NO: 286907 - DNA, 241 bp, Glycine max
aaagatgtcaaaatccttaggcaactttttcactattcgccagatcactgagcgttaccatccacttgctttgaggcactttttgattagtgcccattacagatctccactaaattactcaatctcacagctggagaactcatcagatgctatttactatatatttcagactcttcaagattgtaaagatgctgtatcaccattacttcaaggggaaactgagaagaatgaaaaggtacct

SEQ ID NO: 286908 - DNA, 245 bp, Glycine max
ggagcaagtaacacttcttgagtactcgatgaatgcagtgacagaaggcattgatgcaattgccactacccgggttgtaattcgtggggagagtgaaacaagtactattactacccatgctttaacgggagaaactgttattcgaacatttagtgggactggagcgggaatggatgttgttgtttccagtgtcaaggcctatattgctgcactaaacaagatgtcgggtttcaaggaatcctctc

SEQ ID NO: 286909 - DNA, 251 bp, Glycine max
ggcccgttctctctcgcaagccaaacgtattggtgtccttgttgctcaatctatctccctaattcccgttcatcggcgaggttacgcagtggcatccgatgtatcggtaagagttggattgggtaatattgggcgaaggaatggaatcgtgggaggtgtagaagagaagcctgatacaagagatggttcaaaagcctacttcaactgattgggccccagacccagtaacaggttactataggcccattaac

SEQ ID NO: 286910 - DNA, 245 bp, Glycine max
cgcagagaagaacagagagagatccatccatcaattccaatggccgatcagctcaccgacgaacagatctccgagttcaaggaagccttcagcctcttcgacaaggacggggatggttgtattaccaccaaggaacttgggaccgtgatgcggtcacttggccagaacccaactgaggcagagctgcaggacatgataaatgaggttgatgctgatgggaatggtaccattgatttcccagaatt

SEQ ID NO: 286911 - DNA, 244 bp, Glycine max
  unsure (1)..(244): unsure at all n locations
cgaagaatgggcatttatggttatccaatagagattcaagcacttttcttcatggcattgagatgtgctttgtcaatgctgaaacaggatgacgccgaaggaaaggaatgcgtagagcgtattgtgaagcgtttgcatgcactaagttatcatatgcggagttacttttggctcgacttccaacaactaaatgacatttatcgatataagaccgaggagtactncacatactggcagtaaataa

SEQ ID NO: 286912 - DNA, 257 bp, Glycine max
  unsure (1)..(257): unsure at all n locations
gttcttctttcctcaaccttctttcttcttatatatcgaacatggctaagtatcattcaagtgggaaaagctcttccatgactgctatagccttcctgtttatgccttctaattcacttatacagggcacaacagatggcacaatccggggtatgttatggaagacttgggcaacaacttnaccaacccctcaagaagttgtgggcccttctaacaatcaaggccaacattnggcagggatggcgnaattcttacgg

SEQ ID NO: 286913 - DNA, 245 bp, Glycine max
  unsure (1)..(245): unsure at all n locations
catggaacacgttgaagagaagaatgttgaaccacttcttgaggggttgcttgaggctccgtcaggnactccaaccatcactcagtaaatcccaaagtcgtctgaaagatcttatatttttggatgttgcccttgattctacagttagaacagcantggaaaggagttatgaggaattaaacaatgctggacctgagaaaataatgtacttcattagcttggttcttgaaaatctcgcactncat

SEQ ID NO: 286914 - DNA, 240 bp, Glycine max
ataattttgtttattgatgaaattcataccgttgtaggtgcaggggctacaagtggtgcaatggatgctgggaacttgttgaagccaatgcttggacgaggtgaacttcgatgtataggagcaactacattgaatgagtatagaaaatatattgaaaaggatcctgcacttgagcgtagatttcaacaagtgttttgcagtcaaccatctgttgaagatacaatatccattcttcgtggg

SEQ ID NO: 286915 - DNA, 253 bp, Glycine max
  unsure (1)..(253): unsure at all n locations
ggacacatgtaattatatcaacatgccttcctcgcatcatgaacttngagcctttgaaactttcatacttatctggagttgaagcaatgtnctttaatgctaggtagtggcaaggactatccagttgccgaggttgatgccctgagaattattgaggagaaagttggaaggttaactcttggccttgccattatcagtgcaattttgtctgaactacccataacaccaagcaggctcctagataccataaata

SEQ ID NO: 286916 - DNA, 245 bp, Glycine max
ggaaggtcgtggtgtaggacccctgaaagatcacatctatctccacttgaatcacttgcccccagatgtgctcaaagagagacttcctggcatctctgaaactgctgctatttttgctggtgtggatgttacaaaggaacccattcctgttttgccaactgtacattataacatgggcggtattcccacaaaccattatggagaggtggttaccattaaaggtgacaatccagatgcagtggttt

SEQ ID NO: 286917 - DNA, 244 bp, Glycine max
cgaggattgtctccctaagcacttcaccatctatggttatgcacgaagtaagatgactgatgcagaactgagaaatatggttagcaagaccctcacttgtagaattgataagagagaaaactgcaatgagaagatggaccaatttctaaaaagatgtttctatcattctggtcaatatgattctcaggaaaactttgcagcgctagacaagaagctgaaggaacatgagggtgggagaacttct

SEQ ID NO: 286918 - DNA, 246 bp, Glycine max
gctgcttcttccgccactcagcacttcgctccctctgtgcttcaccaaccatggccgaaatcgaagctaccgttccagatccctctcaaatcgacgtcaaacttttcaaccgctggagcttcgacgacgttgaggttactgatatgtctctggctgattacattggagtgtccccgtcaaagcatgctacatatgttcctccacactgctggtaggtactgcagtgaagaggttcaggaaggcgca

SEQ ID NO: 286919 - DNA, 244 bp, Glycine max
  unsure (1)..(244): unsure at all n locations
ccgagtagcaacaatgtcgaagcgaggtcgcggaggatcggcagggaacaagttccgcatgttcactgggtctncccggtggcggcgacggtgaactgcgccgacaacaccggcgcgaagaatctctacatcatatcagtgaaggggatcaagggaaggctgaaccggttgccgtcagcttgcgtgggtgacatggttatggccaccgtcaagaagggaaagcctgatctccgtaaaaaggtgc

SEQ ID NO: 286920 - DNA, 244 bp, Glycine max
gatgaaagctgggcgagtagtaatggagttgtttgttgatgcaaccccaaaaacagctgaaaacttcagggccctctgcactggggaaatggggattggaaaatctgggaaacctttacattacaaaggttctgcatttcatcgtattattccagagtttatgtgtcagggaggagattttacaaaagggaatggaacagggggtgagtcaatctacggttccaaattcaatgatgagaatttc

SEQ ID NO: 286921 - DNA, 187 bp, Glycine max
aagatgaaatcctacatctggcttcaaactgtggatggttctattcagcaagtagaggaagaggtagccatgttttgccccatgatatgccaggaagtacttcaaacaggcatgggatcttccaaaaactatgctatatctcttccacaacgtgtcaatcctgcaatcttgggattgatactgacta

SEQ ID NO: 286922 - DNA, 248 bp, Glycine max
  unsure (1)..(248): unsure at all n locations
caattcctaattgtttaaacctaattctcatttcttcancgttcgattcttctccgcctanagatgnagatgcttcgtganaactttnaccggtaagaccatcacccttgnggtggagtcctccgncaccatcgataacgtganagctangattnaagncaaggaagggntcccanctgnccagcagananttatctttgcgggtaaacancttgangntngtcgannccttgcccgantacaacatg

SEQ ID NO: 286923 - DNA, 242 bp, Glycine max
  unsure (1)..(242): unsure at all n locations
ctctcttctctctccacccaaaccctaactcccgaccctgttcccctctcgtatccgtcatgaaaggaggaaagtccaagaccgaatctaaganagccgatcccaaacttgctgtgaataagaagggagccgccaccaaggctaggaaacccgccggcaaggggaaggcagcgaaagaccctaacaagccaaagaggcctccaagtgctttcttcgttttcatggagattcagaagtttcaa

SEQ ID NO: 286924 - DNA, 248 bp, Glycine max
aagaaaccttaaaaaacaagtagtgttccgaaaagatggctcagcaggaagtggtagaagggttcaagttcgaacagaggcacgggaaagagcgcgtgagagtggcgcgcgtgtggaagacgaggcaggggcagcacttcgttgtggagtggcgcgtgggcatcactctcttctcagactggcgtcaactcgtattctccgcgatgacaactctggacatacgttgctactgataccatgaaaaacac

SEQ ID NO: 286925 - DNA, 247 bp, Glycine max
  unsure (1)..(247): unsure at all n locations
ttctttgaaaatgcagggaggaaagaaagctggagagtccatcaaggaaacagctgcaaacattggtgcttctgccaaggctggcatggagaaaaccaaggccactgtccaggagaaggcagaaagaatgacggcactgatccgatgcaaaaggagttggcaacccagaagaaagaggcaaagatgagccaggcagagctggacaagcaggcggcgcgttcagcatnaacacggcggncgaanaggt

SEQ ID NO: 286926 - DNA, 240 bp, Glycine max
  unsure (1)..(240): unsure at all n locations
atggaatcggggttcatagttactgtgaagaggttgaaagatgcaaggtaccctggcttggaagagttcagtgctcacattcaagtccttgggaggctcacccaccctaacctcgtccctctcagggcttatttccaggctaaggaggaacgcctcctcgtttatgattactttcctaatggcagcctcttctccctattcacggatcgaaaacatctggtgggggaaagcctcttcang

SEQ ID NO: 286927 - DNA, 247 bp, Glycine max
gggagccgtagcagcggaagctctagcttgggtagcgaatcacaatggcgagaggattaaagaagcatctgaagaggcttaatgccccaaagcattggatgcttgacaaactgggtggtgcatttgctcctaagccctcatctggaccacacaaatcgagggaatgcctgccactcatactcattttgcgaaaccggctgaagtatgctctaacataccgtgaagttcattgctattctgatgcagc

SEQ ID NO: 286928 - DNA, 249 bp, Glycine max
ggctggtctggtttaggtttaggttgagcgatgtcgggtctgtataactccaacttctcaccagtgagggctgcttctcctcagattagaaccaacccagaagtcgacagtcagtaccttacggagttgctggcagagcatcagaagcttggtcccttcatgcaagcccttcccatatgcagtcgtctcttaaatcaagaaatattaagagtttctggaatgctgtccaatcaaggttttggtgacttt

SEQ ID NO: 286929 - DNA, 242 bp, Glycine max
gcgtgcggttgttgggggaagaagagagaaagcgatggcgaatcagggtgctaagaaacgcaaggaagagaacgctcgtcacatggctaggctccgccaaatcatcatcgcctgcaacgttatctatgtgttgctaagaatgttggtgttccattcgagcttcacctggaagcactggattgggttgattgtgacttctttggcatatgttattccctatcaacagctcgcgaagatggcga

SEQ ID NO: 286930 - DNA, 242 bp, Glycine max
atcactgccttaaaagagttgcagggtcacatatggagaactggttatgagaataatgaattggagggaatagtttttgatgatgtaccagaagctctagaaaagtggcacaccttgggtataaaggtatacatatattctagtggtagcagattggctcaaaggctaatatttggaaaaaccaaccatggggacctaagaaaatatttatctgggttttttgacaccacagtggggaacaa

SEQ ID NO: 286931 - DNA, 240 bp, Glycine max
  unsure (1)..(240): unsure at all n locations
gaaaagaataggttataaaanataatgtttaggcaatagttatataggtcaaagtgtcatgtcatgtgtgtngngaaataattagctancatgtttaggttgttttagggtttctttgcatgtgtgtttctcttatgtgtgtaagtgatcagtgaggcatggctctatagctatccagaaattagcacaagcaagcatgtgcctccattcactaatgtgtatgtatctatggtgtgacca

SEQ ID NO: 286932 - DNA, 240 bp, Glycine max
  unsure (1)..(240): unsure at all n locations
caganacaggaaatccgtgaggctgtggagctaccccttacacatcatgaactatacaaacaaattggtattgatcctcctcgtggtgttttactgtatggaccccctggcactggcaaaacaatgcttgccaaagctgttgctaatcataccactgccgccttcatcagggttgtaggatctgagtttgtgcaaaagtatctggtgagggtccacgaatggttcgtgatgtatttcgtc

SEQ ID NO: 286933 - DNA, 242 bp, Glycine max
cttgttgcttatggccgttggttcttggctaatccagatttgccaaaaagatttgctctcaatgcccctctcaacaagtatcaccgggagacattctacacttctgatccggttcttggttatactgactacccctttcttgatgatgaagaatccaatgccgtagcatcctagggtagaacctccatttttaataaccttatcttcccctgcaaattcatatttgcaatttggttggtcgg

SEQ ID NO: 286934 - DNA, 240 bp, Glycine max
gttcacccaaaaagtctgccttgcttgccttagctgctcatgcatctgatccatctgaagctgatcgactaagacatcttgcctcacctgctggaaaggatgaatattcagaatgggtgattacctctcagagaagtctccttgaggtcatggctgaatttccatcagccaaacctccaattggtgtctttttgcagcagttgctcctcgcctgcagcctagatttattcaatctcctca

SEQ ID NO: 286935 - DNA, 245 bp, Glycine max
agatgaaccaggcggagtggacaagcaggcggcgcgtcagcataacacggcggccaaacagtccgccaccacggctgggcacatgggacatggccaccacaccaccggaaccgggactggaaccgccacgacattccaccaccggggaatatggtcagcccatgggggcccaccagacgtcggcaatgcctggccatggaaccgggcagcccacgggccatgtcaccgaaggagtggtgggctca

SEQ ID NO: 286936 - DNA, 257 bp, Glycine max
  unsure (1)..(257): unsure at all n locations
gcaccacagctaggaagcacaggttttgaacttgtgaagggaggttctaaaagcttccaggctccgaccggttggtccggtagattctggggcagaaccggttgccaattcgacggttcgggaaaaggaacgtgcgccaccgccgactgcngctccggcgaggtcaactgcaacggtgccggagcctctccgccggccacgctcgccgagttcacgcttggcaacggctccatggactactacgacgtcagcctcgt

SEQ ID NO: 286937 - DNA, 250 bp, Glycine max
  unsure (1)..(250): unsure at all n locations
cttcaactttgccaatgcatgatgangtcagcncatttnactccatgcgagngcagtgatgaggtgctaaacccaaccctgcactcgnatggagtcaaatgtgctgantcttcaactttgccaatgcatgatgagccaagatcgcgagactttttataatangcttatttataattaagcaaggcataacgctacatgttatggttaataaaagtaataatgtaagaataaagacttgaataaataataa

SEQ ID NO: 286938 - DNA, 216 bp, Glycine max
caaaagatagcatctcgtctgagcatgaggccaaatatttaatgttgttgccaaccccagaatgattgttagagttgcagacgtgcaaagagtacgataaggatgtgattttcgatcaatttgaaagaacttatccatttcttgcaattttagttgtgtacccataactccatgcatgcaactcgttgagctatctcaataaatgccgtttgtatg

SEQ ID NO: 286939 - DNA, 252 bp, Glycine max
  unsure (1)..(252): unsure at all n locations
cgaggcggacgacgagaagcgggagctggtgttcaaggaggacgggcaggagtacgcgcaggtgctccggatgctggggaacgggcggtgcgangcgatgtgcatcgacgggaacgaagaggctctgccacatccgcgggaagatgcacaagaaggtgtggatcgccgccgganacatcatcctggttggactcanggactaccaggacgacaaggctgacgtcatcctcaagtacatgcccgacgaggnca

SEQ ID NO: 286940 - DNA, 251 bp, Glycine max; identical to SEQ ID NO: 286579

SEQ ID NO: 286941 - DNA, 249 bp, Glycine max
  unsure (1)..(249): unsure at all n locations
ggatcaagctgcacatctgtggagtttgatttctcaaggaggttatctttacgtctgtggtgatgcctagggtatggccagagatgttcatcnaattcttcataccattgtccagcagcaggaaaatgtggactcgacaaaggctgaggctatagtgaaaaaacttcagatggatggacgttacctaagggacgtatggtgatttttctgatccatcatctgctcagattgtggtatcattgctattga

SEQ ID NO: 286942 - DNA, 255 bp, Glycine max
cagcagcagagagtgcggtaggctcatccgagaccggaagcagcaatggggatcgatctcaaggccggaggtaaaagcaaaaaaaccaaaagaacagcacccaagtccaatgatatctatcttaagctcttggtcaagctttatcgcttccttgttcggagaactggcagcaaattcaatgccgttatactcaagagattgttcatgagcaaggttaacaagcccccattgtctttgtcaaggttgattaagtat

SEQ ID NO: 286943 - DNA, 252 bp, Glycine max
gttgtgaaggcaaggctccaagctagacaggacaaaactggagacaagaggcaccattacaaaggtacatgggatgctattataaaaatgatccgttatgaagggtttaatgggttttacaatggtatgggcacaaaaattgtacaaagtgtgctggctgctgctgttttgttcatgatgaaggaagaactagttaggggggttcgtttcttgcttgccaatgatgctgtaaagccaaagcatccgtgattg

SEQ ID NO: 286944 - DNA, 251 bp, Glycine max
aaagatctcatacagttcaacaaaccattggacaagctgttggggacctacgtcttatgaatccgagcttaatgaatccagtttctcttgttgaaaaccatccttcttgtcgaaaaaatagagatggccagaaggtgcttcctaatggtcaaagttggagacctctcttgttgctcttatgcttctcaatgaagattctctctgatgctagtaactctacaaaaactcaagaatcattgaccaccgcaggc

SEQ ID NO: 286945 - DNA, 251 bp, Glycine max
  unsure (1)..(251): unsure at all n locations
aagaagtgaagctgttgagcttttttgcgagtccatttggcaaaagggttgaatgggcattgaaactgaagggtgtggagtatgagtacatagaacaagatatcttcaacaagactagtctccttctccagttgaacccggttcacaagaaggttccggttcttgttcatgcccacaaacccatcgctgagtcattcgtncatcgttgaatacgttgatgaaacatgnaagcagtatccactgtngcctcg

SEQ ID NO: 286946 - DNA, 251 bp, Glycine max
ccctaacgcgtgcatagcagagtcagagacagagacgcagccatggggcggagacctgcgaggtgttataggcaaattaagaacaagccataccccaagtcacgtttctgccgtggtgttcctgatcccaagatcaggatttatgatgttggtatgaagaagaagggtgttgatgagtttccttctgtgtccatctggttagttgggagaaggaaaatgtttcaagtgaggccctggaagctgctcgcatg

SEQ ID NO: 286947 - DNA, 251 bp, Glycine max
  unsure (1)..(251): unsure at all n locations
gcaccggtcaccgctacgcgtacagtgccggtgaccggttgccggtgcacgtggattggagggtgaagggtgcagttgctccaatcaaagatcaatgaagangtggaagttgttgggcgttctcaacggtggccacagtggaagcaataaacaagatagtgacagggaagtttgtgtcctatctgaacangaacttgtggactgtgacagagcctacaatgaaggatgcaatggtggcctatggactatgc

SEQ ID NO: 286948 - DNA, 247 bp, Glycine max
gtgacgtcgttgaatcgaagattatcaacgatcgtgagactggaagatccaggggatttggatttgttaccttcgcctccgaggattcaatgagggatgcgatcgaagggatgaacggtcagaaccttgatggacgcaacatcactgtgaacgaagctcagtcccgcggaagccgcggtggaggcggtggcggttacggaagtggcggtggatacaaccgcatggtggtgctggaggatacggtggc

SEQ ID NO: 286949 - DNA, 249 bp, Glycine max
caaagatggagatccctgtgatagattttagtaacctcaatggggacaagaggggtgacacaatggccctattgcacgaagcttgtgaaaaatggggctgctttatggttgagaaccatgaaattgacacacaactgatggagaagttgaagcagttaatcaatacatactatgaggaagacctaaaggaaagcttctaccagtctgagatagccaagaggttggagaaagagcagaacacctctgata

SEQ ID NO: 286950 - DNA, 248 bp, Glycine max
acctctcaagtttttgaagtatagagatggcagagacattcctatttacctcagagtcagtgaacgagggacaccctgacaagctctgtgaccaaatctctgatgctgtcctcgacgcttgcctcgaacaggacccagacagcaaggttgcctgcgaaacatgcaccaaaaccaacttggtcatggtcttcggagaaatcacgaccaaggccaatgttgactacgagaagatatgcgtgacactgcag

SEQ ID NO: 286951 - DNA, 253 bp, Glycine max
  unsure (1)..(253): unsure at all n locations
gntttctcagtctctgtgtttgcggctgangattccgaacgagtgaccttcttcgtttctcgcaaagtttaagtaatcatgggtaaggaaaaggttcacatcaacattgtcgtcattggacatgtcgactctgggaagtcaactaccactggtcacttgatctacaagcttggaggtattgacaagcgtgtgattganaggttcgagaaggaggctgccgagatgaacaagaggtcattcaagtatgcctggg

SEQ ID NO: 286952 - DNA, 249 bp, Glycine max
  unsure (1)..(249): unsure at all n locations
aaagaatcaaagaaaggggtggtggctgcttcgaaagcttaataatttgtttatttccagaacatcatagttttcgcagcagcaaactaacaaattactcatatcatataataagatggcccgttctctctcgcaagccaaacgtattggtgtccttgttgctcaatctatcnccctaattcccgttcatcggcgaggttacgncanggccatccgatgtatcggtaagagtnggattgggnatntggg

SEQ ID NO: 286953 - DNA, 250 bp, Glycine max
  unsure (1)..(250): unsure at all n locations
aattggaganaattattctgggacaagcatgaggancaccatgagcaagatgggagcaattttggcatcaggaatccttgatgctggtggcagaaatgtgaccataaggttactttctaagacaaaacatgataaaattactgcagtggttggtctgcagtttttagccagttttggtattggtaccctctaatttattttataagcttggcctttcacccacggcttttattgggttgaactatgatct

SEQ ID NO: 286954 - DNA, 249 bp, Glycine max
gttgggcgttctcaacggtggccacagtggaagcaataaacaagatagtgacagggaagtttgtgtccttatctgaacaagaacttgtggactgtgacagagcctacaatcaaggatgcaatggtggccttatggactatgcattcgaattcatcattcaaaatggtggcattgacacagacaaagattacccataccgtggctttgatggcatctgtgatccaactaagaaaaatgcaaaggcggtga

SEQ ID NO: 286955 - DNA, 248 bp, Glycine max
aagtctttatggctgattttgaagatgcactgtcaccaggctgggaaaatcttatgagaggccaagtgaacttaaaggatgctgtggctgggaccataagcttgcatgacaaagcaagaaacagggtttacaagctcaatgatcaaacagcaaagctttttgtgcgaccaagaggttggcacctaccggaggcacatattctgattgatggtgaacctgcaactggttgcctgttgattttggcctct

SEQ ID NO: 286956 - DNA, 249 bp, Glycine max
  unsure (1)..(249): unsure at all n locations
atcagactcagaaagaggaagagaaagaaaatggcgctgaagtttctgaacaagaagggatggcacacggggagtttgaggaacatagagaacgtgtggaaggcggagcagaagcacgaagcggagcagaagaagttggaagagcttcgcaagcagatccaggaggagcgagagcgcaccgaatttcgtccttcttcangagaaagctggcctcgttccgccaccaggagaggntncnntttcgtacgc

SEQ ID NO: 286957 - DNA, 245 bp, Glycine max
tgggagacccaaatgctgattctgaaaatcctgtcttgaaagaagagcaagatgcccaagttggtaaggggtcacgaggtgatgttaccatattgcctactctagttgtcaataatagacagtatcgaggaaaattggagaaaggtgctgttatgaaagctatctgtgctggttttgaagaaactactgaaccagctgtttgtttgagcatgatgtggagacaaatgagtgtttggagaataatg

SEQ ID NO: 286958 - DNA, 248 bp, Glycine max
gccaccgttccagggcagctcgtgtgggagatcgtgaagaaaaacaactcctttttggtcaagcagttcggaagggggacccagagcgtcgaattcagcagagagagcaacaatctctacaacctcaattcgttcaagtactctggtttggcaaacaagaaaactgttacggtacagcctgagggtaaagatcaggctgtgttgttggctacaacaaagacaaagaagcaaaacaagcctgctgcatt

SEQ ID NO: 286959 - DNA, 250 bp, Glycine max
  unsure (1)..(250): unsure at all n locations
gcagacttaacaacagcacaaagcgggttactgtctgttcaagctaccatctctctctctnctttcttagtgcctccttgccagaagttaaaatggcccaagaaactttcctattcacatctgaatcagtgaacgaggggcaccctgacaagctctgtgaccagatctccgatgctgtgctcgatgcatgcttggagcaggaccctgacagcaaggttgcctgtgaaacctgcaccaagaccaacatggt

SEQ ID NO: 286960 - DNA, 248 bp, Glycine max
atagttttcgcagcagcaaactaacaagttactcatatcatataataagatggcccgttctctctcgcaagccaaacgtattggtgtccttgttgctcaatctatctccctaattcccgttcatcggcgaggttacgcagtggcatccgatgtatcggtaagagttggattgggtaatattgggcgaaggaatggaatcgtgggaggtgtagaagagaagcctgatacaagagatggttcaaaagcct

SEQ ID NO: 286961 - DNA, 254 bp, Glycine max
aaggtgttgaacaagtattacccaccggactttgatccctccaagcttcccagagcaagaaggccaaagaaccagcagatcaaggtccgcatgatgcttccgatgagcattcgatgcaacacttgcggcaattacatctacaaaggaaccaagttcaattccagaaaggaagatgttattggcgagacatatctgggaattcaaatattcaggttctactttaaatgcaccaagtgctcagccgaggttaccat

SEQ ID NO: 286962 - DNA, 263 bp, Glycine max
  unsure (1)..(263): unsure at all n locations
attttttccgactcggagtttgagccaggttctgaacatgatggaccaggtcatggacaatccgttcctctccgcgtcgcgcgggatcggagctggcgctggagtgcgtcgcggatgggacgcgagggagacagaggatgctctgcatctgcgcgtggacatgcctgggctcggcaaggaagacgtgaagatctccgtggagcagaacactctcattatcaaaggtgaaggtgctaaanaaggcgatgaagaagagagcgctc

SEQ ID NO: 286963 - DNA, 259 bp, Glycine max
gtttcagatgctttgtctggtgggcgcatggaagatgacaagcttgctgcactaaatcagttaagaaatatatttggactgggtaaacgtgaagccgaggcgatttcacttgatgttacgtcgaaggtatatcgcaaacgacttgcacaggctgttgcagatggtgagttagaaatggcagatagcaaagcagccttccttcaaaatctatgtgatgaactcatttgatccacaaaaggccagtgaacttcatgaagaa

SEQ ID NO: 286964 - DNA, 262 bp, Glycine max
  unsure (1)..(262): unsure at all n locations
aaagaaaggaaataattgatctttgaaaatgcagggaggaaagaaagctggagagtccatacaaggaaacagctgcaaacattggtgcttctgccaaggctggcatggagaaaaccaaggccactgtccaggagaaggcagaaagaatgacggcactgatccgatgcaaaaggagttggcaacccagaagaaagaggcaaagatgagccaggcagagctggacaagcaggcggcgcgtcacataacacggcggcgaacnggc

SEQ ID NO: 286965 - DNA, 270 bp, Glycine max
  unsure (1)..(270): unsure at all n locations
gctgcttcgaaagcttaataatttgtttatttccagaacatcatagttttcgcagcagcaaactaacaaattactcatatcatataataagatggcccgttctctctcncaagccaaacgtattggtgtccttgtngctcaatctatctccctaattcccgttcatcggcgaggttacgcagtggcatccgatgtatcggtaagagttggattgggtaatattgggcgaaggaatggaatcgtgggaggtgtagaagagaagcctgnata

SEQ ID NO: 286966 - DNA, 264 bp, Glycine max
  unsure (1)..(264): unsure at all n locations
gaaatccactaccactggtcacctgatttacaagcttggaggcattgacaagcgtgttattgagaggtttganaaggaagctgctgagatgaacaagaggtctttcaagtatgcctgggtgctggacaaacttaaggctgagcgtgaaagaggaatcaccattgatattgctttgtcgaagtttgaaacaacaaagtattattgccacagttattgatgcgcctggacntagggatncccatangaatatgattactgggacat

SEQ ID NO: 286967 - DNA, 261 bp, Glycine max
gtccaaatagctatcagatttggcttggaggaaaccataaacaaacatcattagctcgaagtttcatggacagggtgaagattctagaccttgaaaaagttttggagcctttgttttattattggaagcaaaagcgtcaatctaaagaatcatttggtgacttcacaaaccgaatgggatttgagaagctaaagaatatattgagaaatgggagggtccagtggtagcaccatcacgccacaacctcaagctttttgctga

SEQ ID NO: 286968 - DNA, 262 bp, Glycine max
  unsure (1)..(262): unsure at all n locations
aggaaatcgcgtctttggtgcccttaagggagctctggatgggggtttggatattcctcacagcgacaagaggtttgctgggtttgataaggagaaganggagcttgatgctgaggttcatcgcaaatatgtttttggtggacatgttgctgcctatatgaagatctggcagaagatgaaccagagaaataccagtcacacttcagcgaatacatcaaacgtgggatagaggctgatggtattgaggcacttacaaganggt

SEQ ID NO: 286969 - DNA, 265 bp, Glycine max
aaagaaaggggtggtggctgcttcgaaagcttaataatttgtttatttccagaacatcatagttttcgcagcagcaaactaacaaattactcatatcatataataagatggcccgttctctctcgcaagccaaacgtattggtgtccttgttgctcaatctatctccctaattcccgttcatcggcgaggttacgcagtggcatccgatgtatcggtaagagttggattgggtaatattgggcgaaggaatggaatcgtgggagg

SEQ ID NO: 286970 - DNA, 260 bp, Glycine max
cagaaaagggaacgctttactgaacagggggatgctttaacatttgaatcggaatttgacaggatatatctaagcactcctacaaagattgcaattcttgatcatgagaagaagagaacaattgtattacgtaaagatggtcttcctgatgctgtggtgtggaatcctgggacaagaaagcaaaggctatgtctgattttggtgatgatgagtataagtacatgcttgtgtagaggctgctgctattgaaaagcctatca

SEQ ID NO: 286971 - DNA, 259 bp, Glycine max
  unsure (1)..(259): unsure at all n locations
cttcttctctcttcttcctattctcttttggacatcaggtttacagaatttggtggtccaatttatcagcgaccagttcaagatctagcatttgcagttgctcgtttcgttcaaaagggtggctcacttttcaattactatatgtaccatggaggaacaaattttggacgatcggctggagggccattcattactacaagctatgactatgatgctccaattgatgaatacggtttgatcagggnacctaagtanggtc

SEQ ID NO: 286972 - DNA, 262 bp, Glycine max
ctgagacggagagtgaagagtctgatgttagtggctctgatggggatgacacctcttggatctccgtggttctgtaatctaagagggaatgagttcttttgtgaggtggatgatgattacatacaggatgactttaacctctgtggattgagcagtcaagtgccctactttgattatgccctgatttgattctcgacgttgagtcatcccatggtgacatgttcacggaggaacagaatgagttgatgaatcggcggcggaa

SEQ ID NO: 286973 - DNA, 259 bp, Glycine max
  unsure (1)..(259): unsure at all n locations
gagaagaatgttcgcgctttattcacacttgcagccaaggtctccccaactataatattcgtggatgaggttgatagcatgcttgggcaacggaccagagttggggaacatgaagccatgaggaaaataaagaatgaatttatgacccattgggatggacttttgacaaagcaaggggagcggatcctgttcctgctgcaaccaataggccttacgacttggatgaagctatattaggcgatttgaaagnaggntatgg

SEQ ID NO: 286974 - DNA, 258 bp, Glycine max
caccgcacgaatatcttgttgtttggagcgatccgagaaaaactctgtaaacatgttggtttaccaggacctccttacaggtgatgagcttctctctgactccttccgttacaaggaaattgagaatggaatgctgtgggaagttgaggggaagtgggttgttaaaggagcagttgatgtagacattggtgcaaacccttctgctgagggtggaggagaagatgagggagttgatgatgcagctgttaaggttgttga

SEQ ID NO: 286975 - DNA, 256 bp, Glycine max
  unsure (1)..(256): unsure at all n locations
gatgagcttggcaaaggacatcaatatgctgtatggaaccttaactggcacatncaccattgttgtgtcctttgccttcaacgatcctgggtctggaattttccctgatgctatctccctggatgcgcttttgaaagagtagttgatctcncaaatgggtatggaagttgaataagggttacgaacagagaccttggccaagtactctgttcgtaaccctgatgctatctccctggatgcgctttgaaagagtagt

SEQ ID NO: 286976 - DNA, 254 bp, Glycine max
gagagagaagactgtttcgcttcgctgtggcagaaatacacctgacgatcgtctccaccttcatttgaggaagcaagtttgcgagttaccgcacttaccgtttcccaagtcttaccctcactacgtgcctcggaagcagttcatagactacttgggaaactacgttaaccactttgagatcaagcctctgtaccagcgtgcagtggagttggtggagtatgatggatggaaagggattggagagtgaaggctca

SEQ ID NO: 286977 - DNA, 257 bp, Glycine max
aaggggtggtggctgcttcgaaagcttaataatttgtttatttccagaacatcatagttttcgcagcagcaaactaacaaattactcatatcatataataagatggcccgttctctctcgcaagccaaacgtattggtgtccttgttgctcaatctatctccctaattcccgttcatcggcgaggttacgcagtggcatccgatgtatcggtaagagttggattgggtaatattgggcgaaggaatggaatcgtggg

SEQ ID NO: 286978 - DNA, 259 bp, Glycine max
attctagatcagggtcactgtggttcttgttgggcatttggtgctgttgaatcattgtcagatcgcttttgcattcattttgatgtaaatatctctctctctgttaatgaccttcttgcatgctgtggctttctgtgtggatctggttgtgatgggggatatcccttgtatgcgtggcaatacttagcccaccacggtgttgtcactgaagagtgcgacccatattttgatcaaattggctgttctcatcctggttgtg

SEQ ID NO: 286979 - DNA, 266 bp, Glycine max
  unsure (1)..(266): unsure at all n locations
gtgactagacactcatctcactcgcgccatcttagggtttctccttttgtttcgcaacatggttgccgctaagaaaactaagaagacccatgagagcatcaacaacaggctcgctcttgtcatgaagagtggncaaattcaccctacggttacaagaccgttactcaaatctcttaggaactccaaaggaaaattgattatcattgctaacaactgcccccctttgagaaagtcagagattgaatactatgctatgttggcaaagg

SEQ ID NO: 286980 - DNA, 256 bp, Glycine max
gtcaagcatgaacagaagcttgactgcggtggtggctacatgaagttgctcagtggtgatgttgatcagaagaaatttggtggggatactccttacagtattatgtttggcccagatatctgtggttacagtacaaagaaagtacacgctattctacctacaatgacacaaaccacttgataaagaaggatgttcctgtgagactgaccaacttactcatgtttacacatttatcctccgtccggatgcaactaca

SEQ ID NO: 286981 - DNA, 261 bp, Glycine max
  unsure (1)..(261): unsure at all n locations
gtcaatttcgtacactcgaacatctcnaagaacagccgncagccatacgccgtcagtngtcgcgctggttcaccagaccttccgccgaatcctggggtaccggccgagccgtctcccgtatcccccgtgttcccggcggcggaacccaccgcgccggccaaggagcctttggaaacatgtgccgcggcggacgcatgtttcgccccgaccaagatctggcgccgctggcataggaagatcaacgtgaaccagaagcgctac

SEQ ID NO: 286982 - DNA, 253 bp, Glycine max
gcaacaagacggttaggaggattagggttcgcggtgggaacgtgaagtggcgcgctttgaggcttgatactgggaactactcttgggggagtgaggctgcaacccgcaagacaaggattcttgatgtggtgtacaatgcatccaacaatgagcttgttcggactcagacattggtcaagagtgccattgttcaggtcgatgcagcacccttcaagcagtggtatctgcagcatatggcgttgaggttggccgc

SEQ ID NO: 286983 - DNA, 259 bp, Glycine max
  unsure (1)..(259): unsure at all n locations
cggtcttgggcacctgacaggcaagatagatttgctcgccgatgggttgatgctttatctgacccacgggtcacccatgagatccgcagtgtctggatatcatactggtctcaggctgaccgttctctaggccaaaagatagcttctcatctcagcacgaggccaaatntttaatgttgttgccaacttccagaatgattgttagagttgcagacgtgncaaagagtacgataaggatgtgattttggattacctgaaa

SEQ ID NO: 286984 - DNA, 268 bp, Glycine max
ggcagtgccatcactagaatctgtcaggtggtaatggcatccataagaaaatacaatgttgaagtacctgctgacgagtcacttttatatgagactgctgaaactgaatctgctataaaaggaagccgaaagcttgaccacacaaatgagctaagattttttgacaaagcagcagtgctagcacagtcagataaagtgaaggaatcaacaaacccttggagactttgcactgtaactcaagtggaagagctgaaatccattttaagaa

SEQ ID NO: 286985 - DNA, 253 bp, Glycine max
  unsure (1)..(253): unsure at all n locations
gannatgtattggnacagaagctctaaaattcagttgcgcgatggttctatagtgaatctagatgataatgctaggnaccttgtattgcaagctcttcatgaaatgtcaantagcgcactgcgctgtttgggatttgcatacaaggatgaactccccaaatttgaaaactacagtggtaatgatgatcatccagctcaccagcttatgcttaacccttccaactattcatcaattgaaagtgaacttattttt

SEQ ID NO: 286986 - DNA, 249 bp, Glycine max
atccactttcactggaatcacaatcctgaaacaaaaacatcttagcatttaacatactactagacaacatgaccaccacattggaaagaggtttctcggaagagcaagaagctctggtggtgaagtcatggaatgtcatgaagaagaattctggagagttgggtctcaagtttttcttgaaaatatttgagattgctccatcagctcagaaattgttctcattcttgagagattcaacggttcctttgg

SEQ ID NO: 286987 - DNA, 248 bp, Glycine max
  unsure (1)..(248): unsure at all n locations
ctcgcagnaggnatcttcttctgnggggggtaagattgtgaaagcggtgcccaaggctgatacacaacaagatgtcaaaggtggcggcgtgcaaaagtttcgtgtcaagctgttggccgaaagtgggggtcagagcactatggatgttctctgtcagattggtttggatggaattcgtatgctggatccaaataccagccggacattgagaatttatcctcttgagaacataacaagatgtgatagaa

SEQ ID NO: 286988 - DNA, 255 bp, Glycine max
  unsure (1)..(255): unsure at all n locations
ccactnctcccaccccacttacatacacactctcccactcctccgagccggtcgagttgaatcggtgagtcagtgaccgagttgaaccatgtcggacgaagagcaccatttcgaatccaaggccgatgccggagcctccaagacctatcctcagcaggccggaaccatccgcaaaaacggctacatcgtcatcaagggtcgtccctgcaaggttgttgaagtttctacttccaagactggtaagcacggccatgc

SEQ ID NO: 286989 - DNA, 249 bp, Glycine max
caacactgatggactttatagtgctaagcagactgctattgtgagagcttctgatgatttttaccctcgtgatcctgcttcccataccatccatatttcttctgttgcatacaactcactattccttggagaattcatgcaacctgactgggacatgtttcatagtttacacccagcagcagattatcatgctgcagctcgtgcaattggtggatgtcctatttatgttagtgacaagccaggcaatca

SEQ ID NO: 286990 - DNA, 246 bp, Glycine max
  unsure (1)..(246): unsure at all n locations
cttctganangcaccatggcgacactggattccgacgtgaccanngttccgnccggcgaaccctccaccagcgccggtccttcttcgtccaccaagaagccgaagcgattcgagaannagaagtggaatgccgtttctctctgggcttgggatattgttgtggataattgcgctatttgccgcaaccatatcatggatctctgtattgagtgccaggccaaccnggctagcgccactagcgaggaa

SEQ ID NO: 286991 - DNA, 246 bp, Glycine max
ggatgtctcacaggaagttcgagcacccaaggcacgggtcactgggatttctccccaggaagcgtgctgctcgtcacaggggaaaagtgaaggcattccccaaggatgacccatccaaggcacccaagctcactgcattcttgggttacaaggctggtatgactcacattgttagagaggtcgagaagccaggatcaaagcttcacaagaaggaaacatgtgagcctgttacaattattgagaccc

SEQ ID NO: 286992 - DNA, 241 bp, Glycine max
tggagcccagctctaaccatttccaaggtccttttgtcaatttgctcattgttgacggatcccaaccctgatgatccacttgtacctgagattgcacacatgtacaagaccgacagggccaagtatgaggctacagcccgcagctggacccagaagtatgccatgggatgaccgtattgagtttttagctgttcaatgaagctgcaaaatcataatttatgtaaaagaacaaaagatattt

SEQ ID NO: 286993 - DNA, 244 bp, Glycine max
gtctcatgagacatgcccttctgtaaagaatgtccttcttttggattccgatgggaaacgtgttgcggtcaaatacttctctgaagactggccgacaaatagtgccaaggaaaattttgagaaagttgtattcaacaagactcagaaaaccaatgcccgcacggaagcagaaatagcaatgtttgagaataacattgttctttacaagtttgtccaagatcttcacttctttgttaccggtggt

SEQ ID NO: 286994 - DNA, 247 bp, Glycine max
  unsure (1)..(247): unsure at all n locations
ggcaattgctagcaatggcgaggatcaaggtttacgagctgaggcagaagacganggctgatctgttgaatcagctgaaggacctcaaggccgagcttgccttgcttcgtgttgctaaggtcaccggcggtgcacctaacaagctctctaagatcaaggtggtgaggttgaacattgcccaggttttgacggtgatttctcagaagcagaaggccgcgttgagggatgcctacaagaacaagaagta

SEQ ID NO: 286995 - DNA, 249 bp, Glycine max
  unsure (1)..(249): unsure at all n locations
gaattaggtttttagggtttacaccgagcagcgacacctccctcccgcagtagccatggttctcaaaactgaactatgccgattcagtggtgccaagatctaccccggaaagggcatcanatttgtnccgtngtgattccnnggttntnctgtntgcnaactncaaaatgtaagcggtattngncacaaccgcctgaggccctcaaagctcacctggactgctatgtacagaaagcaacacaaaaagga

SEQ ID NO: 286996 - DNA, 251 bp, Glycine max
agccacgaacctgctggcagtggagctgctctttgtgattggtgtggcacctggaaaggagacaagctttgtagtagttgcagacaagcacggtattgctctgagaaacaccaggctatgagttggcgcacagggcataaaactgcttgccaacagatgaaagtttcttcacctgtttttggacccaacaaaagtggaaccacctccttggagtctcataaagttggaagcaagaatctgtggcctgaatt

SEQ ID NO: 286997 - DNA, 247 bp, Glycine max
agtgttggtgttgacatcaagccatatgcaaatatgttggtgagattgttgtttccagttgttaaggaggaaagaagtactgctgcaaaacgtgcctttgcaagtgcctgtgcaaaagtcttaaagcatataccagcctctcaagcacaaaaacttattgaagatactacagctttgcatgctggtgacaagaattctcaaattgcatgtgcatttctcttgaagagctattcatccatggcagcag

SEQ ID NO: 286998 - DNA, 244 bp, Glycine max
  unsure (1)..(244): unsure at all n locations
cggcagcacgcgcaaaaatggtgaagtttctgaaaccaaacaaagccgtcatcgtccttcagggacgctacgccggcaaaaaagccgtgatagtgcgaaccttcgatgaaggcacgcgcgagncccctacgggcactgcttggtggcagggataaagaagtaccctgcgaaggtgatcaagaaggattcggcccagaagacggccaagaagtcgcgtgtgaaggcgttcgtgaagctcgtgaac

SEQ ID NO: 286999 - DNA, 242 bp, Glycine max
  unsure (1)..(242): unsure at all n locations
aggacatcatcatggttgaccacatgaagaaaatgaagaacaatgccattgtttgcaacattggtcactttgacaatgagatcgacatgctggggctggagaactaccccggcgtgangcgcatcaccatcaagccccaaaccgacagatgggtctccccgagaccaatgtcggcatcattgtctggccgagggtcgtttgatgaacttgggatgcgccacaggacaccctagttttgtgat

SEQ ID NO: 287000 - DNA, 242 bp, Glycine max
atttccaaatggctaggggattgaagaagcatctcaagaggctcaatgctcctaagcattggatgcttgacaaactgggtggtgcatttgcgcccaaaccctcatctggaccacacaaatctagggagtgccttcccctcatactcatcctacgaaaccggctaaagtatgctctgacttaccgtgaagtcatcgctattctgatgcagagacatgttcttgttgatggaaaagtcaggact

SEQ ID NO: 287001 - DNA, 243 bp, Glycine max
cgcaaagagaagagatctgcctcctttttccttcccaaatcaaatctatctcttcttcaagttgaaaatggggctgtcgttcaccaagttgttcagccggctgtttgccaagaaagagatgcgtatactaatggtgggtctcgatgctgcgggtaagaccaccattctgtacaagctcaagcttggagagattgtcaccaccattcccaccattgggtttaatgtggaaactgtggaatacaa

SEQ ID NO: 287002 - DNA, 250 bp, Glycine max
  unsure (1)..(250): unsure at all n locations
cgacaacaacacttccgcggcgaaaaatgtctctggtggcgaacgaggatttccagcacattctgcgtgtgctgaacaccaacgtggatgggaagcagaagataatgttcgctatgacctccatcaagggtattggaaggagattcgccaacatcgcttgcaagaaggccgatgttgacntgaacaaaagggctggtgagttgagtgctgcagagttggatagtgtgatgactgtggtggcgaaccctag

SEQ ID NO: 287003 - DNA, 242 bp, Glycine max
ggcttctcacaagagcaaagaagcttctgattatgccagtgagacggctcagaagaccaaagactatgttggtgatgctgctcagaaaagcaaagaggcttctgaatatgctagtgatgcggctcagaggaccaaagagtatgctggtgatgccaccaagagaagcaaagaggcttctgatcatgccaatgacatggctcggaagaccaaagactacgccatgacactgctcagagaaccaa

SEQ ID NO: 287004 - DNA, 248 bp, Glycine max
  unsure (1)..(248): unsure at all n locations
ctcgagnngggctatggntttnttcaatttgataatgaggaatctgcccaaaaggccattgagangctnnntggcatgctgctgantgnnnnacaagtgtatgtgggacccttcctncgcaagcnagnnagtgaaagtactgctgacaaggcaaagttcaacaatgtttntgtgaagaatctgtcagaatcaaccactgatgntgaattgaagaatgtttttggtgaatttggnactattactagngc

SEQ ID NO: 287005 - DNA, 258 bp, Glycine max
  unsure (1)..(258): unsure at all n locations
gnttcncctcgangcggcctaattcacacccaaagagnnaagannaaaaaaacaacagtggtacgtgatgccaccgaagttcgatccctcgcaggtggtgganntgttcgtccgantcaccggcggcgagntnggcgcggcgagttctctcgccccgaagatcggtcccttgggactctccccaaagaagatcggagaggatattgcgaaggaaaccgcgaaggactggaagggcctccgcgtgacggtgaagctaac

SEQ ID NO: 287006 - DNA, 238 bp, Glycine max
  unsure (1)..(238): unsure at all n locations
cttctattgtggctgataagattgcactaaagttagttggaccangtggatttgtagttactgaagctggttttggtgctgatattggagctgaaaagtttatgaacattaagtgtcgttatagtggtttgacacctcaatgtgcgattattgtggcaactataagagcactaaaaatgcatggtggagggcctgcagttgttgctggaaaacctcttgaccatgcatatttgactga

SEQ ID NO: 287007 - DNA, 239 bp, Glycine max
  unsure (1)..(239): unsure at all n locations
ctctggttcgaccccaccagagatagaactgttgctctctgttcccttggcctttggtaaacacgtttgtgtggagaatgtannggtcaccgctcacgtttcccaagaattcaaaatcaatctcatcatgagttggcccttgagacgacaagtagtaagcagtgacagtgccggcagagttgccagcaacgagcttgagttgcatatcgaattggaaaattcgtttaggaacacaaaaa

SEQ ID NO: 287008 - DNA, 236 bp, Glycine max
  unsure (1)..(236): unsure at all n locations
attctacatatgacatgattggtggtttagaccagcaaattaaagaaataaaagaggtcattgagctaccaatcaaacatcctgagctgtttgaaagtcttggaattgcacaaccanagggtgtcctgctctatgggccacctggtacagtaaaacattgttggctagggcagtggctcatcatactgactgtacattcatcagggtgtctggttctgagttagttcagaaataca

SEQ ID NO: 287009 - DNA, 235 bp, Glycine max
  unsure (1)..(235): unsure at all n locations
cgtttttggatcggaacctcttctgcggcgtanaatgggacactccaacgtttggaactctcacccaaaaaactacggtcctggttctcgcacttgccgtgtgtgtgggaatccacatggactgatcaggaagtatggccttatgtgctgcaggcagtgcttccgtagcaatgccaaggaaattggcttcatcaagtatcgctaaaagagcagttgtcaactacggaccaatatt

SEQ ID NO: 287010 - DNA, 236 bp, Glycine max
cgccgtcgtcgctgtttttgtgtgtcgcttcttcgtaggtgcagctgcaatggtgaagggacgccaaggagaacgtgtcagactctacgtgaggggtacaatccttggatacaaaaggtccaagtcaaaccagtatccaaatacatccctgatccaaattgagggtgtgaatgccaaagaagaagtagcatggtatgctggcaagaaaatggcctatatctacaaggctaaggtga

SEQ ID NO: 287011 - DNA, 237 bp, Glycine max
gtgaagacggggaaggcaatgactttctccaagagtttgataagagagtgaaggcaagcaacaaggggtatctaatatggggttgggcaccacaacttctcatactagagcatcatgccattggagctgtggtgacacactgtggatggaacacaataatcgaaagtgttaatgctggtttgccaatggctacttggcctctgtttgctgagcagttttacaatgagaagttgctgg

SEQ ID NO: 287012 - DNA, 236 bp, Glycine max
  unsure (1)..(236): unsure at all n locations
ggatgacttctgggccaagagaccctgcatcccacacgattcacattgcatcagtggcttacaatactattttcctgggtgaatttatgcngccagactgggatatgtttcatagcttacatccaatggctgaatatcatggtgcggcacgagctgtaggaggatgtccaatttatgtcagtgacaagcccggacaccatgacttgatcttttgaagaagcttgcactanctgatg

SEQ ID NO: 287013 - DNA, 234 bp, Glycine max
  unsure (1)..(234): unsure at all n locations
gtgattcgcgctcagcgtaagggtgctgggtcggtgttcaagtctcacactcaccaccgcaagggtccggcgaggttccgcagcctcgacttcggcgagcgcaacggctacctcaagggcgtcgtcaccgacatcatccacgaccccggtcgcggcgcccctctcgccaaggtggcattccgccaccccttccgctacaagaagcaaacggagctcttcgtcgccgccgagngg

SEQ ID NO: 287014 - DNA, 238 bp, Glycine max
caagattcagacacagatggctcgtacgaagcaaaccgctcgtaagtccacaggaggaaaggctcctaggaagcagcttgcaaccaaggctgcacgtaagtctgcaccaactactggtggtgtgaagaagccccaccgttatcgtcctggtaccgttgctcttcgtgagattaggaaataccagaagagtaccgagcttttgatccggaagctccccttccagaggctggttcgtgaa

SEQ ID NO: 287015 - DNA, 267 bp, Glycine max
  unsure (1)..(267): unsure at all n locations
cctanggtgccgntccacnanggnacngntgncnccggcggngagattnggtttgatacctacttctccatggccanangtaatgctaccgtgccagctatggagatgaccaagtggttcgacaccaactaccactntattgtccctgaattgggccctgatgtgaacttcacctatgcttctcacaaggctgttgatgaatacaaggaggccaaggcgcttgnagtggataccgttccggtcctcgttggccctgttacatacctg

SEQ ID NO: 287016 - DNA, 273 bp, Glycine max
gccgcccgggtctgggaagaaacagcttgatgccctcggtgctggtggggttggattcactccccacgtgatcatggtggagtctggcgaggacatcacagcaaaaataatggccttttctcagcaagggcctcggacagtttgtattctttctgctattggtgcaatcggtaatgttacccttcgacagcctgcaatgtctggtggtattgctacctacgagggccgctttgagattatatctttatcaggttctttgcagcaatctgaaaa

SEQ ID NO: 287017 - DNA, 275 bp, Glycine max
agactgtcgagcagtgaataccagttgctcctatagccggcgctcaacaacatggcggacaaggcagtcaccatccgaaccagaaagttcatgacgaacaggcttctctccagaaagcaattcatcgttgatgtccttcatccagggagggctaatgtttccaaggctgaactgaaggagaaattgggcagaatgtatgacgtgaaagacactaacactgtatttgtcttcaagtttcgaactcattttggtggtggcaagtccactgggtttgg

SEQ ID NO: 287018 - DNA, 281 bp, Glycine max
  unsure (1)..(281): unsure at all n locations
aatgctctggganttgttggtgtaattaactgcccaaggtgngggatggtggcaagtaagagaagaaaacccgcatccatnctacatctcctggtacacttcaccggctctgtctgcgcctctgnngttgacctcatcacacaagtagcaggtgctgaatggcttggagatacaattgtttatgcttacagatcaggtgaggtgattcggctaccaaaaggggtttcaattccagtgacactaaaagttctggagtttgagcttttccacttctgtccaat

SEQ ID NO: 287019 - DNA, 278 bp, Glycine max
gtcactccggtgattcgagcaaatttagagaagcaggggtataaaattattgggtcgcatagtggtgtcaagctttgtagatggaccaaggcgcacttcgaggtcgaggtggttgctataagcactcgttttatggaattgagagtcacagatgcatggaggcaacccctagcttggcttgtgcaaataaatgtgttttctgctggaggcatcacacaaatccagttgggaaaagttggcagtggcagatggatgatccaatagagattgtaaattct

SEQ ID NO: 287020 - DNA, 277 bp, Glycine max
  unsure (1)..(277): unsure at all n locations
cgttttgtaaggaggttgtaagaattgccggtgagtgattacaatggctcctgctaaggcggacaatgccaaaaaggctgatcccaaagctcaggctttgangacagcaaaggctgtcaaatcaggtggccaagtgtttaagaagaaagctaaaaagatcaggacatctgttacatttcacaggccaaggacattgaagaaagaaaggaaccctaagtaccctcgtattagtgctccacccagaaacaagttggaccattaccagatacttaaattt

SEQ ID NO: 287021 - DNA, 269 bp, Glycine max
cgttggtgcaaagcatccttcgtttcaatttctctctctcagcgctttctgcaatcgaacctttcatctccaaagggatccacaggccgaaggagaaatggggctgacattcacaaagcttttcagtcggcttttcgcgaagaaggaaatgcgaattctgatggttggtctgatgctgctggtaagaccactatctgtacaagctcaagctcggagagatcgttaccacaattcctaccatcgggttcaatgttgagactgtggaatac

SEQ ID NO: 287022 - DNA, 273 bp, Glycine max
caaagaatcaaagaaaggggtggtggctgcttcgaaagcttaataatttgtttatttccagaacatcatagttttcgcagcagcaaactaacaaattactcatatcatataataagatggcccgttctctctcgcaagccaaacgtattggtgtccttgttgctcaatctatctccctaattcccgttcatcggcgaggttacgcagtggcatccgatgtatcggtaagagttggattgggtaatattgggcgaaggaatggaatcgtgggag

SEQ ID NO: 287023 - DNA, 275 bp, Glycine max
tcgggaaaaggggcaaagggattgataacaggtaaaacctcagcttcagccaagacaaagacaaagacaagaagaaacccgtttctcgttcttctagagctggtcttcagtttcctgttggacgaattcaccgtcttttgaagtcaagggtgagtgccaatggaagagttggggccacagctgctgtgtattctgctgctatactggagtatctaactgcagaggtgttggagttggctggtaatgcaagcaaggatctgaaggtgaagcgtatt

SEQ ID NO: 287024 - DNA, 275 bp, Glycine max
acttgagacagttatctttatctacgcaagagaagaatagaaaatggatatcaggttgatggatttggactctccattgttcaacactctgcaccgaatcatggatctgacagaggacgcagagaagaacttgaacgctccgacgcggacatacgtgcgcgacgcgaaggcaatggctgcgactcctgcggacgtgaaggagtaccctaactactacgtgttcgtgatcgacatgccaggcctgaaatccggggacattaaggtgcaggtggagg

SEQ ID NO: 287025 - DNA, 268 bp, Glycine max
  unsure (1)..(268): unsure at all n locations
aaaacctaagcttagaattagaaacaaagaaaagaagaaaggaaagaattgatcgttgaaaatgcagggaggaaagaaagcgggagagtccattaaggaaacagctacaaacattggtgcttctgccaaggctggcatggagaagaccaaggccactgtccaagagaaggcaganagaatgacagcacgtgatccggtgcaaaaggagttggcaacccaaaaganagaggcanagatgaaccaggcggagctggacaagcaggcggcg

SEQ ID NO: 287026 - DNA, 264 bp, Glycine max
  unsure (1)..(264): unsure at all n locations
anatgggagaacgaaaaggaatcccaattgctctggggctcttggcgatgctcctcttcttcattgcttcttcctcttcctctcacctcgttcgtncttccgatgacgccgacgacgcgatcttctacgagtcattcgacgaggattttgacggacggtggattgtgtccgacaaggaggattacaacggtgtctggaagcatgctaagagtgatgggcatgatgattatggacttcttgttagtgaacaagcccgganatatg

SEQ ID NO: 287027 - DNA, 267 bp, Glycine max
  unsure (1)..(267): unsure at all n locations
tggatctcatgacattcacaagtntgctgccgtcaccgagcgtgtccttgcagcatgctacaaggctttgaatgatcaccacgtccttcttgagggtaccctattgaagccaaacatggtcacccccggatccaattctgctaaggtttcccctcaggtggttgcggagcacactgttagagcccttcagagaaccgtgcctgctgcagttcctgctatcgttttcttgtctggtgggcagagtgaggaggaggcatccgttaacct

SEQ ID NO: 287028 - DNA, 270 bp, Glycine max
gagaaaacaaaccgcgtcattagcgttgccttatcatccccttttccagacaccaatctctcggcccaaatacctccctctgtgggtgacctcccttacctcgagtccctcgtcttccacaaattccccaaactcgtgggcccaatccagcccgcaatcgccaaactcaccaaactcaagtaccttgatctctccaacaacaatctctctggcccaatacccgattttttcgcgcaactcaagaacctcgacgatatcgacctttccttt

SEQ ID NO: 287029 - DNA, 270 bp, Glycine max
aaagaatcaaagaaaggggtggtggctgcttcgaaagcttaataatttgtttatttccagaacatcatagttttcgcagcagcaaactaacaaattactcatatcatataataagatggcccgttctctctcgcaagccaaacgtattggtgtccttgttgctcaatctatctccctaattcccgttcatcggcgaggttacgcagtggcatccgatgtatcggtaagagttgggatgggtaatattggggcgaaggaatggatcgtggg

SEQ ID NO: 287030 - DNA, 276 bp, Glycine max
  unsure (1)..(276): unsure at all n locations
cnagccgattctcatttcttcatcgttcgattcttctcctcctaaagatgcagatcttcgtgnaaactttgaccggtaagaccatcacccttgangtggagtcctccgacaccatcgataacgtgatagctaatattcangacaaggaagggatctcanctgatccagcagagacttatctttgcgggtactacagcttgnngatggtcgaancctttccgngtacancatcngnaangaatccagtnnctaactcgtngttnaccgcntnggtgg

SEQ ID NO: 287031 - DNA, 275 bp, Glycine max
  unsure (1)..(275): unsure at all n locations
ttggggagaaagggtcatgtttgtgttggccagttttgctgtttgttcaatccagcaccttcaattttgtttgaaccatttctcagcagatgtgtatgagggcccaccaaatggcaatgactggtttgagaagcaaactggtggcacattggacatttcttgctcctcatggatggattggttctttggtggcttgcnattccagcttgagcaccatttgttcccaaggcttccaagggcacaattgaggaaaatctcacctttggtgattgatc

SEQ ID NO: 287032 - DNA, 266 bp, Glycine max
cacaatggatattgcacatgatcgagctggattttatatttgctggggttgcttggtgtgggttccatctgtttatacgtctcctggaatgtaccttgtcaaccatcctgtaaatcttggcatcaagctagcgctctcaattttagtagctggcattctttgcatatacatcaactatgattgtgacaggcaaaggcaagaatttcgtaggacaaatggaaaaggcacagtctggggaaaagctccttcaaagatagaggccacat

SEQ ID NO: 287033 - DNA, 263 bp, Glycine max
gtcagttgcaggaaaaatggtttcgctgaaactgcagaagcggctcgcagccagcgtcctcaagtgtggcagaggaaaggtttggcttgaccccaatgaagtcaacgaaatctccatggctaattctcgccaaaacataaggaagctggttaaggatgggtttattatcaggaagcccaccaagattcactctcgctcacgtgcccgccgaatgaaggaagccaagaggaaaggacgtcactctggatatggtaagcgtaagg

SEQ ID NO: 287034 - DNA, 266 bp, Glycine max
acgaaaattagggtttgtagtgtagcaggaacaagcagcaatggcgccgaaggtaacacgcaaggttagcagaaaccccgaattgataaggggaattggaaagtactcgaggtcgcagatgtaccacaagaggggcatttgggctatcaaggccaaaaatggtggcgttttacctcgccacgaccctaaacccaaacctgaaacacccgctgaaaaaccacccaaattttaccctgctgatgatatcaagaagccccttgtcaaca

SEQ ID NO: 287035 - DNA, 265 bp, Glycine max
ggagagcttcatcttgagatctgtttgaaggacttgcaggatgatttcatgggtggagctgagattatcaaatctgaccctgttgtgtcattcagggagactgttttggagagatcatgccgcaccgtgatgagcaaatcacccaacaagcacaaccgtctgtacatggaagcaagaccattggaggaaggtctgctgaggccattgatgatggcaagattggaccaagggatgaccccaaggttcgttccaagatcttgtctga

SEQ ID NO: 287036 - DNA, 269 bp, Glycine max
  unsure (1)..(269): unsure at all n locations
ctatgagcaaatcaaatctgctatcaaggaggaatcagagggcaaattgaagggtattttgggttacacagaagatgatgttgtgtctactgattttgttggtgataacaggtctagcatatttgacgccaaggccggaatttctttgaatgacaactttgtaaaacttgtttcctggtatgacaacgaatggggttacagttcccgtgtgattgatttgattgtccacattgcatccgtggcttaaagattgagtctgancttggnta

SEQ ID NO: 287037 - DNA, 269 bp, Glycine max
aatcatgccttcccgaagaagaactctcttgaaggtcatcattctcggtgacagcggggtggggaagacgtctttgatgaaccagtatgtgaataagaagtttagtaatcagtacaaggcaaccattggagcggattttttaaccaaagaagtgcaatttgaagataggcttttcaccttacagatttgggatacagctggccaagaaagattccaaagcctggagttgctttctatcgtggtgctgattgttgtgttcttgtatatga

SEQ ID NO: 287038 - DNA, 267 bp, Glycine max
  unsure (1)..(267): unsure at all n locations
tcgtggcggcgacggcgtatcttgcggcggtggtgaaanangttctgaggctgcacccgccgggcccgcttctctcgtgggcccgcttggccatcactgatacgaccattgatgggtatcacgtgcctgcngggaccaccgctatangttaatatntgggccatagcaanggacccggaggtgtggctggacccacttgagttcaagcccganaggttcatgggtcctnnaaaacnnntnttctgttttcgggtcggatctgagact

SEQ ID NO: 287039 - DNA, 261 bp, Glycine max
aggcgtgctaggaaaccaaccagacattgtcatggacagcttggctgtacatggccttggcctagtgcacccaaagaaggttttcaatttctacaacgagctccatgcttacttagcttcttgtggagtagatggagtgaaagttgatgtgcagaacattattgagacccttggtgcgggacatggtggccgagtgtcacttactcgcagctatcatcacgcgcttgaggcttccattgctagcaattttactgataacgg

SEQ ID NO: 287040 - DNA, 261 bp, Glycine max
gttaaagagtaaaagcaccgtctccgtctccactctcggcttcttcttcgttgcgctttttcccaaaaccaattgcatcactctcgtccgttaccgccgctgccctagaccaccgcaagcgacgtcgcacaccgccttcatccgttagggcaaaaatgagtcgaggaagtggaggtggatacgatcgtcacatcactattttctcccctgaaggacgtctctttcaagtggagtatgctttcaaggctgtgaaggctgcag

SEQ ID NO: 287041 - DNA, 261 bp, Glycine max
attgattcttctctctctctccattctccaattctccatttcgatctgcagctccccgctttcaaagctctgaaatttccgattcgggatggagaaatacgagctcgtgaaggatataggatctgggaatttcggtgtggccaggctcatgcgacacaaagacaccaaggagcttgttgccatgaaatacattgaacggggtcacaagattgatgagaatgttgcgagggaaatcataaaccatagaagtcttcggcaccc

SEQ ID NO: 287042 - DNA, 205 bp, Glycine max
agaagaagaaggagcagcaatggactctcgcacgtataatcctcgcaccgtcgaagaggtttttagggatttcaagggccgaagagctggtctcatcaaagccctaaccaccgatgttgaagatttctacaaccaatgtgatcctgagaaggagaatttgtgcttgtatggcttcccagtgagcagtgggaagtaaatttacctg

SEQ ID NO: 287043 - DNA, 262 bp, Glycine max
  unsure (1)..(262): unsure at all n locations
aagaaaggggtggtggctgcttcgaaagcttaataatttgtttatttccagaacatcatagttttcgcagcagcaaactaacaaattactcatatcatataataagatggcccgttctntctcgcaagccaaacgtattggtgtcttgttgctcaaatctntatccctnaattcccgttcatcggngnngttacgcatggcatccgatgtatcggtaagagttggattgggtaatattgggcgaaggaatggaatcgtggga

SEQ ID NO: 287044 - DNA, 266 bp, Glycine max
  unsure (1)..(266): unsure at all n locations
caccgatagatagagagcgcggcataacctaaacctatctttcttctctctctgtgtgtgcgctncaacggcaaccagaagcagccatggccactgcaaggactgtgaannatgtttcacctcatgagttcgttaaggcgtactcctctcacctcaagcgatccggcaagatggagctgccagagtggactgatattgtgaaaactgcaagatttaaggagttggctccttatgatcctgactggtactatgtcagagctgcttcc

SEQ ID NO: 287045 - DNA, 267 bp, Glycine max
gtccgagcccaggatcagtgcagagaaagcggtgcaactgtgtgatcggaacttcggcgttggagctgacggagttatctttgtattgcctggcatcaatggcaccgattataccatggggttttttaactctgatggtagtgagcctgagatgtgtggcaatggagttcgatgctttgccaaatttgtttctcagcttgagaatttacatgggaggcatagttttaccattcatactggtgctggtctgattattcctgaagtctt

SEQ ID NO: 287046 - DNA, 285 bp, Glycine max
  unsure (1)..(285): unsure at all n locations
tcgcacgnanacggctnganttnctctgnctctctctctccaccattgcnatggatccttacaagctccggccatccagcgccttcaattctcccannnggactacaaattctggtgctcctgtttggancaacaactcctctttaaccgttgganctagaggtccaattctgcttgaggattatcatcttgtggagaagcttgcaaactttgacanggaacgtatcccagnacgtgttgtccatgccaggggagctngtgcaaagggtttcttgtngtcacaca

SEQ ID NO: 287047 - DNA, 253 bp, Glycine max
cttcaacctcaccaaaggaactaagaatttcattgaggctagagaaagtggtgatcaatatgtcaaagaatccaaaagttttctttgatattctaattggaaagatgaaagctggacgagtagtgatggagttgtttgccgatgcaaccccaaaaacagctgaaaacttcagggctctctgcactggggaaaaggggattggacgatctgggaaacctttacactacaaaggttctgtatttcatcgtattat

SEQ ID NO: 287048 - DNA, 256 bp, Glycine max
gttttatgatccagttgcaggccaagttttcctggatggtagggatttaaaggaatataacttgagatggttgaggagccaccttggtcttgttcagcaggaacctattatcttctcaacaaccataagggaaaacattatatatgcaaggcataatgcaactgaagctgagatgaaagaggctgcaagaatagcaaatgctcatcatttcattagcagtttgcctcatggttatgatactcatgttgggatgaga

SEQ ID NO: 287049 - DNA, 217 bp, Glycine max
  unsure (1)..(217): unsure at all n locations
ttgttgtttgtgtgtttgttttttctcctcacctgaaaatgtcttgctgcggtggtaactgtggttgcggaagcgcctgcaagtgcggcaacggctgcggaggctgcaagatgtacccagacttgagctacaccgagtcaaccaccaccganaccttggtcatgggagtggcaccagttaaggctcaattcgagagtgctgaaatgggtgttcccgc

SEQ ID NO: 287050 - DNA, 261 bp, Glycine max
  unsure (1)..(261): unsure at all n locations
gaaagatgtcgaagcgtggtcgtggtggttcggcggggaacaagttccgcatgtcgctgggtcttccagtggcggcgacggtgaactgcgccgacaacacgggggcgaagaacctctacatcatttcggtgaaagggatcaaaggccgtttgaaccgtcttccctcggcctgcgttggcnacatggtgatggccaccgtgaagaagggaaaacccgatctgnngaagaaggtcntgccagctgtcatcgttcgccagcgca

SEQ ID NO: 287051 - DNA, 260 bp, Glycine max
  unsure (1)..(260): unsure at all n locations
cctgcttacactatgccgcatactacggccattcttcttgccttaaggctattctttcttctgctcaatctagtccagtatctgcttcttgggggttttctcggtttgtgaatattagagatggaaaaggtgcaacgccattgcacttggcagctcgtcaganacggtctgaatgtgtacntattctattagacagtggtgctcttgnttgtgcttcaactggtggntatggctgtcctgggagcactcctctacatcta

SEQ ID NO: 287052 - DNA, 262 bp, Glycine max
  unsure (1)..(262): unsure at all n locations
ggtgctgctgcattagtgctagtgagcgaagagaaggcacgtgagcttggattgcatgtaattgcaaagataaaaggatatggggatgcagctaaggcgcctganttncttacaactgctccttcccttgcaataccaaaagctatatcaaatgctggtcttgatgnttctcaaatagattattatgaaataaatgaagcttttcggttgtagctcttgcaaatcagaagcttcttggtctgatcctggaaaagttaacgcg

SEQ ID NO: 287053 - DNA, 268 bp, Glycine max
gaggcaccaagggttttgaatttaaacagcaacaaatatttctctggaccatatggcgacgatgtaatctttattgccaatgattggcacactgcccttcttccatggctacttgaaatcaatgtaccagaccagggggatttaccaaaacgcaaaggttgcattttgtcttcataacatagcctaccagggtaggcatgcctttgcagacttcttctctactcaatttacctcgcgaattcaagggttcttttgacttcactgatgg

SEQ ID NO: 287054 - DNA, 276 bp, Glycine max
caggtctgaagcatctagtacatggagcaaggcagcatcacaatgtgaaaaatgtatatgtatggcatgcactagctggttattggggtggagtgaagccagcagcaaccggcatggaacattatgacactgccttggcatatccagtgcagtcaccaggcgtgctaggaaaccaaccagacattgtcatggacagcttggctgtacatggccttggcctagtgcacccaaagaaggttttcaatttctacaacgagctccatgcttattagcttc

SEQ ID NO: 287055 - DNA, 272 bp, Glycine max
atcgagagctccaagtgggccatttttggtaagcagaactggcgatgcgggatgaaccggaagctgggttacggtgcccaactgcgcgctaacctagaccccacaaagggtgttggtcgattaagacagcaggacggtggtctggaagtcgaaatccgctaaggagtgtgtaacaactcacctgccgaatcaactagccccgaaaatggatggcgctaaagcgcgcgacctatacccggccgtcggggcaaggaccaagccccgatgagtag

SEQ ID NO: 287056 - DNA, 270 bp, Glycine max
gcgattcttgggggagctttacaactatgagcatgtagactcatctgttatttttgagacactatatctcattctcatctatggccatgggacacaagagcaagatgtgctggatccacctgaagattgttttcgcataaggttgatcattactctgcttgaaacttgtgggcattactttgatcgtggctcttctaagaggaaacttgatcgattcctaatacacttccagaggtatattttaagcaaaggggcactgcctctggacat

SEQ ID NO: 287057 - DNA, 270 bp, Glycine max
gttacttcactttcattagctatctcatacccaacacttgctgctgcaccacacatgtttgtcaatgcctacaagaatgttcttgctgttgcggttgagacagattattctttccctgaggcagacaaggtcaaggagtatctgaaggatccaagtaaatttgctgtcgctgctgttgctgctcctgctgctgagtctggtgctcctgctgcagccaaggaagaggaaaagaaggaagaaccagctgaagaatctgatgatgacatgggt

SEQ ID NO: 287058 - DNA, 266 bp, Glycine max
  unsure (1)..(266): unsure at all n locations
gcaagtacgagaagaaagtttacgttttgcccaagcaccttgatgagaaggtggctgcacttcaccttggcaaacttggngctaagctcaccaagcttagcccggcccaggctgattacatcagtgtgcctgttgagggtccatacaagcctgctcattacaggtactaagtaattgagattatcaacggaaagtgagggaaagacaaaatcggntttatgaatcggattgattgtttaattttcctttttttgaatttttgttgt

SEQ ID NO: 287059 - DNA, 259 bp, Glycine max
  unsure (1)..(259): unsure at all n locations
aacaataaggttgttattggcccagccacagttggnggcattcaagcaggtgcttttaaaattggtgacacagctggaacaattgacaatataattcagtgcaagctctacaggcctggatctgttggatttgtttctaaatctggtgggatgtccaatgaactatacaacactattgcccgcgtaactgatgggatttatgaaggcattgctattggaggagatgtttnccctggttccacatttcnnacctntttna

SEQ ID NO: 287060 - DNA, 260 bp, Glycine max
  unsure (1)..(260): unsure at all n locations
ctactgatgacagtgtcgcaatagtaattcaacctagtacgagaggaaccgttgattcgcacaattggtcatcgcgcttggttgaaaagccagtggcgcgaantaaccgtgcgttggattatgactgaacgcctctaagtcagaatccgggctagaagcgacgcgtgcgcccgccgtccgtttgccgaccagcagtagggggcctcggccccccaaaggcacgtgccgttggtgaccctcgtgaggcggattagccctac

SEQ ID NO: 287061 - DNA, 265 bp, Glycine max
  unsure (1)..(265): unsure at all n locations
tctttacttancnntgangangggaatccttgagggtgaaagccacagctggggacacccatcttggaggtgaggattttgataacaggatggtcaaccactttgttcaggaatttaagagaaagaacaagaaagatatcagtggcaaccccagagcacttaggaggttgaggactgcctgtgagagggcaaagagaactctatcttcaactgcccaaaccaccattgaaattgattctctctatgagggaattgatttctactc

SEQ ID NO: 287062 - DNA, 265 bp, Glycine max
  unsure (1)..(265): unsure at all n locations
cgacgtgaganagattgtgaagtagaaatcggtgcaaganattctccactttatctaaaaaaattcggtgagtttgtgaagacaaaaaatcactagctactcaaaaatggccacagtaggaaggaacgttgcagctcctttgctgtttcttaacttgatcatgtattttattgttcttggctttgctagttggtgcctcaacaggttcatcaatggccaaacttaccaccctagtttnggtggaaatggtgcanccatgtttttc

SEQ ID NO: 287063 - DNA, 261 bp, Glycine max
  unsure (1)..(261): unsure at all n locations
gtcaagttctcactttgaagagaaaataacaacgtaaagatgtctgcatcaggaggcagaggaagccaagaggaagagaagaagccttctgatcaaggagcacatattaatctcaaagtcaagggccaggatggtaatgaggttttctttaggattaaaagaagcactcagctcaagaaacttatgantgcatactgtgatcgtcaatctgtagattttaactcaattgctttcttgtttgatggnnggagatccgagcng

SEQ ID NO: 287064 - DNA, 260 bp, Glycine max
tgctcttaagtatctcaaagatatcaagtggagcaggatagaaaacccgaaaggattcaaacttgagtttttctttgacaccaacccttattttatcaattctgtcttgacaaaaacatatcatatgattgatgaggatgaaccaatattggagaaagcaattgggactgaaattcaatggcacccaggaaaatgcctgacacagaagattcttaagaaaaagcctaagaagggttcaaagaatgctaaaccaattacca

SEQ ID NO: 287065 - DNA, 260 bp, Glycine max
cgggagagtccattaaggaaacagctacaaacattggtgcttctgccaaggctggcatggagaagaccaaggccactgtccaagagaaggcagaaagaatgacagcacgtgatccggtgcaaaaggagttggcaacccaaaagaaagaggcaaagatgaaccaggcggagtggacaagcaggcggcgcgtcagcataacacggcggccaaacagtccgccaccacggctgggcacatgggactggcccaccacaccaccg

SEQ ID NO: 287066 - DNA, 270 bp, Glycine max
  unsure (1)..(270): unsure at all n locations
gaatgagtacggtgggagaagggaaggtgagtagtaatggtcatggatgttgcanatcagggccaggctatgcttccccactggaagccatttctggtcccagagagtctctcatttatgtaacctctgtctacacagggaccggaatagagangccagactatttggcgacagtggatgtggatccaaactctccaacttattccaaagtcatccataggcttcctgttccttatttaggtgacgaattgcatcacacaggctggaatt

SEQ ID NO: 287067 - DNA, 261 bp, Glycine max
  unsure (1)..(261): unsure at all n locations
gccacagcagcctcaggnggngnntnnggntgtctcacnggaagttcgagcacccaaggcacgggtcactgggatttctccccaggaagcgtgctgctcgtcacaggggaaaagtgaaggcattccccaaggatgacccatccaaggcacccaagctcactgcattcttgggttacaaggctggtatgactcacattgttagagaggtcgagaagccaggatcaaagttcacanganggaanttgtaacttnttacanttt

SEQ ID NO: 287068 - DNA, 261 bp, Glycine max
  unsure (1)..(261): unsure at all n locations
ccacgcgcctgctccacctggtcgcgccggagaaggagaagccgccgcaggaangaaagagagagggaacgaatgtggagtgttccggacgcaaatgccttcactgcggcgcggagaagacgccgcagtggcgaacgggaccgatgggaccgaaaactctatgcaacgcgtgcggcgtgaggttcaagtccgggaggctggtgccggaataccggccggcggcgagtccaacgttcatgtcaacgaagcattcganttcgc

SEQ ID NO: 287069 - DNA, 255 bp, Glycine max
ttcggagaccttgcaagacttcatcaatggctgtcaaagtttatattgtgtactactccatgtatgggcatgttgagaaactagcagaagaaataaagaaaggggcttcctctgtggaaggtgttgaggccagttatggcaggtacctgagacactgctggatgaggtgcttggtaagatgagtgcaccacccaagagtgacgtaccagtcattacccccaatgaactatccgaggctgatggctttgtattcgg

SEQ ID NO: 287070 - DNA, 262 bp, Glycine max
gcttcttcactttctctcgtttcaatcgaaaccaaaacaaaaacatgggcagaaaattcttcgtcggtggcaactggaaatgcaatgggaccactgaggaggtaaagaagattgttactactttgaatgaggctaaagtccctggagaagatgtcgtagaagttgttgtgagccctccttttgtgttccttcctgttgtaaaaagtttgctgcgccctgatttccatgtttcggcacaaaactgttgggttcgcaaaggtgg

SEQ ID NO: 287071 - DNA, 266 bp, Glycine max
  unsure (1)..(266): unsure at all n locations
ctccacaactgctttgctcacaccggcgaggttgtgtcggccaaggtcattcgaaataagcaaactggtcagtctgagggatatggattcgtggngttctattcacgagcgacggctgagaaagtcttgcagaactataatggcacgatgatgcccaatacagatcaggcattccgtctgaattgggccacattcagtgcgggggaaaggcgttcttccgatgctacttctgatctctctatatttgtgggggacttggccattga

SEQ ID NO: 287072 - DNA, 259 bp, Glycine max
  unsure (1)..(259): unsure at all n locations
ccaaaccctgnctnctttgnnnttnaaanacctgnttttgagcctnttgctgctnttggtnttgngntttggncantgcangntggtntnttgtttgacaacatcttgntagctaangntgataaaattgccgagtcctaccgggagactacatggaagcccaagtttaccgtcgagaaagaaaaacaganggnngangattcggaagctggatcangtggtctgctggcttccagaaganggtatttgaccgttatnc

SEQ ID NO: 287073 - DNA, 261 bp, Glycine max
gctcagagaattactgcgaaagatgcacttgatgctgagtatttctggacagatccattaccgtgcgatcccaagagtttacccaagtacgaatcatcacatgagtttcagacaaagaaaaagcgccaacaacaaggcaaaatgaagaaatggctaagcgtcagaaaattcagcacccacagcctcacactcgtcttccccccattcagcagcctggacaacatggccaaatgcggtcaggaccaaaccaaccagttcatg

SEQ ID NO: 287074 - DNA, 261 bp, Glycine max
  unsure (1)..(261): unsure at all n locations
ccggcatcctctccatggcgaacgccggtcccggaaccaacggatctcagttcttcatctgcacgacgaagacggagtggctcgacggaaagcacgtcgtgttcggacaggtcgtcgaggggatggacgtcgtcaagagatagagaaggtcggatccagctccggcaggaccgccaagcctgtcgtcgtcgccgactgtngtcaactctcttagatagacgacgttgaccctaggcttttatctctgtgtcggtggctctg

SEQ ID NO: 287075 - DNA, 260 bp, Glycine max
catgcttccttactggttttccgctatgaccatgaagagtgttggaagtgcagctttgaagatggttgaggaggttcgtaggcagttcaacactattccaggacttatggagggtcatgccaagcctgattatgccacctgcgtcaaaatttctactgatgcatccatcaaggagatgattcctccaggtgcccttgtcatgctcacaccactcattgttggcatcttctttggtgtggaaacactttcgggtgttcttg

SEQ ID NO: 287076 - DNA, 257 bp, Glycine max
cttcaagatgcagatcttcgtcaagaccctcaccggcaagaccatcacccttgaggtggaaagctctgacaccatcgacaacgtcaaggccaagatccaggacaaggaaggaatccccccggaccagcaacgtctcattttcgccggaaagcaacttgaggacggccgtacccttgctgactacaacattcagaaggagagtactcttcacctcgtcctccgtctccgtggtggcatgcagatcttcgttaagacac

SEQ ID NO: 287077 - DNA, 261 bp, Glycine max
ggagatcaacttgaggtcatcaccaatggcaaatacaagagtgtgatgcaccgtgtaattactcaaacggatggtaatagaatgtccatagcctcgttttacaatccaggcaatgatgcattgatcgctccagcacggccttggtgaaggaagatgagactagccaagtttatcctaagtttgtttttgatgattacatgaagctctatgctggccttaaattccaggacaaagagccaagatttgaagctatgaaggcca

SEQ ID NO: 287078 - DNA, 266 bp, Glycine max
ctacaagtacttccttacaatcaaaaccaacaacaactatggcaagttatcaaaagcactacgatgatcagggtcgcaaggttgacgagtatggcaacgttgagaagcaaaccgacgaatacggcaaccctgttcatgctgctagtgtcacctatgtagccaccagaactgctgctggtggttacagtgatgacattaataagcaacatgataccaccaatgcctacggcgtagacactggtagacagcattctagtggtggctac

SEQ ID NO: 287079 - DNA, 262 bp, Glycine max
tgggttcttcttcttctatgtggacggtgtgtgtgattttggcatcactggcctctgcagcactctgtgccaacccacgcaggccagtggatgtacaatttggccgaaactacgtgcccacatgggcctttgatcacatcaaatatttcaatggtggttctgacattcagcttcatcttgacaagtacactggtactggcttccagtccaaagggtcttacttgtttggtcacttcagcatgtacataaagatggttcctgg

SEQ ID NO: 287080 - DNA, 262 bp, Glycine max
  unsure (1)..(262): unsure at all n locations
cggaaacgaagaagggttctgttttcttttcgcgatgagggccaagtggaagaagaagcgtatgaggaggctgaagaggaagcgccgaaagatgagacagagatccaagtagtgcgttaaacctagtttgtttccttgcttttacaattgcttatgttgtcaaataggacacccagttgttagtggcactggtctctccttttgatgttttgatacatttngttggattttatttcgtcttatgttcttagcggaaaacaat

SEQ ID NO: 287081 - DNA, 260 bp, Glycine max
gtcagttgcaggaaaaatggtttcgctgaaactgcagaagcggctcgcagccagcgtcctcaagtgtggcagaggaaaggtttggcttgaccccaatgaagtcaacgaaatctccatggctaattctcgccaaaacataaggaagctggttaaggatgggtttattatcaggaagcccaccaagattcactctcgctcacgtgcccgccgaatgaaggaagccaagaggaaaggacgtcactctggatatggtaagcgta

SEQ ID NO: 287082 - DNA, 257 bp, Glycine max
  unsure (1)..(257): unsure at all n locations
cnaacactgcgttttcagtttcagcacccaaaactatggttcttctacagctagatccgtttctcaatgagctcaccagcatgtttgagcgcagactaagcttggctctgtttgggttactcttaaacgatcatctttgaaatctaaggtgcagaggaataaattggccgctgccggtgaagcaattgagtttagatgccttatacgtgcaactgatgggaaaaagacaatttctacttcggttggaccgaaggatc

SEQ ID NO: 287083 - DNA, 253 bp, Glycine max
  unsure (1)..(253): unsure at all n locations
caacaganaggcattgatctcatagccgaagcaattccttggatagtgggccaggatgtgcagctagtcatgttgggnactggaaggccggacttagaagatatgcttaggcagtttgagtcccaacacctgacaaagtcagaggatgggttggcttttcggtcaagatggctcaccggataacagcaggtgcagacatattgctgatgccatcaagatttgagccatgtggattgaatcaactctatgccat

SEQ ID NO: 287084 - DNA, 259 bp, Glycine max
  unsure (1)..(259): unsure at all n locations
gntgnatttgtgggttgtttaagtnaactaggaatcaagtgtgccaagagcagtgctggtatgtactgttgggctgatatgagtggattaatccgaccttatagtgagaaaggagaaattgaattatgggagaagtttttgagtgttgctaagatcaatataactcctgggtcagcctgccattgcatagaaccaggatggtttaggatttgttttaccactataacattagaggagatccctttggtaattgaacgag

SEQ ID NO: 287085 - DNA, 264 bp, Glycine max
  unsure (1)..(264): unsure at all n locations
gtcattagacatcgtgtactttgaagagagatctaactattatgatgctcttcttgctgctgaatcacgtgcaatttctggnaggaaaggcacccactctgccaaggatcctccagtgatgcatataactgatttgaccacggcatcggctaagaaagccaganacttcttgcctttcctgcaccgaagtagaagagttcctgctgttgtggaatatgtgctcagtggtcatcgttttaagttgttaattccaaaagaaacttg

SEQ ID NO: 287086 - DNA, 257 bp, Glycine max
  unsure (1)..(257): unsure at all n locations
aganaggnaataattgatctttgaaaatgcagggaggaaaganagctggagagtccatcaaggaaacagctgcaaacattggtgcttctgccaaggctggcatggagaaaaccaaggccactgtccaggagaaggcagaaagaatgacggcacgtgatccgatgcaaaaggagttggcaacccagaagaaagaggccaagatgagccaggccagagctggacaagcaggcggcgcgtcacnttaacacggnggngaa

SEQ ID NO: 287087 - DNA, 253 bp, Glycine max
ccaagtactattgcacagtcattgatgcccctggacacagggatttcatcaagaacatgatcactgggacatcccaagctgactgtgctgttcttatcattgattccactactggtggttttgaagctggaatttcaaaggatggacagactcgtgaacatgctctgctttcattcacccttggtgtgaaacagatgatttgttgctgtaacaagatggatgctactacaccaaagtactccaaggccaggta

SEQ ID NO: 287088 - DNA, 251 bp, Glycine max
  unsure (1)..(251): unsure at all n locations
cnttgttcgagggcgtattctcatgattggactgagtgcccctttgttcntccaggggaaactgcanggcggcgtgatccanggaaatntcattacagctgtgtcccttntcccgagttcaggnnggggtcttncagcnngggcgatacctgtgagtatggcactggtatttttgagtgctggcttcaccctgcccagtaccggncgcggctttgcnnggatgagagtngatgcacaagaagggttgcttt

SEQ ID NO: 287089 - DNA, 280 bp, Glycine max
gaagcatcattccttatagggtgaaggttagtctcatttttgatgttcccatcttgggaaggctaactctacctttggagaaaactggagaaatccccataccatacaagcctgatattgatcttgagaagattcattttgaaaggttctcttttgaagagacaattgcaacgcttcatttgaagttggaaaacaagaatgatttcgaccttggcctcaatgcgctcgattatgaggtctggcttggtgatgttagcattggtggtgcagaactcaccaa

SEQ ID NO: 287090 - DNA, 269 bp, Glycine max
  unsure (1)..(269): unsure at all n locations
aacacacaaaaaatttctagagcgagaaagtgagaggagagagaaagtagctgatcctccatggcctccaccaaggaacgcgaaaactttgtctacaccgccaagctcgccgaacaagccgaacgctatgaagaaatggtggaagcaatgaagaatgtggcgaactgaacgtggaattgacggtcgaggagcggaaccttctgncggtagggtacaagaacgtggtgggtgctcgtagggcttcgtggaggattctatcgtcgattgaa

SEQ ID NO: 287091 - DNA, 266 bp, Glycine max
  unsure (1)..(266): unsure at all n locations
gggccaatgacactgttaagctggatctggaggaaaacaagattgtcgattttatcaaatttgatgttgggaatgtagttatggtaacaggtggaagaaacagggggcgtgttggagtgatcaagaacagggagaagcataagggtagcttcgagacaattcacgtgcaggatgccactgggcatgaatttgctactcgtatgggcaatgtgttcactattggcaaggggacaaagccatggatatccctgcccangggtaagggt

SEQ ID NO: 287092 - DNA, 271 bp, Glycine max
ctgtatcagtgtgaatgatccatttgtgatgaactcatgggccaaaacattcccagagaacaagcatgttaagttccttgctgatggtgcagccaaatacaccaatgcccttggtcttgagcttgacctcactgacaagggtctcggcgtccgctcaaagaggtttgctctgctggtggaagacctcaaggtgaaggttgcgaatgttgaaagtggaggagagttcaccatctccagtgctgaagagatcatgcaaggccctttaaaaccc

SEQ ID NO: 287093 - DNA, 277 bp, Glycine max
  unsure (1)..(277): unsure at all n locations
cnaagaatcaaagaaaggggtggtggctgcttcgaaagcttaataatttgtttatttccagaacatcatagttttcgcagcagcaaactaacaaattactcatatcatataataagatggcccgttctctctcgcaagccaaacgtattggtgtccttgttgnncaatctatctccctaattcccgttcatcggcgaggttacgcagtggcatccgatgtatcggtaagagttggattgggtaatattgggcgaaggaatggaatcgtgggaggtgt

SEQ ID NO: 287094 - DNA, 275 bp, Glycine max
gctcatcattgatagaactattgatcagattgctcctgtgatacatgaatggacatatgatgccatgtgccgtgatttgttgaatatggagggaaataaatatgttcatgaggttcctagcaagactggtggtccacctgagcgaaaagaggttcttttggaggatcatgatcctatatggcttgaacttcgtcatgcacatattgcagatgctagtgaacggctgcatgagaagatgaccaacttcatttcaaagaataaagctgcacaaatcc

SEQ ID NO: 287095 - DNA, 270 bp, Glycine max
  unsure (1)..(270): unsure at all n locations
ggggatgatgatattgaggttatttatgttggatgccttaaggaggaggtgcatccaagcgaacaagatgaggtttcacagacacttcttgagaccttcaagtgtatcccaacttttctcccagctgaccagtttactnngtactatcatggtttttgcaagcagcagttgtggccactgtttcattacatgttgcccttgtcaccagagcttggtggcaggtttaatagggtcactgtggcaggcttangtgtcagtcatanaattttg

SEQ ID NO: 287096 - DNA, 265 bp, Glycine max
  unsure (1)..(265): unsure at all n locations
atctgatgcaattaaaatttcccgtgaagtggaccctactggagataggaccattggagttntgacaaagattgatcttatggacaagggtactgatgctgttgatatattggaaggaagagcatataggttaaagtttccctggattggtgttgtgaatagatcacaacaagacataaacaagaatgtngacatgattgctgctaggcgtagagaacgtgagtncttcaatagnacccctgaatataaacaccttgcgaacaga

SEQ ID NO: 287097 - DNA, 253 bp, Glycine max
  unsure (1)..(253): unsure at all n locations
tgataatgcaaggnaccttgtattgcaagctntccatgaaatgtcgactagcgcattgcgtgtttgggatttgcatacaaggatgaactccccaaatttgaaaactacagtggtaatgaagatcatccagctcaccagcttttgcttaatccttccaactattcatcaattgaaagtgaacttatttttgttggctggttggattgagggatcctcctagggaggaagtataccaagcaattgaagactgcag

SEQ ID NO: 287098 - DNA, 266 bp, Glycine max
  unsure (1)..(266): unsure at all n locations
gttgtcttccaggctaagtgcttggaaactggtgaaactgtggctatcaaaaaggttcttcaagacaagaggtacaagaaccgggaganggcaaacaatgcgccttcttgaccacccaaatgtcgttgctttgaagcactgtttcttttcaaccactgaaaaggatgaactataccttaatttggttctcgagtatgttcctgaaacagttaatcgggtgataaaacattacaacaagttgaaccaaaggatgccactgatatatg

SEQ ID NO: 287099 - DNA, 266 bp, Glycine max
ctgatcacctctcagagatggtggaaagtactttgagtgatttagaagcgggcaagtgcattacaattgaggatgatatggagcttgctcctctcaatcttggaatgattgcatcctattattacatcagttacacaacaattgaaaggttttcatcatctgtgacttcaaaaactaaaatgaagggtcttttggagattctgtcttcagcttcagagtatgctcagcttccaatacgacctggagaggaagaggttgttcgtaag

SEQ ID NO: 287100 - DNA, 267 bp, Glycine max
gaaaggaaataattgatctttgaaaatgcagggaggaaagaaagctggagagtccatcaaggaaacagctgcaaacattggtgcttctgccaaggctggcatggagaaaaccaaggccactgtccaggagaaggcagaaagaatgacggcactgatccgatgcaaaaggagttggcaacccagaagaaagaggcaaagatgagccaggcagagctggacaagcaggcggcgcgttcacataacacggcggcgaacagggctgccagg

SEQ ID NO: 287101 - DNA, 263 bp, Glycine max
gcacatcccatgatgtttatgagatctaaaaatggaaggttaccagatttatcttcttttgacaaattcagagttatgggtgctgtccctgtagcaccaactaacctcttcaagctcttttcttctaagtctcatgtcctattatatcctggagggatgcgcgaggctcttcatagaaagggtgaagaatacaagttattctggcctgaacaatctgagtttgtaaggatggcagcaagatttggagctaaaattgtaccttt

SEQ ID NO: 287102 - DNA, 225 bp, Glycine max
  unsure (1)..(225): unsure at all n locations
ttgttgtntgtgtgtttgttttttctctcacctgaaaatgtcttgctgcggtggtaactgtggttgcggaagcgcctgcaagtgcggcaacggctgcggaggctgcaagatgtacccagacttgagctacaccgagtcaaccaccaccgagaccttggtcatgggagtggcaccagttaaggctcaattccgagagtgctgaaatgggtgttcccgctgagaaga

SEQ ID NO: 287103 - DNA, 260 bp, Glycine max
gccatctgctcctcagcgtgtagaggaggttactcacactgtcattttctggaggaatggattctctgtcaatgatggtcctctacggaggttggatgatccgcagaacgcaccgtttctggagagcattaagaagtctgaatgtcccaaagagctgaaccagcagataggaggactgctgtccatgtcaacctcacaaggcgggatgaagactaccctgaaccagtgaagccacgccaacgtgcttttcagggcgttgg

SEQ ID NO: 287104 - DNA, 269 bp, Glycine max
caaatccgaatcaaaatccgaagtgagatttgcgatggagaggcttcagcgaatgtttgcaggtgcaggtggagcgctagggcaccctcccccagattccccaactctcgattcctccgagcaggtctacatctcctcactcgctctcctcaagatgcttaagcacggaagggctggggttcccatggaggtgatgggtttgatgcttggagaattcgtggacgagtacaccgttcgtgtggttgatgtcttcgcaatgccgcagagtg

SEQ ID NO: 287105 - DNA, 266 bp, Glycine max
agctcgcactctctctacgcacgcctcaacatcccttctctgctccattcattatgtctccgtcgttggatcttccccccaagggtggcttcagttttgatctatgccgaagaaacgcaatgcttcaaaacaagggcctcaaagccccaacctttctcaaaactggcaccactattgtcggtttagttttccaggatggtgtcattcttggggctgatactagggcaactgaaggactatagtggctgataaaaactgtgagaaat

SEQ ID NO: 287106 - DNA, 262 bp, Glycine max
cgacaccaccggcctcatcctcaaactcaagtccttctgcctccgcatggacgcattcgggttcttcgccttcgtcagcgccaagaagaaggagctcgacggcctacgcgccgagatgcctgtggctctggcggagtgcgttgatccggcgaaattcgtgctggaggcgatctccgaggtgtttccggtcgacaagagaggggacaaggccggccacgacttgggctgggcctgcgtccttgtcctggagtcgctgattccg

SEQ ID NO: 287107 - DNA, 262 bp, Glycine max
  unsure (1)..(262): unsure at all n locations
cagaaaatgacattgtagcagctgctgtgttgtctgggaatcgtaattttgagggccgagtacatgcattgacaagagctaactaccttgcctctcctcctctagttgttgcttatgctcttgctggcacggttgacattgactttgagaaggagccaattgggacagggaaggatggaaagaatgtctacttgagggatatttggccatctactgaagaaattgctaaggttgtccaanccagtgtgttgcctgagatgtt

SEQ ID NO: 287108 - DNA, 260 bp, Glycine max
ggatgaacaacaaggagggtctcattgcagtttttgatcttggaggtggaacatttgatgtgtccatcttagagatttctaatggtgtttttgaggtgaaagccacaaatggtgacacgttcttgggaggagaggattttgataatgcttattggattttctagtgaatgaattcaaaagaactgagaatattgatcttcaaaggataaacttgcattgcagaggcttcgagaagctggctgagaaagcaaaaatagaac

SEQ ID NO: 287109 - DNA, 260 bp, Glycine max
  unsure (1)..(260): unsure at all n locations
tgatcgctccctgagagagctcgtcgcggcggttgcagaagaagattgcaagatgaagttcaacatcgcgaatcccaccactggatgccagaagaagctcgagatcgacgacgatctgaaactgcgagcattttgggacaagaggatctcacaggaggnccatcggagatgcactcggtgaggaatttaagggctatgtcttcaaaattaccggagttgtgacaaaacnaggttttccaatgaagcagggatgctgactc

SEQ ID NO: 287110 - DNA, 263 bp, Glycine max
actgatccaattattgctctttttgttcctgagatgggaggcggtaaccagcctgccagggttagtctgattcaaatccccagcaaagaggaactcaggcagaagaaccttttcagtgtcagtgactgcaagatttactggcaaagcaatggagactaccttgctgttaatgtagagaggtacacgaaaacaaaaaaaagcacatacacaggctttgagcttttccgtataaaagaacgggatataccaattgaagttttggg

SEQ ID NO: 287111 - DNA, 264 bp, Glycine max
  unsure (1)..(264): unsure at all n locations
gnaacgtggaactgcggaaaccggaatatctcacttctcagatcagatcaatccgacgtcgttgcagttataatggctccattcagcggcgatgagacggcaccgtttttcggcttccttggagccgcagctgccctcgtcttctcctgtatgggagctgcctatggcacagcgaagagtggcgtgggcgtggcttcgatgggtgtgatgagaccggagctggtgatgaagtctattgtccctgttgttatggctggagttttg

SEQ ID NO: 287112 - DNA, 264 bp, Glycine max
  unsure (1)..(264): unsure at all n locations
gaagatcacgccggntcagaagcagacccgggccgggcagagaacccgtttcaaggccttcgtggtcgttcggcgacaacaacggccacgtgggtctaggcgtgaatgcagcaaggaagtggccaccgcaattcgtggcgcgattattctcgcgaactttcggttattcccgtgaggaggggttactgggggaacaagattgggaagccccacaccgttccgtgcaaggttaccgggaatgtgggtccgttaccgttagatggt

SEQ ID NO: 287113 - DNA, 269 bp, Glycine max
tagaatcccaaatccccaatcaatcgaccaagagcaggagcttcggtggcgatcttcatccgcctcggtgaaaaaaatgtctctggtggcgaacgaggatttccagcacattctgcgtgtgctgaacaccaacgtagatgggaagcagaagataatgttcgctctcacctctatcaaaggtattggcaggcgattcgctaacatttgctgcaaaaaagctgatgtcgacatgaacaagagagtggtgaattgagtgctattgagttgga

SEQ ID NO: 287114 - DNA, 266 bp, Glycine max
  unsure (1)..(266): unsure at all n locations
gngcanttncttctagatttaaggaagatgggtaaggaaaaggttcacatcagtattgtggttattggccatgttgactctgggaagtccactaccactggccacctgatctacaagcttggaggcattgacaagcgtgttattgagagatttgagaaggaagctgctgagatgaacaagaggtctttcaagtatgcctgggtgcttgataagctaaggctgagcgtgaaagaggaatcacaattgatatgccttgtggaatttga

SEQ ID NO: 287115 - DNA, 266 bp, Glycine max
  unsure (1)..(266): unsure at all n locations
tgaaaccagtgactgacttttcgagaaaganaaacaaaaatgagtttccgtcattccatcatgaacgctcttcccattctcctcttcttcctcttcgtttctgcattagtttctgcgaagaaaactggtgatgtgacggagctgcaaattggcgtgaagcataaaccagtatcatgtgaagttcaggcacacaaaggtgacagagtcaaagtacactataggggaaaactcactgatggaactgttttcgattctagctttgaaag

SEQ ID NO: 287116 - DNA, 258 bp, Glycine max
  unsure (1)..(258): unsure at all n locations
gaagtatagtgagtctgtggttgtaaggataactggctgccctaatggttgtgctagaccatacatggctgagcttggactagttggtgatggcccaaatagctatcagatttggcttggaggaaaccataaacaaacatcattagctcgaagtttcatggacagggtgaagcttctagacctgaaaaagttttggagcctttgttttattattggaagcaaaagcgtcaatctaaagaatcattggtgncttcacaa

SEQ ID NO: 287117 - DNA, 262 bp, Glycine max
taaacctatctttcttctctctctgtgtgtgcgcttcaacggcaaccagaagcagccatggccactgcaaggactgtgaaggatgtttcacctcatgagttcgttaaggcgtactcctctcacctcaagcgatccggcaagatggagctgccagagtggactgatattgtgaaaactgcaagatttaaggagttggctccttatgatcctgactggtactatgtcagagctgcttccatggcaagaaagatctacttgagag

SEQ ID NO: 287118 - DNA, 265 bp, Glycine max
  unsure (1)..(265): unsure at all n locations
cttcgctgttcctcttcagatcaaacgcacacagttacgctcangcaaatcaatctcttnctcagaaatgggtgtggctcaaaacattcccgatgcggaggagggaaccttggagattggaatggaatacagaactgtgtctggagttgctgggccattggtcattcttgataaagttaagggacctaagtttcaagagattgttaatattcgcttgggagatggaactactcggcgtggacaagtgctagaagttgatggtgaa

SEQ ID NO: 287119 - DNA, 260 bp, Glycine max
  unsure (1)..(260): unsure at all n locations
tttttcttacgttatcattggacagaagtttgcacacacaaantacaagaaagaacttccttataaccaaaaccaacaacaactatggcaagttatcagaagcactacgatgatcagggtcgcaaggtcgacgagtatggcaatgttgagaggcaaactgacgaatatggcaacccggttcatgccactagtgtcacttatgtngccaccaaaagtgttggtggctacaatgatgacgctaataagcaacatgatattac

SEQ ID NO: 287120 - DNA, 257 bp, Glycine max
  unsure (1)..(257): unsure at all n locations
ccgcacgaatatcttgttgtttggagcgatccgagaaaaactctgtaaacatgttggtttaccaggacctccttacaggtgatgagcttctctctgactccttccgttacaaggaaattgagaatggaatgctgtgggaagttgaggggaagtgggttnttggtgagagcatgggtgatgatgcttgcttggtctttgcctactacaaggacggcgctgctgatccaacattcctgtactttgcatatgccttaaag

SEQ ID NO: 287121 - DNA, 271 bp, Glycine max
  unsure (1)..(271): unsure at all n locations
tattgagaagaatatcctgcgcacccaggcactcttgtgtatgctgatgcgagangcacccctaggaattgtatcagagagtcctaatataatggatctagttaaatgtgatggagctgccctcatatacaggaacaaagtatggagattaggagtgacaccaagtgaaccccagatnagangagatagcctttgtggttgtntggagtaccatatgggattcccacaggttttagntacancatagcttgtttngatcgcagggttnccc

SEQ ID NO: 287122 - DNA, 259 bp, Glycine max
  unsure (1)..(259): unsure at all n locations
gttgtttctgaggctgatatctttgtcaccaccaccggtaacaagggacatcatcatggttgaccacatgaggaaaatgaagaacaatgccattgtttgcaacattggtcactttgacaatgagatcgacatgcttgggctggagaactaccccggcgtgangcgcatcaccatcaagccccaaactgacagatgggtcttccctgagaccaacaccggtatcattgtcttggctgagggtcgattgatgaacttggga

SEQ ID NO: 287123 - DNA, 246 bp, Glycine max
  unsure (1)..(246): unsure at all n locations
ctagtatacaaagatggagatccctgtgatagattttagtaacctcaatggggncaagaggggtgacacaatggccctattgcacgaagcttgtgaaaaatggggctgctttatggttgagaaccatgaaattgacacacaactgatggagaagttgaagcagttaatcaatacatactatgaggaagacctaaaggaaagcttctaccagtctgagatagccaagaggttggagaaagagcagac

SEQ ID NO: 287124 - DNA, 253 bp, Glycine max
ccaagacacgtttgataggaccaaactgtcctgggcataatcaagcctggggaatgtaaaattggaatcatgcctggttatattcataagcctggtcgcataggaattgtctctcgttctggtaccttgacatatgaagcggttttccaaacgactgctgttggccttggacaatccacttgtgtgggtataggaggagatccctttaatggaacaaactttgttgactgccttcagaagttcctaacagatc

SEQ ID NO: 287125 - DNA, 249 bp, Glycine max
cgcatatttgcagtttctacataaggggtgaatgtactagaggagctgagtgcccttatagacatgagatgccagtaactggggaattgtctcaacaaaatattaaagatcgttattatggggtgaatgatccagtggctttgaagctacttggcaaggcaggagagatgtccactctggaggctcctgaggatgagagcattaaaactctttatgttggtggacttgatgctagggtcactgagcagg

SEQ ID NO: 287126 - DNA, 247 bp, Glycine max
  unsure (1)..(247): unsure at all n locations
ggctagccacccagactccatcagagctgccttggctgaattcctctccacttgcatctttgtctttgctggagaaggctctgcccttgcnttgcgacaaatttacaaggaaccagggtcatcagcgggtgagctagtggtaattgcactagctcatgcatttgctctatttgctgctatttctgctagcatgcatgtgtctggtggacacgtcaaccctgccgtcacttttggcgctcttcttggt

SEQ ID NO: 287127 - DNA, 249 bp, Glycine max
  unsure (1)..(249): unsure at all n locations
cnacgggatacattagaatggtctgcacggcaaaaaattgctgttggagctgctcgcggtttacgatatcttcatgaagagtgtagagtgggttgtattatccaccgtgacatgaggccaaacaatattctcataactcatgattttgaacctctggttggcgattttggactggcaaggtggcagcctgatggagacacgggtgtggaaactagagtgattggaacatttgggtatttggctcctgaa

SEQ ID NO: 287128 - DNA, 252 bp, Glycine max
ccgcgggttttgccctgtttaaagtgctggatgaaggcaagctttctaaagttgaggacttgtggaagaacttttccagtgcagatactgctagacaggtggtcaagttgaaagcattttctaaatttgagaacacttcagaagctctagaggcagctactttacttattgatggaaaagctagcaagggtctccgcaagttcctgcgtgttcattgtgaaaatgaaacactaggtgtggcagattcaaagc

SEQ ID NO: 287129 - DNA, 251 bp, Glycine max
  unsure (1)..(251): unsure at all n locations
gcttctgatgatttttaccctcgtgatcctgcttcccataccatccatatttcttctgttgcatacaantcactattccttggagaattcatgcaacctgactgggacatgtttcatagtttacacccagcagcagattatcatgctgcagctcgtgcaattggtggatgtcctanttatgttagtgacaagccaggcaatcacaattttgatcttcttaagaagctggttctccggatggttcggttctc

SEQ ID NO: 287130 - DNA, 249 bp, Glycine max
  unsure (1)..(249): unsure at all n locations
accttctcttacccttctctcaagtttcaagagatttcatcatggctccaaagaaggacaaggctccaccaccttcctccaagcccgccaaatctggcggtggcnnnnnnnnnnnnnnnnnnnnnnnnnnnggaaagcaaaaggagaaggtgaacaatatggtgctgtttgatcagggcacctatgacaagctcctttctgaagctcccaaatacaagctcatcactccttccattctctctgatcgtt

SEQ ID NO: 287131 - DNA, 251 bp, Glycine max
gtcagctctgatatttaacatggcctcatcatctccctctccctctccctctccaatgttcacagtgcgaaggttgcaacccgagttggtggctcctgccatccccactccccatgaacttaaaccattatccgacatagatgatcaagaaggtcttcgtttccacattcctatgatacaagtttatcgtaaccaaccatcaatggcagagaaagacccagttcaagtgattcggaaagcactggcaaaaa

SEQ ID NO: 287132 - DNA, 253 bp, Glycine max
  unsure (1)..(253): unsure at all n locations
gggaggtcgcaacanacacgggccgcggccatgtcaaattcatccgatgctccaactgcggaaaatgctgccccaaggacaaggccatcaagaggtttttggttaggaacattgttgaacaggctgcagtcagagatgtgcaggaagcttgtgtctatgaacaatatacacttccaaaactctatgtgaagatgcagtactgtgtttcctgtgctatccactctcatgttgtgagggttcgatcccgcaccga

SEQ ID NO: 287133 - DNA, 252 bp, Glycine max
  unsure (1)..(252): unsure at all n locations
gacgcagaaggttcatccaatctccgaatcctttaatcgcattgcaaccatgtcgaggagaaaggtcagagagccaaaggaggaaaacgtgactcttggcccagctgttagagatggcgaacatgtctttggcgtcgctcgcatatttgnctcctttaatgataccttcattcatgtcactgatctgtctgggagggaaacgcttgtccgcatcactggtggaatgaaggttaaggctgacagagatgaatc

SEQ ID NO: 287134 - DNA, 248 bp, Glycine max
  unsure (1)..(248): unsure at all n locations
gagngatggatcnagacgcgttggcaaaggcattcgtggagcactactacagcaccttcgacaccaacaggaacggcttagcgaatctctaccaggagggttccatgctcactttcgaagggcagaagatccaaggcgcttccaacatcgttgccaagctcacctccctcccttttcagcagtgccaccactcaatctccaccgtcgactgccagccctccggcgtcaacgccggcatgctcgtcttc

SEQ ID NO: 287135 - DNA, 245 bp, Glycine max
  unsure (1)..(245): unsure at all n locations
gtttcacagccaagtcgtaaaagggtttcaagggatggaaaacatgcagagcttctggcaattgggtgatgaactccgtgggcactcaaaagcatcggaggatcacaagtggttaatggttgcctcgaaactggccgaacagacaagattgaagggggagcgtgtgaacaaccttgatctttcaaagggacccattgaaacaaggtcaagggataaatttgggttccaggaagagaacaatttnt

SEQ ID NO: 287136 - DNA, 243 bp, Glycine max
  unsure (1)..(243): unsure at all n locations
ataggnaataattgatctttgaaaatgcagggaggaaaganagctggagagtccatcaaggaaacagctgcaaacattggtgcttctgccaaggctggcatggagaaaaccaaggccactgtccaggagaaggcagaaagaatgacggcactgatccgatgcaaaaggagttggcaacccagaagaaagaggcaaagatgagccaggcagagctggacaagcaggcggcgcgtcacataacac

SEQ ID NO: 287137 - DNA, 247 bp, Glycine max
gtccagcctctttgtttatgcctacaagatcatcatcaaaacctgtggtactactaagctattgcttgcaatcccacccatattgaagttcgctgaaatgctttcccttaatgttaagtctgtgaattacaccaggggaagtttcattttccccagtgctcagccatatccccatcgcaacttttctgaggaagttgctattcttgatggctactttggcaaacttggtgcaggaagcaatgcttat

SEQ ID NO: 287138 - DNA, 249 bp, Glycine max
  unsure (1)..(249): unsure at all n locations
acttctgctacccactctcttcttccaagtccaaccacgcttttctctacagtcatgggcaaggtcaagatcggaatcaacggatttggaagaattggccgtttggttgccagantcgctctgcaaagagacgatgtggagctcgttgccgttaacgaccctttcattaccaccgattncatgacatacatgtttaaatacgacagtgttcacggacactggaagcatcacgatgttcaccgttaagga

SEQ ID NO: 287139 - DNA, 243 bp, Glycine max
ctcaatcgaatctcagaaaaaatgagagaaatcatcagcattcacataggtcagggccgggatccaggtcggaaactcctgctgggaactctactgcctcgaacatggcatccagcccgacggcatgatgccttctgactccaccttcggtgtagcccacgacgccttcaacaccttcttcagcgaaaccggatctggcaagcagtccccgtgctgtcttcgtcgacttcgaacccacgtcat

SEQ ID NO: 287140 - DNA, 243 bp, Glycine max
  unsure (1)..(243): unsure at all n locations
gggcagggtgcatttgcaaaagtgtatcaggtgaggnaaaagggtacttcagaaatatatgctatganggttatgcggaaggacaagattatggngaagacccatgctgagtacatgaaagctgagagggatatttggacaaagatagaacncccntttgttgtacaactnagatactcgtttcagacnaaatacagactntatcttgtgctngattttgtnaatgggggccanctgttcttc

SEQ ID NO: 287141 - DNA, 246 bp, Glycine max
gtttgtgtgtttagatatctccacgacaggggcttctgagagtgcgggagttcacgttggcggagattgagcactttgttgaccctctagataagtctcatcccaagtaccctgaggtagctgacttggagttcttgatgttcccgagggaggagcaaatgtcgggtcagtctgccaagaggattcctcttcgtgatgctgtttccaagggaattgtcaacaatgagacacttggttacttcatcg

SEQ ID NO: 287142 - DNA, 245 bp, Glycine max
atcacattcgaagagttgaaagctggtctcccaaaattgggtactaaactttccgaatctgaagttaggcagttgatggaagcggctgatgtagatggaaatggaaccattgattacattgaatttataactgctaccatgcacatgaatagaatggaaagagaggatcacctatataaagccttgaatattttgacaatgataagagcgggtacatcacaatggaagagttggaatctgccctt

SEQ ID NO: 287143 - DNA, 248 bp, Glycine max
  unsure (1)..(248): unsure at all n locations
cntttctccatttccattttctctctcacttttcaagaatcgtaagctatgggaaagtcttacccaactgtgagtgctgattaccagaaggccgttgagaaggcgaagaagaagctcagaggcttcatcgctgagaagagatgcgctcctctaatgctccgtttggcatggcactctgctggaacctttgacaagggcacgaagaccggtggaccttcggaaccatcaagcaccctgccgaanggctc

SEQ ID NO: 287144 - DNA, 242 bp, Glycine max
  unsure (1)..(242): unsure at all n locations
taacccggtaactaaacacactgctgaaaaccctagctataaatttctacacccaccgacggcagaaaccctagtagtagttttgaaagggaaggnaagatgcagatattcgtgaaanccctaaccgggaagacaatcacccttgaggtggagtcaagcgacaccattgacaatgtcaaagccaagattcaggacaaagaagggattcctccggatcagcagangttgatcttcgccgggaa

SEQ ID NO: 287145 - DNA, 238 bp, Glycine max
  unsure (1)..(238): unsure at all n locations
cnaatccaaaggtcaatgttatggatacgttaagcagacttagccatgatactgattcggaagtagctatggcggcagttatatccttgggtctaataggtgctggaacgaacaatgctcgaattgctggcatgcttcgcaatctttcaagttattactacaaggataccagccttctattctgcgtgcggattgcccaaggtcttgtacattgggaaagggctattaaccctaatcc

SEQ ID NO: 287146 - DNA, 241 bp, Glycine max
  unsure (1)..(241): unsure at all n locations
gtccagaagggtcttcaagatttcacccagaagctgaactcagccacaactgatttggagaaagctgaagctcagattggggttgatgtccatagtgctctgnactctgctcttacaggctaataataagtactgtagtgttaagtctttccttctgtatttgtttanttccccccactatgtggcattgatttgtctcggtgtaatcaaagttgctaaaagaacattttcaccatgaatt

SEQ ID NO: 287147 - DNA, 244 bp, Glycine max
  unsure (1)..(244): unsure at all n locations
gngcaaaggattgcattcacaaggcaaaaggactttggaaaggaacaacgtgaacttcaatgggcacatgcacanagaacattacatggattacaaccagctgacaccaagttcaatgagcgtacacatgtcagtgaactcaatcaaatggccgaagaagctaaaaggagagctgaacttgcaaggttgagagaacttctacactaaaaggtcacgtagaatcagttgtgagattgaaggggct

SEQ ID NO: 287148 - DNA, 245 bp, Glycine max
acttgaagaatctggtggctggcttgagaggacaactgtagaagacatggatatagctgtccgagcccatctgaatggatggaaatttatctttctcaatgatgtgaaggtgctttgtgagcttcctgaatcatatgaagcttataggaaacaacaacatcgatggcattctggtcctatgcaactatttcgtctgtgcctccagcgattataacctctaagattgcgttctggaagaaaaccaa

SEQ ID NO: 287149 - DNA, 248 bp, Glycine max
  unsure (1)..(248): unsure at all n locations
cccttcagtccttcagcaatggtttacgtgaagtcacagaaatcaaaagcctacttcaagaggtatcaagtcaagttcaagagaagaagagagggaaaaaccgattaccgtgccaggattcggttgattaatcaggacaagaacanntataacaccccgaaatatcgctttgttgttcgtttcagcaacaaagacattgttgcacaaataatatctgctagcattgctggcgatattgttcttgctgc

SEQ ID NO: 287150 - DNA, 245 bp, Glycine max
  unsure (1)..(245): unsure at all n locations
agcttgctcatcnagtccaaganncaacctaccttttgcnatctcaattcaatggcgtcctctctcattgcgaagggnttnnnacncctnttcnctcctctccaggtnnctncttcgncccggcgattcggcttaccacnggtctttcaacnaccaatgccatgngcnagtatgncaancgtgacgacgaacanagnacgacatcgatcgtcantccgannggtctttcnctaaaantgggngcg

SEQ ID NO: 287151 - DNA, 244 bp, Glycine max
  unsure (1)..(244): unsure at all n locations
cacaaaagcaattaatacaagactaagcgatttgaagattgaggggatgcaggaactggaagcagtgacaagtgagattgttaggttgattganacagcaacagtgcctattttggcagttgatgttgatgggctggtcaatgggtggaacataaaaattgctgagttgacaggtctccagttggtgaagctatgggaaagcatttactcacacttgttgaggattcttcaactgatagagtca

SEQ ID NO: 287152 - DNA, 250 bp, Glycine max
ggacgagagagcgtgcaactttcggcaaccacagaccatgacattcaagcgcaggaatggaggtcgcaacaaacacggccgcggccatgtcaaattcatccgatgctccaactgcggaaaatgctgccccaaggacaaggccatcaagaggtttttggttaggaacattgttgaacaggctgcagtcagagatgtgcaggaagcttgtgtctatgaacaatatacacttccaaaactctatgtgaagatg

SEQ ID NO: 287153 - DNA, 243 bp, Glycine max
  unsure (1)..(243): unsure at all n locations
cngttattcagaagatcatcagagaggactttgcagctcgtaccatcatcagcattgctcatagaataccaacagtaatggactgtgatagagttctagttgtagatgcagggcgggccaaagaatttgattcaccagccaacttgctccaaaggccatctctctttggggcattagttcaagagtatgccaaccgttccagtggcctataagaaagttccatgcatgtgtctctctcagcca

SEQ ID NO: 287154 - DNA, 246 bp, Glycine max
  unsure (1)..(246): unsure at all n locations
ctcggttctgccttcacaaaaaaattatcgagatcccctttttctcctaagaaaagccatggctaagggtcccggtnctctactctgacatcggcaagaaagccagggatctgctgttcaaggactaccacagtgaccagaagttcaccatcaccanctactcacccactggagtngctataanagcatcaggnaccaggnaaagtgaactgtttgtggctgatgtcaacacccagttgaagaaca

SEQ ID NO: 287155 - DNA, 246 bp, Glycine max
gtgagtagaaggcagagagactagagcggagatagcaatctcatctcattcatttcaatggcaactcaaggtcaagtcattacctgcaaagctgcggtggcctgggaacccaacaagcccttaactgtccaagacgttcaggtggctccgcctcaggccggcgaggtccgtgtccaaatcctcttcaccgctctctgccacaccgatgcttacacttggggcggcaaggatcccgaaggtctcttc

SEQ ID NO: 287156 - DNA, 250 bp, Glycine max
  unsure (1)..(250): unsure at all n locations
cagttgcggagtcaatcgaaatcggcggagatggttgccatgaggtttcaccagtaccaggtggtgggangggctcttcctaccgaatccgatgagcatcctaagatctaccgcatgaaactctgggccaccaacgaggtccgtgccaaatccaagttctggtattttttgagaaaattgaagaaggttnagaaaagcaatggacaagtgctagccatcaatgagatttttgagaagaatcctaccaaga

SEQ ID NO: 287157 - DNA, 247 bp, Glycine max
gacaagcccaatttcattggctctttctattccaaaactaaagctatggttgaggagctcttgagagaatatgacaatgtatgcacactcagggttcgcatgccaatttcatctgacctgagcaacccacgcaacttcataacgaagatttctcgttataacaaagtagtcaacattccaaacagtatgactattttggatgaacttctgcctatctcaattgagatggcaaagaggaacttgaggg

SEQ ID NO: 287158 - DNA, 246 bp, Glycine max
atcagaaaacagcatcgaacccgtcgtagcagaaaaacttgtcaccatggtttcttccgacaaggatccacgagaggatgtccttcaagcctggtacatggatgatagtgatgaagatcaaagactcccccaccacaaagaacccaaggagtttgtctcgttggaccaacttgctgaacttggagtccttagctggaaactagatgctgataaccatgaaaatgatccagagctgaagaagattcg

SEQ ID NO: 287159 - DNA, 249 bp, Glycine max
  unsure (1)..(249): unsure at all n locations
gcaggtgatgctgctcagaaaaccaaagactatgccagtgacactgcacagacatcaaaggactatgctggtgatgctgctcagaaatcanagggctatgttggtgatgctgcacaaaagaccaaagaatatgttggtgatgcagcacagaagacaaaggattatgccactgacgcagtcacagaagaccanagattatgctactncagaagaccaaggactatgcnagtgcatgcaactgatgctgca

SEQ ID NO: 287160 - DNA, 248 bp, Glycine max
  unsure (1)..(248): unsure at all n locations
cacttcccctgtaaatcacgtttagttcgcacaaggttttaaaaaatggctgatgctgaggacattcaacctcttgttgttgataatggaactggaatggtcaaggcgggttttncaggtgatgacgctcctagggccgtgttccccagtattattgggcgaccacgccataccggtgtaatggttgggatgggtcagaaggatgcttacgtgggtgatgaagctcaatcaaaaaggggtatactcac

SEQ ID NO: 287161 - DNA, 242 bp, Glycine max
  unsure (1)..(242): unsure at all n locations
gtgtttgtgtcttgttttacagcaatagcattggctgggactgggtgcgataaggcaccggtggtgttcgtgttcggcgattcgaactcggacacgggtggactcgcttccggtctgggtttccctatcaatcttcccaatggccgcaatttctttcacagatccactggccgcttgtccgatggacgcctcgtcatcgacctnctctgccaaagtttgaatgcaagtttgttggtaccana

SEQ ID NO: 287162 - DNA, 245 bp, Glycine max
cattcacattgaatatggctgagactacacaatctaatgctgagttgttggagtggcctaagaaagataagcgccgcttcctgcatgttgtgtatcgtgttggtgatcttgatcgcaccattaagttttatactgaatgttttgggatgaagcttttgaggaaaagagatattccagaggagaaatatgccaatgcttttcttggatttggccctgaacaatcccattttgttgtggaattaaca

SEQ ID NO: 287163 - DNA, 242 bp, Glycine max
ctgctggcaacactactgctgccataggcaagggatttgctattgggtctgccgctctggtgtctttggccctatttggtgcatttgtgagcagggctggaatttcaactgttgatgtcttgacacccaaggtctttattggactcatagttggtgccatgcttccttactggttttccgctatgaccatgaagagtgttggaagtgcagctttgaagatggttgaggaggttcgtaggcag

SEQ ID NO: 287164 - DNA, 250 bp, Glycine max
  unsure (1)..(250): unsure at all n locations
gngaganacatggcttccttaagctccttagngctgctccttgcagctctaatnctatcccntcaagttcttgcaaactatgagaatnccccagtgtacaagcctcccactgagaaaccaccagtttataagccnccagttgagaagcctcctgnttacaagcctccagntgagaagcntccagtgnagaagcnacnagtnggngaagcgangagtnggnaagcgncnanttggggnaanntcgggngta

SEQ ID NO: 287165 - DNA, 246 bp, Glycine max
  unsure (1)..(246): unsure at all n locations
attcatcgtccatcgagaaaggaaganaagaaacaaggtgacatcatcatggcttgctcgttttctcgcgggtctctgcttcctctcgccatcatcgtttccttaggatgtctatttgcgatttccattgcaaaggaggaagccaccaagttggggacggtcattgggattgatcttggaacgaccnattcatgtgttggtgtttacaagaacggccatgttgaaatcatagccaatgaccaaggt

SEQ ID NO: 287166 - DNA, 246 bp, Glycine max
  unsure (1)..(246): unsure at all n locations
gtcatcatccgcagctgctgttattcgcaccgcaaacaaacagtgagccatggccgtcggaaagaacaagcgcatctccaaagggaaaaagggtggcaagaaganngcagctgatccctttgccaaganggattggtatgacattaaggccccttctctttttcaagtgnaaaatgttggcanaaccctcgtctctcgtacgcagggtaccaagattgcttctgaaggacttaaacatagagtgtt

SEQ ID NO: 287167 - DNA, 241 bp, Glycine max
  unsure (1)..(241): unsure at all n locations
gtaagggaagaagatggtgtcaggttctggaatctgcgcaaagcgagtggtggtggacgctcgccaccacatgttgggtcggctagcgtccatcgtggcgaaagancttctgaatgggcagaaggttgcggtggtgcgctgcgaagagatttgcatctccggcggtctggtgaggcagaagatgaaatacangngattcctccgcaaacgcatgaacaccaaaccctcccatggccctatt

SEQ ID NO: 287168 - DNA, 242 bp, Glycine max
  unsure (1)..(242): unsure at all n locations
cnctcaccgcctctgtctgcgcctctgatgttgacctcatcacacaagtagcaggtgctgaatggcttggagatacaattgtttatgcttacagatcaggtgaggtgattcggctaccaaaaggggtttcaattccagtgacactaaaagttctggagtttgagcttttccacttctgtccaatccaagaaatagctccaagtatatcatttgcagcaatagggctactgggatatgttcaa

SEQ ID NO: 287169 - DNA, 243 bp, Glycine max
gctttgtggaagtttgaaaccaccaagtactactgcacggtcattgatgctcctggacatcgtgactttatcaagaacatgattactggtacctcccaggccgactgtgctgtccttattattgactccaccactggtggttttgaagctggtatttctaaggatggacagacccgtgagcatgctcttcttgctttcaccctaggtgtgaagcagatgatctgttgctgtaacaagatggat

SEQ ID NO: 287170 - DNA, 250 bp, Glycine max
  unsure (1)..(250): unsure at all n locations
ctttttctatggaacaccttcacaaaacatggtagcctagactggaccatcaccctcttctcactttcaactcttccaaacacacttgttatnggaatccctctattgaaggccatgtatggggacttttcagggagcctcatggtccaaattgtggtgttgcaaagtgtcatatggtacaccttcatgctgttcatgtttgaatatagaggtgcaaaactcctcatcacagaacagttccctgagactg

SEQ ID NO: 287171 - DNA, 243 bp, Glycine max
  unsure (1)..(243): unsure at all n locations
gaaagctacctagagcttgcacctattggtatcttctacaatatcctctcatagtgcnnnnnnnnnnnnnnnnnnnnnntatcaagatgtctttgctttcggatctcatcaacctcaatctctcagaatccacagaaaagatcgttgctgagtacatatgggttggtggatctggtatggacctcagaagcaaagccaggactctcctgggccagtgagtgacctgcaaagcttccaaagtgg

SEQ ID NO: 287172 - DNA, 241 bp, Glycine max
agaatcaaagaaaggggtggtggctgcttcgaaagcttaataatttgtttatttccagaacatcatagttttcgcagcagcaaactaacaaattactcatatcatataataagatggcccgttctctctcgcaagccaaacgtattggtgtccttgttgctcaatctatctccctaattcccgttcatcggcgaggttacgcagtgggcatccgatgtatcggtaagagttggattgggta

SEQ ID NO: 287173 - DNA, 204 bp, Glycine max
ttgttgtttgtgtgtttgttttttctctcacctgaaaatgtcttgctgcggtggtaactgtggttgcggaagcgcctgcaagtgcggcaacggctgcggaggctgcaagatgtacccagacttgagctacaccgagtcaaccaccaccgagaccttggtcatgggagtggcaccagttaaggctcaattcgagagtgctgaaat

SEQ ID NO: 287174 - DNA, 244 bp, Glycine max
agaaaggggtggtggctgcttcgaaagcttaataatttgtttatttccagaacatcatagttttcgcagcagcaaactaacaaattactcatatcatataataagatggcccgttctctctcgcaagccaaacgtattggtgtccttgttgctcaatctatctccctaattcccgttcatcggcgaggttacgcagtggcatccgatgtatcggtaagagttggattgggtaatattgggcgag

SEQ ID NO: 287175 - DNA, 243 bp, Glycine max
  unsure (1)..(243): unsure at all n locations
gnggccttgaacactcatcttgcctccaatacttaccttgttggccattctgttacccttgctgacatcataacaacatgcaacttgtatttaggattcagccagctcttagttaagagcttcacctctgagttccctcacgttgaacgatacttttggaccttggtcaaccagcctaacttcagaaagattctaggtcaggttaagcaaactgaggctgttccacctattccatcggcaaag

SEQ ID NO: 287176 - DNA, 242 bp, Glycine max
  unsure (1)..(242): unsure at all n locations
gngaggcctactccctcttcgcctgcaacggcatcctcttcaaccacgagtccccccgccgcggcgagaatttcgtgacccgcaagatcacgcgggccgtgggccgcatcaaggtcgggctccagagcaagctcttcttgggcaacctgngggcctcgcgagactggggcttcgctggggactacgtggaagccatgtggctgatnctgcancaggataagcccggatgacttatgttgtgg

SEQ ID NO: 287177 - DNA, 239 bp, Glycine max
  unsure (1)..(239): unsure at all n locations
ganaagaaganaggaaagaattgatcgttgaaaatgcagggaggaaagaaagcgggagagtccattaaggaaacagctacaaacattggtgcttctgccaaggctggcatggagaagaccaaggccactgtccaagagaaggcagaaagaatgacagcacgtgatccggtgcanaaggagttggcaacccaaaagaaagaggcanagatgaaccaggcggagtggncaagcaggcggcg

SEQ ID NO: 287178 - DNA, 243 bp, Glycine max
gggcgcaagaacgacgaccacgtgtccctcgtgaagcactacagatccaaggtcgagaacgagctcacgcaggtctgcgccagcatacctcaacctcctcgactccaacctcgtaccctccgtcttcgccagcgagtccaaggtcttctacttgaagatgaagggcgattaccaccgctatctcgcagagtttaaggttggggatgagagaaaaaccgctgctgaggataccatgttgtctta

SEQ ID NO: 287179 - DNA, 243 bp, Glycine max
  unsure (1)..(243): unsure at all n locations
gttgaatcgaaggttatcaacgaccgtnagactggaaggtccagaggattcggatttgtgaccttcgcctcagagcagtcaatgagagatgcgatcgcaggaatgaacggccaggnccttgacggtcgtaacatcactgtcaacgaagctcantnccgcgccagccnnnnnnnnnnnnnnnnnnnnnnnttcggaagtggtggtggatacaaccgcggtaggntgggatatggtggtggtggt

SEQ ID NO: 287180 - DNA, 247 bp, Glycine max
  unsure (1)..(247): unsure at all n locations
gntcatctgcttactaaaatttcttccattcttagctttgttcaatcaaagttttttaagatggcccagagaaatgttactgctaattcttcttttgaaaggactagcttgccttccctagatcaaaagttggccatggccaagcgctgctctcatgagggtgtgatggcaggagcaaaagcagctgttgttgctactattgctactgccataccaactnctggctagtgtaaggatgcttccttgg

SEQ ID NO: 287181 - DNA, 248 bp, Glycine max
ttcttttgttgtttgtgtgtttgttttttctctcacctgaaaatgtcttgctgcggtggtaactgtggttgcggaagcgcctgcaagtgcggcaacggctgcggaggctgcaagatgtacccagacttgagctacaccgagtcaaccaccaccgagaccttggtcatgggagtggcaccagttaaggctcaattcgagagtgctgaaatgggtgttcccgctgagaacgatgggctgcaaatgtggag

SEQ ID NO: 287182 - DNA, 290 bp, Glycine max
gttcttcatagttcagtgtgtcgtttaaaaatgtcgcagttgctggataaagccaagaacttcgtgtcggagaaggtaaatgatatggccaagccggagggagtgtcactgacgtggacttcaagcgcgtgagcaaagataatgtcgagtacttggccaaggtctctgttcgtaacccttattcaacttccatacccatttgtgagatcaactactctttcaaaagcgcatccagggagatagcatcagggaaaattccagacccaggatcgttgaaggcaaaggacaca

SEQ ID NO: 287183 - DNA, 291 bp, Glycine max
  unsure (1)..(291): unsure at all n locations
gccaaatccctcgaagatctcctccgattcaccgacatgtccaacctcgatgcgtctctctcgtctcttaacctcggccacggctccatcgtcttcttggcctacgagggcgagcngcgcgtggcgggccccgccttcaaccccgccggctccttcggccgcaagatgaccatggacgacctcatcgccaagcagatgcgcgtcacgcgccaggagaatccacactgcgagctcgtctccttcgaccgcgactgcgccaacgcgttccagcactacgtcaacgncactctc

SEQ ID NO: 287184 - DNA, 287 bp, Glycine max
ggactttccccaacttacaatgacattacctgatggtcgtgaagaatctgtcatgaagcgcacaacactagtggctaacacttcaaacatgccagtggctgctcgtgaagcttcaatttatacaggaatcacattagctgagtattttagagatatgggttataatgtcagtatgatggcagattctacatctagatgggcagaagcattgcgtgaaatctctggacggctggcatgagacacatgggaatggacattgatcaatgtattttgatgatattgttgtc

SEQ ID NO: 287185 - DNA, 285 bp, Glycine max
gtttttgagaaattcggcaattgattttccatggccaacaatccgtcacagcttctcccatcagagttgattgaccggtgtataggttcgaaaatttgggtgataatgaagggtgacaaggagcttgttggtactcttagaggctttgatgtttatgtcaacatggtccttgaagatgttactgaatatgagatcactgctgaagggagacggataaccaagcttgatcagattttactcaatggaaacaacattgccattttggtcctggtggttctcctgagt

SEQ ID NO: 287186 - DNA, 286 bp, Glycine max
  unsure (1)..(286): unsure at all n locations
gtcgttatcttcttcttttgttgtttgtgtgtttgttttttctctcacctgaaaatgtcttgctgcggtggtaactgtggttgcggaagcgcctgcaagtgcggcaacggctgcggaggctgcaagatgtacccagacttgagctacaccgagtcaaccaccaccgagaccttggtcatgggagtggcaccagttaaggctcaattcgagagtgctgaaatgggtgttcccgctgagaacgatggctgcaaatgtggagtaactgcactgcaacccctgcantgca

SEQ ID NO: 287187 - DNA, 289 bp, Glycine max
  unsure (1)..(289): unsure at all n locations
accctatccgctgctcacggaagcaccacggttcaagacatcgcgaganagttgaaactcggggacaacgagcttctgcgcacggagaagaagttcaaggttttcatggagaattacgggaggagctactccacagaggaggagtatttgcgccgtttggggattttcgcccagaacatggtcagagcggcggagcatcaggcgctggaccccaccgccgtccacggcgtcacgcattctccgatctcaccgaggacgagtttgagaagctctacactggcgtcaatgg

SEQ ID NO: 287188 - DNA, 292 bp, Glycine max
aaagaattaagctcaaacctacaacttgtaccccgacttaggttcatgattcgggatgttatagagttgcgtgctagtaactgggttcctagacgcgaagaggtcaaagccaaaaccattactgaaattcattcagaggcagaaaaaaatcttggattgcggccaggtgcaactgcaagtatgagaaatccccgtggtggtgttcaaggaaatgcccagctctgggggttttcctattgcccgactggtgcagggggtttgatggcctggaatgccagggaccaggaagatg

SEQ ID NO: 287189 - DNA, 294 bp, Glycine max
gcctcaggtaagccaaagccatggttaagcataacaatgttatccccaacggacacttccgtaagcactggcagaactatgtgaagacctggttcaatcagccagcacggaagacaagaagacggttggctcgtcagaagaaagctgtgaagattttccccagactacagctggacctcttagacccattgtacatggtcaaactttgaaatacaacatgaaagtgagagctggaaggggattttcccttgaagaatcaaggcagcagggttcccaaaaagcttgcaccaacaa

SEQ ID NO: 287190 - DNA, 293 bp, Glycine max
ctggagcttcgaggatgttgaggttaatgatatgtctctggctgattacattggagtgtccccatcaaagcatgctacatatgttcctcacactgctggtaggtactcagtgaagaggttcaggaaagcgcagtgccccattgttgagaggctcaccaactctctgatgatgcacgggaggaacaatggaaagaagctcatggctgtcaggattatcaagcatgccatggagatcatccacttgctcactgacctgaacccaattcaggtcattgttgatgccgtcatcaata

SEQ ID NO: 287191 - DNA, 292 bp, Glycine max
  unsure (1)..(292): unsure at all n locations
gttaggttctgcacgctctgcttccagcgagtgttctttcttcgtttcaacaccttaatttgcacacgctgcttcttcngcttgagaaatgggcacaagaaacctttctattcacatctgaatctgtaaacgagggtcaccccgacaagctgtgcgaccagatctctgatgcagtgctcgatgcgtgccttgaacaggaccctgacagcaaggttgcctgtgagacatgcaccaagaccaacatggtcatggtcttggagagatcacaaccaaggccaacgtagactatgag

SEQ ID NO: 287192 - DNA, 289 bp, Glycine max
cgcacgaatatcttgttgtttggagcgatccgagaaaaactctgtaaacatgttggtttaccaggacctccttacaggtgatgagcttctctctgactccttccgttacaaggaaattgagaatggaatgctgtgggaagttgaggggaagtgggttgttaaaggagcagttgatgtagacattggtgcaaacccttctgctgagggtggaggagaagatgagggagttgatgatgcagctgttaaggttgttgacattgttgacacattcagacttcaggagcaaccc

SEQ ID NO: 287193 - DNA, 288 bp, Glycine max
gttgttctgttagaagtgctacaaacaacaatggctgctaatcaggaagatgtgaagcttttgggagctactggaagcccatttgtgtgcagggttcagattgccctcaagttgaagggagttcaatacaaatttttggaagaaaatttgaggaacaagagtgaactgcttctcaaatccaacccagttcacaagaaggttccagtgtttattcacaatgagaagcccatagcagagtctcttgtgattgttgaatacattgatgagacatggaagaacaaccccatc

SEQ ID NO: 287194 - DNA, 289 bp, Glycine max
  unsure (1)..(289): unsure at all n locations
gnaacaccgctcttcatcatcttcagcccggtgctgattccngccacggtcgcattggcctggccgtggccgggttcctgacgtcggnagtctttgggctcacggcgctgtcgnccttctcctggatcctgaactacatccgggagacccagcnggcgtcggaatntctggccgctgcggcgaanaaccatctggcggaggcggcggagtaacgtggggcagaagaaccaaagaagtagggnagaaaaccaagnaagttgggcaagatattcagaagcaaggcacaaga

SEQ ID NO: 287195 - DNA, 287 bp, Glycine max
  unsure (1)..(287): unsure at all n locations
aacatatttcacttgagacagttatctttatctacgcaaganaagaatagaaaatggatatcaggttgatggatttggactctccattgttcaacactctgcaccgaatcatggatctgacagaggacgcagagaagaacttgaacgctccgacgcggacatacgtgcgcgacgcgaaggcaatggctgcgactcctgcggacgtgaaggagtaccctaactactacgtgttcgtgatcgacatgccaggctgaaatccggggacattaaggtgcaggtggaggatg

SEQ ID NO: 287196 - DNA, 288 bp, Glycine max
  unsure (1)..(288): unsure at all n locations
cnaannnanggnacgntagaggtgcnaaaatctttcaggcagacaagtatcggaaaggtgcttgtgagaactgtggagctatgacacatgattctaagtcatgcatggaaagaccacggagagtgggagcaaaatggacaaacaaacacattgctcctgatgaaaagatagaaacttttgagcttgactatgatggaaaacgggacagatggaatggctatggggctcaacgtatgctcgagtcattgagaggtatgaagctagagatgaagctcgaaagaagtacct

SEQ ID NO: 287197 - DNA, 286 bp, Glycine max
gctgaaagttttacaagtttgggccgactggtttctcttttcagatgcttatgttaatggattaagggccactttccttcgacctgggaactccggtgtaattccattccattccatttgtggtggtgcgcctgagattgagcagaataccacttccaaagatatggttgttggtggcaagaccaaccaagatgctgcattggcaatgggtcgaggggctgcaatgaaggagctaatgagtcttcctcttgctgagctggaaagacgtgccggcacaatggatgtc

SEQ ID NO: 287198 - DNA, 287 bp, Glycine max
gagaggaccaaagaacaagaacagaaagatgataggtggcaccgcgttgaaagaagcactgggaagttcatgaggaggttcaggcttcccgagaatgccaaaatggatcaggtcaaggctgctatggagaatggagtgctaactgttactgtgcccaaggaggaagacaagaaacctcaagtcaagtcaattcaaatatctgcctagatctttaattggttgttgctgtctctcattccaaacaagtgtgttctgttctgtctttactgtagttgttccagtagtgt

SEQ ID NO: 287199 - DNA, 287 bp, Glycine max
  unsure (1)..(287): unsure at all n locations
agaaaatcaagttcttcgtcagcaagcactggctgtatcaccaactggaaaagctctatctgcgagaccaaggacagtgattattcagaggacacctgaaaatgggaatgctctaaatggtgaagcaaaaattggatcggatatgactcttgctgtatccaatgtgcgtgaacctgaatctgagggaanaccacaaaaatctctcaatgagaagcagcaagaaaaccaggacttgttgatcagtgcataacacaagatttggggattctgggggcaacctgttgctc

SEQ ID NO: 287200 - DNA, 293 bp, Glycine max
ggaagattatgaggtcaaggttccttttcagtcccttcaggctttaggttgccatgttgatgctgtttgcccctcaaagaaggccggtgacacttgcccaaccgctgttcacgattttgaaggggatcaaacttacagtgagaaaccaggacatacttttgctttaacagctacctttgatgatgtggatccctcaggttatgacgctcttgtcatccctggaggtcgagcacctgagtatttggcattgaacgagtcagtcattgccttggtgaagtatttctttgaaaaca

SEQ ID NO: 287201 - DNA, 287 bp, Glycine max
  unsure (1)..(287): unsure at all n locations
cnccgcacgaatatcttgttgtttggagcgatccgagaaaaactctgtaaacatgttggtttaccaggacctccttacaggtgatgagcttctctctgactccttccgttacaaggaaattgagaatggaatgctgtgggaagttgaggggaagtgggttgttaaaggagcagttgatgtagacattggtgcaaacccttctgctgagggtggaggagaagatgagggagttgatgatgcagctgttaaggttgttgacatgttgacacattcagactncnggagca

SEQ ID NO: 287202 - DNA, 286 bp, Glycine max
agaatcaaagaaaggggtggtggctgcttcgaaagcttaataatttgtttatttccagaacatcatagttttcgcagcagcaaactaacaaattactcatatcatataataagatggcccgttctctctcgcaagccaaacgtattggtgtccttgttgctcaatctatctccctaattcccgttcatcggcgaggttacgcagtggcatccgatgtatcggtaagagttggattgggtaatattgggcgaaggaatggaatcgtgggaggtgtagaagagaagcc

SEQ ID NO: 287203 - DNA, 283 bp, Glycine max
cacctttgttcactcttcttctcttgcggctagggttttagcgcacttcttctagatttaaggaagatgggtaaggaaaaggttcacatcagtattgtggtcattggccatgtcgactctgggaaatccactaccactggtcacctgatttacaagcttggaggcattgacaagcgtgttattgagaggtttgagaaggaagctgctgagatgaacaagaggtctttcaagtatgcctgggtgctggacaaacttaaggctgagcgtgaaagaggaatcacca

SEQ ID NO: 287204 - DNA, 287 bp, Glycine max
gttcgtcaccatgactttcaagcgcaggaatggaggtcgcaacaaacacggccgcggccacgtcaagttcattcgatgctccaactgcggcaaatgctgccctaaggacaaggctatcaagaggtttctggtgaggaacattgttgaacaggctgcagtcagagatgtgcaggaggcttgtgtctacgaacaatacacgcttccgaagctgtatgtgaagatgcagtattgtgtttcctgtgctatccactctcatgttgtgagggttcgatcccgcactgatagga

SEQ ID NO: 287205 - DNA, 287 bp, Glycine max
  unsure (1)..(287): unsure at all n locations
gnaagaagaaaagacaaaggaataacatagatgttgatgatgcttcacgcttgcgaaggagaacaaggtacctcttaatcaaaatgaagctagagcagaaccttattgatgcttactctggagaaggttggaaaggtcaaagtcgggaaaagattaggccaganaaggagctactacgagcaaaaaagcagattttaaaatgtaaacttagtattcgcgatgccatacaccagctgggattctcttagttctgtgggtagcatgaagattctgccattgctccagag

SEQ ID NO: 287206 - DNA, 282 bp, Glycine max
  unsure (1)..(282): unsure at all n locations
cggaaatttctctgcgtctctcctattttttctgaatctaacattaacaacnagaatggcatccaacaggggtcaaggtggaattcagcagctgttggctgctgaacaagaggcacaacggattgtgaatgctgcgaaaaatgaaaaattggctaggttgaagcaagccaaggaagaggctgaaaaggagattgctcaataccgagctcaactagaggctgagtttcaaaagaaagtgtcagacantnctggagattctggagctaatgtcaagcggcttga

SEQ ID NO: 287207 - DNA, 289 bp, Glycine max
  unsure (1)..(289): unsure at all n locations
ananaatgttgantgaaaatgccgagttcaaagcgcttactcagaaagaaattcgcacagcatntgatggaacaagaaagattttattcacattggaagatgggctggtcataganacagttgtcataccttgtgacagangtaggactactgtgtgtgtttcaagtcaagttggatgtgctatgaattgtcaattttgctacactggaagaatgggtcttaggagacatcttactgctgcagaaatagtagagcaggctgtttttgccagacggctgctcactgatga

SEQ ID NO: 287208 - DNA, 284 bp, Glycine max
  unsure (1)..(284): unsure at all n locations
gnaaanagacatgaagaagctggaagaggctgttcgcagtgttgagatgcctggtctattgtggggagcatccaaactggttcctgttggttatgggatcaagaagttgcagatcatgttaactattgtcgatgaccttgtatctgtggacacccttgttgaggagactctcacagttgagcccatcaatgagtatgtccaaagctgtgacattgttgcattcaacaaaatctagttttcagttgaatttcagtcattttgaagcagccaattagtttgttttc

SEQ ID NO: 287209 - DNA, 288 bp, Glycine max
gagcgagcgagcagtttcaaagagaggatttgggattgggaaggcgagggattgcgctgcgtctcttcctcttctctttcgattcatccctcattcataatcttccaatccaacaacctcagcctcacactcacacatacacacatctgaacgcgtatcgtccctcccatgggcttcaaagcgcatcctcaaggagctcaaggacttgcagaaagacccaccaacttcttgcagcgctggtccagtagctgaggacatgttccattggcaagcaacgattatgggtcc

SEQ ID NO: 287210 - DNA, 282 bp, Glycine max
gccgaaacccttccggaaccctaaggtaagtgagtaatcagtggttgagaatggtggagaaggcgaagggtagaaaggaggaggtggttacacgtgagtacaccattaacctccacaagcgcctccatggctgcacatttaagaagaaagctcctaaagctattaaggagataaggaaatttgcccaaaaggccatggggaccatgatgtgagggtggatgtgaagttgaacaagtttgtctggagccagggaatcaggagtgttccaaggagggttagagt

SEQ ID NO: 287211 - DNA, 289 bp, Glycine max
  unsure (1)..(289): unsure at all n locations
gtgagtttcaatgagcttgagtcggtgcctganagcttgtgttttgccacctctcttgtcaagatgaacataggaaacaattttgctgacatgagatccttaccgagatccattgggaaccttgaattgcttgaggaattggatatcagcaataatcagatacgtgtgcttcctgaatcgtttaggatgctcactcaactacgcatcctgcgagcagaagagaatcctcttgaagtcccaccaagagaaatagctgataagggagctcaggctgttgtccagtacatgg

SEQ ID NO: 287212 - DNA, 284 bp, Glycine max
  unsure (1)..(284): unsure at all n locations
gcagtttctaatcttaccaagggtattgaaggtctattcaagaaaaacaaggtaaactatgtncaaaggttatggcaaatttgtttcaccatctgaagtctctgtggacaccactgaaggtggaaatactgttgtgaaaggcaagcatattataattgccactggctcggatgtgaaatcattgcctgggcgtcactattgatgaaaagaaagtcgtatcatcaacgggggctcttggctttgactgaaatccccaagagactcgtagtcattggggcaggcta

SEQ ID NO: 287213 - DNA, 278 bp, Glycine max
  unsure (1)..(278): unsure at all n locations
ggaaaatcgtttatctcttgagatcaagctcatctccgaccgcaccctcggcgacaccgtcatcggcaccgtccatgttcctctcagggaactcctggataaccccggcgatgacagctccttccgccaagtcagttatcaggtgatgaagcaatcaagaaaatccaagggatccttgaatttctcctacaaattcggcgaacatgttcccgccccggccgccaagacacccaaagcggccaaggcgggacaagagcggtgatggntatctctgctgg

SEQ ID NO: 287214 - DNA, 284 bp, Glycine max
ggctggtctggtttaggtttaggttgagcgatgtcgggtctgtataactccaacttctcaccagtgagggctgcttctcctcagattagaaccaacccagaagtcgacagtcagtaccttacggagttgctggcagagcatcagaagcttggtcccttcatgcaagcccttcccatatgcagtcgtctcttaaatcaagaaatattaagagtttctgggaatgctgtccaatccaaggttttggtgactttgacagactgcggcatagaagccctagtcctatg

SEQ ID NO: 287215 - DNA, 284 bp, Glycine max
ggcctcaagctcctgctcctgctgcaactggggcactgcctgcatctgttactgcacctgtatcttcaccttctccagctccagccccagctcctgctcctatatcttcaggaactgctgtggaagggtctgatatctatgggcaggctgcgtccaatctggttgctggaagcaacttggagggaacaattcagcaaattcttgatatgggtggagggagctgggacagggatactgttgtccgtgctcttcgagctgcctacaacaaccctgagagagctgtt

SEQ ID NO: 287216 - DNA, 284 bp, Glycine max
caaaaatgagttggagcgtaacattacaatcaagcttggctatgctaatgcaaaaatatacaagtgtgaagatgaacggtgtccaaggcctatgtgctacaaggcttatggaagtggaaaggaagatagtcctatgtgtgatgtgccaggatttgaaaacagcaagatgaaattgctgagacatgtttcatttgtggattgtccgggacatgatattcttatggctacaatgcttaatggagcagcatcaggatggagcttgctactcattgctgcccaatgaa

SEQ ID NO: 287217 - DNA, 303 bp, Glycine max
  unsure (1)..(303): unsure at all n locations
ctcttcttctcttgcggcnnanggttttagcgcacttccttctagatttaaggnagatgggtaaggacaaggttcacatcagtattgtggttattggccatgttgactctgggaagtccactaccactggccaactgatctacaagcttgnaggcattgaccaagcntnttattgaganatttganaaggaaacctgcctgagatgaaccaanangtctttcaagtatgcctggggtgcntggataagcttaagggctgagcgtgnaagnagnatncccaattgaattgcccttntgggangt

SEQ ID NO: 287218 - DNA, 285 bp, Glycine max
gccaagaggaaaggacgtcactctgggatatggtaagcgtaagggtacaagggaggcaaggcttcccactaaaatcctttggatgaggagaatgcgtgtgcttagacgcttgcttcgcaaatacagggaatctaagaagattgacaagcacatgtatcatgacatgtacatgaaggtcaagggtaacgttttcaagaacaaaagagttttaatggagagcattcataagtccaaagccgagaaggcaagagagaagaccttgtccgatcaatttgaggccaaacg

SEQ ID NO: 287219 - DNA, 282 bp, Glycine max
  unsure (1)..(282): unsure at all n locations
gtggacaactaccacctgaaatgtgggaacgctggtcaaagccttatatcaaagagattgtaaatttggtcangaaaaaatgccctggggtaccaattgttctttatataaacggaaatggtggtcttcttgagcgtatganagacaccggagttgatgttatagggctagactggacagtggatatggcagatggaagaagaagattgggtagtgggataggtgttcagggaaatgtggaccctgcctacttattctcccctcttgatgccctgactgaag

SEQ ID NO: 287220 - DNA, 282 bp, Glycine max
ctagagcttgcacctattggtatcttctacaatatcctaaagtgtttttcttcttcttcatcaccatgtctttactttcagacctcatcaacctcaatctctcagaatccacagaaaagatcattgctgagtacatatgggttggtggatctggtatggacctcagaagcaaagccaggactcttcctgggccagtgagtgaccctgcaaaacttccgaagtggaactatgatgggtctagcacagatcaagctccaggggatgacagtgaagtcattctat

SEQ ID NO: 287221 - DNA, 282 bp, Glycine max
  unsure (1)..(282): unsure at all n locations
ggccatgccctcatgtgcttggcacgtntttcactncttcctctgcgctctaaccctatccgctgctcacggaagcaccacggttcaagacatcgcgaganagttgaaactcggggacaacgagcttctgcgcacggagaagaagttcaaggttttcatggagaattacgggaggagctactccacagaggaggagtatttgcgccgtttggggattttcgcccagaacatggtcagagcggcggacatcaggcgctggaccccaccgccgtccacggcgtc

SEQ ID NO: 287222 - DNA, 276 bp, Glycine max
  unsure (1)..(276): unsure at all n locations
caggggtcaaggtggaattcagcagttgttggctgctgaacaagaggcacaacggattgtgaatgctgcaaaaaatgaaaaattggctaggttgaaacaggccaaggaagacngctgaaaaggagattgctgaataccgagctcaactagaggctgagtttcaaaagaaagtgtcagacagtactggagattctggagctaatgtcaagcggcttgagcaagagaccgaagaaaaaatccatcacctgaaaacggaggctgcaagaatatcggatg

SEQ ID NO: 287223 - DNA, 273 bp, Glycine max
  unsure (1)..(273): unsure at all n locations
cggggctaggatagtngccgatgttgttggaaacccagttctctttaatgaatggaaagcagagatggaaatgatggctggaaggataaagaatgttagacagcagctatatgatagtattacttcaaaagacaaaagtggaaaggattggtcattcatacttaagcagataggcatgttctcattcactggcttgaacaagaaccagagtgacaacatgacaaacaagtggcacgtatacatgacaaaggatggaaggatttccctggcagg

SEQ ID NO: 287224 - DNA, 282 bp, Glycine max
aagaatcaaagaaaggggtggtggctgcttcgaaagcttaataatttgtttatttccagaacatcatagttttcgcagcagcaaactaacaaattactcatatcatataataagatggcccgttctctctcgcaagccaaacgtattggtgtccttgttgctcaatctatctccctaattcccgttcatcggcgaggttacgcagtggcatccgatgtatcggtaagagttggattgggtaatattgggcgaaggaatggaatcgtgggaggtgtagaagag

SEQ ID NO: 287225 - DNA, 283 bp, Glycine max
  unsure (1)..(283): unsure at all n locations
aataacatagcatagagtgagaagtgagaagagaaaaatggcaatctccatacccagtagacaacttttcatagatggagagtggaaagtccctcttctcaacaatcggtttccgatcatcaaccccgctactgaagacatcatagggcatattccagccgctactaaggaagatgttgaccttgcggtggatgctgctaaaagagccttttcccataacanaggcaaagattggtcttcagctcctggctctgttcgtgctcgctatcttcgagccatcgct

SEQ ID NO: 287226 - DNA, 284 bp, Glycine max
gttttctgatcgctcatagagagttcgacgcggcggttgcagaagaagattgcaagatgaagttcaacatgcgcgagtcccaccactggatgccagaagaagctcgagatcgacgacgatcagaaactacgagcattttgggacaagaggatctcacaggaggtcagcggagatgcacttggtgaggaatttaagggctatgtcttcaaaattactggaggttgtgacaaacaaggattcccgatgaaacagggagtgcttactcctggtcgtgttcgactttt

SEQ ID NO: 287227 - DNA, 282 bp, Glycine max
taacacggcggccaaacagtccgccaccacggctgggcacatgggacatggccaccacaccaccggaaccgggactggaaccgccacgtattccaccaccggggaatatggtcagcccatgggggcccaccagacgtcggcaatgcctggccatggaaccgggcagcccacgggccatgtcaccgaaggagtggtgggctcacatcccattggaaccaacagagggccgggtgggaccgctacagctcataatacccgtgcgggtggaaagccgaatgatta

SEQ ID NO: 287228 - DNA, 273 bp, Glycine max
  unsure (1)..(273): unsure at all n locations
agccctacacaagataagatttctgattttgagatgaagctgatggacattgacagtgagcaccttgggattccagaggcagagtatcatgccattgntaagatgccatcctctgagtttgctaggatctgcaaggatctcagtagtattggtgacactgttgtcatttcaattactaaggagggtgttaagttttccaccaaaggagacattggaactgccaatatagtttgcaggcagaatacttctgtggacaagcctgaagaagctact

SEQ ID NO: 287229 - DNA, 272 bp, Glycine max
  unsure (1)..(272): unsure at all n locations
anacactcttcttcatcgtcgtcgcaatgggacgtgtgatccgtgcgcangtaagggagcaggctcggtcttcaagtcccacacgcaccaccgcaagggccctgcccgcttccggagcctggatttcggagagcgcaacggctacctgaagggtgtcgtcactgacgtcatccacgatcctggccgtggcgcgcctctcgctaaggtcgccttccgccacccgttccgctacaagaagcagaacgagctcttcatcgccgccgagggtctct

SEQ ID NO: 287230 - DNA, 275 bp, Glycine max
ctcatcactctccctctcatcgcgtcgattcctcttccctctctcccatgccatcgtccctccctccacccgcgtcgccggaatccggtgccgcgttaaccgcgccggagactcggcgtactcaccgctgaactcggggtcgtcgtcttcgtcgttcagcgaccgcccccccacggagatggcgccgctcttccccggctgcgactacaaccactggctcatcgtcatggagaatcccggtggtgagggcgccaacaagcagcagatgatcgatt

SEQ ID NO: 287231 - DNA, 277 bp, Glycine max
  unsure (1)..(277): unsure at all n locations
tgagttttataaagtggggcagtgtgccaagggcttcaaatgcaagttctcgcatgatttgaatgttcagaggaaaggggagaagattgacatttacagtgataagcgtgaccaggaaacaatggaggattgggatcaagagaccttgganaaggtggtggagtcaaagaaaactgagtataatcagaataaaccaactgacatagtctgtaaatactttttggatgcagtagaaaagaagcaatatggttggttttgggtctgccccaatggtggt

SEQ ID NO: 287232 - DNA, 280 bp, Glycine max
  unsure (1)..(280): unsure at all n locations
agatttttcatccctttgtagcagtagtgttatctgtgacttttgttctagcttntggagaggttatcccacaagctatatgcacaagatatggactctatgttggtgctaatttngtggggcttgtgcgtgtcctgatgatcatcngttatccaattgcttaccctattggaaaggctctggatgttttacttggacacgatcatgcactgtttaggcgagcacagctgaaagcccttgtttcaatccatagccangaggctggtaaaggaggtgaact

SEQ ID NO: 287233 - DNA, 278 bp, Glycine max
ttggagctggtgtctcagggtttctaggttttgcaacaacagcatttgctgatgaagctgagcatggcctggcatgtcctagctatccatggcctcataagggcatccttagttcatatgatcatgcttcgattcgtcgtggtcatcaagtttatcaagaagtctgtgcttcttgtcattctatgtctttgatatcataccgtgatttggttggtgttgcttatacagaagaagaggtaaaggctatggcagctgagattgaggtggttgatggccct

SEQ ID NO: 287234 - DNA, 273 bp, Glycine max
  unsure (1)..(273): unsure at all n locations
gaagacctgcaagatgttgccgacaaattaaaaacaaaccataccagaaatcgcggttttgccacggtgttcctgatcccaagatcaggatttatgatgttggcatgaagaagaaaggtgttgatgagtttcctttctgtgtgcatttggttagttgggagaagtagaatgtcttgagtgaggcgctggaggctgccaggattgcttncaacaagtacatgacgaaattcgctggaaagggatgcattccacttgagagtcaggctgcatcac

SEQ ID NO: 287235 - DNA, 273 bp, Glycine max
agcccaagccgcccatagtcataaccaaggaaagtcccaacgcactccgaagccacgtcctggaaatcacctccggcagtgacgttgctgagagcatcgccgcctttgccaaccgccgccaccgcggcgtgtcggtgctcagcgggagtggcattgttgccaacgtcactctccgccagcctgccgccccggccggcgtcataacgctccatgggaggttcgagatactgtccctctcgggagcctttttgccgtccccctcgccgccgggag

SEQ ID NO: 287236 - DNA, 282 bp, Glycine max
cacgaaggctcggagccaggaagcagcggtcggaggccacgtggcaggccacctgggtccaagaacaagcccaagccgcccatagtcataaccaaggaaagtcccaacgcactccgaagccacgtcctggaaatcacctccggcagtgacgttgctgagagcatcgccgcctttgccaaccgccgccaccgcggcgtgtcggtgctcagcgggagtggcattgttgccaacgtcactctccgccagcctgccgccccggccggcgtcataacgctccatggg

SEQ ID NO: 287237 - DNA, 284 bp, Glycine max
gacgccgtttgggtcctcttccacctcgccttcttctcccaatgccttccctccgcctgggcccactcggcgatcctcctcccgggtcaactcgcccgtgactcaccgcagagctgccccgcccctgaccccaacctctactacaagccagtcatcggaatcgtcagccatcccggcgacggcgcctccggccgcctcagcaacgccaccggcgcctcctacatcgccgcctcctatgtcaaattcgttgaggccgccggcgcccgtgtcgttcccctcatctt

SEQ ID NO: 287238 - DNA, 279 bp, Glycine max
  unsure (1)..(279): unsure at all n locations
cttttgaatcagatggatggttttgaccagacagttaatgttaaagttattatggcaactnacagagcagacactttggaccctgctctgttgcgtcctggaaggcttgatcgtaagattgagttccctttgcctgatagacgtcaaaagaggctcgtatttcaggtttgcacagccaagatgaacttgagtgatgaggtagccctggaggattatgtttctcgtcccgacaaaatcagtgctgctgagatatcagctatttgtcaagaagctggaatg

SEQ ID NO: 287239 - DNA, 262 bp, Glycine max
gatggtgggaccagtgagacctcagtttgtgctctttggttcttccattgttcagctcagttactctctccaaggttggggcgctattcttgctcatttgtatgctcgcaaggcggatataattctgcgaggatactctggttggaattcaaggcgtgctgtgcaagttctggatgaaattttccctaagaacgccactgagcaaccagatttggtaattgtgtactttggtggtaatgattctcttcttccacatccaagt

SEQ ID NO: 287240 - DNA, 278 bp, Glycine max
  unsure (1)..(278): unsure at all n locations
ganatcatctcttgcggctgatcatgcagctgctggaaattttgatactgcaatgangttgctgaaccggcaacttgggataacaaattttgcccccctgaaaaccatgtttctggatcttcatactggcagtcattcctatctccgggcattttcttctgctccgatcatatcacttgcagttgaaagaggttggactgagtcatctagtgcaaatgtgagangcccaccggcacttcctttcaaattgtctcaattggntgaaaagcttaaagctg

SEQ ID NO: 287241 - DNA, 278 bp, Glycine max
  unsure (1)..(278): unsure at all n locations
caactctagaatgtttgtatctggttcttgtgattcaactgcccgattgtnggacactcgtgtggcaagccgagcagtgcggacatttcatgggcaccggggggatgttaatactgtcaaattctttcctgatggaaatagatttggaactggctcagatgatggaacttgccgattgtttgacattaggaccggccaccaactacaagtatatcatcagcaacatggtgacaatgaagctgcacatgtgacctccattgcattctccatatctggaa

SEQ ID NO: 287242 - DNA, 273 bp, Glycine max
  unsure (1)..(273): unsure at all n locations
ccgtcctaagtttattgagaganttttgcaagtgtgagaaacatggcatctcgtcaaaacaacaagcaagagcttgatgaaagagcaaggcaaggagagactgttgtcccgggtggaactggtggcaagagcctggaggctcagcaacaccttgctgaaggaaggagcaagggagggcaaacaaggaaggaacagctgggtacagaagggtaccaggaaatgggacgcaaaggagggttgagcactgtggacaaatcaggagaagaacgtgct

SEQ ID NO: 287243 - DNA, 275 bp, Glycine max
gaacccttccactgtggtgactctgcgatgggtgcctacaagtatgtttcagagctatggcgcaagaagcagtctgatgtcatgcgcttcttgcagcgggtgaggtgctgggagtataggcagcaaccttccattgttcgtttgacaaggtctacccgccctgacaaggctcgtcgcttgggcttcaaggctaagcagggctatgtgatttaccgtgttcgtgttaggaggggtggccgaaagagaccagttcccaaaggtattgtttatgggaa

SEQ ID NO: 287244 - DNA, 277 bp, Glycine max
  unsure (1)..(277): unsure at all n locations
cttcttttgttgtttgtgtgtttgttttttctctcacctgaanatgtcttgctgcggtggtaactgtggttgcggaaggcctgcaagtgcggcaacggctgcggaggctgcaagatgtacccagacttgagctacaccgagtcaaccaccaccgagaccttggtcatgggagtggcaccagttaaggctcaattcgagagtgctgaaatgggtgttcccgctgagaacgatggctgcaaatgtggagctaactgcacctgcaacccctgcacttgca

SEQ ID NO: 287245 - DNA, 284 bp, Glycine max
  unsure (1)..(284): unsure at all n locations
ctggtctccctggtgttggtctcctacgctgcccggtcggaatcagcgctgggcggctggagccccatcaaggacgtaaacgacagccacgtggcggagatcgccaactacgcgctgagcgagtacgacaagcgttctnnggccaagctcacccttgtcaaggtcgtcaagggcgagactcaggtcgtttccggcaccaactaccgtctcgtcctcaaagccaaggatggatccgccacggccagttacgaagccatcgtctgggagaagccttggctccattt

SEQ ID NO: 287246 - DNA, 277 bp, Glycine max
  unsure (1)..(277): unsure at all n locations
cgatatttgagcttaaaccctagccgctcttctcttcattcttcnctttggaaacaatcataatggcgttctgtaataaggttggaaatgtcttgaggcagggtgctgctcgcagcacacatgcccctgttgcgtccatgcttaattacatccgctgcatgtcttcaagcaagcttttcattggaggcctttcatatggagttgatgaccagtctcttaaggatgcattttctggctttggagatgtggttgatgcaaaagttataactgatagagt

SEQ ID NO: 287247 - DNA, 277 bp, Glycine max
cgaaggtgtggctattgaaatagcagaagctgttgttggggcattgaaaggggagcttgctgctactgcagtcaatgcaccaatggttccctcagaggtgttaacagaattgaaaccattcattgatcttgcagagaaattgggtaggctagctgtccagctggtagcaggaggaagcggtgtgaaaacagtgaaggtcacttatgccacctctaggggccctgatgatctggacactcgtcttctccgtgccatgataaccaagggtctgattgag

SEQ ID NO: 287248 - DNA, 276 bp, Glycine max
  unsure (1)..(276): unsure at all n locations
cgacgtgaganagattgtgaagtagaaatcggtgcaagaaattctccactttatctaaaaaaattcggtgagtttgtgaagacaaaaaatcactagctactcaaaaatggccacagtaggaaggaacgttgcagctcctttgctgtttcttaacttgatcatgtattttattgttcttggctttgctagttggtgcctcaacaggttcatcaatggccaaacttaccaccctagttttggtggaaatggtgcaaccatgtttttcttaaccttctc

SEQ ID NO: 287249 - DNA, 273 bp, Glycine max
gaaattgctttgctgtaagtttctgattcctttcttcagaattccaagttttcatttcgttagggacaaaagattgtgagatagagtatggctggaaaaggcgagggtcctgctatcggaatcgatttgggaacgacgtactcttgcgtcggcgtgtggcaacacgatcgtgttgaaatcatagccaacgatcagggtaatagaactaccccatcctacgtggctttcaccgatacagaacggttgatcggcgatgcggcgaagaaccaggtc

SEQ ID NO: 287250 - DNA, 270 bp, Glycine max
  unsure (1)..(270): unsure at all n locations
cagaaaccttaaaaacaacaacgtaggagtgttcggaaaagatggctaagcaggaagtggtggaagggttcaagttcgagcagaggcacgggaaagaacgcgtgagagtggcgcgcgtgtggaagacgaggcaggggcancacttcattgtggagtggcgcgtggggatcactctcttttcggattgcgtcaactcgtacctccgcgatgacaactctgacatcgttgctactgataccatgaaaaacaccgtgtatgcaaaagcaaagg

SEQ ID NO: 287251 - DNA, 279 bp, Glycine max
agaattgataaacaaatcgttagggttttttggttgtgcgagtgagagtgagagagaacaatggaagacataacagagggagtgaacaacatcaacatctctgattcgtataagaaaaatcgcattcaggtctctaacaccaagaagcccctcttcttctacgttaatctggccaagagatatatgcaacagcatgatgaggtcgagctctcagctctaggaatggctattgccacagtagtaactgttgctgaaattttgaaaaacaacagacttgct

SEQ ID NO: 287252 - DNA, 277 bp, Glycine max
ttgaatcgtgaaaatgttcagaaaccagtacgacacggacgtgaccacatggagccctgcggggaggctgttccaggtggagtacgctatggaggcggtgaagcagggctcggcggcgatagggctccgatcgaagacccacgtggtcctcgcatgcgtcaacaaggccaactccgaactctcctcgcaccagaagaagatcttcaaggtcgacaatcacatcggcgtcgccatcgctggcctcaccgccgatggccgcgtcctctcccgctacatg

SEQ ID NO: 287253 - DNA, 269 bp, Glycine max
cttttaaatccttttgtaccctcaactccataagccactagtacctcacaatgcccattgtagcaacctctcttctcttctttcttcttaatttatgcctcagaggcacttatgctgactatggaggtggttggcaaggtggtcatgccacattttatggtggaggtgatgcatctggcacaatgggaggggcttgtggatatggaaatttgtacagccaagggtatggcactaacactgcagcactcagcactgctctattcaacaat

SEQ ID NO: 287254 - DNA, 273 bp, Glycine max
aaaatggtcaccatgtgctggaagatcagaacaatgctgaagcacagagtgtcacacctgtgaagaagtttggtacagaatctgatggcaaattaaggagatccttcattgaacgtcaacatgagaatgttgatgcacttgtcaactgtgttatgaaacatattggtttccatcatggaaagcctgttgctgcatttaccatttacaaatgtcttctccactggaaatcatttgaggctgaaagaacaagtgtatttgatcgtcttatccaga

SEQ ID NO: 287255 - DNA, 286 bp, Glycine max
  unsure (1)..(286): unsure at all n locations
cgncgaaacantggccggannaggaganggtcntgctatcggaatcgatctcggaancacctactcttgngtcggtgtgnggcaacatgaccgagttgaaatcatcgccaacgaccaanggaacagaacgacgccgtcttacgtcggcttcactgataccgagcgtctcatcggtgatgcngctaagaaccaagtcgccatgaaccccatcaacaccgtcttcggatgccaagaggttgattggtcgtagattcagtgacactctgttcagagtgagtcaaattgt

SEQ ID NO: 287256 - DNA, 233 bp, Glycine max
  unsure (1)..(233): unsure at all n locations
tgaatcgcgattnttnctnttgtgcggactgnnaagaagagagatcgaaaatggcgttggctttcgacgagttcggaaggcctttcataatcctgaaggaacaggagcagaagagcagacttcgaggtttggangctcagaaagccaacatctccgccggcaaagccgtccgctcgcatcctccgaanctccctcggccccaaaggcatggacaagatgctccagagccccga

SEQ ID NO: 287257 - DNA, 272 bp, Glycine max
  unsure (1)..(272): unsure at all n locations
cgcagcgaatcacacacactctgaacaacgcccaccatgcaggccagtnataggtttaacatcaattccccagcttgagcatctccaagccaaatatgttggaactggccatgccgatttgaacagatttgagtgggcagtgaacattcaacgagatagctatgcatcatatattggacactaccctttactgggattctttgctattgctgaaaatgaatctattggangacaacgctacagctttatgccagaaaangctcntgcttgng

SEQ ID NO: 287258 - DNA, 273 bp, Glycine max
  unsure (1)..(273): unsure at all n locations
gcacagcatcctcgtccacaagtccaacgaggacaagatcatgcttctcgattcccanaaaacttcatcgccgctagcggcgagcccggagacagggttcaattcactgagtacattcagaaaaacgtcgccttgtatcagttccgtaacggcatccctctnnnnnnnnnnnnnnnnnnnaatttcanacgtggcgaactnngccatggttctccgcaagaacccatantctgtgaacatccttcttgctggctatganaaagagacaggcct

SEQ ID NO: 287259 - DNA, 272 bp, Glycine max
  unsure (1)..(272): unsure at all n locations
cacaaggtcacaggaaggagagacagagccaagcctctgccattcaagatggattctcgtggttcatggggcttctctggagctaatgaagggaacccacagatcagtgccaagtttgtnncaccatgttatatgatgaacaagattcagattgatacccaactccctgtagttggtgaccagaaatgggtagtatggatatgttncttcaatgtccccatggcacccggtaagactngcnccatagttngcagttctcgaaatttctttcc

SEQ ID NO: 287260 - DNA, 284 bp, Glycine max
  unsure (1)..(284): unsure at all n locations
cgaatagctgctatcagcgaactggncgggtgggaagacagaacaacagtggaagatatggaccttgctgttcntgctaantcctaaggggatggaaaatntttgtaccttggtgacctccaggccaaaagtgnagcttcccagtactttgagagccttcagattccagcagcacagatggtcatgtggtcctgctaatttgttccgcaaaatggtgatggagattgtgaggaacaagaaagttaggttttggaaganagtgtatgtnatatacagctttttct

SEQ ID NO: 287261 - DNA, 282 bp, Glycine max
  unsure (1)..(282): unsure at all n locations
tgcaccaaaaccaacttggtcatggtcttcggagaaatcacgancaaggccaacgnttgactacggagaagnnatgcgntgaacacctggcaggnccatcggcttcgtctcaaatnangtgggactgccntgccgacaactgcaaggtcctcgtcaacattgagcagcagagccctgatattgctcagggtgtacacggccaccttaccaaaaaacctgaagaaattggtgctggtgaccagggtcacatgtttggcnatgccactgatgaaacccctgact

SEQ ID NO: 287262 - DNA, 279 bp, Glycine max
  unsure (1)..(279): unsure at all n locations
tctctgaccgtnttgttgattcaccatgctgtctggtgactggagaatacggttggactgcaaacntggaaaaggatccatgaaagctcaagccctaagggacaacagnatggcaggatacatcctcaannaagaagacaatgggagatcaaccctgagaacccaattatggaggagctcaggaatcgtgcggatgctgcacaagaacgacaaatncgtgaaggaccttgttctgttgctgttcgagactgctcttctcanttctggttncagccttga

SEQ ID NO: 287263 - DNA, 274 bp, Glycine max
  unsure (1)..(274): unsure at all n locations
cggccagatatcattcgagaagattatatgaatgaactgtgcattcttcaagatgatgttccttcattccccatgaaattgccttcagaatcatagaggaggatctgggtcaaccccttgaagctgttttcagcaaaatctcatcagagacantagcagctgcaagtntaggtcaagtttacagagctactttacgtgcaactggcgaggatgttgctatcaaggttcagaggccagggatagagcccattatatatcgagaccttttcctatt

SEQ ID NO: 287264 - DNA, 271 bp, Glycine max
  unsure (1)..(271): unsure at all n locations
aagaaaggggtggtggctgcttcgaaagcttaataatttgtttatttccagaacatcatagttttcgcagcagcaaactaacaaattactcatatcatataataagatggcccgttctctctcgcaagccaaacgtattggtgtccttgnngctcaatctatctccctaattcccgttcatcggcgaggttacgcagtggcatccgatgtatcggtaagagttggattgggtaatattgggcgaaggaatggaatcgtgggaggtgtagaa

SEQ ID NO: 287265 - DNA, 270 bp, Glycine max
aaagaatcaaagaaaggggtggtggctgcttcgaaagcttaataatttgtttatttccagaaacatcatagttttcgcagcagcaaactaacaaattactcatatcatataataagatggcccgttctctctcgcaagccaaacgtattggtgtccttgttgctcaatctatctccctaattcccgttcatcggcgaggttacgcagtggcatccgatgtatcggtaagagttggattgggtaatattgggcgaaggaatggaatcgtgg

SEQ ID NO: 287266 - DNA, 276 bp, Glycine max
  unsure (1)..(276): unsure at all n locations
caacaatgtcgaagcgaggtcgcggaggatcggcagggaacaagttccgcatgtcactgggtcttnccggtggcnggcgacgtgaantncgccganaacaccggcgcgaagaatctctacatcatatcagtgaaggggatcaagggaaggctgaaccngttgccgtcagcttgcgtgggtgacatggttatggacaccgtcaagaagggaaagcctgatctccgtaaaaaggtgctccccgccgtcatcgtccgtcagcgcaaccgtggcgccgaa

SEQ ID NO: 287267 - DNA, 278 bp, Glycine max
  unsure (1)..(278): unsure at all n locations
cgagcanctctcaagaagaaccctctcacgaaccttcaatgcgatgttgaagctcaatccctatgntaagacccgttaagagaatggctcttctngctgagaagcngcgcattgtggctaagaaggagaagcttcataagaagcgcaacattgtctccaaggaggaggcttctgctatcaaagctgctggaaaatcatggtatcaaactatggtgtcngactctgattangcganttngacactttnctaagggncngggttttncccagaaaaaaat

SEQ ID NO: 287268 - DNA, 279 bp, Glycine max
  unsure (1)..(279): unsure at all n locations
ctcgatcacttgtgggatgacaccgtcgccggtcctcgcccggagaacggccttggcaagctccgaaaagcaaccanaccnttccgntttccgatctgcntccggcaaggaatcagacagcggaagcgtggaaatcgtacggtgaagatttgccggaggatgcggtgagagtgacgcgaagtatcatgatcgtgaaaccacctggtggtaaccagagtccgagcggatccgctccggcttcccccgccggttctactcctccggtgtctcctttttcgg

SEQ ID NO: 287269 - DNA, 272 bp, Glycine max
  unsure (1)..(272): unsure at all n locations
ctttgtngttttatgtgtagattatcaacgatcgtnagactggaagatccaggggatttggattgttacnttcgcntcccgaggattcaatgagggatgcgatcgaagggatgaacggtcagaaccttgatggacgcaacatcactgtnaacgaagctcagtcccgcggaanccgcggtggaggcggtggcggttacgnaagtcgcggtggatacaaccgcagtggtggtgctggaggatacggtggccgtcgggaaggtgcatataaccgt

SEQ ID NO: 287270 - DNA, 276 bp, Glycine max
  unsure (1)..(276): unsure at all n locations
tatatccttcaacctctcatcattaggcattcagcaagcaaganaaaaaaatgggcaaaatccatgcttgttttngggtagcctnattggattatncccgtttcacaatcactacctatgccttctcaccttctggatggaccaatgcccatgccactttttatgggggtagtgatgcttcaggaactatggggggagcttgtgggtatgggaatctgtatgcaactgggtatggaactagaactgcagctttaagcantgccttatttaatgatg

SEQ ID NO: 287271 - DNA, 272 bp, Glycine max
  unsure (1)..(272): unsure at all n locations
ctgatgggactttatagtgctaagcagactgctattgtgagagcntctgatgatttttaccctcgtgatccttgnttcccataccatccatatttcttctgttgcatacaactcactattccttggagaattcatgcaacctgactgggacatgtttcatagtttacacccagcagcagattatcatgctgcagctcgtgcaattggtggatgtcctatttatgttagtgacaagccaggcaatcacaattttgatcttcttaagaagctgg

SEQ ID NO: 287272 - DNA, 268 bp, Glycine max
  unsure (1)..(268): unsure at all n locations
cnaaaccaagttaatgttgcaatcgcataataataaccatccaaagtttattgagaganattngcaagtngaaaagaaacatggcatctcatcaacaaaacaagcaagancttgatgaaagggcaaggcaaggagagactgttgtnccgggtggcactggtggcaaganccttgaggctcagcaacatcttgctgaaggaaggagcaggggagggaaaacaaggaaggagcagctgnggacagaagggtaccatgaaatgggccgcaa

SEQ ID NO: 287273 - DNA, 269 bp, Glycine max
  unsure (1)..(269): unsure at all n locations
cgaacttgacaaggaggtgaggcagattattaaggagaaagaagaagctgttcgcaaccaagactttgaaaaggctggagagctacgtgatagagagatggatcttaaggcacagatctcaacacttgtagagaaaggcaaggngatgagcaaggcagagactgaggcaggggatgaaggtcctattgtgactgangctgacatacagcatattgtctcatcctggactggtattcctgttgagaaagtctcaacagatgaatctgatc

SEQ ID NO: 287274 - DNA, 282 bp, Glycine max
  unsure (1)..(282): unsure at all n locations
cgagaagagagatggatccagacgcgttgggcaaaggcattcgtggagcactactanagcaccttcgacaccaacnaggaacggnttagcgaatctctaccaggagggttccatgctcactttcgaagggncagaagatccaaggcgcttccaacatcgttgcnaagctcanctccctcccttttcagcactgcnaccagtcaatctccanggtcgattgcaagccttnggggttnaacgggggaaatgccnggtnttcntnagggnaaatnttnngcgngg

SEQ ID NO: 287275 - DNA, 277 bp, Glycine max
  unsure (1)..(277): unsure at all n locations
cantttttctaagtttgcatgtaatgcggcataccatttgtgacagtnagttgagacctgtgggaacaaggattgtaatcnggttatttcnatcatcaatcacagcngtttgcccaattctgtgttggtttttgagggaagctcagctttggtacgtgcggtgcagcatataccctcaggtactgaggtgctgataagttacatacgagactgctgaaagcactatgactcgacagaaggctctcaaagagcagtacctattcacttgtacatgtcc

SEQ ID NO: 287276 - DNA, 266 bp, Glycine max
  unsure (1)..(266): unsure at all n locations
cgcagcataaccaggatgtgaactctttgggtttaatttcatccagaaagacaaatgaagctatcgagatccttaagctcatgtcttccacattcttgattgcactttgccaagcgattgacttgaggcatttggaggagaatttgaaaaactcggtcaagaacactgtgagccaagtttccaaaaggattcttaccacaggtgtcaatggagaactccatccttcangatttggtgaaaagggntctgcnaaangnggtggatag

SEQ ID NO: 287277 - DNA, 264 bp, Glycine max
  unsure (1)..(264): unsure at all n locations
ctcaggggttgatggatatgatgctgaaatccagaaatcagtaagacaagcagcacatgggcctgcnacttactagggaggttgctatgtctattgcaagcaaggcggtaaggcagatttttattaattacataaaacgtgcacgggcagctggaaatcgtaccgagtctgcgaaaganctgaagaagatgatagccttcaacaccttagttgtaactaatttggtggaggacattaaaggggagtcactgatanttccnngga

SEQ ID NO: 287278 - DNA, 277 bp, Glycine max
  unsure (1)..(277): unsure at all n locations
cgggcaaatgaattgctgtcccatcttgcagcacttcctgcacctgctcaagaaaagatgagtgcactgggttgaaagctccaatttgaatggaattgataaaggttttgcnaaagaagctgataagaagaagaactactttggctgctgctgttgctgaggagggatcccagctgttattgcttcatgcattgaagatttccttgcaagtctaantcccatggcttaaaggaggttccccnggntnaaanaatttccanggggggggggngggggg

SEQ ID NO: 287279 - DNA, 285 bp, Glycine max
  unsure (1)..(285): unsure at all n locations
cgacantccaacgtttggaactctcacccaaaaaactacggtcctggttctcgcacttgccgtgtgtgtggggattccanatggacccntcaggaagtatggccttatgtgctnnaggcagtgcttccgtagcaatgccaaggaaattggcttcatcaagtatcgntaaaagaggnanttgnncncctagggacnaantattggtgncnctggcgacaagntttttttnanggtggtttgcnggaagaaatggagaaanngggnttttggnaggngannnnnncc

SEQ ID NO: 287280 - DNA, 276 bp, Glycine max
  unsure (1)..(276): unsure at all n locations
gagggagatcctttcacgttcagggagggcaatgcgggaaccagattcggtttcgaagttctggggaagtggtgtgcganaagcacggnatagatccgacggggaagtangtcggaaactcagatctacaactncgagcgcgtganctgtactanaacgaagcttcctgcgggcggtttgtcccacgcgcagtgctcatggacctggagcccggaaccatggacagcntgcggactgggccgtangggcagatattccggcccgacaactncgtgt

SEQ ID NO: 287281 - DNA, 264 bp, Glycine max
  unsure (1)..(264): unsure at all n locations
ttttcgctgaccggtgcgcagtcgagcctccagaagacgaatcgaaaatgccgtcgcacaagacttcagaatccaagaagaagttggcgaagaagatgaggcagaacaggcccattccctactggatccgcatgaggaccgataacaccatcaggtacaacgcgaanccgtcactggcgtcgcaccaagcttggattctgaggtgtatgctctgcctaggttcaatttatccaattaattagtgttttattttcttgaggcaaa

SEQ ID NO: 287282 - DNA, 265 bp, Glycine max
  unsure (1)..(265): unsure at all n locations
cnacaatatcctctcatagtgctcttcttcttcttcattctcattntcaagatgtctttgctttcggatctcatcaanctcaatnctctcagaatccacagaaaagatcgttgctgagtacatatgggttggtggatctggtatggacctcagaagcaaagccaggactcttcctgggccagtgagtgaccctgcaaagcttccaaagtggaatacgatggctctagcacagaccaagctccaggggatgncagtnaagtcatcc

SEQ ID NO: 287283 - DNA, 287 bp, Glycine max
  unsure (1)..(287): unsure at all n locations
ccttganaggnaacaatataaagangctcagcatagttttgangtagcagctgaagcaggtcatgtgtattctgtggctggtgtngccagaaccaagtacaagcagggtcaaccatattcggcctataagttaattagttctctcatatttgagcacaaacctgctgggtggatgtatcaggagcgcgctctttacaacatggggagganccanctttgatttggatgttgcnnntgattggacccctcccttncatttccanntnagtatangaccctggcaaagg

SEQ ID NO: 287284 - DNA, 283 bp, Glycine max
caaggcagaagatgtcaaactcaaactttaaacttggcagcaatgctccaacggtgagctgggctgatccaaggaattctgaatcatctgcaatctctctggtaaaatcagtgtatgtaaagaaccttccagaaaacattactcaggatcgtctcaaggagctgtttgaacatcatggaaagatcacaaaagtggttctccctttgctaaatcgggtcaagaaaagagcagatttggttttgttcactttgctgaaaggtcaagtgccatgaaggctttgaag

SEQ ID NO: 287285 - DNA, 282 bp, Glycine max
catatctccatttccatttcctctctctcagtttccaagaatcttaagctatgggaaagtcttacccaaccgtgagcgctgattaccagaaggccgttgagaaggcgaagaagaagctcagaggcttcatcgctgagaagagatgcgctcctctaatgctccgtttggcatggcactctgctggaacttacgacgtgagctcgagaccggtggtcccttcggaaccataaagcacccctccgaactcgctcacggcgctaacaacggtcttgacatcgctgt

SEQ ID NO: 287286 - DNA, 274 bp, Glycine max
tacagttgtggagccatacaatgccactttgtctgtacaccaactggttgaaaatgcagatgagtgcatggttcttgacaatgaagcactttatgacatttgctttaggacattgaaactcagcacccctagctttggtgatctcaaccatctgatttctgcaaccatgagtggggttgcctgttgtctgaggtttctggacaactgaactctgacctcaggaagctggctgtcaatctgattccatttccccgtcttcacttctttatggtgg

SEQ ID NO: 287287 - DNA, 277 bp, Glycine max
  unsure (1)..(277): unsure at all n locations
cttcaacttaaccttttctactcataatctnaacaacttgcncanaacaagataaagaaagannaaaaagtgtgtgtgtgtgagacanagcaatggctggctcgtgggcacgccgttctctgattgtnctggctatcatttccttcggatgtttatttgcaatttccattgctaaggaggaagccacaaaattggggacgtcatcgggattgatcttggaacgacctattcatgtgttggtgtttacaanaacggccatgttgaaatcatagccaat

SEQ ID NO: 287288 - DNA, 243 bp, Glycine max
  unsure (1)..(243): unsure at all n locations
cccaaaaanaannaanaaanaaaagaannaaaagnaantcaannannannnnggcaactctgccggcactgncanngnttactacttgtcgtctcaagggccaactcatgatgagattgattttgaattcttgggaaacgtgagcggtgacccttacattctccacacaaacgtgtttaccaaaggccaagggaacagagacaannnnttgaatntctggttcgaccccaccagaaactnnna

SEQ ID NO: 287289 - DNA, 275 bp, Glycine max
  unsure (1)..(275): unsure at all n locations
ctgcgtttcggaagcagacacagatggctcgtacgaagcaaaccgctcgtaagtccacaggaggaaaggctcctaggaagcagcttgcaaccaaggctgcacgtaagtctgcaccaactactggtggtgtgaagnagccccaccgttatcgtcctggtaccgttgctcttcgtgagattaggaaataccagaagagtacgagcttttgatccggaagctccccttccagaggctggttcgtgaaattgctcaggacttcaagactgatctgcgtt

SEQ ID NO: 287290 - DNA, 275 bp, Glycine max
gcgttgccattctcatcctcttctttctctctctaccattgccatggatccctacaagcaccggccatccagcgccttcaattctcccttctggactacaaattctggtgctcctatttggaacaacaactcctctttaaccgttggagctagaggtccaattctgctggaggattatcatcttgtggagaagcttgcaattttgatagggaacgtatcccagaacgtgttgtccatgccaggggcgctagtgcaaagggtttctttgaggtcac

SEQ ID NO: 287291 - DNA, 277 bp, Glycine max
ctggatcattcggaattgttttccaggcgaagtgcttggagacgggggaggcagtggctataaaaaaggtcttgcaggacaggcgatacaaaaatcgtgaactgcagttaatgcgactgatggatcacccaaatataattaccctgagtaactatttcttctctacaacaagtagagatgaactttttctgaatttggtatggaatatgtccctgagacgatcttccgtgttataaagcactacagtagtatgaaacagagaatgcccctaatctat

SEQ ID NO: 287292 - DNA, 277 bp, Glycine max
  unsure (1)..(277): unsure at all n locations
gagctctacgccgacgtgactccgagcaccgccgagaacttccgcgcgctctgcaccggcgagaagggcgccgggcggagggcaagcccctccactacaaaggctcgtccttccaccgcgtgatcccgaacttcatgtgccagggcggcgacttcaccgccggaaacggcaccgncngcgagtcgatctacggcgccaattcgccgacgagaacttcgtgaagaagcacactggtcccggcatcctctccatggcgaacgccggtcccggaaccaac

SEQ ID NO: 287293 - DNA, 279 bp, Glycine max
  unsure (1)..(279): unsure at all n locations
tcgaagaaaatttgaggaacaagagtgaactgcttctcaaatccaacccagttcacaagaaggttccagtgtttattcacaatgagaagcccatagcagagtctcttgtnattgttgaatacattgatgagacatggaagaacaaccccatcttgccttctgatccttaccaaaganccttggctcgtttctggtccaaattcattgatgataaggtttttggtgctgcatggaaatccgttttcacagctgatgagaaagagcgtgagaagaatgttg

SEQ ID NO: 287294 - DNA, 284 bp, Glycine max
ctttgcacttgggaaatgaaggagaggcaacgttggagagctgaagaggatgctttattacgttcttatgtcaaacagtatggtcctagggaatggaatcttgtgtctcagcgcatgaacacatatcttaacagggatgctaagtcgtgcttggagaggtggaagaactacctcaagcctggcatcaaaaaaggctctcttactaagaagagcagcgccttgtcatccaccttcaagcaaaatatggaaacaaatggaagaaaatcgctgctgaagtcccaggg

SEQ ID NO: 287295 - DNA, 282 bp, Glycine max
  unsure (1)..(282): unsure at all n locations
cgcagaccgagctagctagctagcaagcaagcacagagatggaggcaaagcgacgccatgccctcatgtgcttggcacgtgtttcactacttcctctgcgctctaaccctatccgctgctcacggaagcaccacggttcaagacatcgcgaganagttgaaactcggggacaacgagcttctgcgcacggagaagaagttcaaggtttcatggagaattacgggaggagtatccacagaggaggagtatttgcgccgtttggggatttcgcccagaacatgg

SEQ ID NO: 287296 - DNA, 279 bp, Glycine max
  unsure (1)..(279): unsure at all n locations
cgattcgcaacattgaacaacatgcttctgacaatgtaaacaagatacttgtgggtaacaaggctgatatggatgaaagtaaaanggctgtgcctacctccaaaggtcaagcccttgctgatgagtatggtatcaagtttttcgaaaccagtgcaaagacaaacatgaatgtggaggaggttttcttttcaatagcaagagtatcaagcaaaggcttgctgacacagattctaaggctgaacctcagactatcaagattaaccaacccgaccagacagc

SEQ ID NO: 287297 - DNA, 277 bp, Glycine max
  unsure (1)..(277): unsure at all n locations
cgagctccaagtgggccatttttggtaagcagaactggcgatgcgggatgaaccggaagctgggttacggtgcccaactgcgcgctaacctagaccccacaaagggtnntggtcgattaagacagcaggacggtggtcatggaagtcgaaatccgctaaggagtgtgtaacaactcacctgccgaatcaactagccccgaaatggatggcgctaaagcgcgcgacctatacccggccgtcggggcaaggaccaagccccgatgagtaggagggcgcg

SEQ ID NO: 287298 - DNA, 276 bp, Glycine max
  unsure (1)..(276): unsure at all n locations
aagggttagatatatagaaaaacaaaggagaaaagataganatggagaactttccagttgttgacatgggaaacctgaataatgaagagagatcagcaaccatggagataatcaaagatgcctgtcagaactggggtttctttgagttggtgaaccatgggatatccatagagttgatgatggacaccgtggagaggagacaaaagagcactacaaaaagtgtatggagcaaaggttccaagaaatggtagcaagcaaaggcttggagtctgctca

SEQ ID NO: 287299 - DNA, 274 bp, Glycine max
  unsure (1)..(274): unsure at all n locations
ttgtctttctctctttccgcggcctagatctgagcagtttggaaaccctaactgctctcaccaacgacatcaccactctctccgatcaactacctctttcgtcgccctaagtcatggcaggaattgcacccgagggatcacagcntgatgctcgtcaatatgataccaagatgaatgagctgcttacgtccgatggtaggatttcttcacatcctacgatgaggtttatgacagttttgatgctatgggcttgcaagagaatctcctgagaggc

SEQ ID NO: 287300 - DNA, 277 bp, Glycine max
  unsure (1)..(277): unsure at all n locations
cgcagccaaaatatttgccaagcttcattagaaagcagtcggagactggtgctgatatagttacagggactcgttatgttaaaggtggtggtgtgcatggatggaatcttatgcgtaaactaactagcaggggggcaaatgttcttgcacaaacacttttatggcctggtgtctcagatttgacaggatcttttagacttataggaaatcagtgcttgaagatatcattagttgctgtgttagtnnnngatatgtctttcaaatggaaatgatagta

SEQ ID NO: 287301 - DNA, 276 bp, Glycine max
  unsure (1)..(276): unsure at all n locations
cggactttcaccaaggaatgcagctgttgtgatgctttctggtcaagtggctgatggatttgtcaccatatttgttggtgaactgatagacaggtttggacacttcaanatatggcatggtgctggatctttattggtggcaatttcattttcttctgtttttggtggttgtttaccatgcaaactgtntagttccaattcaggtacttttgaaactttgagttacagcatgtatgcagcaatcttcaatgtgggctgggccgctactcaggtttc

SEQ ID NO: 287302 - DNA, 276 bp, Glycine max
caaaaatgaagagcaccatcttctttgctctctttctctcttgtgccttcaccacctcatacctaccttcagccatcgctgatttcgtgctcgataatgaaggtaaccctcttgaaaatggtggcacatattatatcttgtcagacataacagcatttggtggaataagagcagccccaacgggaaatgaaagatgcctctcactgtggtgcaacctcgcaatgagctcgacaaagggattggaacaatcatctcgtccccatatcgaatccgttt

SEQ ID NO: 287303 - DNA, 273 bp, Glycine max
  unsure (1)..(273): unsure at all n locations
agagtacctatttgggaggatcgatatgcaactcaagctcgttgctggcaactctgccggcactgtcactgcttactacttgtcgtctcaagggccaactcatgatgagattgattttgaattcttgggaaacgtgagcggtgacccttacattctccncacaaacgtgtttaccaaaggccaagggaacagagacaacagttctatctctggttcgaccccaccagaaacttccacacttactccatcatctggaagcctcaacacatcata

SEQ ID NO: 287304 - DNA, 276 bp, Glycine max
cgggaaagggaggtaagaacaggaagaggggaaagaacgaggcggacgacgagaagcgagagctggtgttcaaggaggacgggcaggagtacgcgcaggtgctccggatgctgggtaacgggcggtgcgaggcgatgtgcatcgacgggacgaagaggctctgccacatccgcgggaagatgcacaagaaggtgtggatcgccgccggagacatcatcctggttggactcagggactaccaggacgacaaggctgacgtcatcctcaagtacatgc

SEQ ID NO: 287305 - DNA, 282 bp, Glycine max
  unsure (1)..(282): unsure at all n locations
gagagacagtgaacccaaaagcttaccctttggccgatgcgcaactcgcaataacaatcttggatcttgtgcaacaagctgccaactacaagcaactaaaaaagggtgctaatgaagcgactaagacactgaacagaggcatttctgagttcgttgtgatggccgcagacactgagcctcttgagattcttctccatcttcctctccttgctgaggataagaatgttccctatgtattcgttccatcaaaacaagcacttgggcgagctgtggagtcncacg

SEQ ID NO: 287306 - DNA, 278 bp, Glycine max
  unsure (1)..(278): unsure at all n locations
cangcaaagcaatggctacttcanagttgaaaacccagaatgtggttgtatctctctccctaaccttaaccttggtactggtgctactgaccagcaaggcaaactcagcggaaactgtttctttcagctggaacaagttcgtgccgaagcaaccaaacatgatcctccaaggagacgctattgtgacctcctcgggaaattacaactcaataaggtngacgaaaacggcancccaaaaccctcgtctcttggtcgcgccctctactccanncccancc

SEQ ID NO: 287307 - DNA, 207 bp, Glycine max
ggaaagcaaaaggagaaggtgaataacatggtgctgtttgatcagggcacctatgataagctcctttctgaagctcccaaattcaagctcatcactccttccattctttctgatcgtttgaggattaatggatcacttgcaaggaaggctataagagaattgatggctaggggttcaatcaggatggtgtctgcccatgcaagccag

SEQ ID NO: 287308 - DNA, 274 bp, Glycine max
cacacaactactacaagtacttccttacaatcaaaaccaacaacaactatggcaagttatcaaaagcactacgatgatcagggtcgcaaggttgacgagtatggcaacgttgagaagcaaaccgacgaatacggcaaccctgttcatgctgctagtgtcacctatgtagccaccagaactgctgctggtggttacaggatgacattaataagcaacatgataccaccaatgcctacggcgtagacactggtagacagcattctagtggtggcta

SEQ ID NO: 287309 - DNA, 274 bp, Glycine max
attatcctaagtctttgggaatagtgctgcaatggcttcaagtcaggaggaggtgacccttttgggagctactggaagcccatttgtgtgcagggttcatattgccctcaagttgaagggagttcaatacaaatatgtcgaagaaaatttgaggaacaagagtgaactgcttctcaaatccaacccagttcacaagaagattccagtgtttattcacaatgagaagtccatagcagagtctcttgtgattgttgaatacattgatgagacatgg

SEQ ID NO: 287310 - DNA, 279 bp, Glycine max
  unsure (1)..(279): unsure at all n locations
ccagccccatcatgggcttcagagaagcaagcggctcttgccgtcactccctctgatgctgatgctcctaccatatttgacaagatcatcaatanggagattccttctactgtggtttatgaggatgacnaggtgcttgccttcagggacataactcctcaagctcctacacatattcttatcattcctaaattcaaagacggttaagtggtctatccaaggctgaggagaggcactttgagattcttggccgccttctgtacactgccaagctggttg

SEQ ID NO: 287311 - DNA, 275 bp, Glycine max
  unsure (1)..(275): unsure at all n locations
cgtgagagccaaaagccgaagaaagggaagatggcgctatggatggaaaagggttcagagccnttaaccgaaaccgagaaggcagaccttgaagccattgctgcactcaaagagtctgcagcctttgaattcaaggaaaagggtaatcaatatgtgaagatgggcaagaagcattactctgatgccattgattactacacgagggcaattgatcagaaagccttgagtgactctgagacctctattctctttgcaaatagagcccatgtgaattt

SEQ ID NO: 287312 - DNA, 265 bp, Glycine max
ctcaagaaccccttgctcgtcgattccattgtggagaaggccggcgtcaagagcaccgacgtcatcctcgagatcggtcccgggaccggtaacttgacgaagaagcttctcgaagccggcaagaaggtcatcgccatcgagatcgatccccggatggttctcgagctccagagacggttcagggtaccctcactcaatcgcctcacggtatgaaaaaaacaacattttccagaatagttatttacaacttattgaattatgtgtt

SEQ ID NO: 287313 - DNA, 274 bp, Glycine max
  unsure (1)..(274): unsure at all n locations
cgngatttgagaaggaagctgctgagatgaacaagaggtctttcaagtatgcctgggtgcttgataagcttaaggctgagcgtgaaagaggaatcacaattgatattgccttgtggaagtttganaccaccaagtactattgcacagtcattgatgcccctggacacagggatttcatcacgaacatgatcactgggacatcccaagctgactgtgctgttcttatcattgattccactactggtggttttgaagctggaatttcaaaggatgg

SEQ ID NO: 287314 - DNA, 275 bp, Glycine max
  unsure (1)..(275): unsure at all n locations
cggaaatgtcgggatcggaggacgagggaggagaagagtacctcttcaagatcgtcataatcggagactctgcggtgggcaaatccaaccttctctcccgctacgcccggaacgagttcaacatgcactccaaggccaccataggtgtcgagttccagactcagtgcttggaaatcgactccaaggaagtcaaggctagatttnggacaccgccggccaagagcgattccgcgccgtcacctccgcctactaccgcggcgctgtcggcgccctca

SEQ ID NO: 287315 - DNA, 275 bp, Glycine max
  unsure (1)..(275): unsure at all n locations
cacatgtatttcgtgtcagtntttccagtncccccaagtacatctagtcatggatctgcacctgatgactgtgatgctttgggggatgtatacatatggggagangttacctgtgaatgttaaagttggtgctgataaaaatgtaaattatgtcagccccagggcagacntacttctccccagaccactggaatccagcgtagttttagatgtacatcatatagcatgtggtgttagacatgcttctctagtcactaggcaaggngaagttttna

SEQ ID NO: 287316 - DNA, 270 bp, Glycine max
cacaatcgataatgtcaaagcaaaaatccaggacaaggagggtatcccaccagaccagcagaggttgatatttgctgggaagcaattggaggatggaaggactcttgctgactacaacattcagaaagagtctactcttcaccttgtgttgcgtcttcgtggtgggttttaaaagtctgagaatgttctgtagggtcttgaagtctaagcatgtggaagttccgaagatctttgggtttttttttttaatgttcctgaaagtttactctt

SEQ ID NO: 287317 - DNA, 272 bp, Glycine max
cgattcgcttactcttattctcctgcttctgcttccaccatttttcgtttcccgaaatacccttcgaaacacactaaattctccttgctaccactctcattctcaacgatggaagctcctccagaaggttatcgtaggaacgttggtatctgtctcatgaacaatcacaaaaagattttcgcggcttcgaggctcacattcccaatgcttggcaaatgcctcagggtggtattgatgaaggtgaggatccaagaaatgcagctatcagggag

SEQ ID NO: 287318 - DNA, 271 bp, Glycine max
aaaatggcgggtggtggaaaggtttcgttcaaagtcacactcacctccgatccaaaattacccttcaaagtgtttagcgttccagaggctgcgccttttactgccgttctcaaattcgccgccgaagaattcaaagtcccgccccagaccagcgctatcatcaccaatgatggtgttggcataaatccccagcaagcgcaggcaatgtcttccttaaacatggttcagaattgcgcctgattccgcgcgatagggttggtgccttttagat

SEQ ID NO: 287319 - DNA, 274 bp, Glycine max
  unsure (1)..(274): unsure at all n locations
attctcatatcctcaatcaccccccctcgcactcgctcttcccttcctctggtggcgacaatgtcgactcctgctaggaagaggctgatgagagacttcaagangctgcaacanganccgcctgcngggatcagtngtgcnccccaggataacaacataatgctgtggaatgccgacntatttngtcctgatgatatccatgggatggaggcacgttcaagttgacactccaatttactgaggactatccaaataaaccaccgactgtacgatt

SEQ ID NO: 287320 - DNA, 274 bp, Glycine max
  unsure (1)..(274): unsure at all n locations
cntgctgcaaggngttttcgaattcaatgtaacaagtgggctgtgatagtgcgtttactgttgggagaaatacctgagcggactgtcttcatgcagaaaggaatggagaaagctttaaggccttactttgagcttacaaatgctgtgcggattggagacttggaactgtttaggaatattgcagacaagtttgccatacctttaatgcagacagaacccataatttgattgtncgtttgcngcataatgtcatcaggactggtttacccaacat

SEQ ID NO: 287321 - DNA, 280 bp, Glycine max
  unsure (1)..(280): unsure at all n locations
ccntgcactatctggaggacatacactggggagagcacatccagagagatcagggtttgatggcccttggacagaggaccctctgaagtttgataactcatactttgtggaaccttganagaagattctgctgggctgcttaaacttccaacagacaaggctttattggaggatgctgaatttcgccgttatgttgagctaatncaaaggacgaggatgcattttttcgagattatgctgaatcacataaganactttcagagctaggctttgtgccant

SEQ ID NO: 287322 - DNA, 265 bp, Glycine max
  unsure (1)..(265): unsure at all n locations
aagagagtgtgaacaacatgcaatgtctatgtccaagcttgacttcaactctcaagaagaaaaggatacagtggagcatgtttttcaaaatgcagtgctctgtttgaatgaagaagacaggaacttacctgcttttggctgatgttgccacttctncagcgaggaattgctgtccatcattctggacttcttcctgtcatcaaagaattggtcgagcttcttttccaggaaggtcttgnaaaagccctcttcgctactgaaacat

SEQ ID NO: 287323 - DNA, 260 bp, Glycine max
  unsure (1)..(260): unsure at all n locations
cttacggaaaatgaatcatgcaaatattgtgaagctgaaggaagttatacgagaatgtnacactctgtgccttgtttttgagtacatggaatacaacctgtatcaacttgtgaaaaacagggaaaagctgtttctgaaaatgaagttagaaattggtgttttcaagttttccaaggtttagcttacatgcaccagcgtggatactttcatcgtgatcttaagcctgananctngctggtcaccangggtgncntcaagnt

SEQ ID NO: 287324 - DNA, 251 bp, Glycine max
  unsure (1)..(251): unsure at all n locations
ccattctctctgtgtatttccctacctctcccttcaagatgcagatcttcgtcaagaccctcaccggcaagaccatcacccttgaggtggaaagctctgacnccatcgacaacgtcaaggccaagatcaggacaaggaaggaatccccccggaccagcaacgtctcattttcgccggaaagcaacttgaggacggccgtacccttgctgactacaacattcagaaggagagtactcttcacctcgtcctcc

SEQ ID NO: 287325 - DNA, 260 bp, Glycine max
  unsure (1)..(260): unsure at all n locations
gaagcacccaaacatcgtgcagcttcacgaggtcatggcgagcaagtccaagatctacatcgccatggngctcgtccgcggcggcgagctcttcaacaagatcgccagangccgtctccgggaggagatggccgactttacttccaacaactannctctgctgtggacttctgccacagccgcggcgtctaccaccgtgacctcangccagagaaccttctcctcgacgacgacggcaacctcaaggtcaccgacttcgg

SEQ ID NO: 287326 - DNA, 257 bp, Glycine max
  unsure (1)..(257): unsure at all n locations
ggctctcctccattttctcctcctccccctttngtcnctccacctccaatttctgccccagggggtaatggtgccactggagcaatagccggaggtgttgccgctggtgctgctctattatttgctgcaccgcaattgcatttgcctggtggcgtcgaaggaaaccacaagaatttttctttgatgtncctgctgaagaggaccctgaagtccatctgggacagcttaagangttctcactgcgagaactgcaagtt

SEQ ID NO: 287327 - DNA, 255 bp, Glycine max
  unsure (1)..(255): unsure at all n locations
ggacgagaagacccttctcttcggtgacaagccagtcactatttttggacacagaaaccctgaagagatcccatgggggtcaactggagctgacatcattgttgagtccaccggagttttcaccgataaggcaaggccgccgcacatttgaagggtggtgcaaagaaggttattatttctgcccccagtaaggatgcccccatgtttgttgttggtgtcaacgagcacgagtacaagccaganttgntattattc

SEQ ID NO: 287328 - DNA, 255 bp, Glycine max
ggcgagatggcgttgctggttgaaggtctcgggattgggggtgatacatctatagaagagtacataattggccctgctgacaaggtggctgatggtcatgaacatgcaacagagaaagataaaattcgatatatggatcccaagcaggcctctcttggttagcaaaacctgtcactggacagagttctattggccttgcatcacgccatggaagcatcatcaaccaaagcatgccactcatggatcctctagtga

SEQ ID NO: 287329 - DNA, 248 bp, Glycine max
  unsure (1)..(248): unsure at all n locations
ttctccattcccnctctcactcctccatctacgtttctnaaatcatttccttctttctctctttctttatcttctcattttcctcatnacacnctanntngnctctcaacttttctctnattaacatagttcacatattatatcatcacatancatagtgatatattatatcatatcacaatgtgtggcatacntgctgtgcttggttgctctgattcatctcaagccaaaagggttcgcgtccttga

SEQ ID NO: 287330 - DNA, 260 bp, Glycine max
gggagtcagagaaaccctaggtaagaagaaaagatgccggctggtcatggtttgagatcccgcaccagagattccttctctcgtcctttcaggaagaagggaaccatcgccctcaccacatacctgagaaccaccacgtcggcgactatgttgacgtcaaggttaacggtgccgttcacaagggaatgccccacaaattctaccatggccgcaccggacgcgtctggaatgtcaccaaacgtgctgttggcgtcgaagtc

SEQ ID NO: 287331 - DNA, 255 bp, Glycine max
  unsure (1)..(255): unsure at all n locations
ctcttgcggctagggttttagcgcanttncttctagatttaagnnagatgggtaaggnaaaggttcacatcagtattgtggtcattggccatgtcgactctgggaaatccactaccactggtcacctgattacaagcttggaggcattgacaagcgtgttattgagaggtttgagaaggaagctgctgagatgaacaagaggtctttcaagtatgcctgggtgctggacaaacttaaggctgagcgtgaaagagg

SEQ ID NO: 287332 - DNA, 255 bp, Glycine max
  unsure (1)..(255): unsure at all n locations
tcgctgcttcttcagccactccgcacctcgcagcctctgtgccctcaacaaccatggctgaaatcgaaactaccgttccagatcccacccaaatcgacgtcaaactcttcaatcgctggagcntcgaggtgtngaggttaatgatatgtctctggctgattacattggagtgtccccatcaaagcatgctanatatgnncctcacactgctggtaggtactcagtgaagaggttcaggaaagcgcagtgccccat

SEQ ID NO: 287333 - DNA, 255 bp, Glycine max
  unsure (1)..(255): unsure at all n locations
ccganaagatgggtgtnctgatgtaacaacgaggcagaattggcaaattcgtggtgtggtgctacctgatgtgccagacattctcaaggncctcgatgaggttggattgactagtcttcagagtggaatggcnatgtgaganaccctgttggnaaccctcttgcaggcattgacccagatgagattgttgatacacgaccttangacaacttgttntctcaattcatcactgccaattcangcggcaacccagcc

SEQ ID NO: 287334 - DNA, 253 bp, Glycine max
  unsure (1)..(253): unsure at all n locations
cgnattgcagagcgagcctaaatggaagcaattgggaganttagctatgtctactggaaagttaganatgnctgaggaatgtttgangtatgcaatggatttgagtggcttgttactgctatattcttcttaggagatgctgaaggaatatcaaaacttgcaatccttgccaaggagcaagggaaaaacaatgttgcattcctttgcttatttatgtngggtaaatnagaagactgccttcanctgttggtaa

SEQ ID NO: 287335 - DNA, 252 bp, Glycine max
  unsure (1)..(252): unsure at all n locations
ccntacacaagantttgaagagtgggaacgtgcttttggatggcanttttagggctaaagtttcgaatttgggattggcaaganctgtggaggatcacggggatgatggggggtttcaattgacaaggnatgtggtggggactcatgggtacatggcacctgagtacattgagaatggtttgattactccaaagatggatgtttttgcgtttggggttgtgcttttggagcttctttcggggagagaagctg

SEQ ID NO: 287336 - DNA, 248 bp, Glycine max
  unsure (1)..(248): unsure at all n locations
gtncttatatgaagcattcccggttganagccatcttcatcacttcttgcatgataacttgaacgctgaaattgttgctggaattattgagaacaagcaagatgctgtagattatcttacatggaattcatgtacaggcggctcacgcagaatcccaattattacaatttacaaggagttagtcacagacatctttctgatcacctctcagagatggtggaaaatactttgagtgatttagaagcggg

SEQ ID NO: 287337 - DNA, 246 bp, Glycine max
  unsure (1)..(246): unsure at all n locations
cntacacaagantttgaagagtgggaacgtgcttttggatggcacttttagggctaaagtntcgaatttgggattggcaaganctgtggaggatcacggggatgatggggggtttcaattgacaagcatgtggtggggactcatgggtacatggcacctgagtacattgagaatggtttgattactccaangatggatgtttttgcgtttggggttgtgcttttggagcttctttcggggagagaa

SEQ ID NO: 287338 - DNA, 255 bp, Glycine max
  unsure (1)..(255): unsure at all n locations
tcacttggaagctgttaatccagttgtngttggaactcgtgccaagcagtattactcaaatgatgtggatagaacaaagaacatgggtgtgctgattcatggagatggaagtnttgctggacagggtgtgtctatgaaaccctgcatttaagtgctcttccaaattacactactggtgggacgattcacatcgtgtttaataatcaggttgcatttacaactgatccaacgtctggcaggtcttcacaatattgc

SEQ ID NO: 287339 - DNA, 250 bp, Glycine max
  unsure (1)..(250): unsure at all n locations
cnccacagaaggncaagcgtttcagtggctccgtcaagttgccccacatccctcgccccaagatgaaaatttgcatgcttggngatgctcagcatgttgaagaggcagagaagataggactggactgatggatgtagaagccttgaaaaagctaaacaaaaataagaagttggtgaagaagctagctaaaaaataccatgcttttttagcatctgaagcagtcattaagcagattcctcgtcttttgggt

SEQ ID NO: 287340 - DNA, 245 bp, Glycine max
aagccgtcgctatcctagtctcttcttcccctctacccatttcagtttcaggatggaatctcaggtgaagcacgcccttgttgtcaaagttatgggtcgtactgggtctagggggcaggtgactaggttagagtgaagtttttggatgatcaaaaccgacacatcatgaggaacgtgaagggacccgtgagagaaggagacattctcaccctacttgagtctgaaagagaagcaagaaggttgcg

SEQ ID NO: 287341 - DNA, 263 bp, Glycine max
  unsure (1)..(263): unsure at all n locations
agaacacggtctgggttaaagagatctttggtcggcagaactgtctaagcttgctgctaatgccttcttagcacaaaggatttcatctgtcaatgccatgtcagcactttgtgaggctactggggcaaacgttcaacaggtgtcctattctgttggtacagactcaaggattggaccaagtttctcaatgcccatnntggnttcngtnnatccgcttccnaaaggntancttgaacctggttaanncnggaaanncnaaggcc

SEQ ID NO: 287342 - DNA, 264 bp, Glycine max
  unsure (1)..(264): unsure at all n locations
gagttctcaaaccaaaggtcactcaggtacaccagcatgattttatcaggggtcgttttgccggttttgacaaagactctgctattgtcggttggttgctatcctttttaaagcagttttatggatctgtgacaaaatcagattatgtgacattgcgacatgggttcattatgacccacangcaggacaaatccaaagtttaattttcacaagtacatgattcgtgccctcgaagatgatttcaagcangttgttggtataagt

SEQ ID NO: 287343 - DNA, 209 bp, Glycine max
gggtttttgtgatctgcaagctacgatgggtaagggaacggggagtttcggtaagagaaggaacaagacccacaccctctgtgtgaggtgtggccgccgcagtttccacctccagaagagtcgttgccccgcgtgcgctttccccgctgcgcgcaccaggaaatataactggagcgtgaaggccattaggagaaagaccaccggaattg

SEQ ID NO: 287344 - DNA, 263 bp, Glycine max
  unsure (1)..(263): unsure at all n locations
gggtttttgtgatctgcaagctacgatgggtaagggaacggggagtttcggtaagagaaggaacaagacccacaccctctgtgtgaggtgtggccgccgcagtttccacctccagaagagtcgttgcgccgcgtgcgctttccccgctgcgcgcaccaggaaatataactggagcgtgaaggccattaggcgaaagaccaccggaactngaaggacgaggtacttgcgtaacgtgccccgtagatttaagagtggcttcagag

SEQ ID NO: 287345 - DNA, 262 bp, Glycine max
ggctcccaaaatttgtcagatctgaaggaaccttagggctgtacaaggggttagtgcctctctggggacgacaaattccatacacaatgatgaagtttgcttcttttgagaccattgttgagctgatctataagcatgccatcccaacaccaaagaatgagtgcaccaaaagcctgcaacttggtgtcagttttgctggtggatatgttgctggtgtactttgtgcaattgtgtctcatcctgctgataatcttgtctcttt

SEQ ID NO: 287346 - DNA, 269 bp, Glycine max
  unsure (1)..(269): unsure at all n locations
ggncaacagtgagaacaccattgaattttgattctagcaagcagagcttttgtcaattttctattgaccttctcggtggaggaattttagtggacaaaactggagattggatcacacttatacaaaattctccaattagtaacttgttgagagttgctgcttggaagaaaggctntttaatggtcaagattgtgatgtctgggaatgcagcagtcaaaaggngtgattgggcctcattggtacaagtgtttttaacaaacngccacagt

SEQ ID NO: 287347 - DNA, 259 bp, Glycine max
  unsure (1)..(259): unsure at all n locations
gagactcaggcgctgctgcccttcagtccttcagcaatggtttacgtgaagtcacagaaatcaaaagcctacttcaagaggtatcaagtcaagttcaagagaagaagagagggaaaaaccgattaccgtgccaggattcggttgattaatcaggacangaacaaatataacaccccgaaatatcgctttgttgttcgtttcagcaacaaagcacttgttgcacaaatnatatctgctagcattgctggcgatcttgttc

SEQ ID NO: 287348 - DNA, 266 bp, Glycine max
gttgcttgagaatttgacacaggatgatttccgacagagtctacctagattccaacctgaaaatttggagcagaataagactatattcgagagggttaatgaactggctgcaaaaaagggatgtactccatctcaacttgcattggcctgggttcatcaccaaggaaaagacgtgtgccctatacctggaaccaccaagattgagaactttaatcagaacattggggcttgtcagtcaaactaactccagaagacatggcagagct

SEQ ID NO: 287349 - DNA, 259 bp, Glycine max
  unsure (1)..(259): unsure at all n locations
tcggccagcaccaacagcatcggcggcgacagttcactctccgacaacaacacttccgcggcgaaaaatgtctctggtggcgaacgaggatttccagcacattctgcgtntnctgancaccaacgtggatgggaagcagnngataatgttcgctatgacctccatcaagggtattggaaggagattcgccaacatacgcttgcnaganggccgatgttgncatgaacnaaagggctggtgagttgantgctgnngagtt

SEQ ID NO: 287350 - DNA, 260 bp, Glycine max
  unsure (1)..(260): unsure at all n locations
cncatggtttgtctctcaggcttcattgcaaaacagagatgtttctagcagtggacgggtagtttccatcagagctcaagtcaccactgaggcaccagccaaggttgaaaaagagtccaagaaacaggatgaaggtgtggttgtgaacaagtttaaacccaagaccccttacattggtagatgcctgctcaacacaangatcaccggggatgatgctccaggnganacttgggcacatggtcttcagcaccgagggagag

SEQ ID NO: 287351 - DNA, 258 bp, Glycine max
  unsure (1)..(258): unsure at all n locations
gttgataagcctgagtacaagtacactatagctatgctcgggtatggagaggagcacgagacaactgtgttggagttgacatataactatggtgtgactgaatactctaagggaaatgcttatgcacagattgccattggtactgatgatgtatatnagagtgctgaggtagttaaccaagtcataaaagaggttggngggaagattactcggcaaccagggccaattcctggcctaatacaaaaaccacttcgtttt

SEQ ID NO: 287352 - DNA, 256 bp, Glycine max
  unsure (1)..(256): unsure at all n locations
cgnggaagccacatagagacacaatacagagtgagttgttgctccttcgccacaactctctgccaacatgggtatctccagagattctatgcacaagaggcgtgccactggtggcaagaagaaggcctggaggaaaaagagaaagtatgcccttggtcgccagcctgctaacactaagctgtcaagcaacaagacagtcaggaggatccgtgttagaggtggncngtgaaatggngggcntgagattggatactgg

SEQ ID NO: 287353 - DNA, 262 bp, Glycine max
  unsure (1)..(262): unsure at all n locations
gggcatgggtgatngtgancaaggttttgagtaggataaagnngccagtgcaattcctagntgtgactacactctcacagtacagaaaagatgcacatcctgaaggctacagtggggntatgccaactgattgcagccattggtgtcttccaggactgcctgatacatggaatgtgcttctccatgctgctttatttgactganggngaggnaccagctagctngtgacttgccaatttgtttcttagaggaanccaatngt

SEQ ID NO: 287354 - DNA, 260 bp, Glycine max
  unsure (1)..(260): unsure at all n locations
cncatggtttgtctctcaggcttcattgcaaaacagagatgtttctagcagtggacgggtagtttccatcagagctcaagtcaccactgaggcaccagccaaggttgaaaaagagtccaagaaacaggatgaaggtgtggttgtgaacaagtttaaacccaagaccccttacattggtagatgcctgctcaacacaangatcactggggatgatgctcnaggagnaacttggcacatggtcttcagcancgngggagaga

SEQ ID NO: 287355 - DNA, 160 bp, Glycine max
  unsure (1)..(160): unsure at all n locations
cntctcatgaacatgccaaatgctgttctttcaatgtggagatattttgttggagatctcgtctttgaagtttctaagatgacttctccctacattaactgtacagtctctttcttcatagcatttggaantttggctgatgacaccatcaattttgagg

SEQ ID NO: 287356 - DNA, 258 bp, Glycine max
  unsure (1)..(258): unsure at all n locations
cntacgagaaagttgccacagcatttaaattggaggaagatgtagtcgttgcaaatctggatgctgataaatatagggatctggctgaaaagtacgacgtgagtggatttcctaccttgaagttcttcccaaagggcaacaaagctggtgaagactacggaggtggaagagacttggatgactttgtggcttttatcaatgagaaatctggagcaagtcgagatggaaaaggacaacttacttcccaagctggtatag

SEQ ID NO: 287357 - DNA, 253 bp, Glycine max
  unsure (1)..(253): unsure at all n locations
aagctcatcctagagttttaannatggcagcagcctcctccatggctctctcttccccatccttggctggcaaggccgtgaagctgggcccatcagcccccgaagtcgggagggtcagcatgaggaagaccgtcaccaagcaggcctcctccggaagcccatngtacggcccagacgcgtcaagtacntgggcccattntctggcgagcncccgtcctacctcatggngagttcccaggnnatanggctgggc

SEQ ID NO: 287358 - DNA, 259 bp, Glycine max
  unsure (1)..(259): unsure at all n locations
cnccaccactggtggttttgaagctggtatttctaaggatggacaacactcgtgagcatgctcttcttgctttcacccntggtgtgaagcagatgatctgctgctgtaacaagatggatgccactaccccgaagtactctaaggctaggtatgatgaaattgncgaaggaagtctcttcctacttgaagaaggttggttacaacccagacaagatnncattgtgcccatctctggtttcgagggtgacaacatgattga

SEQ ID NO: 287359 - DNA, 259 bp, Glycine max
  unsure (1)..(259): unsure at all n locations
cannacaaccttctttctttcaggttcttgatcagtgtcaaaaccanaagggtggttgcaaattgcantggctaagcatgatgttgagggtngttccttcgctgcaaaggactaccatgatcctcctccagcaccattgattgntgctgaggaactcacacagtggtccttctacagggcttncattgctgagttcattgccacaatgctcttcctttacatcacagtgcncaatgtgattggttacaagagccagant

SEQ ID NO: 287360 - DNA, 263 bp, Glycine max
  unsure (1)..(263): unsure at all n locations
catctttcaatttcaatcaacggttatacccttttctatttgagcatcatcatgtccaccgcagcgcagcccaaggccaagaaaacggcgtcgtccaagaagccccnntcccatcctaccttcgccgcgatgatagcggnggcgatagcgcntcngaaggngagaaccggttcgagccaatacgcgataaccaaattcatcganggcangcaccaggagttgcctccaaactnacaanangcttgttctcgttcatctcaaga

SEQ ID NO: 287361 - DNA, 258 bp, Glycine max
  unsure (1)..(258): unsure at all n locations
catagagacacaatacagagtgagttgttgctccttcgccacaactctctgccncacatgggtanctccagagattctatgcacaagaggcgtgccactggtggcaagaagaaggcctggaggaaaaagagcccgtatgagcttggnngccagcctgctaacactaagctgtcaagcaacaagacagtcaggaggatccgtgttagaggtgganatgtgaatggagggcntgagattggatatggaattatcctgggg

SEQ ID NO: 287362 - DNA, 278 bp, Glycine max
  unsure (1)..(278): unsure at all n locations
cactcttcttctcttgcggctagggttttagcgcanttcttctagatttaaggaagatgggnaaggaaaaggttcacattncctattgtggttattggccatgttgactctgggaagtccactancactggccacctgatctacaagcttggaggcattgacaagcgtgttattgagagatttgagaaggaagctgctgagatgaacaanaggtctttcaagtatgcctgggtgcttgataagctaaggctgagcgtganagaggaatcacaattgct

SEQ ID NO: 287363 - DNA, 274 bp, Glycine max
  unsure (1)..(274): unsure at all n locations
gntcaatcctggtatttcaggttctcgtcttttgggcaccattcctcagtccatttcacagcaaantgtttggaatnaaatggcaacagtgagaacaccattgaattttgattctagcaagcagagcttttgtcaattttctattgaccttctcggtggaggnttctnagtggacaaaactggagattggatnacacttntacaaaattctccaattagtaacttgttgagagttgctgcttggaagaaaggctgtttaatggtcaagatgtga

SEQ ID NO: 287364 - DNA, 274 bp, Glycine max
  unsure (1)..(274): unsure at all n locations
cnaganagaatttccttaatactcatctcaaattgccatccttaaactgtcggagttatgcatacttcctctgcggttattgggccaatgatgatagtgttcgcagtgcactgcatatccgtaagggaactataggaaaatggcgtcgctgtaccttcaatatacctaacaaggaggacatctcaagcagctatgagtatcatgtaaatctcagtagaaaaggctatcgtntcactgatatacagcggggatcatgacatgaaaattccttctt

SEQ ID NO: 287365 - DNA, 274 bp, Glycine max
  unsure (1)..(274): unsure at all n locations
tcgagctgcttncgcggcgagagcgggtcgtcgcgtgccggtcgggggacggattgggaacgggcccttcggggcctcttccccgggcntcgaacagtcaactcagaactggtacggacaaggggaatccgactgtttaattaaaacaaagcattgcgatggtccctgcggatnttgacgcaatgngatttctgcccagtgctctgaatgtcaaantgaagaaattcaaccaagcgcgggtaaacggcgggagtaatatgatctcttaaggtag

SEQ ID NO: 287366 - DNA, 279 bp, Glycine max
  unsure (1)..(279): unsure at all n locations
agagagaganaagcgtgaatcatgtcggacgaagagcatcacttcgattctcaggcggatgcgggagcgtccaagacgtatcctcagcaggctggtaccattcgcaagaatggctacatcgtcatcaaatccaggccttgcaaggttgtagaggtctctacgtcaaagacaggcaagcatggacatgcaaagtgtcactttgttgcantgatatttttaatgggaaaaagcttgaagatattgttccatcatcccacaatgtgatgttccacatgtgaa

SEQ ID NO: 287367 - DNA, 264 bp, Glycine max
  unsure (1)..(264): unsure at all n locations
gagcttctagcattgtgatgttgattgcatatgttgtcncacattgtctttcaactgtggacacacagggagttatttgaagaagaagatgacggtaaagatggcgaggatggttcanaagaacaagctgtgattggattatggagtggcattgcttggttggttggaatgactgtattcattgctgtgttgtctgaatatgtggtggatacaattgaggagcatcagattcatggggtttgtcgtgagcttcctaagcataat

SEQ ID NO: 287368 - DNA, 272 bp, Glycine max
tagatctaacaaccacttatcccctttctccttctaacgagtgaggaaaaatggcgcgtaagaagatcagagagtatgactcaaagaggttgttgaaggagcactttaagagactctctggcaaggagttgccgatcaagtctgcacaaattaccgcatcaactgatttcactgagctacaagagaaggaaccctggctttcatcttctaaattggttgttaaacctgacatgttattggaaagcgtggcaaaagtggtttggttgcctgaa

SEQ ID NO: 287369 - DNA, 274 bp, Glycine max
  unsure (1)..(274): unsure at all n locations
cgatcacaaaaatggcggcgaaacttcaaatatttacgggattgccccccgcgccatttcaatcttcttcttcctccactctctgcgtactcaagaagcctctcactacctccttcttcggcaccgcgcgagtggaagttctgaaacttagagtgatgaggattgtgaagcctacgcgtggcggaggccntctcggtgctcgcatgaacctctttgacaggttcgccagagttgtgaagtcgtacgcaaacgctgtcttaagttcgtttgaaga

SEQ ID NO: 287370 - DNA, 273 bp, Glycine max
tattttttgggaatgttcttagtgctaatttggggcaagctcctgcaagacaagctgctcttggagcaggaatatccaattcagttatctgcactaccgttaacaaagtttgtgcatcaggaatgaaagctgcaatgcttgctgcacagagtattcaattaggcacaaatgatgttgttgtggctggtggtatggaaagcatgtctaatgtacccaagtacctggctgaagcaaggaaaggatcacgccttggacatgattcacttgttgatg

SEQ ID NO: 287371 - DNA, 280 bp, Glycine max
ggaaacagtcagaatcagaatcagaagaagcgagcaaagatgtcgggtcgtggaaagggaggcaagggtttgggtaagggaggagccaagaggcacaggaaggtgctccgcgataacatccagggaatcacaaaacccgccattcgccgtttggctcgcagaggcggcgtcaagagaatcagtggcctcatctatgaagaaacccgcggcgtccttaagatcttcctcgagaacgttattcgcgacgctgttacctacaccgagcatgctaggaggaaga

SEQ ID NO: 287372 - DNA, 258 bp, Glycine max
  unsure (1)..(258): unsure at all n locations
gtactccggaggtgaaatgcgcaagttggaggcttgctgtggaagcacacaacatctttggctttgagaccattcctgaagagtgcgttgaagcaacaaaggaatacatccatggcgaacaatatagatcagactccaaaacagttaaccaacaagcttacttttatgccagagacctcgaagtccatcccaaggacacatttgtgttcagtatagatggcacgtactctctaatattcatntacaaaaaactggttg

SEQ ID NO: 287373 - DNA, 275 bp, Glycine max
aagatgtttggagagttgaatgtggaatcccttctggatttccgctcacagttatttgcaatagcatttttaatgagatgctcattagatatagctatgaaaaattactgcgccaggctaaagctccaagtatgtttttacaatccttcaaaaattttgtttctttgtgtgtgtatggtgatgataacttaattagtgttcatgaatatgtcaagccttactttagtggttctaaattgaaaagctttctagctggtcataatatcaccatactg

SEQ ID NO: 287374 - DNA, 270 bp, Glycine max
  unsure (1)..(270): unsure at all n locations
tggttttccatgctaaatttgctgacaactatagactttactctcntagccactttgtcaagggtattgagctcatgatattacttgttgtatatgaaatttttggtcattcttacagaagtactgttgcatatatcttgattaccgcatcaatgtggtttatggtgggtactggctgtttgctccctcttgttcaatccttctgggtttgaatggcaaaaaattgttgatgattggaccgattggaataaaggattggtatcgaggggg

SEQ ID NO: 287375 - DNA, 267 bp, Glycine max
  unsure (1)..(267): unsure at all n locations
tttggatacctcgcacctgagtactttatgcacggtagagtgactgatananttgacgtatatgcttttggtgttgtactccttgagcttctctcaaataggaagcccattaacaatgaatgcccaaagggccaggggagccttgttatgtgggcaataccaattttggaaggtgggaagttttcccagttgcttgatccaagcctaggcagtgaatatgacgattgccagatcaggagaatgatttggccgctatctctgcataga

SEQ ID NO: 287376 - DNA, 271 bp, Glycine max
  unsure (1)..(271): unsure at all n locations
ttttcctttcgtttcctttcattttcnctcactttctcgctccccaaacgcccctctctctcctccaatggccgaccagctcaccgacgaccagatcgccgagttcaaggaggccttcagcctcttcgacaaggacggcgatggttgcattactaccaaggaacttgggactgttatgaggtcacttggtcaaaacccaactgaggcagaactgcaggatatgataaacgaggttgatgctgatggcaaggaaccatcgatttcccagagt

SEQ ID NO: 287377 - DNA, 278 bp, Glycine max
  unsure (1)..(278): unsure at all n locations
gaagatcaagcacaagcacaagaaggtcaagctcggcattcttcagttctacaaggtcgacgattctggaaaagtccagaggctccgcaaggagtcgccccaacgccgagtgcggcgccggcaccttcatggccaaccacttcgaccgccactactgcggcaagtgcggcttgacctacgtctaccagaaggccgatgcttaatttgcggttttaattttattttagtatttaanagttttggtttatgttttngttcantagtgttatgactgtttg

SEQ ID NO: 287378 - DNA, 268 bp, Glycine max
  unsure (1)..(268): unsure at all n locations
attgaagattgctatatagtttctggtgatgactgtgtggctgtaaagagtggatgggatgagtacggcataaaatttgggtggcccaccaaacagctaatgataagaaggctaacatgctcttcaccatacagtgcaaccattgccttgggaagtgagatgtcaggtggaatccaagatgtgacagctgaggacatcacagcaatccaaacagaatcaggtgtcagaatcaagactgcagttgggagaggaggtatgtgaaggacna

SEQ ID NO: 287379 - DNA, 270 bp, Glycine max
  unsure (1)..(270): unsure at all n locations
cgcttgtcaatctggagactagtttgaaaaactacgagccttcagaagaggcttttgacattgattcagtgcccagggaggtcaagtctcaaccacttgcagagaagaaagcccctggtaaaaancctactggtttgggtgctcctcctagtggtcccccatctactgcagatgcatatgaaaggctgcttctatccattcccgagtttgcaaactttgggaagctttttaagtcttcagaacctgtggagcttactgaagcggagacag

SEQ ID NO: 287380 - DNA, 277 bp, Glycine max
  unsure (1)..(277): unsure at all n locations
ggaaaggatatgatcaagtgtatctctttgaataattctatcccancnngttnccaccaaaagtaggtttgtaattgtagatgagattatctcgcactttttgagcatcaggtgtgtttgtggatttcctagcttcacttacaaacctacttttggtggaacggctgggaaaggatatgatcaagtgtntntctttgaataattctatctgtaggaggtgtccttgaatttgattttatgcacaatnnatagactggggagtagtttgannccataa

SEQ ID NO: 287381 - DNA, 270 bp, Glycine max
  unsure (1)..(270): unsure at all n locations
gancgatgtgactgcgaatagcctcgagatcgacattctcgctccgttttgctgttgatcaacacaacaaaaaagagaatgcaaatctggagtttgtgggggtgattagggcaaagcagcaggtggtggaagggttcatatactacatcactttggaagcaaaagatggtganancaaaaatgtgtatgacnccgaaggtgtgggtgagatcatggttgaactccaaggaggtcctcgaattcaagcctntcagtattaatcctctttcg

SEQ ID NO: 287382 - DNA, 272 bp, Glycine max
  unsure (1)..(272): unsure at all n locations
cntttcaatggcaactcaaggtcaagtcattaccttcaaagctgcggtggcctgggantccaacaagccctnncctgtccaagacgttcaggtggctccgcctcaggccggcgaggtccgtgtccaaatcctcttcaccgctctctgccacaccgatgcttacacttggggcggcaaggatcccgaaggtctcttcccctgtattcttggccatgaagctgcagggatgtggagagtgttggagaaggtgttactaatgttcagcctgggga

SEQ ID NO: 287383 - DNA, 272 bp, Glycine max
  unsure (1)..(272): unsure at all n locations
gtttcttacaagcctctactatactgcttcaccttctgctctagaaaattcagtgctgaaacatggctcggctactctctctgtagccaaaccagcccttcaggcaaatgggaaaggcttctctgaattctctggcctccgaagctcatcaggcttccttcccttttctagaaaatcttcagaggatttccattctgtcattgcttccagacttanncagttnncaaccattggnggatnnaaaaggtntnaagangnaaattgaggtttgc

SEQ ID NO: 287384 - DNA, 273 bp, Glycine max
  unsure (1)..(273): unsure at all n locations
cacaaggcagaaagcaagctcatcntagagttttaaaaatggcagcagcctgcntccatggntntntnttcgccnannntnggntggcaaggccgtgaagctgggcccatcagcccccgaagtngggagggtcagcatgaggaagaccgtcaccaagcaggcnttcctccggaagcccatggtacggcccagaccgcgtcaagtattgggcccattntctggcgagnntncgtntanntcatggcgagttnccaggtgattaggctgggacat

SEQ ID NO: 287385 - DNA, 265 bp, Glycine max
  unsure (1)..(265): unsure at all n locations
aaacctagagcgaagagcgtgaaggcaccggccgccggncatgacattcaagcgcaggaacggaggtcgcaacaaacacggccgtggccatgtcaaattcatccgatgctccaactgcggcaaatgctgccccaaggacaaggccatcaagaggtncttgtgaggaacattgttgaacaggctgcagtcagagatgtgcaggaagcctgtgtctatgaacaatacacgcttccgaaactatatgtgaagatgcagtatgtgtttc

SEQ ID NO: 287386 - DNA, 266 bp, Glycine max
ctcgagacctcccagaccgtcttcgtgggcccgtacttgggcctcaaagcccgagagcgatttgagagggattactttctattcaacgtggggctaatgaagctgccgtttgacttccccggcaccgcgtttcggaacgcgaggctcgccgtggaccggcttgtcgtagccctaggcacgtgcaccgagatgagcaaaacgaggatgcggacattaggggaagagccttcgtgcctcatcgattactggatgcaggacacgctcag

SEQ ID NO: 287387 - DNA, 271 bp, Glycine max
  unsure (1)..(271): unsure at all n locations
aactncttctcttcttccttcgctcgttgttctccctcgcgtagancgncaatggcggagacagagncgtttgctttccaggctganatcaaccanctcctcagtctcatccatcaacaccttctactccaacaaggagnnctttccttcgtgaactcatcagcaacgcctccgatgctttggacaagattcgatttgagagtttgacagataagagcaagctcgatgctcagccagagttgttcatcatatattccagacaagactagnt

SEQ ID NO: 287388 - DNA, 273 bp, Glycine max
  unsure (1)..(273): unsure at all n locations
acaaaacagcagcgagagagaaactgataaggcagggatacaacattgttgggatcattggagaccaatggagcgatctcctcggaggccacagaggcgaaagcaggacctttaagcttcctaatcccctgtactacattcncgtagttccttcacctctgcaacaatctagcttgctcctatctatctatatgtaataagatgcgttcaaataggggcactagcttcactttatgttgtttcagctgtgtgtcaacaagtcatgtaagagac

SEQ ID NO: 287389 - DNA, 263 bp, Glycine max
  unsure (1)..(263): unsure at all n locations
ctatggtgcatgatagttcagtgtctacaataccaggtgattttgtcattggtgtcaagttgacaaccataaacaatatgtgtgcatatgggctcaatcctggtatttcaggttctcgtcttttgggcaccattcctcagtccatttcacagcaaactgtttggaatcaaatggcaacagtgagaacaccattgaattttgcttctagcaagcagancttttgtcaattttctattgaccttctcggtggaggaattttagtg

SEQ ID NO: 287390 - DNA, 263 bp, Glycine max
acactcataacacaaagcacaaagcaaagctcatccttgagttaaaaaatggcagcagcttcttccatggctctctacatccccatccttggctggcaaggccgtgaagctgggcccatcagccccagaagtgggaagggtgagcatgaggaagaccgtcaccaagcaggtctcctcaggaagcccatggtacggcccagaccgagtcaagtacttgggcccattctctggcgagcccccgtcctacctaaccggtgagttcc

SEQ ID NO: 287391 - DNA, 260 bp, Glycine max
  unsure (1)..(260): unsure at all n locations
gctcttcttgaaccagggngnaagcatgcattgattgttggagttggaatacaaatacttcagcagttttcagggataaatggggttctatattacacacctcaaatccttgaagnggctggtgttgaagttcttctttcagatataggcattggctcagagtctncatcattccttatcagtgctttcacaaccttcttgatgctccatgtataggcgtagcatgnaagctcatggatgtttcaggcagaaggcagttg

SEQ ID NO: 287392 - DNA, 269 bp, Glycine max
  unsure (1)..(269): unsure at all n locations
aagaaagtagcaaagatgacaggtgnncatgtttggnaaggaaggggcaaaancataaaggggacagtggtgttgatgccaaagaatgtgttggacttcaangccataacctcngtnggaaaaggcagtgnctaaggacacngccacngatttcttgggcaaaggcttggacgcattaggtcatgcagttgatgntctcactgccttngctggncatagcatctccttggcagcttatcagtgctactcagantgatggtagtggaaaa

SEQ ID NO: 287393 - DNA, 263 bp, Glycine max
  unsure (1)..(263): unsure at all n locations
ccgtcctantcttctactacgngaacttnnccgggatcagngtggggcgcgtcctggtacctcttcccagcgagtatcttgggtttaacccgaacactggatccggaaccataattgattcgggcacggtgataacccggttcgtggagcccgtttacaacgcggtgagggaggagttcaggaagcaggtagggggaactacattcacgagcattggngctttcgacacgtgtttcgtganaacctacgaaacgctggcgccg

SEQ ID NO: 287394 - DNA, 261 bp, Glycine max
  unsure (1)..(261): unsure at all n locations
accctactcattctccatacctcaangaagaggttaaagaganggcaacactttgntgtcngncttgaccgagcagagcttngtcttggncctngattttgccctaaagtactctcagtcacaacagacacngtngtngtngtngtngtcatcaatggnacngaagcagaccaagggcgagaagaagatngngnnngatgngaagtgtgngacctaatggaggagtacggccagatcctcgttgtgaatccgataacgtgg

SEQ ID NO: 287395 - DNA, 257 bp, Glycine max
  unsure (1)..(257): unsure at all n locations
agataatagnnacattgtgatncaactgaangcncttnttnncntcncantnncnntnacganttnggngaagatgggctagtggcgaatggngattttgaggttagcccatcaagtgggttccctaannaggcgattgtggagggccccagcgaggtcccaaactggaagtcaaacggcaacgttgagctagtggaatcggggcaaaaacagggtgggatgatcctcattgtaccgcaggtagacacgcggtgagg

SEQ ID NO: 287396 - DNA, 272 bp, Glycine max
  unsure (1)..(272): unsure at all n locations
cgcnatcgnatgaagnnnncagctnacaactctcnncactggncttcagggaaagtcncaaattgttcaggaagagttagtnanntttngtgancaaatggttagnagttctgaaggtacaagaggtctagccttgcagttntgtcgtgaatttganganaaatttcttcaacatcttactggaggcgagggtaatggttggaaagttgtngcnagttttgaagggattttccnaacagnatcaagcaacttcctattgacngacacttggc

SEQ ID NO: 287397 - DNA, 266 bp, Glycine max
  unsure (1)..(266): unsure at all n locations
cgcaatcgtatgangcttaggcttccaactctcctcactggtcttcagggaaagtctcaaattgttcaggaagagttagtgaagtttggtgaacaaatggttagtagttctgaaggtacaagagctctagccttgcagttgtgccgtgaatttgnggacaaatttcttcaacatcttactggaggcgagggtaatggttggaaagttgttgctagttttgaagggaattttcctaacagaatcaagcaacttcctattgacagaca

SEQ ID NO: 287398 - DNA, 261 bp, Glycine max
  unsure (1)..(261): unsure at all n locations
ttttggtggatagagctattggaggatccagcttacaagatggacaaatagagctgatggttcacaggagattactacttgatgattcaagaggtgttgatgaggctctaaatgaaacagattgtgtcggtgatgattgcnggggtctaactgtccaaggtaaattttactacagaatagaccccttgggtgagggcgctaagtggcgtcgtacttttggccaggaaatatattctccacttctgttagcctttgctgaaa

SEQ ID NO: 287399 - DNA, 259 bp, Glycine max
caccgagtttgggcgtttagatcagaaccaaatcgtgttctcttccattggcaaacatggcaactcaaatgagcaagaagagaaagtttgttgcggacggagtgttctttgccgaactgaacgaggttctgacacgtgaattggcggaggacggttactccggcgtggaagttagggttacgccgatgcgcaccgagatcatcatcagagccaccagaacccaagccgttctaggtgagaagggaaggagaattaggga

SEQ ID NO: 287400 - DNA, 260 bp, Glycine max
  unsure (1)..(260): unsure at all n locations
ctctaacctacctctttttcttctctctcaacnacttcancttcttcctcctgcgatcatgtctcacttcaagggcaagtacnatgacngagcttatcgccaatgctgcgtacattggcactcctggaaagggtattcttgctgctgatgagtcaanagggacaattggcaagcgtttggccagcatnngtgtanngaanattgaatccaacaggcgagctcttagggagctgcttttcactgctcctggtgttcttcaa

SEQ ID NO: 287401 - DNA, 259 bp, Glycine max
  unsure (1)..(259): unsure at all n locations
ccctaaacgactctatctctcttcgttttgttcttccttgcgctcctcctacgttcgttcgttctccctcgcgtagatcggcaatggcggagaccgagacgtttgctttccaggctgagatcaaccagctcctcagtctcatcatcaacaccttctactccaacaaggaaatcttccttcgtgaactcatcagcaangcctctgatgctttggacaagattagatttgagagtttgacggacaagagcaagctcgatgc

SEQ ID NO: 287402 - DNA, 263 bp, Glycine max
  unsure (1)..(263): unsure at all n locations
atggnacttcgttgcttggtgatgtccctttctgttctcttcnctcttggtcttgcgagagaaagccatgccagagacgaagatttttggcatgntgtttggccaaacactcccattccaagttcattgngagntcttctaaagcctggccctgcaagtgttgaaatcgatgatcaccctatgcaaattgaagaaacacagtacccgaaaaccttcttctataaagaagaccttcatccaggcaaaacaatgaaagtacaatt

SEQ ID NO: 287403 - DNA, 256 bp, Glycine max
  unsure (1)..(256): unsure at all n locations
aaaaaatcatgggcagaaaattcttcgtcggtggtcaactggaaatgcaatgggaccactgaggaggtgaagnagattgttactactttaaatgaagctaaagtccctggagaagatgttgtagaagttgttgtgagccctccttttgtgttccttccttttgtaaaaagtttgctgcgccctgatttccatgtctcggcccaaanttgttgggttcgcaaaggtggtgcttatactggagangntagtgctgaaa

SEQ ID NO: 287404 - DNA, 263 bp, Glycine max
  unsure (1)..(263): unsure at all n locations
gganaatnaatgcaaannaccacaaagacttatgnnngnaagaaccatatttttcttgaaagatgatggaactttgacaccattggccattgagttaagtaagccacanccctcagggtgangaatatggtcctgttagngaagtctangtgcctgtccagcgaaggagtggaagcttatatttggttactggcaaaggcttatgttgttgtgaatgatgcatgctaccatcaaatcnttagccattggctaagcactcatgc

SEQ ID NO: 287405 - DNA, 266 bp, Glycine max
  unsure (1)..(266): unsure at all n locations
cggagtccacaagaatganatgggtntccatntnnaggtntntnttttcntcgtngttacaattntngtagcatggcaatgccatgcgtacgatatgttccctctccgaatgaacactggctatggtgcccgtatgcggaggtgaaatgngcaagttggaggcttgctgtggaagcacacaacatctttggctttgagaccattcctgaagagtgcgttgaagcaacaaaggaatacatccatggcgaacaatatagatcagactc

SEQ ID NO: 287406 - DNA, 264 bp, Glycine max
  unsure (1)..(264): unsure at all n locations
ggaaaacagcccacttgnttggagtgctcggttaangatagctctcggttctgctcgtggactggcttatctacatgaagattcangtccccatgtcatacatagggacttcaagtcgagcaatatcttgctggaaaatgattttacaccaaaagtatcggattttggattggcccgaacagcagctgatgaggggancagacacatatcaacacgagtgatgggaacttttggttatgtggctccggagtatgcctgacggga

SEQ ID NO: 287407 - DNA, 263 bp, Glycine max
  unsure (1)..(263): unsure at all n locations
gcgacatcatctctgtcgatggnnaggnaatcaaagttgtctctgaccgcaaccctgccaaccttccttggaaggatttggggatagacttggtgattgaaggaactggggtgtttgtagacagagnnggtgcagggaaacacattcaagcaggagctaagaangtgctcattactgctcctgncaaaggagacatccccacatatgtggttggtgtcaatgagtatgattacagccctgatgaacccatcatcagcaatgca

SEQ ID NO: 287408 - DNA, 255 bp, Glycine max
  unsure (1)..(255): unsure at all n locations
ctgagatattgggtgtttcagttgacagtgtgttctcgcaccttgcntggatccaaacagatagaaagtcaggtggccttggtgacttgaattatcctttgatttctgatgtcaccaaatccatatcgaaatcttatggtgttctcattcctgatcagggaattgcattgagaggtttgttcattattgacaaggaaggggttattcagcattctaccattaacaacttggcaattggtagaagtgttgacgaga

SEQ ID NO: 287409 - DNA, 256 bp, Glycine max
  unsure (1)..(256): unsure at all n locations
cntaagnngacggctaccctaatcctctcctcttcctctctactaatttcagctatggccgacgaagctgtggttgttccagatcccacccagatcgatgtcaagctctttaaccgctggagcttcgacgatattgagattactgacatttctctggctgattatatcggagtggcgacatccaagcacgccacgtatgtgcctcacaccgccggcaggtactcggtgaagcggttcaggaaggcgcaatgcccca

SEQ ID NO: 287410 - DNA, 234 bp, Glycine max
  unsure (1)..(234): unsure at all n locations
cgtgagtntcacttcttgaagacattccaaatcatggaaccattcactttgtttgcaactcatgggtttanaatgcaaaangttacaaaagggatcgcattttctttgctaataagacatatcttccaaatgaaactccaacncccactagtgaagtacagaaaagaagaattggaaaatctaagaggagatggaaaaggagagcgcaaggnatatgataggatctatgattat

SEQ ID NO: 287411 - DNA, 230 bp, Glycine max
  unsure (1)..(230): unsure at all n locations
gagagtntgaagaagtttgaacgtattctggntgtnatttcacactctcaggactttccttaatggtgtctgcacaaatattatccatatgcaaagcaaaaaactgaagatctacactggtaatnatgatcaatatgttcagacacgttctganctagangagaancagatgcnccagtacaagtgggagcaggngcngattgcctcaatgnnggaatacattgnccggt

SEQ ID NO: 287412 - DNA, 171 bp, Glycine max
gctgaaggtgaaggagctcaagaatggtaggttggccatgttctccatgtttggattctttgttcaggcaattgtgacaggaaagggacccttagaaaaccttgctgatcaccttgctgacccagtgaacaacaatgcttgggcctatgccacaaactttgtccccggaaa

SEQ ID NO: 287413 - DNA, 242 bp, Glycine max
  unsure (1)..(242): unsure at all n locations
aaggaagtgagccagcagaggaaggactacgtagaccctccgccagcccccctcatcgacttggccgagattaagctctggtccttctacagagccctcatcgccgagtttatcgccacactcctcttcctctacgtcaccgtcgccaccgtcattggccacnaaaaacagaccggaccatgtgacggcgttggcntctcggcatcgcatgggccttcngnggcatgatctttgtcctcgtc

SEQ ID NO: 287414 - DNA, 253 bp, Glycine max
  unsure (1)..(253): unsure at all n locations
gagtttgttgtgagctataagctagtttatcgtgaggagaatatgaagtngtttgttttctttgttgctgcagtagttttggtagcatggccatgccatggcgcagtctaccaaaggttccctctccgaatgaaaactggctatggtgagcgttcttcggaggtaaaatgcgcaagttttaggcttgctgtggaagcacacaacatccgagcctttaaaaccattcctgaagagtgcgttgaancaacaaagg

SEQ ID NO: 287415 - DNA, 241 bp, Glycine max
  unsure (1)..(241): unsure at all n locations
ctagagcgaganagtgagaggagagagaaagtagctgatcctccatggcctccaccaaggaacgcgaaaactttgtctacaccgccaagctcgccgaacaagccgaacgctatgaagaaatggtggaagcaatgaagaatgtggcgaactgaacgtggaattgacggtcgaggagcggaaccttctgtcggtagggtacaagaacgtggtgggtgctcgtagggcttcgtggaggattcta

SEQ ID NO: 287416 - DNA, 230 bp, Glycine max
  unsure (1)..(230): unsure at all n locations
gtcagaatggataccaccaccgaactgagttgaacaagaaggtttacaagcttggcaaagctggagatgaatctcactctgctcttactgagtttgataggaccgagaaagacattaccccaatgggtggtttccctcactatggtgttgttnaggatgattttatcatggtcaagggatgctgtgttggtcccaagaagagggtcattacattgcgtcaatccctcctt

SEQ ID NO: 287417 - DNA, 236 bp, Glycine max
  unsure (1)..(236): unsure at all n locations
ggnaatcgttcctatcatcacttctcaaatctcgaaccctctcgttcgtgccgatcactaggtcacacttcatcaatggcgggtagaggcaaaaccctaggatccagcgccgctaagaaggccacctcaaggagcagcaaagccggcctcnaattccccgtcggtcgtatcgccaggttcctcaaggccggaaagtacgccgagcgcgtcggcgccggagcccccgtctacctcgg

SEQ ID NO: 287418 - DNA, 237 bp, Glycine max
gtgtgatgaaaatgaaggtccttgttttcttcgttgctacaattttggtagcatggcaatgccatgcgtacgatatgttccctctccgaatgaacactggctatggtgcccgtactccggaggtgaaatgcgcaagttggaagcttgctgtggaagcacacaacatctttggctttgagaccattcctgaagagtgcgttgaagcaacaaaggaatacatccatggcgaacaatata

SEQ ID NO: 287419 - DNA, 243 bp, Glycine max
gagaaagtagcagatcctccatggcctccaccaaggaacgtgaaaacttcgtctacgtcgccaagctcgccgaacaagccgaacgctatgaagaaatggtggaagcaatgaagaatgtggcgaactaaacgtggaattgacggtagaggagcggaaccttctgtcggttgggtacaagaacgtggtgggtgctcgtagggcttcgtggaggattctttcctcgattgaacagaaagaagaagc

SEQ ID NO: 287420 - DNA, 228 bp, Glycine max
  unsure (1)..(228): unsure at all n locations
ggcaacagtgagaacaccattgaattttgattctagcaagcagagcttttgtcaattttctattgaccttctcggtggaggaattttagtggacaaaactggagattggatcacacttatacaaaattctccaattagtaacttgttgagagttgctgcttggaagaaaggctgtttaatggtcaagattgtgatgtcngggaatgcagcagtcaaaaggagtgattt

SEQ ID NO: 287421 - DNA, 237 bp, Glycine max
  unsure (1)..(237): unsure at all n locations
cgaataccattgtgcagattgaaccagacatgaattcaaggtttcagcttttgagtaccactaccaatggtgattttgttcaaggaaaagatctcgcgatggttaaagttaatgtagcatgtgctgctgttggcttgacatcaagttacactccaactccattgttggaatctggtttgcaaaaagacagagggttaattgtggagtattttggaaggntgtcttacgttgctcata

SEQ ID NO: 287422 - DNA, 250 bp, Glycine max
  unsure (1)..(250): unsure at all n locations
ctttcctctccgaaccctcgatcactctcacgcgctcctatattcgctcctccaccgtcgctctctcgaacancccacaacaccatcttcatcacatggcaaacgnancatctggtatggcagtccatgatgactgcaagttgaggtttttggagctgaaggcaaaaaggacacaccgtttcatagtttttangattgaggagcagcagaagcaggtcattgtggagaagcttggtgagcctgcccaggc

SEQ ID NO: 287423 - DNA, 236 bp, Glycine max
  unsure (1)..(236): unsure at all n locations
ggnagccacatagagacacaatacagagtgagtngttgctccttcgccacaactctctgccaacatgggtatctccagagattctatgcacaagaggcgtgccactggtggcaagaagaaggcctggaggaaaaagagaaagnctgagcttggtcgccagcctgctaacactaagctgtcaagcaacaagacagtcaggaggatccgtgttagaggtggaaatgtgaaatggaggg

SEQ ID NO: 287424 - DNA, 237 bp, Glycine max
  unsure (1)..(237): unsure at all n locations
ggnagccacatagagacacaatacagagtgagttgttgctccttcgccacaactctctgccaacatgggtatctccagagattctatgcacaagaggcgtgccactggtggcaagaagaaggcctggaggaaaaagagaaannatgagcttggtcgccagcctgctaacactaagctgtcaagcaacaagacagtcaggaggatccgtgttagaggtggaaatgtgaaatggagggc

SEQ ID NO: 287425 - DNA, 230 bp, Glycine max
  unsure (1)..(230): unsure at all n locations
gaagtngttgagaactaagaaggagaagcaaatggcttcctcaatgatctcttccccagctgttaccactgtcaaccgtgccggtgccggcatggntgcnccattcactggccncaagtccatggntggcttccccaccanaaagaccantantgacattacctccantggctagcaacgntggaagagtgnaatgcggcccacgtgtggccaccagttggcnnnngccg

SEQ ID NO: 287426 - DNA, 241 bp, Glycine max
  unsure (1)..(241): unsure at all n locations
agaaaaagaaaaatcccagtgagagagagaaaagaaaagaacganaaaccaagaagcttcgaaacgatcgtgtgagatgaacaagtgcgaactgtgcaaagttccggcgaggatcttctgcgagtcggaccaggcgagcttatgctgggactgcgacgctaaggttcacagcgccaacttcttggtcgcgagacacgcgcgaaccttactctgccgcacgtgccgctctcccacgccgtgg

SEQ ID NO: 287427 - DNA, 246 bp, Glycine max
  unsure (1)..(246): unsure at all n locations
gcatttccaattntntgtgtagaagcnatgtntaagggtnntggtgtntantctganattggcaagaaagncagagatctantgttcaaggactaccacagtgannagaagtttaccatcantacatantcanccactggagttgctataacatcctcggggannaagaangggtganntttttgtgtcagatgttaacacccagttgaagaanaagaanatcancactgatatcaaagtgganac

SEQ ID NO: 287428 - DNA, 270 bp, Glycine max
  unsure (1)..(270): unsure at all n locations
gtttaccaagagcgagatatctatttagatctctgaaaaacagagtttcatttcaattcagtcttattattagggtttgccgattganagagaaagagaaatggganaacgaaaagnaatcccaatggctttggggctcttggcgatgatcctcttcttcattgcttcctcttcctctcacctcgttcgcncttccgatgacgccgacgacgcggtaattccgatactattgttgttgttgttatgttgtgatggatctctgattcgaga

SEQ ID NO: 287429 - DNA, 271 bp, Glycine max
gtccagagtcccacagaagaaaaacaaaaccctcactgagcgctgctgctttgagagagagatggctccgaaccttgaatgtcgtatgtacgaagcgaagtacccggaggtggacatggcggtgatgatacaggtgaagaacatagcggacatgggggcgtacgtgtcgctgctggagtacaacaacatcgagggcatgatcttgttctcggagctctctcgccgtcgtattcggagtgtgagcagcctcatcaaggttggccgcatcgag

SEQ ID NO: 287430 - DNA, 272 bp, Glycine max
  unsure (1)..(272): unsure at all n locations
caaaatctttcaccagagatcttaaagctttatatcactcaagaaggagtgcgttccccattttcatcaaagcccacagatagacctgttccaaatgcaactttacaagttactggtgctgttggttggnggaganaagggnttgtgtacaaaaagaatgaggtcttcctggatattgtggaaagtgtaaatcttctantgtcttcaaaaggtagtgttctgcgttgtgatgtcactgggaagattctcatgaagtgctttctttctggaat

SEQ ID NO: 287431 - DNA, 277 bp, Glycine max
  unsure (1)..(277): unsure at all n locations
cctcttagtcccaattttctagggttttattcattttccgatggcttctgcagatgttgagtaccgttgctttgtcggtgggctcgcttgggccactgacgaccatgccctcgagagagccttctctcagtacggcgaaatcgttgaaacgaagattatcaacgatcgtgagactggcagatccaggggttttggatttgtgaccttcgcctcggagcagtccatganagatgcgatcggagcgatgaatggacanaacttggacggccgtaatatc

SEQ ID NO: 287432 - DNA, 278 bp, Glycine max
  unsure (1)..(278): unsure at all n locations
atcgagataactagaaacagtgtgatgaaaatgaaggtccttgttttcttcgttgctacaantttggtagcatggcaatgccatgcgtacgatatgttccctctccgaatgaacactgggctatggtgcccgtactccggaggtgaaatgcgcaagttggaggcttgctgtggaagcacacaacatctttggctttgagacattcngnacagtgcgttnagcnaacaaagggatacatccatgggngaacatttggttcnggcnncnaaacagtttac

SEQ ID NO: 287433 - DNA, 282 bp, Glycine max
  unsure (1)..(282): unsure at all n locations
ccagtgtttggaaaatattatagagaaccaaagaaatcagacgcacctcttccttttcaccttattggggaaataataaggagcttcaagactgaccattttgttagtgacacgggggatgttgtgtactatcaaaccgactctaagattaatggctcttccaaattagagtgaatattaaaattcttttctatatngacaagagaggcttatacacaattcttattgctttaaagattgtcttgagtttctccgaaagttactgcacttacttggagttga

SEQ ID NO: 287434 - DNA, 287 bp, Glycine max
  unsure (1)..(287): unsure at all n locations
ancattttcagaggaaaatggcgggtacggtttcgacttgtttcttcttcgtgtttcttctttctctccttcttccttttcagatctccgctgaggaatcctcggagaaggagttcgtactcacattggatcactctaactttcacgacactgtcagcaagcacgatttcatcgtcgtcgagttctacgccccatggtgtggtcactgtaagaagcttgctccggagtatgagaaagctgcttctatcttgagtagtcatgatcctcctattgttttggctaaagta

SEQ ID NO: 287435 - DNA, 272 bp, Glycine max
agaggcttttgctgagcttaaggtgaaggaactcaagaacggacgattggccatgttctctatgtttggcttctttgttcaggccattgtcaccggaaagggtccattggagaacctcgccgatcaccttgctgaccctgtcaacaacaacgcctgggcctatgccaccaacttcgtccccggaaagtgagcgtcaaagaacgaaatgacttttgagagtttttagatttgtgtttggtgaagtacttcagataatgtgaattatctgtgta

SEQ ID NO: 287436 - DNA, 272 bp, Glycine max
  unsure (1)..(272): unsure at all n locations
gnagagagaaagtagcagatcctccatggcctccaccaaggaacgtgaaaacttcgtctacgtcgccaagctcgccgaacaagccgaacgctatgaagaaatggtggaagcaatgaagaatgtggcgaactaaacgtggaattgacggtagaggagcggaaccttctgtcggttgggtacaagaacgtggtgggtgctcgtagggcttcgtggaggattctttcctcgattgaacagaaagaagaagctaaagggaacgatgtgagcgtgaa

SEQ ID NO: 287437 - DNA, 279 bp, Glycine max
tcataccacagtggagccgtctactaggtggtgttttcttcagtttttgggtcttggctcatctctatccctttgcaaaaggtttgatgggaagaagagggaggacacctaccatagtttttgtgtggtcaggcctcatagcaatcacaatttctctcctctgggtggctatcaaccccctagctggtactgaccaaattgggggttcattccagttcccttgacaggtcattcttttttgtcagatgaatgaatctgtcagctatttttttatttaaa

SEQ ID NO: 287438 - DNA, 283 bp, Glycine max
  unsure (1)..(283): unsure at all n locations
aganaatgggctcccaagggtttaacctttctggctgtgttaatatgcgtttcagcacngtcactgagtccttctgttgcgggggaagggcaaaataatggccttgttatgaacttctacaaggaatcatgccctcaggctgaagacatcatcacagaacaagtcaagcttctctacaagcgccacaagaacactgctttctcctggctcaggaacatcttccatgactgtgctgttcagagttgtgatgctcactgttgctggactccacaagaaggagctt

SEQ ID NO: 287439 - DNA, 269 bp, Glycine max
  unsure (1)..(269): unsure at all n locations
cgtttaaatatgacggaaaatgtgacttcgatcctatcaattgatgacatgcttccagctgttgcccaaggtgcaattggaatagcctgtagaagtaatgatgataaaatggcggaataccttgcttcactgaatcatgaagaaacaagactagcagtttcctgcgaaagangcttccttgaaaagttggaagggtctgccgcactcctattgcaggctatgctagcagaaatgaggatggcaattgcttgtttagaggattagttgca

SEQ ID NO: 287440 - DNA, 269 bp, Glycine max
ctgcaattttaagtggtgagggcaatgagaaggttcaggatcttctcctccttgatgtcacccctctatctcttggtttggagactgctggcggtgtgatgactgtcttgatccctaggaacactacaattccaaccaagaaggaacaggttttctcaacatactctgacaaccagcctggtgtgttgatccaggtctttgaaggtgaaagagcaaggactaaagataacaatttgttgggcaaatttgaactttctggcattcctccc

SEQ ID NO: 287441 - DNA, 273 bp, Glycine max
  unsure (1)..(273): unsure at all n locations
agagaagcattagcactaggagcagcaacaactagtctcagctgaaatggcctcttcagtgatggcatctgtggccctcaaacctgcccctttcactgttgagaagtcctcagtgagaagccttccctctctctcaaggaactcttcttcattcagagttgtggccagtggtggcaagaagatcaagactgacaaaccttatggaattaatggnggcatggctttgagggatggaactgatgcatctggcaggaaaggaaaggnaaagggtgt

SEQ ID NO: 287442 - DNA, 278 bp, Glycine max
cttcctttcggcctctctcagtcacacaccttctcgatgaccaacgacaacatcgccgtgacagatctcacttctgccctcaatgaagagaatcgcgccgacctagtcaatgctctcaagagcaagattcagagtctggctggggcgcattctgatgttctagagactctatccccgaatgtcaggaagcgtgttgaatctcttagagaaattcagggtaaacatgatgaactagaggcagacttcttgaaggagagagaagctcttgaagcaaagta

SEQ ID NO: 287443 - DNA, 283 bp, Glycine max
  unsure (1)..(283): unsure at all n locations
tttcagtgagtgatcggtgttcacttgatctcatcataatcgtcagcgtcaattgaagaagatgccgatcagaaacatncgccgtcggaaggcctgaagaggcgactcaccccgacacgttgaaggcggctttggctgagttcatctcaaccttcatcttcgtgttcgccggctcaggctccggcatcgcctacaacaagctcaccgacaacggcgctgccacccctgccggcctcatntccgcctccatcgcccatncattcgcgctnttngtcgtcgntcc

SEQ ID NO: 287444 - DNA, 269 bp, Glycine max
ctgagaatacaggtatagcattgggcctgtgctatgaatagttcttttagggggcgcgccagttctgatatttacaccatctgctctcaagactgtgaattatggaatcctgcttgcacaaaagcaatggctatgtcatttaatccaaacccgtgttctgatgcatggagtttggaatttctgaagcgtaccggatttcattgtgatatcatttgtgtcactggatggactgccaccccaatgcaggatgttcaggttacaattgattg

SEQ ID NO: 287445 - DNA, 266 bp, Glycine max
tttctctttctctttctctgtctgcttcttcactttctctcgtttcaatcgaaaaaaatcatgggcagaaaattcttcgtcggtggcaactggaaatgcaatgggaccactgaggaggtgaagaagattgttactactttaaatgaagctaaagtccctggagaagatgttgtagaagttgttgtgagccctccttttgtgttccttccttttgtaaaaagtttgctggcgccctgatttccatgtctcggcccaaaattgttggg

SEQ ID NO: 287446 - DNA, 265 bp, Glycine max
  unsure (1)..(265): unsure at all n locations
ccacccttcaaattggcagatattagagcttccattcctaaacactgttgggtgaaggacccttggaagtccatgagttatgttgttagagatgtcattgtggttttngggttggcgttgctgcagcttatctcaacaattgggttgtttggcctctctattgggctgctcagggaaccatgttctgggccctctttgttcntggacatgnttgtggtcatggaagcttttcaaacaatcctaagctgaacagtgttgctggcca

SEQ ID NO: 287447 - DNA, 269 bp, Glycine max
  unsure (1)..(269): unsure at all n locations
tatcaagcctgtcattcctgagaagtaccttgatgacatgctctttaaggtccgcagcaatttgatcattgctcacagtctncatcatgttgggtggaccttaaagagcannttntcaagcctgtcattcctgagaagtaccttgatgagaagaccatcttccaccttaacccttctggccgttttgtcattggtggccctcatggtgangctgcnctcactggaagaaagatcatcattgatacctatggtggctggggtgctcatgg

SEQ ID NO: 287448 - DNA, 272 bp, Glycine max
  unsure (1)..(272): unsure at all n locations
ttgcattgaataagaactttgtgaagcttgtttcttggtacgacaacgagtggggatacagctcacgtgtcattgacctgcttgtattcgttgccaagaagtctttttaaggtggtgtactgcaaagttgcttgtctacacattatgtgcttgtctagttgcgatttagtgtcttgctcgtgcaaaaaatgagaggtctgaataaatcggtttctggaaccagtggatttaccttgttaggagcattagcntattttggatttgcctcttgt

SEQ ID NO: 287449 - DNA, 275 bp, Glycine max
  unsure (1)..(275): unsure at all n locations
gttgatcgagataactagaaacagtgtgatgaaaatgaaggtccttgttttcttcgttgctacaannttcgtagcatggcaatgccatgcgtacgatatgttccctctccgaatgaacactggctatggtgcccgtactccggaggtgaaatgcgcaagtnggaggcttgctgtggaagcacacaacatctanggctttgagaccattcctgaagagtgcgttgaagcaacaaaggaatacatccatggcgaacaatatagatcagactccaaaa

SEQ ID NO: 287450 - DNA, 281 bp, Glycine max
attttgttgttcgaagccaaaaccctagcagccggcgagaatggcagacgttgaggttgatgcggcggcagcggcaggggcagcgcagccgaagaagagaacgttcaagaaattcagcttcaggggcgtggatctggacgcgcttctggacatgtccaccgacgaactggtgaagatgttcagtgcgcgtgcacgtagaaggttccagagaggtctgacgaggaagcccatggccttgattaagaagctccgcaaagctaaaagggaagcaccagcaggtg

SEQ ID NO: 287451 - DNA, 281 bp, Glycine max
  unsure (1)..(281): unsure at all n locations
aattggcacaaactgaggctgaaattcttcatgatgctgtgaaaganaagaagggtagctatgaagagaccattagggtcttgaccacaaggagcaggacccaacttgttgcaactttcaactgctacagagagatccatggcacttccatctctaagaaactggtggatgaaggatctgatgagtttcaaagggcattgtacactgccattcgtggcatcaaggatcctattangtactacgaaaaggtggtgcggaatgcaatcaaaaaggttggaatg

SEQ ID NO: 287452 - DNA, 269 bp, Glycine max
  unsure (1)..(269): unsure at all n locations
cgcagagagaaattgagtttctgagataaccacttttctctttgattcatcaatggcaaccgcgaggaccgtgaaggatgtttcgcctcacgatttcgtgaaggcttacgcctcccatctcaagcgttccggcaagatggagcttcctgagtggactgatattgtaaaaacagcaaaatttatggaattggctccatatgatcctgactggtattatgttagggctgcctcaatggcaagananattatttgagaggcggtcttggtgt

SEQ ID NO: 287453 - DNA, 266 bp, Glycine max
  unsure (1)..(266): unsure at all n locations
actatgtgatggaccctgcgaaagcagttcgaaatggtagatganaacaccatctgtgttgcagccattttggggtcaactatgaccggagagtttgaggatgtgaagcttctcaatgaacttcttactaaaaagaacaatgagacaggttgggataccccaattcatgtagatgctgccagtggggggtttattgccccatttctatatcctgatttagagtgggacttccgtttgccgttggtgaaaagcatcaatgttagtgg

SEQ ID NO: 287454 - DNA, 271 bp, Glycine max
ccgatttcgaagatgggctgaagcagaggatgccgtaagaacgccgtaatgcggtcgccgagtatcggaagaaacttctccagcacaaggaattggaatccagagtccgatccgtcagggagaatttgcgagcttcaaagaaagagttcaataaaacagaagatgatttgaaatctcttcaaagtgttgggcagattattggcgaagttctcaggcctcttgacaatgaacgcctgattgttaaagcaagcagtggtcccaggtatgtggt

SEQ ID NO: 287455 - DNA, 266 bp, Glycine max
aaacttgtggaggtagaaggatctcatacactccaaaactcatattcttcccttgacatccatctcggacagtcttattccgtgctggtcactgccgatcaacccgtcaaggattactatatagttgtctctacaagatttacaagacggatactcacaacaacttccgttcttcattacagctattcaaaaacaggggtatctggtcctgttcctccagggcctacccttgatatcacatcatccgtctatcaggccagaactat

SEQ ID NO: 287456 - DNA, 271 bp, Glycine max
  unsure (1)..(271): unsure at all n locations
ggcttcttcaatccctaatgcgccttctgcgttcaattctcagagctacgttggtctcagagcgccactgaggaccttcaacttttcttctcctcaagctgccaaaattcctcgctcccaacgccttttcgtcgtcagagcctccgattcggagttcgaagcagccgttgtcgccggtaaggttccgccggngcttccntgccgnacagaccggcgggtccngttggnacaacggtggttccttaattccactnancggcgtcctntcnga

SEQ ID NO: 287457 - DNA, 275 bp, Glycine max
  unsure (1)..(275): unsure at all n locations
caagattcagcaagtgcgttttggaagcagagaccgaaatacttcgagatggcccgtacaaagcaaactgctncgtaagtcaactggaggaaaagctcccaggaagcagcttgcaaccaaggctgcacgtaagtctgcaccaacaactggtggtgtgaagaagcctcatcgttatcgccctggaactgttgctcttcgtgagattaggaaataccagaagagcactgagctctaatcaggaagcttcctacccagaggttggttcgtgaaattgc

SEQ ID NO: 287458 - DNA, 295 bp, Glycine max
  unsure (1)..(295): unsure at all n locations
cccgaaaacagcgtcgagctttatgctgagaaggtcaacaatagangcctgtgtgccattgccccagggccgagtcgcttcgctataagcntctcggtggcctcgccgttcgcagggcttgctatggtgttttaagatttgtgatggaaagtggtgccaagggttgtgaggtgactgttagtggaaagttganggctcagagagccaaatccatgaaattcaaggatgggtacatgatctctctggacaaccagtcaaggatcgnttgactcgggnntgagacatgtcctcctaa

SEQ ID NO: 287459 - DNA, 293 bp, Glycine max
  unsure (1)..(293): unsure at all n locations
tagtactctcgttaattttnttgctaattgctaattgggcacaatggaaaagcttcatggctgtgtgcatcccatacccagcacaaggccacataaacccaatgctcaagctagcaaaactccttcatgttagaggcttccacatcacctttgttancacagaatacaaccacaaacgccttctcaaatcaagaggttctgattccctcaatagtgtcccatcatttcaatttgaaaccatccctgatggtctctctgataaccctgatgttgatgccacacaagacgtattt

SEQ ID NO: 287460 - DNA, 295 bp, Glycine max
  unsure (1)..(295): unsure at all n locations
gggaaatgatttgtcgccgttgttcgaggaaaagaagagagaagagaaagagttacgntttgcgaccacgcgccccgcgagcagcgtgatttcgagattggaagatttggcgaaggcggtgaagttcgacgtgaagaagagcgagactaaggtgaggttgcagggtcaagaaaaagggcgaaaaggtaaactcgctattgctgcggacttgtacgccgtgacgccgtcgtttttggtggtggaggttaagaaggacaacggtgacaccttggagtataaccagttctgtagcaag

SEQ ID NO: 287461 - DNA, 298 bp, Glycine max
  unsure (1)..(298): unsure at all n locations
ctgggactggnctctttgcagagattttggatggagangtgtacaagtactatgctgatggagaatggnagaaatctgcttctgggaaaagtgttgccatcatcaaccccactaccagaaagactcaatacaaagttcaagcttgttcacaagaggaggttaacaaggtcatggacttggcaaaatctgcccaaaagttatgggcaaagaccccactatggaaacgtgctgaacttcttcacaaggcagctgcncatccttananagcacaaagcaccaattgcagagtgcctggtga

SEQ ID NO: 287462 - DNA, 294 bp, Glycine max
  unsure (1)..(294): unsure at all n locations
cnaacctctcaagtccaacctacccctttttnttctcccaccaacttcaccgttcnnttcctcgatcatgtctcacttcaagggcaagtaccatgatgagcttattgtcaatgctgcttacattggcactcctggaaagggtattcttgctgctgatgagtcaacagggacaattggcaagcgtttggccagcatcagtgtagagaatgttgaatccaacaggcgtgctcttagggagctgcttttcaccgctcccggtgctcttaaatatctcagtggtgtcatcctctttga

SEQ ID NO: 287463 - DNA, 290 bp, Glycine max
  unsure (1)..(290): unsure at all n locations
tcgagataactagaaacagtgtgatgaaaatgaanntccttgttttcttcgttgctacaattttngtagcatggcaatgccatgcgtacgatatgttccctctccgaatgaacactggctatggtgcccgtactccggaggtgaaatgcgcaagttggaggcttgctgtggaagcacacaacatctttggctttgagaccattcctgaagngtgcgttgaagcaacaaaggaatacatccatggcgaacaatatagatcagactccaaaacagttaaccaacaagcttat

SEQ ID NO: 287464 - DNA, 290 bp, Glycine max
  unsure (1)..(290): unsure at all n locations
ganacganngctggtgttaatccaaatntcattaagattcttgaggagttcccaccacgtnngcaagctagattctcaagcctacggtgatcatacctctataataacaaaacaacacttggagcctaacttgggtgggctcaccgttgagcaggctatccagagcaagaagttgttcatcttagatccaccatgactatctcattccatatttgaggaaaataaatgcaactaccacaaagacttacgctncaagaaccatatttttcttgaaaagtgatggaaccttg

SEQ ID NO: 287465 - DNA, 298 bp, Glycine max
  unsure (1)..(298): unsure at all n locations
aactgcttatngtcccaccttanttagtgaagagacaaaaacaacatttccatcatcttgaggagtttggtattgatttgatacttggctgtaatggattcatatgggttgggcgaacatgttgaagccaaagatgacatggtagaagatcaagtgagccaatctgatccacaagttttattgcctaataacattgtatcagtctngaagaacatnagaaaacttacacaatattggagacaagaaattacatatgcagagctgctaatgctgttagagtattgtcaaccttaggctt

SEQ ID NO: 287466 - DNA, 287 bp, Glycine max
  unsure (1)..(287): unsure at all n locations
aaaaagacaacacagagagaagcgtcttaataaacnctcttctctgaaaaacctgatttcttctcttcttctcttctctttcgtctcnctcntcgatctctgaaaatgagagagtgcatttcaatccacatcggtcangccggtattcaggtcggaaacgcctgctgggagctctnctgcctcgaacatggcattcagcctgatgggcagatgccaagtgataagactgttggtggaggtgatgatgctttcaacaccttcttcagtgaaatggggctggaaagcac

SEQ ID NO: 287467 - DNA, 288 bp, Glycine max
  unsure (1)..(288): unsure at all n locations
gttgtgacagtgtgtntgagtgagtnagtganagcgacgatgggcgcnagcagcgaccccanccaagacggntccgacgagcagcagaagcgttcggagatctacacctacgaggccccctggcacatctacgccatgaactggagcgtccgccgcgacaagaagtatcgcctcgccatcgnctncctcttagagcagtaccctaaccgcgtggagattgtccagctcgacgactccaacggcgagatccgttccgacccctccctctccttcgagcacccttaccct

SEQ ID NO: 287468 - DNA, 257 bp, Glycine max
  unsure (1)..(257): unsure at all n locations
gtgagtttgttgaacnagataactagaaacacntgtgatgaaaatgaaggtccttgttttcttcgttgctacaattttggtagcatggcaatgccatgcgtacgatatgttccctctccgaatgaacactggctatggtgcccgtactccggaggtgaaatgcgcaagttggaggcttgntgtggaagcacacaacatctttggctttgagaccattcctgaagagtgcgtngaagcaacaaaggaatacatccatg

SEQ ID NO: 287469 - DNA, 279 bp, Glycine max
  unsure (1)..(279): unsure at all n locations
cttaaaaacattcattctcctttganagttgagaaaggagaattganganctggcaggagggtctttcacaacaggcnctgtgnccaaggagagggcagagcagtacaaggggagagtcactgcttatgtcatcatctcttgcattgttgctgccacaggaggggctctctttggctatcatattggaatttcaggtggggttacatccatggatgacttcttatagagttcttccacncannatagngnngaagatgcatcacccatgaaaacaatat

SEQ ID NO: 287470 - DNA, 293 bp, Glycine max
cacaaggcagaaagcaagctcatcctagagttttaaaaatggcagcagcctcctccatggctctctcttccccatccttggctggcaaggccgtgaagctgggcccatcagcccccgaagtcgggagggtcagcatgaggaagaccgtcaccaagcaggcctcctccggaagcccatggtacggcccagaccgcgtcaagtacttgggcccattctctggcgagcccccgtcctacctcactggcgagttcccaggtgactacggctgggacactgctgggctttcggccgac

SEQ ID NO: 287471 - DNA, 292 bp, Glycine max
acaagggcaatgcaccggcactgcccgagactcttaagaattacaacaagctggtgtctcttggcttcaagattatattcttgtcaggaagaacactggacaaacaggccgtaacagaagcaaacttaaagaaggctggctaccacacatgggaaaaattaattctcaaggatccacaagatccttccactccaaatgcagtttcatacaaaacagcagcgagagagaaactgataaggcagggatacaacattgttgggatcattggagaccaatggagcgatctcctcgg

SEQ ID NO: 287472 - DNA, 284 bp, Glycine max
  unsure (1)..(284): unsure at all n locations
cttattttgacatttgtgttgcaaacattccctaccaaatatcttctcctctcncattcaagttactcaagcacgancctgcttttagggctgcaatcntaatgttccagagagaatttgccatgagactggttgctcagcccggtgataaactatattgtcgtctcacggtcaacactcaactacatgctcgagtcttccacctcctcaaagttggaagaaacaacttcaggccccctcccaaggtggattcctctgtggcgcgaattgagcccaggaaaccc

SEQ ID NO: 287473 - DNA, 285 bp, Glycine max
  unsure (1)..(285): unsure at all n locations
accctactcattctccatacctcaacgaagaggttaaanagacggcaacactttgctgtccgccttgaccgagcagagcttcgtcttggccctcgattttgccctaaagtactctcagtcacaacagacacnnnnnnnnnnnnnnnnnnnnnnaatggcaccgaagcagaccaaggctgagaagaagatcgcttacgatgcgaactgtgcgacctaatggaggagtacggccagatcctcgttgtgaactccgataacgtgggatcgaaccagctccagaacatt

SEQ ID NO: 287474 - DNA, 290 bp, Glycine max
gaacccgaagattatttccgttgtagaacaggaagcgaaccacaaccaggaccggttcttggagcggttcacggaagcgttgcattactactcgaccgtttttgactcgctggaggcgtgtccggtcgaaccggacaaggcacttgcggagatgtacctgcaaagggagatatgcaacgtggtgagcagcgagggaccggcgcgagtcgagaggcacgagccgctggctaagtggagggagcggctcgagaaagccggcttcaagccgctgcatttggggtcaaacgcgt

SEQ ID NO: 287475 - DNA, 235 bp, Glycine max
  unsure (1)..(235): unsure at all n locations
gagaaagaaaagaatggcaaagttaataaaattctttganttgaacacaggggccaagattccttctgttgggttaggcacttggcaagctgagcctggtgttgtagccaaagctgtcaccacagccattctggttggatacaggcatattgattgtgctcaagcgtataacaatcaagcagagattggttctgctcttaagaagcttnttgatgatggtgtggtgaagcgtgag

SEQ ID NO: 287476 - DNA, 283 bp, Glycine max
  unsure (1)..(283): unsure at all n locations
gcatgatgagactgtcacaaatgatgagattgcagctgatcttaaagaacacgtgattaagcctgtgattctgagaagtaccttgatgagaagaccattttccatttgaacccttctggcaggtttgtcattggagggccgcatggcgatgctggtctcaccggccgcaagatcatcatcgacacctatggaggatggggtgcacatggtggtggtgccttctctgggaaggatcctaccaaggttgataggagtngtgcctacattgtgangcaagctgcaa

SEQ ID NO: 287477 - DNA, 286 bp, Glycine max
  unsure (1)..(286): unsure at all n locations
ctctcactttcatttctacatccctggctctgttccgtcgatgacgntggcgtttagggtgcgaaaccctgacctccgctttctcattcttctctctctcttgtccatcacttccgccaaggtcttcttcgaggagcgtttcgatgacgtatggggaaatcgttgggttaaatcagattggaaaaaagatgagaacctggctggggagtggaaccacacctctggccaatggaatggagacgctaacgacaaaggtattcaaaccagtgaggattacagattctac

SEQ ID NO: 287478 - DNA, 290 bp, Glycine max
  unsure (1)..(290): unsure at all n locations
tataactagaaacagtgtgatganaatgaaggtccttgttttcttcgttgctacaattttngtagcatggcaatgccatgcgtacgatatgttccctctccgaatgaacactggctatggtgcccgtactccggaggtgaaatgcgcaagttggaggcttgctgtggaagcacacannatctttggctttgagaccattcctgaanagtgcgttgaagcaacaaaggaatacatccatggcgaacaatatagatcagactccaaaacagttaaccaacaagcttactttt

SEQ ID NO: 287479 - DNA, 289 bp, Glycine max
  unsure (1)..(289): unsure at all n locations
caaccgagaagtaacatttggntgatggcacccacaaattagagctaccggttgcatgtttcatgcacgctaggtacaggtctagccagtccagtacctacagggaaaatggtacttctgctgcaattcaatatggtactggagcaatttctggtttctttagcaatgacgatgtcaaagttggtgacatngttgtaaaggaccaggaatttattgaagcaactagagaacctggagttacatttgtggctgctaagtttgatggtatactaggacttggatttcaaga

SEQ ID NO: 287480 - DNA, 288 bp, Glycine max
  unsure (1)..(288): unsure at all n locations
ggtaagcccatcaaggttgtttcaagcagggaccctcttaagcttccttgggctgaacttggaattgacattgttattgagggaaccggagtgtttgtggatggccccggggctggtaaacacatccangcaggtgccaagaaagttattatcactgctcctgcaaagggtgctgatattccaacttatgttgttggtgtaaatganggggatacactgcatcagatctctaacatataagcnacgcttcctgcaccacaaactgtcttgctccctttgtgaagatcc

SEQ ID NO: 287481 - DNA, 288 bp, Glycine max
  unsure (1)..(288): unsure at all n locations
gnttgacgttgttcanaatcactttctgcgcttcactcactcccttacgtgcggttttctttctttgtcgaactcgtgcgaagatgcgtgagattcttcacatacagggaggnccaatgcggnaaccagatcggagcgaagttctgggaggtggtgtgcgcggagcacgggatcgattccacggggaggtaccngngggacaacgagttgcaactcgaccgagtcaacgtctattacaatgaagcgagttgcggaaggttcgtgccgagggcggtgctcatggatcta

SEQ ID NO: 287482 - DNA, 282 bp, Glycine max
ggcacagtctgttgatgagcagcttgttgttgtttctcaggttcttgtgtctgacatcaatattggatatgaggagatagttaacactcaggttcttgctttcaacgataaacctgtgaagaatctgaagagcttggccaacatagttgagagctgtgatgatgattatctaaagtttgatctggaataccaacagaaggtagtgttgaagactagcactgctaaggccgcaaccttagacatcctcaccacacattgtataccttctgcgatgtctgatga

SEQ ID NO: 287483 - DNA, 281 bp, Glycine max
  unsure (1)..(281): unsure at all n locations
ggaaggcaagggcttgtnttgtcacaatccaaggtttgtttgtgtttgtgccactgtcctgtctttgtttatatatcttagtttcgtcggtgtttacttagatgtatgtgttgttgtagagagaagtnatggcgaacatagacatcgaagggatcttgaagcagcagcagccttatgatgggcgcgttccgaagacgaagancgtgtgtactttgggccctgcttctcgatccgtagaaatgaccgagaagcttctgagggcagggatgaacgttgctcgt

SEQ ID NO: 287484 - DNA, 282 bp, Glycine max
  unsure (1)..(282): unsure at all n locations
tgagaatagagccaaattctggtataaagcagattatggcctgtntcgtttctgcatagcagatagtgacacatgactggagagaaggatcagaacaatacaaattcattgagcattgtcttgcaacagtagatagaaagcatcaaccatggctaatcttttcagctcatcgtccccttggctactcctctaatctttggtatggcatggagggttcatttgaagagcccatgggaagggaaagtttgcagaagcttggcaaaagtacaaagtagacattgg

SEQ ID NO: 287485 - DNA, 288 bp, Glycine max
  unsure (1)..(288): unsure at all n locations
ctaaccttgttttcttcgtctttactcttctcttcacagaagcgtanaaacaaaaggcttgactnnnnnnnnnnnnnnnnnnnncttcgaatcgaatctcagaagtaganaaaaacacaaatcacaatcgctatggctaggtacgaccgagcaatcaccgtgttctcccctgacggccatctcttccaggtcgagtacgccctcgaagccgtccgcaagggcaacgccgccgtcggcgtccgcggcaccgacaatgttgtcctcggcgtcgagaaganatccaccgcc

SEQ ID NO: 287486 - DNA, 287 bp, Glycine max
  unsure (1)..(287): unsure at all n locations
gttgctccttcgccacaactctctgccaacatgggtatctccagagattctatgcacaagaggcgtgccactggtggcaagaagaaggcctggaggaaaaagagaaagtatgagcttggtcgccagcctgctaacactaagctgtcagccaacaagacagtcaggaggatccgtgttagaggtggaaatctgaaatggagggcattgagattggatactggaaattactcctggggaagtgaagctgtaactcgcaagactcgtgtactanatgtggtttacaatgc

SEQ ID NO: 287487 - DNA, 292 bp, Glycine max
  unsure (1)..(292): unsure at all n locations
ggcagaaccatccttcctagggtttatttgctcttctcgttggtgtatttcgctctggctgctctctggatcatcgtcctctacaagaagcgccaaaccgccttccgcatccattacttcangctgggcgtggtcatctttaaggccttgaatctcttgtncgaggccgnggacaaatcctacatcaagcncaccggangcncccacggttgggatatcnncttctacattttcagcttcctcaagggcatttcgctcttcactctaatgtncnttgattggcactggctgg

SEQ ID NO: 287488 - DNA, 238 bp, Glycine max
  unsure (1)..(238): unsure at all n locations
tgcaatgggctgccattgttttcatccacattgcatcattggtctctctttttgttgcaacaagtgcaagantccctggagtttacaccggtggcccctggcagagtgctcatgccaccttctacggtggcagtgatgcttctggaacaatgggtggtgcttgtgggtacggaaactgtacagccagggctacggagttaacaccgcggcgctgagcatgctctgttcaacaacggtt

SEQ ID NO: 287489 - DNA, 281 bp, Glycine max
cacagttggaggaaccattctgcgtagtgatctattggcaaattttttgacagagggcaattttagagcaagtgttgatttgcagcgcactcatcgtattaaaggaatgattaaaatggtggctacagttggtattcctgagaatacaggtatagcattggcctgtgctatgaatagttcttttagggggcgcgccagttctgatatttacaccatctgctctcaagactgtgaattatggaatcctgcttgcacaaaagcaatggctatgtcatttaatc

SEQ ID NO: 287490 - DNA, 253 bp, Glycine max
ttgggagctctcgttgtttcggagttagggaccttacgcagccatggccactgctacgaaatgccgccgccgccccaccacgccagctctcccagaaggaagctgacatccgatgatgttggccgccgacgtccacctcggcaccaagaactgcgacttccaaatggaacgttacatcttcaagcgccgcaacgacgggatttacattattaaccttgggaagacgtgggagaagctttcagctagcagctag

SEQ ID NO: 287491 - DNA, 252 bp, Glycine max
  unsure (1)..(252): unsure at all n locations
ttcattatacatgtatggagaagagaaacctaaaacatctgaagacaaaccacaagcaaaagcttcctctccccgaaattaagtgggagcatcacaaagttcatgataagagtcaataattactatgtttggngcctctgcaacttatggcactgctgatggaagtacaattattgcctcgtgttcagaagggactgacatcattctttggcatggaaaaactgggaagagtgttgggcatgtcgatacaaa

SEQ ID NO: 287492 - DNA, 252 bp, Glycine max
  unsure (1)..(252): unsure at all n locations
gtggatgacttggaagaggtcagtgaatattaccaaaatagaggttgcttcaatgagcctaatatnccctcatggagagtggtttaggattagaacgggcacatatgggtattttacagagttaggagttctgtatgctagatatcgttatgagangctcatggagcatatcaaactatttgcgacccgactcaatattccaaaactcataagagcctgtgatgaacaacaacattggaaggagctgaccta

SEQ ID NO: 287493 - DNA, 252 bp, Glycine max
  unsure (1)..(252): unsure at all n locations
gagaaaaactggatgaacgatcctaacggtcctatgtactacaagggatggtatcaattnttntannaatacaacccgannggtgcagtttggggtnacatagtttggggaacgcaggtcaagggacatgatccactggcttcacnttccactagnaatggtngatantcaatggtatgacatgcaaggtgtgtggacaggctcagcnacgatcttaccaaacggtgaaatcatcatgttatacagggttcc

SEQ ID NO: 287494 - DNA, 254 bp, Glycine max
  unsure (1)..(254): unsure at all n locations
tgaggccaggcaagccccactcaaccaccacacctctcctcgttcacgctaacccctttctgctcttcttctacctttcaagttttaaaagtataaagatggcagagacattcctatttacctcagagtcggtgaacgagggacaccctgacaagctctgcgaccaaatctccgatgctgtcctcgacgcttgcctcgagcaggacccagacagcaaagttgcctgcgaaacatgcaccaaaacncacttggtc

SEQ ID NO: 287495 - DNA, 251 bp, Glycine max
gtttattatcaggaagccaactaagattcactctcgctctcgtgctcgtcgaatgaaggaggcccaagaggaagggacgtcactctggctatggtaagcgtaagggtaaagggaggcaaggcttcccaccaaaatcctttggatgaggaggatgcgtgtcctcaggcgcttgcttcgcaagtacagggaatcaaagaagattgacaagcacatgtaccacgatatgtacatgaaggtgaaaggtaatgttt

SEQ ID NO: 287496 - DNA, 250 bp, Glycine max
  unsure (1)..(250): unsure at all n locations
tgggattatttttnanggggcacctgttaaggtcaggagacctactgattataatccntnccnttagctngntaccctaggcccaagccaacctaacccaaaccttaatcgggtgctgttggcttaacacctgggtcggccggtggacttgatggtcctgatcggatttttgttggtggacttccatattactttactgaaacacagatcagggagcttttagagacttttggtcctctacggggttttg

SEQ ID NO: 287497 - DNA, 250 bp, Glycine max
  unsure (1)..(250): unsure at all n locations
gcaatcgtggcccaacatttgacatggatttatctgattttatggatgaagaagaccaaaccaatctccatatgaaanagcaaagaaatactttgctcaagatccttccaaaagtgggcagcatatgttgcaggggcagttttggtcttaatgactganatgggtgttcaatttgaagacagtatcagcatgctggtttcatctgcagtcccagaaggaaaaggcgtntcatcttctgcatctgtggagg

SEQ ID NO: 287498 - DNA, 252 bp, Glycine max
ccgattgctagaatggaatttcgatgctcagtcatctcttttaccattctcttctcttcttgctcttgcaggagagagccatgtccatgcatcgctacctgaggaagattttgggaagctgtttggccaaacactcccattcccactgcactgcgagagcttctaaagcctctccctgcaggtgttgaaatcgatgaactccctaagcaaattgatgatacacagtacccaaaaacattcttctataaagaa

SEQ ID NO: 287499 - DNA, 247 bp, Glycine max
  unsure (1)..(247): unsure at all n locations
cggcggcaacagggagagaagatgaagttcaatccacgtgtgtcgagcagccgccgcaagatcccgaaaggctcatttcacggcgccgtcgagcgtgcggcgggtgctatgagcgcccctctgtcngcggagtgcggtccaagtacaacgtgaggtcgatcccagtacggaaggaggacgaggtgcaggtggtgcgaggaacatacnagggtcgcgaggggaaggtgactcaggtctaccgtcgaaa

SEQ ID NO: 287500 - DNA, 251 bp, Glycine max
  unsure (1)..(251): unsure at all n locations
cnacaacacaactccactcttagctgccattggtttttcttcttccatttctcttcctttctaagcttttttcgattacccatttggagattctgtcctaatggctcttgctccttccaaagtttcctccttttccgggttttctcccaaacccagtgttggggatgctctgaaaaacccaacttgctctgnttctctgagctttgcgaatgtgaaattggaagcagaaaccttagggtttgtgcctcaac

SEQ ID NO: 287501 - DNA, 244 bp, Glycine max
  unsure (1)..(244): unsure at all n locations
acgagnggnaagcttcaagacggattaaaacagagcttctggtgcagatgcagggtgtaggacacaatgatcagaaagttcttgttcttgcagcaacaaatacgcctatgccttagaccaggcaataaggcgtcgttttgataagcgcatatatattccgctaccagatttgaaggctcgccaacnctgttcaaggtgcatctaggagatactccccataacttgactgnngtgattttgaata

SEQ ID NO: 287502 - DNA, 247 bp, Glycine max
  unsure (1)..(247): unsure at all n locations
gttcactcttcttctcttgcngctagggttttagctccagttcttctagatttaaggaagatnggtaaggaaaaggttcacatcagtattgtggttattggccatntgactctgggaagtccactaccactggccacntgatctacaagnctggaggcattgacaagcgtgttattgagagatttgagaangaagctgctgagatgaacaagaggtcttcaagtatgcctgggtgcttgataagctt

SEQ ID NO: 287503 - DNA, 249 bp, Glycine max
  unsure (1)..(249): unsure at all n locations
cggtggaggaattttagtggacaaaactggagattggatcacacttatacaaaattctcccaattagtaacttgttgagagttgctgcttggaagaaaggctgtttaaggtcaagattgtgatgtctgggaatgcagcagtcaaaaggagtgattgggcctcattggtacaagtgtttttaacaaacagcaacagtacagagcattttgatgcangtaagtggacaaaatcagaaccacattcctggga

SEQ ID NO: 287504 - DNA, 247 bp, Glycine max
agagagagaaaagcgtgaatcatgtcggacgaagagcatcacttcgattctcagggcggatgcgggagcgtccaagacgtatcctcagcaggctggtaccattcgaagaatggctacatcgtcatcaaatccaggccttgcaaggttgtagaggtctctacgtcaaagacaggcaagcatggacatgcaaagtgtcactttgttgcaattgatatttttaatgggaaaaagcttgaagatattgttc

SEQ ID NO: 287505 - DNA, 244 bp, Glycine max
  unsure (1)..(244): unsure at all n locations
gttctcgtcttttgggcaccattcctcagtccatttcacagcaaactgtttgncnatnaaatggcaacagtgagaacaccattgaattttgattctagcaagcaagcttttgtcaattttctattgaccttctcggtggaggaattttagtggacaaaactggagattggatcacacttatacaaaattctccaattagtaacttgttgaganttgctgcttggaagaaaggcgtttaatggtc

SEQ ID NO: 287506 - DNA, 246 bp, Glycine max
gaaaaccctagctagtagtctcagttcgtttgagagagaaaaaatggcagagggtctcgtttctccgcggaaccatgcgcgcccacaccgacgtcgtgacggcgatgccactcccatcgacaactccgacatgatcgtgacggcgtcgcgcgacaaatccatcattctctggcacctcaccaaggaggacaagacctacggtgtcccccgccgccgcctcaccggacattctcacttcgtccagga

SEQ ID NO: 287507 - DNA, 241 bp, Glycine max
gaatatgtcaagccttactttagtggttctaaattgaaaagctttctagctggtcataatatcaccattactgatggtattgacaaaactagtgcaactttgaatttagaaagttagcagattgtgattttctcaagagaaactttaagcagatgtctaatgttttgtgggtggctcctgaggacaaggcgagtttgtggtcacaacttcatatgtttcgtgtaataatctggaaatgcaa

SEQ ID NO: 287508 - DNA, 241 bp, Glycine max
gcattattgagcaatcatttctgcctgggccatttgctgtggagatgtcttcggcagtttacaaggggtgggttttcactgatcaagcccttcctgcggatctatcaagagaggaatggcagtggaggatccatcctctccctatggccttcgccttgtgatagatgactacccttatgctgttgatggactagagatatggagtgctatccagacatgggttaaggatacgtctccttgt

SEQ ID NO: 287509 - DNA, 246 bp, Glycine max
  unsure (1)..(246): unsure at all n locations
caagaatacttggggaagctatgactgcagttgtagtggagatcttctgtatatgagggncccacgatacctgcataagtaaaactggcagtcagggaagatctacctgggctgctttttggttgattttacttggcgtagttatgattgctggtggggcattccntgtgtacaagtacagaataaggcaatacatggattcagaaatcagagcaatcatggcgcaatatatgcccttggacagcc

SEQ ID NO: 287510 - DNA, 241 bp, Glycine max
tcaagattcagcaagtgcgttttggaagcagagaccgaaatacttcgagatggcccgtacaaagcaaactgctcgtaagtcaactggaggaaaagctcccagaagcagcttgcaaccaaggctgcacgtaagtctgcaccaacaactggtggtgtgaagaagcctcatcgttatcgccctggaactgttgctcttcgtgagattaggaaataccagaagagcactgagctcctaatcagga

SEQ ID NO: 287511 - DNA, 239 bp, Glycine max
  unsure (1)..(239): unsure at all n locations
cttgttcagcatcaacctactcaatatcccacttcggaggagttgagtattgggaagataaagtttaagggctttcgacttgggtggtcaccagattgctctagggtctggaaggactattacgctcaggtggatgctgtagtgtacctggttgatgcatttgacaaggaaaggttttcagaatcaaagaaggagttggatgctcttctcnctgacgagtcatagcaaatgtgccttcc

SEQ ID NO: 287512 - DNA, 243 bp, Glycine max
  unsure (1)..(243): unsure at all n locations
gaanggttgancggngatgcggcgaagaagcaggtcgntatgaacccnagcaacaccgtttttgatgctaagngnttgnattggaaggcgtttttccgatgatccagtacaaggtgacatgaaattgtggccgttcaaggtgattnctggaccctgctgcggcaanntatgattgtggtgaactacaagggggangagaaacgttttccgcggaagagatatccnnccatggttctnncgaag

SEQ ID NO: 287513 - DNA, 242 bp, Glycine max
  unsure (1)..(242): unsure at all n locations
ggtgatgaaaaattgatgcgtganaggncacacctgctgttggcttgttgttcaaggatggcaatttgtaaganagatgtttggagagttgaatgtggaacccttctggatttccgctcacagttatttgcaatagcatttttaatgagatgctcattagatatagctatgaaaaattactgcgccaggctaaagctccaagtatgtttttacaatccttcaaaaattttgtttctttgtgt

SEQ ID NO: 287514 - DNA, 240 bp, Glycine max
gaacctcactgggatctggaatttcaccaaccctggagtcgtaagtcacaacgagattttacagatgtacaaggaatacgtggatccgaactttacatgaagaacttcactctggaggagcaggctaaggtgattgttgcccctagaagcaacaacgagcttgacgcctctaagttgaagaatgagtttcctcaacttttgtccatcaaagactccctcgttaagtatgtattccagcca

SEQ ID NO: 287515 - DNA, 170 bp, Glycine max
tgattgaagaagatgccgatcagaaacatgccatcggaaggcctgaagaggctactcaccccgacacgttgaaggcggggttggctgagttcatctccaccttgatcttcgtgttcgccggttcaggttccggcatcgcctacaacaagctcaccgacaacggcgccgcc

SEQ ID NO: 287516 - DNA, 243 bp, Glycine max
  unsure (1)..(243): unsure at all n locations
gatggagatgtgtacaagtactatgctgatggagaatggaaganatctgcttctgggaaaagtgttgccatcatcaaccccactaccagaaagactcaataaaagttcaagcncgttcacaagaggaggttaacaaggtcatggacttggcaaaatctgcccaaaagttatgggcaaagaccccactatggaaacgtgctgaacttcttcacaaggcagctgctatccttaaagagcacaaag

SEQ ID NO: 287517 - DNA, 235 bp, Glycine max
gttgatcgagataactagaaacagtgtgatgaaaatgaaggtccttgttttcttcgttgctacaattttggtagcatggcaatgccatgcgtacgaatgttccctctccgaatgaacactggctatggtgcccgtactccggaggtgaaatgcgcaagttggaggcttgctgtggaagcacacaacatctttggcttgagaccattcctgaagagtgcgttgaagcaacaaagga

SEQ ID NO: 287518 - DNA, 241 bp, Glycine max
  unsure (1)..(241): unsure at all n locations
tgaccgtttgcntgttgcaaatgttggggactccagagctgttatatgcaggggtggaaatgccattgctgtttctcgagatcacaagccagaccaaatgatgagaggcgaaggattgaagatgcaggtggttttgttatgtgggctggaacttggagagttggtggagttcttgctgtntcacgtgcatttggtgatagactcctgaagcagtatgttgttgctgatccagaaatccagg

SEQ ID NO: 287519 - DNA, 285 bp, Glycine max
  unsure (1)..(285): unsure at all n locations
cacgctcccaagctctggcaagcgctacacctcccggggtcgctacgccatgatgccggagatccccttcgaagctttccgcgtgnnctctcagttcttcacgctcacgcgccgccacgcgctggtcgtcgtcaaggataggaccctgtggcagaaattcaagatcccgtgttaccgtgacgatgaatgctaccctgaggagcattattttccgaccctgttgtccatggcggatcctgatggctgcaccaaatacacgctcaccagggttaattggaccggcac

SEQ ID NO: 287520 - DNA, 285 bp, Glycine max
  unsure (1)..(285): unsure at all n locations
cnaatcctcaaattcgatttgtaccaaattttcttcacaaaatgtctggtcgtgggaaaggtggcaagggtttgggaaagggaggtgccaagaggcacagaaaagttcttcgtgataacattcaaggtatcacgaaacctgcgattcgtaggttagcgagaagaggtggcgttaagaggatcagtggtttgatctatgaggaaaccagaggagttctgaagattttcttggagaacgtgattcgagatgctgtgacctacaccgagcagctaggaggaagacggt

SEQ ID NO: 287521 - DNA, 289 bp, Glycine max
  unsure (1)..(289): unsure at all n locations
atcgtccgttaccgccgctgccctagaccaccgcaagcnacgtcgcacaccgccttcatccgttagngcaaaaatgagtcgaggaagtggaggtggatacgatcgtcacatcactattttctcccctgaaggacgtctctttcaagtggagtatgctttcaaggctgtgaaggctgcaggaatcacctcgattggtgtccgaggaaaggatcaattgtgtcgttatcagaagaaggttccggataagcttttggacaacacnagtgttacacacctctttncaatcacc

SEQ ID NO: 287522 - DNA, 283 bp, Glycine max
  unsure (1)..(283): unsure at all n locations
cacaacaacactctctcttctcgctcttggcttttcgctcttcactcactctcattcattcatttccaccgttcatggatcnanctaagcgtgtggggtaacacgcccttggcgacggtggatcccgagatccatgacctcatcgagaaggagaagcgccgtcaatgccgcggaatcgagctcatcgcctccgagaacttcacctccttcgccgtcatcgaggccctcggcagcgctctcacgaacaaatactccgagggcatgccgggcaacgctactaggc

SEQ ID NO: 287523 - DNA, 286 bp, Glycine max
  unsure (1)..(286): unsure at all n locations
gnaatgtcccaaggatgagaaacttcctcgnccgcaaaatttttgaccaacctaagacgcgctgcttcactattctccctatggagtttnatcttgtggttcgtcagaagtttttaaattttgtgaggttcattatgaagaaaagggacaagcttagttgtcaagttggaatcaacccatactccatggaatggnctggtttggccaatagattactgagtaanggcaacgatattctgtgttgcgattatgctagttttgatggtttgattaccaggcaagttat

SEQ ID NO: 287524 - DNA, 289 bp, Glycine max
  unsure (1)..(289): unsure at all n locations
ttcttcagccactccgcacctcgcagcctctgtgccctcannaaccatggctgaaatcgaaactaccgttccagatcccacccaaatcgacgtcaaactcttcaatcgctggagcttcnnggatgttgaggttaatgatatgtctctggctgattacattggagtgtccccatcaaagcatgctacatatgttcctcacactgctggtaggtactcagtgaagaggttcaggaaagcgcatgccccattgttgagaggctcaccaatctctgatgatgcagggaggaac

SEQ ID NO: 287525 - DNA, 278 bp, Glycine max
  unsure (1)..(278): unsure at all n locations
ttctgtctctgtgtttgcngctgaggattccgaacgagcgaccttcttcgtttctcgcaaagtttaagttcatcatgggtaaggaaaagactcacatcaacattgtcgtcattggacatgtcgactctgggaagtcaactaccactggtcatttnatctacaagcttggaggtattgacaancgtgtgattgagaggttcgagaaggaggctgctgagatgaacnagaggtcattcaagtatgcctgggtgctgacaagctcaaggctgagcgcgaaa

SEQ ID NO: 287526 - DNA, 281 bp, Glycine max
  unsure (1)..(281): unsure at all n locations
gntcgagataactagaaacagtgtgatgaaaatgaaggtccttgttttcttcgttgctacaantttgcgtngcatggcaatgccatgcgtacgatatgttccctctccgaatgaacactggctatggtgcccgtactccggaggtgaaatgcgcaagttggaggcttgctgtggaagcacacaacanntttggctttgagaccattcctgaagngtgcgttgaagcaacaaaggaatacatccntggcgaacaatatagatcagactccaaaacagttaac

SEQ ID NO: 287527 - DNA, 276 bp, Glycine max
  unsure (1)..(276): unsure at all n locations
gcctgagtctgacatttactggaaaaaatttgaagagaaatatcatttctcatgccaatttactgctgatctttttgcaatgaaccacacagactttatcatcaccagcaccttccaagagattgctggaagcaaggacactgntggacagtatgagagtcacactgccttcacccttccaggactttaccgtgttgttcacggtattgatccatttgatccaaagttcaacattgtctctcccggtgcagacatgggtatatacttcccatacac

SEQ ID NO: 287528 - DNA, 230 bp, Glycine max
  unsure (1)..(230): unsure at all n locations
ctgcgatttagtgtcttgctcgagcaaaaaatgagaggtctgaatanatcggtttctgaaaccagtggtgttacttgttgacaggagcattagctcttttttggacttttgatgttttctcttgtggagggggatcgagtttttggatttttatatactcgctgatgtactggcttgaatacttgctaatgtacttgttattgattgttatagtagatatttgtccgtcc

SEQ ID NO: 287529 - DNA, 279 bp, Glycine max
catggcgaaggtggcgattgttgagctcaatagaaactgtgccaatacagtggaagagatagtgaaaatggagagaaagatctttcccaagcacgaatcactggcttcattctttcacgatgaacttagaaagaaaaacagtgggttgctttatattcacgtgaatggcgtaattgcaggctatgtcatgtattcttggccttcttccttgtacggctccatcacaaagctcgcagtgaaggagcaatggaggggacaaggccaggagaggctctgttg

SEQ ID NO: 287530 - DNA, 269 bp, Glycine max
  unsure (1)..(269): unsure at all n locations
gggcacttccngaagtgttaagagaatgcctctttctatagggggaggagctggtgcaaagaatgctattctcatgaacatgccaaatgctgttctttcaatgtggagatattttgttggagatctcgtctttgaagtttctaagatgacttctccctacattaaatgtacagtctctttcttcatagcattggaaatttggctgatgacaccatcaattttgaggcctttccccacaagctggtgcagtttggagaaatcaggaaaaa

SEQ ID NO: 287531 - DNA, 268 bp, Glycine max
  unsure (1)..(268): unsure at all n locations
gaagaanatggnttgtttttcagcatatacacgtgcttnttcagctgtcactttcctcttatcttcccaaatcagctttgttancagcaagagccatgaacatattaggattcccttgcttttgnagctcttggacccacttcttagctcgggtaaaggagtccgcgctagtgatgtcatagacaatgatagcagcagcagcacctctgtaatantgggannnangctatggtacctctcttgtcctgctgtgtcccatatctcanac

SEQ ID NO: 287532 - DNA, 258 bp, Glycine max
  unsure (1)..(258): unsure at all n locations
tacaagncagagcttgatattattnccnctgctagctgcacnaaccaactggcttgctnccacttgctaaggttattaatgacaggtttggcatgttgagggtttgatgaccactgttcattccatcactgccacccagaagactgttgatgggccatcagccaaagactggagaggtggaanagctgttcatttaacatcatcctagcagcactggagctgccaaggctgttggnaaagtccttcctgtttgaacgg

SEQ ID NO: 287533 - DNA, 264 bp, Glycine max
  unsure (1)..(264): unsure at all n locations
agttttancttacatagtttttcattgttttacttaatctacaatggctgcttcaacaatggctctctcttcatcattcattggctggccaagctatcaagcttgccccctccacccctgagcttggtgttggangggttagcatgaggaaaacagcctccaaaactgtttcctcaggaagcccatggtacggcccagaccgtgtcaagtacttgggcccattctcaggtgagcccccatcctatctcatggtgnattcccagg

SEQ ID NO: 287534 - DNA, 271 bp, Glycine max
  unsure (1)..(271): unsure at all n locations
tgttgatcgagataactagaaacagtgtgatgaaaatgaaggtccttgttttcttcgttgctacaattnctggtagcatggcaatgccatgcgtacgatatgttccctctccgaatgaacactggctatggtgcccgtactccggaggtgaaatgcgcaagttggaggcttgctgtggaagcacacaacatctttggctttgagaccattcctgaagagtgcgttncagcaacaaaggaatacatccatggcgnaacaatatagatcagac

SEQ ID NO: 287535 - DNA, 281 bp, Glycine max
  unsure (1)..(281): unsure at all n locations
gatcgagataactagaaacagtgtgatgaaaatgaaggtccttgttttcttcgttgctacaattttngtagcatggcaatgccatgcgtacgatatgttccctctccgaatgaacactggctatggtgcccgtactccggaggtgaaatgcgcaagttggaggcttgctgtgnaagcaccacaacatctttggctttgagaccattcctgaagatgcgttgaagcaacaanggaatacatccatggcgaacaatatagatcanactccaaaacattancca

SEQ ID NO: 287536 - DNA, 275 bp, Glycine max
  unsure (1)..(275): unsure at all n locations
cattgaaattnattctctatacgagggaattgatttctactccactgttactcgtgccagatttgaggagctcaacatggatctcttcaggaaatgtatggagccggtggagaaatgtttgagggatgctaagatggacaaaagaagtgttgatgatgttgtccttgttggtggttctaccagaattcccaaggttcaacaactgcctggcaggacttctttaatggaaaagaantttgcaagaccntaanccgatgaggccgttgcaaaggggc

SEQ ID NO: 287537 - DNA, 276 bp, Glycine max
  unsure (1)..(276): unsure at all n locations
cttgggaggaggcactgtggcagaagtcctaggagtgtaaaacagagacgcaaaatgaagacgatcttgtcgtctgagaccatgaatattcccgacggcgtgagcatcaaggttcacgctaaggttatcgaggttgagggccctcgtggaaaactcgtgcgagacttccntcatctgaacttggacttccaacttatcaccgacgatggcggtaaaaggaagctcaagattgattcttggtttggttctcgtaaaacctccgccgccatccgcacc

SEQ ID NO: 287538 - DNA, 277 bp, Glycine max
cttttctcagttctcacactcattccgtgctctaaatctcaaattctagggttagggttcccaatttctccgccaatcagaagatgagttccaccggtggttctaccaagggcggaaggggcaagcccaaagcctccaaatccgtttcaagatcgcagaaagctggtctccaattccccgttggaagaatcgctcgattccttaaggctgggaaatacgctgagcgtgttggtgctggtgctcctgtgtacctctctgcagtgctcgagtatctcgc

SEQ ID NO: 287539 - DNA, 275 bp, Glycine max
  unsure (1)..(275): unsure at all n locations
gataactagaaacagtgtgatgaaaatgaaggtccttgttttcttcgttgctacaattttggtagcatggcaatgccatgcgtaacgatatgttccctctccgaatgaacactggctatggtgcccgtactccggaggtgaaatgcgcaagttggaggcttgctgtggcagcacacaacatctttggctttgagaccattcctgaagagtgcgttgaagcaacaaaggactacatccatggcgaacaatatagatcngactccaaaacgttaacc

SEQ ID NO: 287540 - DNA, 277 bp, Glycine max
gttcgagataactagaaacagtgtgatgaaaatgaaggtccttgttttcttcgttgctacaattttggtagcatggcaatgccatgcgtaacgatatgttccctctccgaatgaacactggctatggtgcccgtactccggaggtgaaatgcgcaagttggaggcttgctgtggaagcacacaacatctttggcttgagaccattcctgaagagtgcgttgaagcaacaaaggaatacatccatggcgaacaatatagatcagactccaagacagtt

SEQ ID NO: 287541 - DNA, 279 bp, Glycine max
  unsure (1)..(279): unsure at all n locations
gtccttgctagaanctggtgtgcttcctggncatccaaggttgacaagggcacagtcgagcttgctnnaactaatggagaaaccaccactcagggtctagatggccttggtcagcgttgtgccaagtactacgaatctggtgcacgttttgccncatggcgtgcagtgctnaagattggtcccaacgagccatctgagctgtctatccatgagaacgcctatggcttggctagatacgctgtcatatgccaggagaatggctggttcccntgttggncc

SEQ ID NO: 287542 - DNA, 271 bp, Glycine max
  unsure (1)..(271): unsure at all n locations
tgcagaattcatgggcctatagtactcgaactattggggtcatggtgatggttcatnntgatgacaagggnctggtactacctcctaaagtagcatcagtacaagttattgtgattcctgtgccttacaaagatgccgatactcaaggaatctttgatgcctgttctgcaactgtgaatacattgaatgaagcaggtattcgcgctgagtcagattctagagataattattctcctggatggaagtattccaactgggaatgaaggggttc

SEQ ID NO: 287543 - DNA, 291 bp, Glycine max
  unsure (1)..(291): unsure at all n locations
tcgtnttnnctnttctgagatgcaagtcaatgagcntngngtntttcttcnatnctacagttttngtagcnnggnnatgncntgcgncacnatgtgntccctnnccgaatgaacactggctanggtgcccgtactcncggnggtgaaaatgcgcaagttggaggcttgctgtggaagcacacaacatctttggctttgagaccattccctgaagagtgngttgaagcaacaaagggaataccatccatgggcgaaacaatatagatcagactcccaaaccagttaacccac

SEQ ID NO: 287544 - DNA, 268 bp, Glycine max
  unsure (1)..(268): unsure at all n locations
gttctttctctcgcaatcttcaccacattcaccgancttttgcattcacattgaatatggctgaggctacacaatctaatgctgagttgttggagtggcctaagaaagataagcgccgcttcctgcatgttgnctatcgtgttggtgatcttgatcgcaccattaagttttatactgaatgttttgggatgaagcttttgaggaaaagagatattccagaggagaaatatgccaatgctttctggatttggcccgaacaatcccatnc

SEQ ID NO: 287545 - DNA, 273 bp, Glycine max
  unsure (1)..(273): unsure at all n locations
cacgaggttgtgtacacgaagaaggggtacaccgactcaaccggagcatacacaatgtacgtggatgaggatcacgcagattcagatctgcagtgccaagcttgtaagcagccctcaccctcaatgcaaggaagtcaccccaggccgcgacgaagccgtcgtgattctcacccgctacaacggncattgccttccgacgataggttcgccatgccatgggcttcatgtctcaggaggttgcttctggctgtgctgagatctcaggcataccag

SEQ ID NO: 287546 - DNA, 281 bp, Glycine max
  unsure (1)..(281): unsure at all n locations
gngaaacactcgtgaggtgcttcacaaatttactgttgatctaccaaagaagcatggtagaggaggtcaatcagctttgcgttttgctcgacttaggatggaaaagcggcacaactatgttaggaaaactgcagaacttgctactcagtttttcatcaatcctgccaccagtcaacctaatgtttctggacttatacttgctggttctgctgacttcaagactgagttgagtcagtcagatatgtttgaccctcgattgcaagcaaaaatattgaatgtgg

SEQ ID NO: 287547 - DNA, 261 bp, Glycine max
  unsure (1)..(261): unsure at all n locations
ggntcaatgagttcgtccgcaagaccggtggcgccggcaaaggtcgcactaacatgcgccgcaccgtcaagagtgctcctcagagcatttggtatggncctgacgtcccaagtattgggtccattctccggagcagattcatcatagntgacnggtnnattcctggtgactacggatgggacancgctggattatnactgacccggaaacttcgcnaggaaccgggagtggaggtgattcnanagnaatgggcatgntgnt

SEQ ID NO: 287548 - DNA, 282 bp, Glycine max
cgttgctctgcttcaacattgcgggaagcagaagaagcgccgcagctatggtgaagtactccagagaacccgacaatcccaccaagtcctgcaaggccagaggcgctgacctcagagttcattttaagaacactagggagactgctttgccatcaggaagttgcccttgttaaagctaaacgatacttagaggatgttttggcccacaaacaggctattctttccgacgcttttgtggtggtgttgggaggacggcccaggctaagaacagacactccatgg

SEQ ID NO: 287549 - DNA, 281 bp, Glycine max
  unsure (1)..(281): unsure at all n locations
gcttgcaagagtgaaaaccttctcttacccttctctcaagtttcaagagatttcatcatggctccaaagaaggacaaggctccaccaccttcctccaagcccgccaaatctggcggtggcnnnnnnnnnnnnnnnnnnnnnnnnnnngganagcaaaaggagaaggtgaacaatatggtgctgtttgatccagggcacctatgacaagctcctttctgaagctccccaaatacaagctcatcactccttccattctctctgatcgtttgaggattaatgga

SEQ ID NO: 287550 - DNA, 274 bp, Glycine max
  unsure (1)..(274): unsure at all n locations
tgaattgttggaatcattggagaccaatggagcgatctgcttggagaccacagangcgaaagcaggacctttaagcttcctaatcccatgtactacattgagtagtacttcacctctctcaacaatctagctanagtttgctcctatctatatgtaatanggtatgctgatatgcactattcaaataggagcattatctatgtttgttaatgtcactttatgttatgtgggtaagtcacctaagacactccacgtacctattgttgtcnttacg

SEQ ID NO: 287551 - DNA, 286 bp, Glycine max
  unsure (1)..(286): unsure at all n locations
gtgagtttgttgatcgagataactagaaaacagtgtgatgaaaatgaaggtccttgttttccctcgttgctacaattttgcgtagcaggcaatgccatgcgtacgatatgttccctctccgaatgaacatgggctatggtgcccgnattcggaggtgaatgcgcaagttggaggcttgcgtggaagcacacaaacatctttggctttnaganccattccggaagagtgcgttgtaagcaacaaaggaatacatccatggggaacaatatggatcagactccaaanc

SEQ ID NO: 287552 - DNA, 279 bp, Glycine max
  unsure (1)..(279): unsure at all n locations
cncagcttcattatttaagacagatttatcattctaaatttggtgtttatcttgagcatgacattgaaacaaacatctccggggatcataaaaagattttgcttacnatatgtaaccacaccacgtcatgaagggcctgaggtaaatagagagatggctgagaaggatgcaaggttctctacaaagcaggggagaagagactgggaaccgatgagaagacttttgtgcaatattcagcgacggagtgcggctctttggcggctaaacttctattaccaa

SEQ ID NO: 287553 - DNA, 280 bp, Glycine max
  unsure (1)..(280): unsure at all n locations
tgnggtgctgcacaacgaaactcacagaagaaagaagaaaaagaagcgaaactaaagttcagcattcgaaaaagatgagtagcatcggtacaggttacgatctatcggtcaccactttctcccctgatggccgcgttttccagatcgagtatgccgctaaagccgtcgacaacagcgggactgttattgggatcaagtgcaaagatggggttgtgttgggcgttgagaagcttattccgtcgaaaatgatgcttccgggttccaatagaagaatacaccc

SEQ ID NO: 287554 - DNA, 281 bp, Glycine max
gtccgcagctgctgcagacaaaaccctagtgagcagagcgtggaaagcaccggccaccggccatgacattcaagcgcaggaatggaggtcgcaacaaacacggccgtggccacgtcaaattcatccgatgctcccaactgtggcaatgctgccccaaggacaaggccatcaagaggtttcttgtgaggaacattgttgaacaggctgcagtcagagatgtgcaggaagcctgtgtctatgaacagtacacgcttccgaaactctatgtgaagatgcagtcc

SEQ ID NO: 287555 - DNA, 276 bp, Glycine max
ttttgatgcatgtaagtggacaaaatcagaaccacattcctgggaattgatcttcccaatagaggtatgtggtcccaataatggttttgaaatgtggagttctgagtgggcaaatcaaacttcatggcatttgagtttccttattgacaatcccaaacaatctacagtttttgatattctcttgggaatctctcaagattttgaaattgctggtaatactcttatgccagctttttctgttccacggctactgccagatcttctgaaaatgcggac

SEQ ID NO: 287556 - DNA, 274 bp, Glycine max
  unsure (1)..(274): unsure at all n locations
gggttcaacaggtgagactcagattactccaacccatgtatctgatgaagaggcaaaccttttcgncatgcaatagccagtgcctcagtactccctatggttctcanatcagctcttgagttgatctgttggaaatcatagccaaggctggccctggtgttcacctttccccctgcgacattgcttcctcggctcccaacacacaacctgatggcacccgttatgtnggaccgtatattgcgcctcttggctgctacaatatcntctctttttc

SEQ ID NO: 287557 - DNA, 276 bp, Glycine max
  unsure (1)..(276): unsure at all n locations
ttctgtgtntgcggctgaggattccgaacgagcgaccttcttcgtttctcgcaaagtttaantnnatcatgggtaaggaaaagacttcacatcaacattgtcgtcattggacatgtcgactcgggaagtcaactaccactggtcatttgatctacaagcttggaggtattgacaagcgtgtgattganaggttcgagaaggaggctgntgagatgancaagaggtcattccaagtatgccgggtgcttgacaacctcaaggcgagcgngaaangga

SEQ ID NO: 287558 - DNA, 279 bp, Glycine max
  unsure (1)..(279): unsure at all n locations
gagagagagagagatccatcgatcaattaatttccaatggccgatcagctcaccgacgaacagatctctgagttcaaggaagcctttagcctcttcgacaaggacggcgatggttgtattaccaccaaggaacttgggactgtgtntgcggtcgcttgggcagaacccaactgaggctgagctgccaggacatgataaatgaggttgatgctgatgggaatggtaccattgattncccagattcctcaatctcatggcgcgcaagatgaaagacatgnt

SEQ ID NO: 287559 - DNA, 295 bp, Glycine max
  unsure (1)..(295): unsure at all n locations
tgcaaatnctgcgttgaagagagcatttgaggccttgaacactcatcttgcctccaatacttaccttgttggccattctgttacccttgctgacatcataacaacatgcaacttgtatttaggtttcagccagctcttagttaagagcttcacctctgagttccctcacgttgaacgatacttttggaccttggtcaaccagcctaacttcagaaagattctaggtcaggttaagcaaactgaggctgttccacctattccatcggcanagaagccttcccagtctaaggaatct

SEQ ID NO: 287560 - DNA, 286 bp, Glycine max
  unsure (1)..(286): unsure at all n locations
gtggaaggagtgcagaatcttggagacaaagcagtgatgtgtcatgggctaaatttcagaactgcagtattttactgccataaagtccgtgaaacaacagctttcatggttccattggtggctggtgatggaaccaaaactcaggcacttgctgtttgccactcagatacttctggaatgaatcatcacatgcttcatgaactcatgggagttgatcctggaactaaccctgtttgccatttcctggaagcaaggccattttatgggtaccaatttatctatggnc

SEQ ID NO: 287561 - DNA, 289 bp, Glycine max
gtacgccgtgaattcaaggctaacaagatctccgaggaagagtatgtaaagtcaattaaggaggaaattcgcaaagttgttgagcttcaagaagagcttgatattgatgttcttgttcatggagaaccagagagaaatgatatggttgagtacttcggtgaacaattgtcaggctttgccttcaccgttaatgggtgggtgcaatcctatggttcccgttgcgtgaagccaccgatcatctatggtgatgtgagccgcccaaagccaatgaccgtcttctggtcatctc

SEQ ID NO: 287562 - DNA, 297 bp, Glycine max
  unsure (1)..(297): unsure at all n locations
cctaacgcgtgcagagcagagagagacgcagccatggggcgaaacncccgcgaggtgttataggcaaattaagaacaaaccataccccaagtcacggttttgccgtggtgttcctgatcccaagatcaggatttacgatgttggtatgaagaagaagggtgttgatgagtttcctttctgtgtccatctggttagttgggagaaggaaaacgtttctagtgaggccctggaagctgctcgnattgctngcaacaagtacatggccaaatttgctggagtnnctgctaccnacttgag

SEQ ID NO: 287563 - DNA, 284 bp, Glycine max
  unsure (1)..(284): unsure at all n locations
gcagnactanancgctacttggaagcttcacaaattagggagagagcgattganaggattaataatgttattggaacatacaatgatttgaggctcagaatattttccaaataccctgatttattccctgatgaggtgttcaacatagagtccttcaaatggtcatttggtattcttttctcccgcttggttcggttaccctcaatgggtggaaatgttgccttggttccttgggctgatatgctgaatcatagttgtgatgtggagacatttttggattatga

SEQ ID NO: 287564 - DNA, 286 bp, Glycine max
  unsure (1)..(286): unsure at all n locations
agataactagaaacagtgtgatgaaaatgaaggtccttgttttcttcgttgctacaattttngtagcatggcaatgccatgcgtacgatatgttccctctccgaatgaacactggctatggtgcccgtactccggaggtgaaatgcgcaagtnggaggcttgctgtggaagcacncaacatctttggctttgagaccattcccgangagtgcgttgaagcaacaaaggaatacatccatggcgaacaatatagatcagactccaaaacagttaaccaacaagcttt

SEQ ID NO: 287565 - DNA, 285 bp, Glycine max
  unsure (1)..(285): unsure at all n locations
cctaacttaggtggtctcactgttgagcaggctatccaaaacaagaagttgttcatcttagatcaccatgactatctcattccanatttgaggaaaataaatgcaaataccacaaagacttatgctacaagaaccatatttttcttgaaaaatgatggaactttgacgccattggccattgagttaagtaagccgcatcctcagggtgaagaatatggtcctgttagcgaagtctacgtgccttcgagtgaaggagttgaagcttacatttggttactggcaaag

SEQ ID NO: 287566 - DNA, 283 bp, Glycine max
  unsure (1)..(283): unsure at all n locations
cntcagtggtgtnagatctgtacctgcctagccattgatttggaaaagtccaagcttcaaagatgattaagcttcagagtgatgctcttagagaagctatctcaggaatcatgactgattccaaggaanagaacaggaaatttgtggagaccattgaactccaaattgggctgaaaaactatgatccccagaaggacaagcgttttagtggctctgttaagttgcctcacatncctcgccccaagatgaagatttgtatgcttggagatgcccaacacgttga

SEQ ID NO: 287567 - DNA, 277 bp, Glycine max
  unsure (1)..(277): unsure at all n locations
ctggttatggaggatttgcagctgcattgattgatcagagtatggncagttgggttatgaatgtggttcctgttagtggtccaaataccttgcctgtcatatatgaccgggggctgattggagttatgcatgactggtgtgaaccatttgacacctacccgagaacctatgatttactgcatgctgcaaatctgctttctgttgagaagaaaagatgcaatttgtcatcaattatgcttganatggatcgaatactaaggcctggtggacgggcata

SEQ ID NO: 287568 - DNA, 292 bp, Glycine max
  unsure (1)..(292): unsure at all n locations
gccatccttcgtttggatctcgcaggtcgtgatctaactgatcatttgatgaagatcctcactgagagagggtacatgttcaccacctctgctgagcnagaaattgtccgtgacatgaagganaaacttgcatatgttgccctagattatgagcaagaactcgagactgcaaaaagcagttcatcagttgagaaaagctatgagcttcctgatggacaggttatcacaattggggcagagagattccgttgcccagaagttcttttccagccatcnnntgattggaatggaa

SEQ ID NO: 287569 - DNA, 278 bp, Glycine max
  unsure (1)..(278): unsure at all n locations
gctaaccattctctgcacttttcagttacaaagcatttcattgttttacaatatacaacactacaatgnctgcttcaacaatggctctctcttcatcatcattggctggccaagctatcaagcttgccccctccacccctcagcttggtgttggaagggttagcatgagaaaaacagcctccaagactgttacctcaggaagcccatggtacggcccagatcgtgtcaagtacttgggcccattctctggtgagcccccatcctacctcactggtgaa

SEQ ID NO: 287570 - DNA, 279 bp, Glycine max
  unsure (1)..(279): unsure at all n locations
caaaggattctacccgccgctcgannggaattgcgcttcaangcgtctcgtagggctaatccgcctcacgagggtcaccaacggcacgttgncttttgngggccgaggccccctactgctggtcggcaaacggacggngggcgcacgcgtcgcttctagcccggattctgacttagaggcgttcagtcataatccaacgcacggtagcttcgcgccactggcttttgcaccaagcgcgatgaccaattgtgcgaatcaacggttctctcgtactaggtt

SEQ ID NO: 287571 - DNA, 280 bp, Glycine max
  unsure (1)..(280): unsure at all n locations
gtgatgcttcactgttgctggactccacaagaaggagcttgtctganaaggaaacagatagaagctttgggttgagaaatttcaggtacattgagaccatcaaagaagctttggaaagagaatgccctggagttgtttcatgtgctgatatcctcgttctctctgccagagatggcattgtttcgctaggaggtccccatatccctcttaagactggaagangggatggtagaaggagcagagctgatgtggttgagcagtgcctcccagaccacaatgt

SEQ ID NO: 287572 - DNA, 282 bp, Glycine max
  unsure (1)..(282): unsure at all n locations
aagctgtgtggttcaangccgggtcccagatcttcagcgagggtgggctggactacttgggcaacccaagccttgtccacgcccagagcatcctcgccatctgggccacccaagttatcctaatgggtgctgttgagggttatcgtattgctggtgggcccctcggtgaggtcactgacccaatctaccctggtggcagctttgacccattgggccttgctgatgacccagaggcttttgctgagcttaaggtgaaggaatcaagaacgggagattggccat

SEQ ID NO: 287573 - DNA, 281 bp, Glycine max
  unsure (1)..(281): unsure at all n locations
gctacttcctactccaaccgcacttctgctccgcaattatcatgggcaaggtcaagatcggaatcaacggatttggaagaattggccgtttggtagccagagtggctctgcagagagacgatgttgaactcgttgccgttaacgaccctttcatcaccaccgattacatnncatacatgtttaaatacgacagtgttcatggacactggaagcatcacgatgtcaccgttaaggacgagaagacccttctcttcggtgacaagccagtcactatttttggt

SEQ ID NO: 287574 - DNA, 290 bp, Glycine max
  unsure (1)..(290): unsure at all n locations
gagataactagaancagtgtgatgaaaatgaaggtccttgttttcttcgttgctacaattttggtagcatggcaatgccatgcgtacgatatgttccctctccgaatgaacactggctatggtgcccgtactccggaggtgaaatgcgcaagttggaggcttgctgtggaagcacacaacatctttggctttgagaccattcctnaanagtgcgttgaagcaacaaaggaatacatccatggcgaacaatatagatcagactccaaaacagttaaccaacaagcttactt

SEQ ID NO: 287575 - DNA, 274 bp, Glycine max
  unsure (1)..(274): unsure at all n locations
aggagtctggtgaacacattgttgctggngcaggagagcttcatcttgagatctgtttgaaggacttgcaggatgatttcatgggtggagctgagatcattaaatctgaccctgttgtgtcattcagggagactgtcctggagagatcatgccgcactgtgatgagcaaatcacccaacaagcacaatcgtctgtacatggaagcaagaccattggaggaaggtcttgccgaggccattgacgatggcaagattggaccaagggatgaccccaa

SEQ ID NO: 287576 - DNA, 274 bp, Glycine max
  unsure (1)..(274): unsure at all n locations
ggaagcagaagaagcgccgcagctatggtnaagtactccagagaacccgacaatcccaccaagtcctgcaangccagaggcgctgncctcagagttcattttaagaacactagggagactgcctttgccatcaggaagttgccccttgttaaagctaaacgatacttagaggatgttttggcccacaaacaggctattcctttccgacgcttttgtggtggtgttgggaggacggcccaggctnngaacagacactccaatgggcaaggacgct

SEQ ID NO: 287577 - DNA, 278 bp, Glycine max
cgatctgtttcgtgttgtagctagctcctcgaaaatgctggcacgcctcgccgcgagtcgcttcaacgagatccgtcagattttccgtcagccttctagggctttctcaaccgctccgaactaccaccttgacacaccggacaacaaccctaaacttccatgggaattcaccgaggccaatcaagcaaaggttaaggagattttgtctcactatccatccaactataagcaatctgctacaattcctcttttagatcttgcccagcagcagcatggag

SEQ ID NO: 287578 - DNA, 288 bp, Glycine max
  unsure (1)..(288): unsure at all n locations
ctgcactcttcatcaagctccgctccaacacaggggaaaatganggngatccttcancgngcagggagggtnatgcggnaaccagatcgnttccnaatttcctgggaatcggtgtncaacgagcacggcatagatccgacggggaagtacgtcggaaactcagatctgcaactccgagcgcgtgaacgtctactacaatgaagcctcgtgcgggcnttcgtgccacgcgcggtgctgatggacctggagcccggaaccatggacagcgtgcggaccgggccgtacggg

SEQ ID NO: 287579 - DNA, 285 bp, Glycine max
  unsure (1)..(285): unsure at all n locations
ctcggcctcaacgcgctcgattatgaggtctggcttggtgatgttagcattggtgntgcagaactcaccaagtctgctaaaattngaaaaagntggantanntaatatggntatcccaattaccttcaggcctaaggattttggctcngcactangggacatgattagaggaagaggaactgcttacaccataaaaggacatattgatgttgacactccctttggagcaatgaagttgcccatcagcaaagaaggtggtactacccgtcttaagaaaaagaagga

SEQ ID NO: 287580 - DNA, 283 bp, Glycine max
  unsure (1)..(283): unsure at all n locations
ttcaaaacactcataacacaaagcacaaagcaaagctcatccttgagttaaaaaatggcagcagcttcttccatggctctctcatccccattctttgntnggnaaggcgtgaagntgggccnatnagcccnagaagtgggaagggtnagcatgaggaagaccgtcaccaagcaggtctcctcaggaagccnaanntacggcccagaccgagtcaagtattgggcccttctctggcgagccccgtcntacctaaccggtnattcccaggcgattacggctggga

SEQ ID NO: 287581 - DNA, 275 bp, Glycine max
  unsure (1)..(275): unsure at all n locations
ccgcatttaattcacttgcccgcnaatccttggtcaatgcagacggtatntatagangaaaaatttcttgtggggganggantctttggaattgtccngntgtnatttacaaggattgggttttcaccgatcaagcattgcctattgatctngtcaagagagganttgctgttaaggatccatcctgctccccatggagttccgacttttgatcgaggactatccttatgcttcctgatgggcngagatatgggatgctatccagtctngggtgg

SEQ ID NO: 287582 - DNA, 280 bp, Glycine max
  unsure (1)..(280): unsure at all n locations
gnagaaagcaagctcatcctagagttttaaaaatggcagcagcctcctnccatggctctctcttccccatccttggctggcaaggccgtgaanctngggccnatccagccccngaagtcgggagggtcagcatgaggaagacgtcaccaagcaggcctcctccggaagcccatggtacggcccagaccgcgtcaagtattgggcccattctctggcgagcccccgtcctacctcactggcgagttcccaggtgactacggctgggacatgctgggctttc

SEQ ID NO: 287583 - DNA, 277 bp, Glycine max
  unsure (1)..(277): unsure at all n locations
acatagttngtgcaatgcttttggttgatacttatcataccaatcctgaaaatgcagttcgtaatattttttnctgcgctttcagaggcggnaggcccatncgggtngttacatttccgaatanccattgtgcagattgaaccagacatgaattcaaggtttcagcttttgagtaaccactaccaatggtgattttnttcaaggaaaagatctcgcgatggttaaagttaatgtagcatgtgctgctgttggctgacatcaagttacactccaactc

SEQ ID NO: 287584 - DNA, 273 bp, Glycine max
  unsure (1)..(273): unsure at all n locations
gccaacgtttgccacatgcaatggtggtcctgctgagatcattgtgcatggnaaatctggttaccacattgatccttaacatggtgacatnctgctgagatccttgttgagttctttgagaagagcaaggctgatccatcctcactgggacaaaatctcccagggtggactcaagcgtattcatgagaagtacacatggcaaatttactcggacaggctcttgacactcactggtgtgtatggctctggaagcacgtgaccaatctgaacgcc

SEQ ID NO: 287585 - DNA, 274 bp, Glycine max
  unsure (1)..(274): unsure at all n locations
gacatcgngggccacagatntgattccntaagctaganaatcngatgacttcaagtgcaccaaatgcttcatctcttggaaggtaaacaaaatcggccggcttctcactgtgttgactgatgnatncgatgganancttttgagccttgagttcgataattttgctgaagtgcgcaaactctatgaaggtggagttacattgccctacaaactttcttagccaatatcactcctataccaataattaaggaatttttcgaatgatggcgaacag

SEQ ID NO: 287586 - DNA, 280 bp, Glycine max
  unsure (1)..(280): unsure at all n locations
ggngtacagcatatcatccatggttatggtctgctggaaatcacgaaatagactatatgccttaacatgggagaagttgttcctttcaaaaaactatctttaaccgatatactactccctacttggccctccaatagctccagtcccctctggtatgcagtcaggcgtgcgtctgctcatataattgtgctatccagctattcaccattcgtgaaatacactcctcaatacatgtggcttaaagaagagctgaagcgagttgagagggagaagactcctt

SEQ ID NO: 287587 - DNA, 241 bp, Glycine max
  unsure (1)..(241): unsure at all n locations
actttttcgaactgatggcgaacagttctcaagtatccaacncctaaagtgatgcangtcgacangtctgcatggntgactgatgaagatttgcnagagaaacaattgctggtttgaatccaaatgtcatcaagattattgaggagttcccactaagtagcaagctcgatactcaagcctatggtgattcatacctgtataataacaaaagagctttggaaactaaattaggtggtctcac

SEQ ID NO: 287588 - DNA, 270 bp, Glycine max
  unsure (1)..(270): unsure at all n locations
gtgagtttgttgatcgagataactagaaacagtgtgatgaaaatgaaggtccttgttttcttcgntgctacaattttggtagcatggcaatgccatgcgtacgatatgttccctcttcggatggaacattggtatgggggccgtactccggaggtgaatggccantttggaggcttgcngtggaagcacacaacatctttngctttnagacaattccgaanaatgcgttgaancacaaaggatacatcctggcgaacaattagatcagac

SEQ ID NO: 287589 - DNA, 293 bp, Glycine max
  unsure (1)..(293): unsure at all n locations
cactctcatagctgtagcggcgacactaanatcggagaaagaatggcgaaaacnacgtcgttgctgctctttacactgctcctcttgcggaaccctagctctcatccaggcgaagaaatcgaaggaggatttgaaggaggtgacccacaaggtttactttgatgttgagattaatggaaaagaagcaggtcgtattgtaatgggtctttatgggaaggctgttccaaaaactgcagaaaacttccgagcactttgcacaggggaaaagggaactggtaaaagtggaaagcctc

SEQ ID NO: 287590 - DNA, 289 bp, Glycine max
  unsure (1)..(289): unsure at all n locations
caagcagantggtgttatnggntggggatctcaggggcctgctcaggctcagaatctacgggactctcttgctacaagcaaantctgatattgtggncaagattgganttaggaaaggttcnccgttcctttgccgaagctcgggcagctgggttttctgaggagnatnggactctaggtgacatatgggaaactgtctnnggcagncgatnttgtgatgctgttaatttctgatnccacacaanatacganntccgagaacatattgtctgacangaagccaaacagc

SEQ ID NO: 287591 - DNA, 286 bp, Glycine max
  unsure (1)..(286): unsure at all n locations
cttttgatttgtgaaaggnaagcaaacatgcttgatcaggtccaacaccctacaatcatggacaaggttgctggccagctccatctccgttctggtgtttctggtattaggagttatgaaggagcctactgccaccccacaatgtaccaaagaccctcttttgggaattactcgaatgctgcattgcagtatcctgtgatgccctcatggcaaagctactatggatttgtctgctgctgcaacaatgcctcccccgtctttgttgctgctccagcagagaaaggcc

SEQ ID NO: 287592 - DNA, 285 bp, Glycine max
  unsure (1)..(285): unsure at all n locations
ccaaacatcgtcgagctccacgaagtcatgggccagtaagtccaagatctacatctccatcgaactcgtccgcggcggagagctcttcaacaaggtctccaagggacgcttgaaggaggacctggccagactctacttccagcagttaatctctgccgtcgatttctgccacanccgcggcgtctaccaccgtgacctcaagccggagaatctcctcctggacgaacacggcaacctcaaggtctccgacttcggactcaccgccttctccgaccaccttaaaga

SEQ ID NO: 287593 - DNA, 286 bp, Glycine max
  unsure (1)..(286): unsure at all n locations
ttttagaagaataccccctcttttgctgcatcagaggagttgtaaattaagagcatggctgcacaagctcttgtatcatcatcttctcttaccttctcagcggaggctgcaagacaaagtcttggaccaagatcactccaatctccatttggctnctccagaaaagcctcctttcttgttaaggcagctgctaccccccctgtgcaagcaaggatcagacagacctttgtggtttgcatcaaagcaaagtctttcttacttggatggcagccttccgggtgatatg

SEQ ID NO: 287594 - DNA, 290 bp, Glycine max
  unsure (1)..(290): unsure at all n locations
gtaagatcncaagannngatcgagaaccaagtcctgacggtggcgcaaccgtcnnggacaagatngacgatgagatcgccgccctngaacgcctngatgccgacgacatcgaagccctgccgcgagcnccgnctgccagcagatgaagaagatngcggagaagcgctcccgctggatctccctcggccantccgaatattccgagattccctccgagaaaganttnttctccgtcgtcaaggccagcnaacgctncgtctgccattnttccggaaaatgggcncnaccaa

SEQ ID NO: 287595 - DNA, 290 bp, Glycine max
  unsure (1)..(290): unsure at all n locations
ttcagccacagtttcggaggagaagaaaatagtgcgttcganatggcccgtacgaagcaaactgctgcgtaagtgccacaggaggaaaggctcctaggaagcagcttgcaaccaaggctgcacgtaagtctgcaccaactactggtggtgtgaagaagccacatcgttaccgtcctggtaccgttgctcttcgtgagattaggaaataccagaagagtaccgagcttttgatcaggaagctccccttccagaggctggttcgtgaattgctcaggattcaagactgatct

SEQ ID NO: 287596 - DNA, 281 bp, Glycine max
  unsure (1)..(281): unsure at all n locations
ttcaactctttcaaaagggagaagaaaaggaaaggaaacaaaacgcacaaaggattattatagcaatggcagaacaaaaccaaaaccagacaactgaagctggaaggcaccaagaggttggccacaagagccttctccagagtgatgctctttaccagtatnttctggagaccagtgtctacccaagagaacctgaatccatgaaagaatgagagagttgacagcaaaacacccatggaacncctggacaacctctgcagacgaaggcantcttgaacatg

SEQ ID NO: 287597 - DNA, 279 bp, Glycine max
  unsure (1)..(279): unsure at all n locations
ccatttgcttccctttaccccggttgcattgccacaacaggcctgttcagagagcacattcccttgttcanaactctgttccctccattccagaagtacataaccaaaggctatgtctcagaagatgaagcaggaaagagacttgctcaggttgtaagtgatccaagcctaacaaaatctggtgtttactggagctggaacaaagcatcagcttcgtttgaaaaccagttgtctcaggaggccagtgatacagagaaggctcgtaagatctgggagnta

SEQ ID NO: 287598 - DNA, 281 bp, Glycine max
  unsure (1)..(281): unsure at all n locations
aacgatggatnaggganagaccaactcatgggtaggtaaggatgggaaggtgtaccatagccacgatggtctggcgccgcattctgcacgaacccatttactcccccggctacttcaccagaagagctccaccgcttctcaacagaaacttcaacgaaagagccttcaccgtcggaatcggtggacccgtcggtactggcaaaacagctctcatgttggccctttgtgaatcttgcgcgaaaactacagtctcgcagctgtgacaaatgatatnttcatag

SEQ ID NO: 287599 - DNA, 276 bp, Glycine max
cacttccttatcttatatcttctcctccctccatctttgagattctcaaagaaacttctgaagatggctggcatagcattcggaagcttcaatgattctgtcagttttgcctccatcaaggcctacattgctgagttcatctcaacccttctctttgtttttgccggtgttggttcagccatagcctatgctaagttgacatcagatgcagctcttgatccaactgggttggtagccgttgctatttgccatggttttgctctcttcgttgctgtt

SEQ ID NO: 287600 - DNA, 279 bp, Glycine max
  unsure (1)..(279): unsure at all n locations
gcaacagtgagaacaccattgaattttgattctagcaagcagagcttttgtcaattttctattgacnttctcggtggagganttttngtggacaaaactggagattggntcacacttntacnaanttctccaattagtnacttgttnancagntgctgcttgnangaaaggctgtttantggtcaagattgtgatgtctgggaatgcagcagtcaaaaggagtgattgggcctcattggtacaagtgtttttaacaaacagcaacagtacagagcnttt

SEQ ID NO: 287601 - DNA, 280 bp, Glycine max
  unsure (1)..(280): unsure at all n locations
acaaagcacaaagcaaagctcatccttgagttaaaaaatggcagcagcttcttccatggctctctcatccccatccttggctggcaaggccgtgaagctgggcccatcagccccagaagtgggaagggtgagcatgaggaagaccgtcaccaagcaggtctcctcaggaagcccatggtacggcccagaccgagtcaagtacttgggcccattctctggcgagcccccgtcntacctaaccggtgagttcccaggcgactacggtgggacatgtgggttt

SEQ ID NO: 287602 - DNA, 291 bp, Glycine max
  unsure (1)..(291): unsure at all n locations
ctggatgtgaaatgcgcaagttggaggcttgctgtggaagcacacaacatctttggctttgagaccattcctgaagagtgcgttgaagcaacaaaggantacatccatggcgaacantatagatcagactccaaaacagttaaccaacaagcttacttttatgccagatacctcgaagtccatcccaaggacacatttgtgttcagtatagatggcaccgtantctntantattccatnntacaaaaaacatggatatggggtggagnatttaactcgacttgtatgatga

SEQ ID NO: 287603 - DNA, 257 bp, Glycine max
  unsure (1)..(257): unsure at all n locations
gatcgagataactagaaacagtgantgtgaaaatgaaggtacttgttttcttgcgttgctaacactttggtagcatggcaatgccatgcgtacgatatgttccctctccgaatgaacactggntatggtgcccgtactccggaggtgaaatgcgcnngttggaggcttgntgtggaagcacacaacntctttggctttgagactttcctgaagatgcgttgaagcaacnnaggnntacatccatggcgaacaatata

SEQ ID NO: 287604 - DNA, 276 bp, Glycine max
  unsure (1)..(276): unsure at all n locations
ttcgagntaactagaaacagtgtgatgaaaatgaaggtccttgttttcttcgttgctacanntttngtagcatggcaatgccatgcntacgatatgttccctctcncgaatgaacactgngntatggtgcccgtacnncngaggtgaaatgngcaanttggaggcttgctgtngaagcacacaaactctttggctngagaccatcctngagantgcgttgaagcaacanangagtncatccatggcgaacaatatagatcanactccaanacagtt

SEQ ID NO: 287605 - DNA, 274 bp, Glycine max
  unsure (1)..(274): unsure at all n locations
tcacaaacaaattgttngtttccatgttgctggaagcnaaggaagactggnatatgcttcattgntaccatatgttganccagttgtgcaagctcaaagtgntgaagtttattttgacttcttccctgtggaggttgatagtcaagagggagttgctncacattggtgaattgaatctggtgtctatgttccattgcctacaanaactaatttggtggaaactcccaaggaatggcaactggatctaccttgtgcacaaaattcctagtgtcnt

SEQ ID NO: 287606 - DNA, 274 bp, Glycine max
  unsure (1)..(274): unsure at all n locations
ttttgtntagatagctagaancaataagatgaaaatnaaagtccttgtcttgcntgttgctacagttttggtagcatatgaatgccatggctcagactaccagaagttccctctccaaatganaactgggtttggtgggcaatacagcaatgaggtggcatgtgccagttggaggcttggcgtggaagcanacaacgtagtcaagtggcaaactgttcctgcagcttgcggagagtacatagctgactacgttctaggagaccatcatagatca

SEQ ID NO: 287607 - DNA, 278 bp, Glycine max
  unsure (1)..(278): unsure at all n locations
tggtttcgntgantgatcngtgtncatttgatccttcataagtcgtcatcnatnatcatncatcatcaccgttgnttnacgaanatgccgatcagaaacatcgccatcgaangcctgaagangcanncaccccgacacgttgaaggcggggttggtgagttcatctccaccttgatcntcgtgttcgccggttcaggttccggcatcgctaacaacaagttcacngacaanggngccgncantcncgcnggcctcanntncgttccatcggccatgtt

SEQ ID NO: 287608 - DNA, 280 bp, Glycine max
  unsure (1)..(280): unsure at all n locations
ttcaaaacactcataacacaaagcacaaagcaaagctcatccttnntttaaaaaatggcagcagnttcttccatggctctctcntccccattccttggntggcaagggccgtgaagctgggcccatcagccccagaagtgggaagggtgancatgaggaagaccgtcaccaagcaggtctcctcaggaagcccatggtacggcccagaccgagtncaagtacttgggcccnttctctggcagancccccgtnntgnntatncggtganttcccaggcgat

SEQ ID NO: 287609 - DNA, 273 bp, Glycine max
  unsure (1)..(273): unsure at all n locations
ttaagattgaagacaacaacactttggttttcatagtcgacttgcgggctgacaagaagaagatcaaggatgcagtncaagaagatgtatgatattcaganccaananagtaaacaccttaatcaggcccgacggcaccaagaaggcttatgtcaggttgacacntgattatgacgcccnggatgtngncaacaagattggncttatntaaactaattccnggctcancacagtcgntttctgtttacaggtagttngnttngtgaacattgc

SEQ ID NO: 287610 - DNA, 266 bp, Glycine max
  unsure (1)..(266): unsure at all n locations
ttgaagccaactcagaatcttttggtaattttcgaggaacttggggggaatcttncanaaatttcacttgtgaagagatcagtaagcagtgtttgtgcngatgtgtcagagnaccacccaaatattaagaactggcacattgagagctatggtaantcagaagagntccatccgccgaanttcagttggcattgcagcccggtcaaaccatctcttccattaaattgccagntttggaatctttgggtattgtgggaactatgagc

SEQ ID NO: 287611 - DNA, 281 bp, Glycine max
  unsure (1)..(281): unsure at all n locations
ananctcttcgttccttcgattcattccatttcttccaaaatggccaaagacccagttcgcgttntcgtcactggagccgcagggcaaattggatatgctcttgtccctatgattgctaggggagtgatgctgngtcctgaccagccngtgatnctccanatggttgnncttcctccagcagcagagtcacnganngngngtnnaaangngattggnggangntgnantnccngttgcttcaaaggngtngnacctcacaaccgcngtgggtgaggntgca

SEQ ID NO: 287612 - DNA, 286 bp, Glycine max
  unsure (1)..(286): unsure at all n locations
tttcaacggtgcaaaggnaactgncagnagtttgtanggtgctattccaanaacacaaagcaaggcacgtgctgtnaactctccnactaagagtnccataaccattgttgangaanaggctagcagtaacagttgcaagaccaagcnntttggggtgtctgnncaatcccaagaaaaanggtgcaccctnagtangggtctagcnatgttcttcagagnnccgaaaacgaataagncgcgttgggctttggnaaatgatggactantacgatgaatcttatgcccc

SEQ ID NO: 287613 - DNA, 278 bp, Glycine max
  unsure (1)..(278): unsure at all n locations
ttatatctggtctagctgttcaagacatggccccaatgagcttgggtttatctcacagcttatccagatacaaattgaagtttagtgcagagaaggtggataccatgattgtccaggctattggtttactagatgatcttgataaagagttnaatacctatgccatgagggttcgagaatggtatggttggcatttcccgagcttactaaaataatacaggacaacatcctatatgcccagggcatcaanttgatgggtgatcgtgttaatgcagcta

SEQ ID NO: 287614 - DNA, 288 bp, Glycine max
  unsure (1)..(288): unsure at all n locations
ctcctattccaagcttcaatcttttctctcttctcacagccttcttcactcacaggaggtgaagatgtcgactcccggctaggaagagactgatgagggattttaaaagattgcaacaagatcctcctgctggcatcagtggggctccccaagacaataatatnatgctttggaatgctgttatctttggcccagatgacaccccttgggatggaggtacgtttaagttgacacttcagtttacagaggattatctcaataaaccactactgtgcgctttgtttctcg

SEQ ID NO: 287615 - DNA, 289 bp, Glycine max
  unsure (1)..(289): unsure at all n locations
ccactccagagccaaggtaggttaaacaatcttcttcatcgtcgtcgccgcaatgggacgtgtgatccgtgcgcaggtaaggnagcaggctcggtcttcaagtcccacacgcaccaccgcancggccctgcccgcttccggagcctggatttcggagagcgcaacggctacctgaagggtgtcgtcactgacgtcatccacgatcctggccgtggcgcgcctctcgctaaggtcgccttccgccacccgttccgctgacaagaagcagcgncgagctcttcatcgccgc

SEQ ID NO: 287616 - DNA, 285 bp, Glycine max
  unsure (1)..(285): unsure at all n locations
ctaaaccctatggccgacgaagccaaagccaaaggcaacgcagccttctcctccggggactatcctgccgccatccaccacttctnccgatgccatcgccctggctccctccaaccatgtcctctattccaaccgatccgccgcatacgcctccctcaaaaactacgcagntgcattagcggatgccaaaaagacagttgaactcaagcccgactggtccaagggttacagccgtctcggtgccgcgcatcttggcctttcccaatacgatgatgctattttggg

SEQ ID NO: 287617 - DNA, 286 bp, Glycine max
  unsure (1)..(286): unsure at all n locations
tggcaccgtactctctaatattccatactacaaaaaacatggatatggggtggagaaatttaactacgaccttgtatgatgaatgggttaacaagggcaatgcaccggcactgcccgagactcttaagaattacaacaagctggtgtctcttggcttcaagattatattcttgtcaggaagaacactggacaaacaggccgtaacagaagcaaacttnaagaaggctggctaccacacatgggaaaaattaattctcanggatccacaagatccttcccactccac

SEQ ID NO: 287618 - DNA, 286 bp, Glycine max
aaaaaaggacattcattcatctatggctacccttattgctcccagcaaccactctccccaagaagatgctgaagctctcagaaaggcttttgaaggatggggaactgatgagaacactgtcatagtaattttgggtcatagaactgtgtatcagaggcagcaaatcagaagagtttatgaggaaatttaccaggaggatcttgtgaagcgcctagagtctgagatcaaaggagactttgagaaagccgtgtaccgatggatactggaacctgcagatcgtgatgcg

SEQ ID NO: 287619 - DNA, 285 bp, Glycine max
  unsure (1)..(285): unsure at all n locations
caaggcagaaagcaagctcatcctagagttttaaaaatggcagcagcctcctccatggctctctcttccccatccttggctggcaaggccgtgaagctgggcccatcagcccccgaagtcgggagggtcagcatgnggaagaccgtcaccaagcaggcctcctccggaagcccatggtacggcccagaccgcgtcaagtacttgggcaccattctctggngagccccngtcctnacctcactgggcgagttcccaggtgactacggctgggacatgctgggtttc

SEQ ID NO: 287620 - DNA, 281 bp, Glycine max
tcggttcttccttctcaaatattcttgagatccccattttctccgaagcaaagccatggctaagggtcctggtctctactctgacatcggcaagaaagctagggatctgctgttcaaggactaccacagtgaccagaagttcaccatcaccacctactcaccgactggagtggctattacagcatcaggaaccaggaaaagtgaactgtttctggctgatgtcaacacccagttgaagaacaaaaacatcactactgatatcaaagttgatacagattcta

SEQ ID NO: 287621 - DNA, 285 bp, Glycine max
  unsure (1)..(285): unsure at all n locations
gcatattcaacccctcgtttgcnataatggaaacggnatggtacaaggctggttttnctgganatgctgcaccganggctgtgttccntagnantgtggggcgtccacgtnacactggggtnatggttgnnatngggcagnacnatgcgtangtncgggacgangctcaatcccaagangggnattttgactctcaaatacccnnttgcncntgganttgtgagcaattgggacnacatggagaanatctggccatcacactttntcacaacgagcttcntgtgg

SEQ ID NO: 287622 - DNA, 286 bp, Glycine max
  unsure (1)..(286): unsure at all n locations
gggaaggttgggacccgaatacgaatncgacgctgacacagatccctctgctggggacgaaggctggtccacgagacggggcggcatggacgcagaggctgaaggaagagtacaaggctctgatagcgtacacgcaaatgaacaagtccaacgacaacgattggttccgcatctccgccgccaattccggaaggcacttcgctggaccggtaaatgctggtacgtctacaacctcctcaagtacgaattcgacctccaattcgatgtccccgtcacttacccttcc

SEQ ID NO: 287623 - DNA, 266 bp, Glycine max
  unsure (1)..(266): unsure at all n locations
gcaagctcatcctagagttttaanacatggcagcagcctcctacnatggctctctcttccccancccttggctggcaaggccgtgaagctgggcccatnagccncngaagtcgggagggtcagcatgaggaagaacgtcaccnagcaggactactccnggaagcccatggtacggcccacaccggcgtcaagtacttgggcccattctctggcgagccaccgtcntanntcatggcgcgttcacangtgaatacggctgggccacc

SEQ ID NO: 287624 - DNA, 282 bp, Glycine max
ccctcatctccaatctgcaaatccaactaacatgggaagccagcaagccgccgtgtcgttcctgacgaacctggcccgcgccgctttcgggctgggcgcctccgcgaccctattgagctcctccctctacaccgtcgatggcgggcagcgcgccgtcctcttcgaccgtttccggggcatcctcgacgagaccgtcggcgaggggacccacttcctcatcccgtgggtccagaaaccctacatcttcgacatccgcacccgcccccacaccttctcctccgt

SEQ ID NO: 287625 - DNA, 277 bp, Glycine max
  unsure (1)..(277): unsure at all n locations
caagattctaaganagattttgctgctctttgaagaagggtgtttgcttgattttggagatgtcgctgctctcagatctcatcaaccttaacctctcagacactactgagaaggtgatcgcagagtacatatggatcggtggatcaggaatggacctgaggagcaaagcaaggactctcccaggaccagttagcgaccctcaaagcttcccaagtggaatatgatggttccagcacaggccaagctcctggagaagacagtgaagtgattatatacc

SEQ ID NO: 287626 - DNA, 278 bp, Glycine max
  unsure (1)..(278): unsure at all n locations
caaaaccttcgtcgcaaaatgcaacaaattcagaggcctcaaaccgagagaatacgctgccttgaaggactgcgctgaagaaatcagtgacagcgtcgaccggctcagccggtcgctgaaggaactcaaattgtgtaaggtgaagggtgaggacttcacgtggcacatcagcaacgttgagacgtgggtgagttcggctttgaccgatgagagcacttgcggcgatgggttcgccgggaaggcgctgaatgggaagntaangaggcgntagggtagaa

SEQ ID NO: 287627 - DNA, 290 bp, Glycine max
  unsure (1)..(290): unsure at all n locations
aaatcaaactcagctgacgggcttgccttcttcttggcacccgtcgggtctcagccccaatccgacgatggatttcttggtcttttcaacagtcccttaaaggacaagtctctccaaaccgnggcgattgagttcgatactttctcgaacaaaaaatgggatcctgcaaaccgacacatcggcattgacgtgaactcgatcaagtccgttcaaaacggcatcgtgggggttgtccaatggacaagtggcggagattctcgttacctataatgccgccacgagcctcttgg

SEQ ID NO: 287628 - DNA, 283 bp, Glycine max
  unsure (1)..(283): unsure at all n locations
gggatgcctnaaaatatgatgtgtgctgctgatccccgacacggccgatacttgactgcatctgctatgttcaggggaaagatgagcaccaaagaggttgatgaacaaatgatcaatgtgcagaacaagaactcatcatactttgttgaatggattcccaacaatgtgaagtccagtgtgtgtgatattccacccaggaatttgaannatgtcatccacctttattgggaacttcgacatcaattcaagagatgtttaggagggtcagtgagcatttcactgc

SEQ ID NO: 287629 - DNA, 280 bp, Glycine max
ccgttgtcttctcacttcgtcaaaaccaaccaaacccctccccaattctcaagccaaccatgtcttccttcaagagcaagtaccaagatgaactcattgccaatgctgcttacattggcaccccagggaagggtatccttgctgctgatgagtcaactggtacaattggcaagcgattggccagcattaatgtcgagaatgttgaagcaaataggcgtgctcttcgtgaactcctattcaccacacctggtgcttttgagtgcctcagtggtgtgatctt

SEQ ID NO: 287630 - DNA, 273 bp, Glycine max
  unsure (1)..(273): unsure at all n locations
accacaagtaggatcaaaggcacttgagaagganaaactttggcaagacttagaggggttggttcaaggcattctgcaacagaagattttcttaggtggggatctaaatggacatgttcagctcgccgataaggctcaggtttgcacccagcggtcatggaaacggccttatggagttggactcctggtngctggattagatgaatcgggagctcacctcnattacaatgtccccagtggaaactattttgaatatcaggcttttgctatggg

SEQ ID NO: 287631 - DNA, 277 bp, Glycine max
  unsure (1)..(277): unsure at all n locations
atcaattttnangcctttccccacaagctggtgcagtttggagaaattcaggaaaaagttgtattgaaattttcacaagaggaatttcttnccagcttggtcaactcaggtgcgtcctgcaacaactctgttggctgatgggtgcccatatttgtatgctatggtgcatgatagttcagtgtctacaataccaggtgattttgtcattggtgtcaagttgacaaccataaacaatatgtgtgcatatgggctcaatcctggtatttcaggttctcgt

SEQ ID NO: 287632 - DNA, 282 bp, Glycine max
  unsure (1)..(282): unsure at all n locations
tagaaacagtgtgatgaaaatgaaggtccttgttttcttcgttgctaccaatttccgtagcatggcaatgccatgcgtaacgatatgttccctctccgaatgaacactggcnatggtgcccgtactccggaggtgaaatgccgcaagttggaggcttgctgtggaagcacacaacatctttggcttgagaccatcctgaagagtgcgttgaagcaacaaaggaatacatccatggcgaacaatatagatcagactccaaaacagttaaccaacaagcttact

SEQ ID NO: 287633 - DNA, 274 bp, Glycine max
  unsure (1)..(274): unsure at all n locations
gctagtttctgtctganagctattctccaccgtagccgcaagcttcgccgtttgaaacagtgcctcaaccatggcagaacaaacagagaaggcttttctgaagcaaccaaaagtgtttctatgctctaagaaaggtgggaagggaaagaggcctgggaaaggtgggaatcgcttttggaagtcaattgggcttggattcaagactcccagagatgccattgaaggaacatatattgacaagaatgcccctcactggcangtttccatcggggtc

SEQ ID NO: 287634 - DNA, 274 bp, Glycine max
  unsure (1)..(274): unsure at all n locations
tgttgatcgagataactagaaacagtgtgatgaaaatgaaggtccttgttttcttcgttgctacaatnntngtagcatggcaatgccatgcgtacgatatgttccctctccgaatgaacactggctatggtgcccgtactccggaggtgaaatgcgcaagttggaggcttgctgtggaancacacaacatctttggctttgagaccattcctgaagagtgcgttgaagcaacaaaggaatacatccatggcgaacaatatagatcagactccaa

SEQ ID NO: 287635 - DNA, 277 bp, Glycine max
  unsure (1)..(277): unsure at all n locations
gtttattatcgttgcaatccaatgcnccatcatagaattggatccaagtataaagtgtatccaacttatgattttgcttgtccatatgttgattctatagaaggaatcacgcatgcccttcgatctagtgaancccatgattgcaatgcccagtattactggattcaagaggacatgggtcttagaaaagttcttatctacgaatttagccggtncgaatatggtctacactcttctgagcaaacgaaagcttttgtggtttgtacaaaatgggaaa

SEQ ID NO: 287636 - DNA, 272 bp, Glycine max
  unsure (1)..(272): unsure at all n locations
tccaattganattttaaaaatgactgggntaaacttaaganttcaattattgaaattgaataagtaaacaatttaattggattggncgaatggtatcaaaaaaatggagtactaactcccatttcttatttnttattganntaaccgntcaacttgctttgttatcgaacatttctttttgatttcaaaaattttccggaaaanatttgaatctatttttatatgcgaatcaatcctactacttctggtcctgaggtttctgcgctganaaa

SEQ ID NO: 287637 - DNA, 273 bp, Glycine max
  unsure (1)..(273): unsure at all n locations
cttcgttgcttggtgatgtccctttctgttctcttcactcttggtcttgcgagagaaagccatgccagagacgaagatttttggcatgctgtttggccaaacactcccattccaagttcattgcgagatcttctaaagcctggccctgcaagtgttgaaatcgatgatcaccctatgcaaattgaagaaacacagtacccgaaaaccttcttctataaagaagaccttcatccaggcaaaacaatgaaagtacaattcagcaagcctccnttc

SEQ ID NO: 287638 - DNA, 275 bp, Glycine max
gagaagatgacccaaattatgtttgagactttcaatgtgcctgccatgtatgttgcaattcaggctgtcttgtctctgtatgccagtggacgtactacaggtattgtgcttgattctggtgatggtgtgagccacacggtgcccatatatgaagggtatgctcttcctcatgcaattccttcggttggaccttgctggccgtgatttaacagagtacttggtgaaaatccttaccgagagaggatactccttcagcacctctgccgaaaaggaaa

SEQ ID NO: 287639 - DNA, 276 bp, Glycine max
  unsure (1)..(276): unsure at all n locations
tggccgcttaggccacggaagtttgaggcaataacaggtctgtgatgcccttagatgttctggggccgcacgcgcgctacactgatgtattcaacgagtctatagcntggccgacaggtccgggtaatctttgaaatttcatcgtgatggggatagatcattgcaattgttggtcttcaacgaggaattcctagtaagcgcgagtcatcagctcgcgttgactacgtccctgccnttgtacacaccgnccgtcgctcctaccgattgaatggtccg

SEQ ID NO: 287640 - DNA, 288 bp, Glycine max
attgaataccgttggggtggagaagggttgaggaagactttagtgcgatgggctgattcaaccactgataagaagggtgataatgacgaacaaattgtgagtcctgctgaacagctttctaccgactattgttatgctttcaaagtgcgaaagccaggaatggctccccctgtgaaggagcttcggaagttattaaggatccaagctctacgttgccatcctatatattgtcaaaatgggacaagactgaatgtaattcctgtgctggcatctcgttcccaagctctc

SEQ ID NO: 287641 - DNA, 288 bp, Glycine max
  unsure (1)..(288): unsure at all n locations
aaaacacaacaacactctntcttctcgntcttggcttttcgctcttcactcantctcattgcattcctttccaccgttcatgggatctncnnnagcgtgtggggtaacacgccttggcgacggtggatcccgagatccatgacctcatcgagaaggagaagcgccgtcaatgccgcggaatcgagctcatcgcctccgagaacttcacntccttcgccgtcatcgaggccctcggcagcgctcttcacgaacaaatactccgagggcatgccgggcaaccgctactac

SEQ ID NO: 287642 - DNA, 287 bp, Glycine max
  unsure (1)..(287): unsure at all n locations
tgcaaatgtttgcntcgttaattttctctgggagacaacagggctcactgagaaaacaatttttacttgcagagatttggacatctnggttgtttattatacaatagcaactcaatttagaaaatttctaccgcattacattaggtggcatctgtataccttgttgatctacattctcccatcttttctcactgctgaaattaaatataagcggaatctgagtaatattcatatttccggcttattttacgacggcagatacaaattctggactaaacacgagaaaa

SEQ ID NO: 287643 - DNA, 284 bp, Glycine max
  unsure (1)..(284): unsure at all n locations
aaggaattacaagatgcacgagtgctaactgatgttggtgatgttcctatccaagaaattcganattgtggggtagatgatcatagattaatgaatgtaattggtgaatctgtaaagttagtgatggaggaggatccattacgtccattagttttaggcggtgatcactcaatatcatttccagttatcagagctgtctctgagaagcatggaggaccagttgatgttcttcatcttgatgcgcatcctgataactatgatgcctttgaaggaaacatttattc

SEQ ID NO: 287644 - DNA, 285 bp, Glycine max
  unsure (1)..(285): unsure at all n locations
gngataactagaaacagtgtgatgaaaatgaaggtccttgttttcttcgttgctacaattttgcgtagcatggcaatgncatgcgtaccgatatgttccctctccgaatgaacactggctatggtgcccgtactccggaggtgaaatgcgcaagttggaggcttgctgtggaagcacacaacatctttggctttgagaccattcctgaagagtgcgttgaagcaacaaaggaatacatccatggcgaacaatatagatcagactccaaaacagttaaccaacaag

SEQ ID NO: 287645 - DNA, 284 bp, Glycine max
  unsure (1)..(284): unsure at all n locations
aagagaatccgagggcgaagagaagagaaaaattaagatggaggggaaggaacaggatgtntacnatgggancgaacaagttcccggagagacagccgattgggacggcggcgcagagccaagacgacggcaaggactaccaggagccggcgccggcgccactggttgacccgacggagtttacgtcatggtccttttacagagcagggatagcagagtttgtggccattttctgtttctatacatcactgtcttaaccgtcngggatcgccggggctaatcta

SEQ ID NO: 287646 - DNA, 281 bp, Glycine max
  unsure (1)..(281): unsure at all n locations
ggtncttgttttcttcgttgctacaattttngtancatggcaatgncatgcgtacgatatgttccntcntnccgaatgaacactgacatatggtgcccgtaatccggaggtgaaatgcgcaagttcnnaggcttgcngtggaagcacacaacatctttggctttgagaccattcctgaagagtgcgttgaagcaacaaaggaatacatccatggcgaacaatatagatcagactccaaaacagttaaccaacaagcttacttttatgccagagacctcgaa

SEQ ID NO: 287647 - DNA, 286 bp, Glycine max
  unsure (1)..(286): unsure at all n locations
ttccanatctttaaaaatattcagtgaagatcaacctcaatggcatctcttggcgtgcgaccagttcntccccctccattaacttccatctccgacccacctcctcttttcgatggcaccaccaggttgtacatcagttattcttgcccctatgcacaacgtgtgtggatcgctaggaactacaaggggctacaagataagatcaatttggtccctattaaccttcaagacaggccagcttggtataaggagaaagtctaccctgaaaataaggtgccatccttgg

SEQ ID NO: 287648 - DNA, 280 bp, Glycine max
  unsure (1)..(280): unsure at all n locations
ttattatcaaangtgaaacgaagaagccctaactacgcacgcattcgtgaganaacttcantattcgtcgctcatggcactctcttctccgtctcttttccaaatccaaattgatctatggcagttcaaatacttctacaaaaggagcatgctattccagttcgtcactttgctaaagagtctgcccctcctgcccttaagggagacgagatgctgaagaacatttttgtggaggtgaagaacaaatttgagaccgccataggaatattaaagaaggaga

SEQ ID NO: 287649 - DNA, 279 bp, Glycine max
  unsure (1)..(279): unsure at all n locations
ctctcgttgtttcggagttagggaccttacgcagccatggccactgctacgaatgccgccgncggcccacccacgccagntctccccagaaggaagctgacatccagatgatgttggccgccgacgtccacctcggcacnnaagaactgcgacttccaaatggaacgttacatcttcaagcgccgcaacgacgggatttacattattaaccttgggaagacnncggagaagcttcagctagcagctagggttatagttgcaattgagaacccccaggat

SEQ ID NO: 287650 - DNA, 273 bp, Glycine max
  unsure (1)..(273): unsure at all n locations
atcgcctagcagcaaagacanagggtgtnttcattaatccagcttnnattgngccatcngntcccacncncaanngaggcagctnatcatggnttgcccaattgaccgctactaaaaatggaggtcctgttgatattcatagggtacntgacaatggtctgctcgtagatccccatgatcagcagtctattgctgatgctctttngangcttgtnancaacaaacaactttgggcaanatgtagacagnatgggctnaagaatattcatttat

SEQ ID NO: 287651 - DNA, 261 bp, Glycine max
  unsure (1)..(261): unsure at all n locations
ttgatcgngataagtannaacagtgtgatnnactgaatngncnnngtatnntcgtnncnacaatntcgtagctngcatgccatgcgtacgatatgttcctctccgagtgaacatggctatggtgcccgtactcccggaggtgaaatgcgcnagttggnngnttgctgtggaagcacacanatctttggnttgagaccatcctgangagtgcgttgatnnnacacaggagtacatccatggcgaccatntagatcacatccc

SEQ ID NO: 287652 - DNA, 285 bp, Glycine max
  unsure (1)..(285): unsure at all n locations
gttgatcgagataactagaaacagtgtgatgaaaatgaaggtccttgttttcttcgttgctacaattttngtagcatggcaatgccatgcgtacgatatgttccctctccgaatgaacactggctatggtgccgtactccggagtgaaatgcgnaagttggaggcttgctgtggaagcacaccacatctttggctttgagaccattcctgcagagtgcgttgaagcaaccaaaggaatacatccatggcgaacaatatagatcagactccaaacagttaaccaac

SEQ ID NO: 287653 - DNA, 285 bp, Glycine max
  unsure (1)..(285): unsure at all n locations
atcttcgtcaagacccttacgggtaagactattaccctcgaggtggagagctccgacaccattgacaatgtgaaggcgaagatccaggacaaggaaggaatcccaccggaccagcagaggcttatttttgctggcaaacagctagaggatggaaggnccctcgctgactacaacatccagaaggagtcaactctgcacttggtgttgcgtcttcgtggggggttttaagctggagctgatttctgtgtgatgttcgatgttggattttcccaaacattttaagaa

SEQ ID NO: 287654 - DNA, 283 bp, Glycine max
gagaatattcttagaatgcagcttgttgcaacacacagtaatgatccatatgttgatgactattaccaccaaggctgtctcgcaaaaaagtcttctggtgctaaattgaggcatcacttttctccagctcaaataaaggaactccctctacgaccctcttctaatgctgaaccacatgcttttcttcaggttgatgcactagggagggttccattctcatcaattcgcaggccccgtcctctactggaagttgatcctcccaattcctctcatgcaggtagcc

SEQ ID NO: 287655 - DNA, 279 bp, Glycine max
cggagattcttcaaattgtgaaggagaatttcgacttcagacctggaatgatcaccattaacttggaccttaagaggggtggccataggttcctcaagacagctgcttatggacactttggaagggatgaccctgacttcacctgggaagttgtgaagccactcaagtctgagaagcctcaagcttaagattgttgtgaagttaatcactcccttcaatggatgtcttgctaggtgtggatgaataatttgcgtgttccatgactactactacttcatc

SEQ ID NO: 287656 - DNA, 276 bp, Glycine max
  unsure (1)..(276): unsure at all n locations
gcaanttgctgcacttcttgtatcaaaggtcttttattacctgggtgaacttaatgactcgttgtcttatgcccttggagctggtcctctgtttgatgtttcagaggattctgactatgtgcacactcttcttgctanagccattgatgaatatgccagccttaagtctaaggcagcagagtcaagtgatgaatctatcaaagtggacccaaggttggaagcaattgtggagaggtcgtcngataagtgtatcgtggatggaaataccaacaagca

SEQ ID NO: 287657 - DNA, 279 bp, Glycine max
  unsure (1)..(279): unsure at all n locations
caaaattcttccaaaatgggcatcgaagccttgcgtaatgggaatcgacgaagcnggaagangccccgttttagggcctatggtctacggttgcttatactgctctcagtcctatctgaagaccctttccacgttgagttttgcagattctaagacactcaaggaagagaagagggaagaattgtttgaaactttaaaactcaatgattctattggatgggatgttgatgtcattgacccccgggaactctccgctaaaatgcttaagaagaataagat

SEQ ID NO: 287658 - DNA, 261 bp, Glycine max
  unsure (1)..(261): unsure at all n locations
aganaacctcaactatgatgaantggacagtgtttccaacgttgcagaaaaccccgaggtacactgatattatccagaaagtggaagaggcacttcataaaaaggagtctgaggtcttgtttcaggtggtggatatagaagatgatcctgaataccagctgatagtggattgcaatgcactgtcagttgacatagaaaatgaaattgttattattcacaactttattcgggacaagtatcntttganatttccggagcttg

SEQ ID NO: 287659 - DNA, 280 bp, Glycine max
gttgggaacctatcaaagacatctcgggtaccatcacattgccagggtctaagtctctgtccaatcgaattttgcttcttgctgctctctctgagggaacaactgttgtagacaacttgctgtacagcgaggatattcattacatgcttggtgcattaaggacccttggactgcgtgtggaagacgaccaaacaaccaaacaagcaattgtggaaggctgtgggggattgtttcccactattaaagaatctaaagatgaaatcaatttattccttggaaa

SEQ ID NO: 287660 - DNA, 276 bp, Glycine max
  unsure (1)..(276): unsure at all n locations
ctaagtggacaaaatcagaaccacattcctgggaattgatcttcccaatagaggtatgtggtcccaataatggttttgaaatgtgganttctgagtgggcaaatcaaacttcatggcatttgagtttccttattgacaatcccaaacaatctacagtttttgatattctcttgggaatctctcaagattttgaaattgctggtaatactcttatgccagcttnttctgttccacaggctactgccagatcntctgaaaatgcngatcctctgcang

SEQ ID NO: 287661 - DNA, 277 bp, Glycine max
  unsure (1)..(277): unsure at all n locations
cnaataagttctatcattgaggaagtttcctgtgcatcgtctccgaaaatgaacgacgcagatgtctcaaagcaaatccagcagatggtgcagttcatccgccaggaagctgaggaaaaggccaacgagatctctgtctccgccgaagaggaattcaatatcgagaagctgcagttggtcgaagccgacaagaagaagatcaggcaagaatacgaacgcaaagagcgccaagttganattcgcaagangattgagtatcgatgcagctaaatgcttc

SEQ ID NO: 287662 - DNA, 277 bp, Glycine max
ccagtgactctgggattacattcaatgaacaaccattaatgaaagcattgcagattgctgaaaaggctagggatgctattcttagcgggaaatttgatcaggtacgcgtcaaccttccaaatggtgacatggtggggcatacaggtgacattgaagcaacagttgtggcttgcaaggcagctgatgctgctgtgaagatgattcttgatgcaatagagcaagtgggtggaatttatgttgtcaccgctgaccatgggaatgcagaggatatggtcaa

SEQ ID NO: 287663 - DNA, 278 bp, Glycine max
atcgagcaattgatatttacttaaaagctcatcaaggttcgacagatttggacaagaagaaactatgcaaattgattgattttcaaaagctttctcaagaagctggagcacatgctgcacaaaatgagcgccttcctctccaatcaatagtgcaagttctatactttgaacaactaagacttagaaattcattgtcctgctcctacgcagaagatgataccaagccaatacaccagtcatggcgcataagtagtggagcactaagtgcagcatgtctc

SEQ ID NO: 287664 - DNA, 278 bp, Glycine max
  unsure (1)..(278): unsure at all n locations
gcgcggcgagttctctcgccccgaagatcggtcccttgggactctccccaaagaagatcggagaggatattgcgaaggaaaccgcgaaggactggaagggcctccgcgtgacggtgaagctaaccgtgcagaaccggcaggcgaaagtnacggtggtgccatccgccgccgcgctggtcatcaaggcgctgaaggaacccgaaagggacaggaagaagacgaagaacatcaagcacaatggnaacatctccctcgacgacgtggttgagatcgtaggg

SEQ ID NO: 287665 - DNA, 273 bp, Glycine max
  unsure (1)..(273): unsure at all n locations
cacttttcagttacaaagcatttcattgttttacaatatacaacactacaatggccgcttcaacaatggctctctcttcatcatcattggctggccaagctatcaagcttgccccctccacccctcagcttggtnttggaagggttancatgaganaaacagnctccaagactgttacctcaggaagcccatggtacggcccagatcgtgtcaagtattgggcccatctctggtgagcccccatcctacctcatggtgaattcccaggtgact

SEQ ID NO: 287666 - DNA, 269 bp, Glycine max
  unsure (1)..(269): unsure at all n locations
cattaccttgtttctccaccagagattgacaggacttctggtgaatatttagtgtataatggtattcggacttttgcttgcagtgagactgttaaatttggccacgtcacattcttccggaatggaaaccgctctgggtattttaatgcagaattggaggaatatgtggaaattcctagtgattctgggattacattcaatgaacaaccataatgaaagcatgcagattgctganaaggctagggatgcattcttagcgggaatttgat

SEQ ID NO: 287667 - DNA, 272 bp, Glycine max
  unsure (1)..(272): unsure at all n locations
gttagctactactggagcaaactttgcaagagcatacaccgtggaattcggtagttgcaagttccctgagaacttcactggttgccaagatcttgccaaacaaaagaaagtgccattccttagtgacgatttggagcttgaatgcgaaggaaaggacaaatacaagtgcggttctaatgttttctggnaatggtgaaaggaggcaaccttttatgcccaactgcgaattattcgctttgcgatgtacctaactgcttgaatatataccctat

SEQ ID NO: 287668 - DNA, 282 bp, Glycine max
  unsure (1)..(282): unsure at all n locations
gcgcagagcatgggttgaaggtcanatgtctttcgatcagtctgtagtagcaattatgtctaaatgcaaagccagcatgagaatgggaaacactgatgctcaaattttgatggttccagggcgcagattcatagctcatgggacattttttcanaaatctgactcagaaagtgcgagtccaaattgttacatctgaaaaaagttactggcatgtgtatgatcctgacaagtttcagatgtttgacaacagtgaaataggtctctattctaatcccactttgg

SEQ ID NO: 287669 - DNA, 270 bp, Glycine max
  unsure (1)..(270): unsure at all n locations
ctcagntggnaacaaatttgtttaanttgtctcttgatgatgntnaaactcctaaaggttccatgttggntcttanaatntcncaatctaaaatngcacttcccaagancacagttggagganccattctgcgtagtgatctattggcaaattttttgacngagngcaattttagagcacgtgttgatttgcagcgcactcatcgtattaaaggcntgattnanatggnggctacagttggnattccngagantacaggtatagcattgg

SEQ ID NO: 287670 - DNA, 267 bp, Glycine max
cacacaacaccttttccttttcccttccgttggtgccattcgtgcagcaccggatcctctcatttctccggcgataactctcccttttccggcgaattcaccgcttcctcgatatgaatcccgagtatgactatctgttcaagctccttctgattggagactctggtgttggtaaatcatgcctcttctaagatttgctgatgattcatacatgagagctacataagcaccatcggagttgatttaaaattcgcatgttgagcagga

SEQ ID NO: 287671 - DNA, 274 bp, Glycine max
  unsure (1)..(274): unsure at all n locations
canagttgtatgagggtaagcatattcctgtatctaatattagtgcaggggaaaatcangtagttcaaatacccttaatggcacaggaggaaattctgtctnctagtgcaagtnatttcagaactgcaatggtgagtacaaaatagcnagcctcaagctactgcaatgcatgtgggagctatagaaatnatcattgatagtttcgcaagtcctgactgtaacatagttggtgcaatgcttttggttgntacttatcataccaatcctgaaaatg

SEQ ID NO: 287672 - DNA, 271 bp, Glycine max
gagaatggctcccaagggtttaatctttttggctgtgttatgcttctcagcactgtcactgagtcgttgtcttgcggaggataatggacttgttatgaacttctacaaggaatcatgccctcaggctgaagacatcatcaaagaacaagtcaagcttctctacaagcgccacaagaacactgctttctcctgggctcagaaacatcttccatgactgtgctgttcagagttgtgatgctcactgttgctggactccacaagaaggagcttg

SEQ ID NO: 287673 - DNA, 259 bp, Glycine max
  unsure (1)..(259): unsure at all n locations
ccttnngttcactcttcttctcttgcggctagggtnttagcgcagttcttctagaantaaggagcatgggtaaggaaaaggttcacatcagtattgtggtcattggncatgtcgatctgggaaatccactancactggtcacctgatttacaagcttggaggcattgacaagcgtgttattgagaggtttgagaaggaagcngctgcagatgaacaagaggtcttcaagtatgcctgggtgctggacaaacttaaggcg

SEQ ID NO: 287674 - DNA, 267 bp, Glycine max
  unsure (1)..(267): unsure at all n locations
caatggagaacaccgagggatccagatctgcgacgaacggggtgctgcctctggcgcgcaaggtggcattgattaccggaattaccggccaagacggttcgtacctgacggaattccttctagacaagggttacgacgtgcacggtctgatccgtcgctcctcgaacttcaacacgcagcgcatcgaccacatctatgtggatccccacaacgcccacaangccgcatgaagctccactacgccgatctctccgacgcctctccctc

SEQ ID NO: 287675 - DNA, 269 bp, Glycine max
  unsure (1)..(269): unsure at all n locations
gggcgaagttgaaannccaaaacccttggcgagtgaagccctagactcactagactacacacttcgcaatgncggttgttgctcaaacccctgacatcgccggcgagcggcagtccggccaagacgttcgcacccaaaacgttgtggcatgccaagccgttgccaacatcgtcaaaagctctttaggccccgttggcctcgacaagatgctcgtcgacgacattggcgacgtcaccatcaccaacgacggcgccacgattctcaagatg

SEQ ID NO: 287676 - DNA, 267 bp, Glycine max
  unsure (1)..(267): unsure at all n locations
gtttgttgatcgagataactagaaacagtgtgatgaaaatgaaggtccttgttttcttcgttgctacaattttngtagcatggcaatgccatgcgtacgatatgttccctctccgaatgaacactggctatggtgcccgtactccggaggtgaaatgcgcaagttggaggcttgctgtggaagcacacaacatctttgncttgagacatttctgaagagtgcgtngaagcaacaaaggaatacatccatgggcgaacaatatagatc

SEQ ID NO: 287677 - DNA, 314 bp, Glycine max
  unsure (1)..(314): unsure at all n locations
gataactagaaacagtgtgatgaaaatgaaggtccttgttttcttcgttgctacaattttggtagcatgggcaatgccatgcgtacgatatgttccctctccgaatgaacactggctatggtgcccgtactccggaggtgaaatgcgcaagttggaggcttgctgtggaancacacaacatctttggctttgagaccattcctgaagagtgcgttgaagcaacaaaggaatacatccatggcgaacaatatagatcagactccaaaacagttaaccaacaagcttactttatgccagagacctcgaagtccatc

SEQ ID NO: 287678 - DNA, 310 bp, Glycine max
  unsure (1)..(310): unsure at all n locations
ctttgccgctgttgttgttgctgcaccaccgaacaacttcccctgtanntcgcgtttcgtttgtgcaaggttttaaaagatggctgatgctgaggacattcaacctcttgttgttgataatggaactggaatggtcaaggctggttttgcaggtgatgatgctcctagggccgtgttccccagcattattgggagaccacgccatactggtgtaatggttgggatgggtcagaaggatgcttacgtgggtgatgaagcccaatcaaaaaggggtatactcaccttgaagtatcctatagagcatggcata

SEQ ID NO: 287679 - DNA, 309 bp, Glycine max
  unsure (1)..(309): unsure at all n locations
cgcatggatgaatggggagttgatgtggcaataactggctctcagaaggccctttcccttcccactgggataggtattgtggttgcaggccctagagctattgaggcctcaaaacatgctaaatcacttcgagttttctttgactggaaagactacctgaaattctaccagctaggaacgtattggccatacactccttccatacatttgctgtatggtctgagagctgctcttgatctgatttttgaggaaggacttgaaaatgtgattgcnagacacagtcgtttaggcaaagcaaccagacttgct

SEQ ID NO: 287680 - DNA, 308 bp, Glycine max
cgaagagaatggctcccaagggtttaatctttttggctgtgttatgcttctcagcactgtcactgagtcgttgtcttgcggaggataatggacttgttatgaacttctacaaggaatcatgccctcaggctgaagacatcatcaaagaacaagtcaagcttctctacaagcgccacaagaacactgctttctcctggctcagaaacatcttccatgactgtgctgttcagagttgtgatgcttcactgttgctggactccacaagaaggagcttgtctgagaaggaaacagatagaagctttgggttg

SEQ ID NO: 287681 - DNA, 307 bp, Glycine max
  unsure (1)..(307): unsure at all n locations
agagtgtgaactgcaaagggcttctccagcctagtttgttctcagatcttcttcttccatggaccagtacgagnaggtggagaagataggcgagggaacatacggcgtcgtttacaaggctcgcgaccgcgccaccaatgagacaatcgctctgaagaagattcgcctcgagcaggaggacgaaggcgttcccagcaccgccattcgcgagatttctcttctcaaagagatgcagcataggaacattgttaggttgcaggatgtagtgcacagtgagaagcgattgtatctngttttncagtatctg

SEQ ID NO: 287682 - DNA, 303 bp, Glycine max
  unsure (1)..(303): unsure at all n locations
tttgttgtgagctataagctagtttatcgtgaggagaatatgaagttgtttgttttctttgttgctgcagtagttttggtagcatggccatgccatggcgcaggctaccaaaggttccctctccgaatgaaaactggctatggtgagcgttcttcggaggtaaaatgcgcaagtnttaggcttgctgtggaagcacacaacatccgagctcttaaaaccatcctgaagagtgcgtnnnaccaacaaaggactacattaatggcgaacaatttagatcagactctaaaacagttaaccaacaag

SEQ ID NO: 287683 - DNA, 307 bp, Glycine max
gcactatagaaaaaacgacattcattcatctatggctacccttattgctcccagcaaccactctccccaagaagacgctgaggctctcagaaaggcttttgaaggatgggggactgatgagaaaactgtcatagtaatattgggtcatagaactgtttatcagaggcagcaaatcagaagagtctatgaggaaattttccaggaggatcttgtgaaacgcctagagtctgagatcaaaggagactttgagaaagccgtgtaccgatggatactagaacctgcagatcgtgatgctgttttggccaat

SEQ ID NO: 287684 - DNA, 314 bp, Glycine max
  unsure (1)..(314): unsure at all n locations
agaaacagtgtgatgaaaatgaaggtccttgttttcttcgttgctacaattttggtagcatggcaatgccatgcgtacgatatgttccctctccgaatgaacactggctatggtgcccgtactccggaggtgaaatgcgcaagttggaggcttgctgangaagcacacaacatctttggctttganaccattcctgaagagtgcgttgaagcaacaaaggaatacatccatggcgaacaatatagatcagactccaaaacagttaaccaacaagcttacttttatgccagagacctcgaagtccatcccaagga

SEQ ID NO: 287685 - DNA, 308 bp, Glycine max
  unsure (1)..(308): unsure at all n locations
agtatttttgttgnccctttcagaggcggaaggcccattcgggtggttacatttccgaatncccattgtgcancattgancccagacatgaattcaaggtttcagcttttgagtncccactaccaatggtgattttgttcaaggaaaagatctcgcgatggntaaagttaatgtagcatgtgctgctgttggcttgacatcaagttacactccaactccattgttggaatctggtttgcaaaaagacagagggttaattgtggagtattttggaaggatgtcttacgttgctcataacgttaatcagc

SEQ ID NO: 287686 - DNA, 302 bp, Glycine max
  unsure (1)..(302): unsure at all n locations
gccttcgcccacaacaactcctccttcaggatcgctgccaacgttactttccatttttacccttcatcctcgagaaaaaaatggcgaacgcagcatctggtatggccgtccatgatgagtgcaagctaaagtttctggagctcaaggcgaagaggacgtaccggtatatcgtttttaagattgaggancnatcgaagcaagttattgtggagaagctgggtgaccctgcaaatggctatgatgaattcgctgccagtcttcctgctgatgagtgtcgatatgctgtttatgattttgatttg

SEQ ID NO: 287687 - DNA, 301 bp, Glycine max
  unsure (1)..(301): unsure at all n locations
cnacgagtggggatacagctcacgtgtcattgacctgcttgtattcgttgccaagaagtctttttaaggtggtgtactgcaaagttgcttgtctacacattatgtgcttgtctagttgcgatttagtgtcttgctcgtgcaaaanatgagaggtctgaataaatcggtttctggaaccagtggatttaccttgttaggagcattagctctattttggactttgcctcttgtggaggaggatggagtttttggntttttatatatttgctaatgtacttgtcgttattgattgttatagtag

SEQ ID NO: 287688 - DNA, 302 bp, Glycine max
  unsure (1)..(302): unsure at all n locations
acgccatgncagggtcttccccaaggttaccgtcccaacgttggtgtctgtctcatcaactccgatgatcagatttnntgtggctctaggttgaatgtcccaggagcatggcaaatgcctcaggggggaattgaagatggtgaagaacccaaatctgctgccattagggaacttcgagaagaaactggaatagnatctgctgagataattgctgaggtttgctcataatcttagctctatctatngatcagtgatatcttacaacattcaattaattgagttcaaagtagttttaccattgt

SEQ ID NO: 287689 - DNA, 307 bp, Glycine max
tcttgccaagaaaatctggtgctttggccctgagacccttggacccaacatggtggttgatatgtgcaagggagtccagtatttgaatgaaatcaaggattctgtggttgctggattccagtgggcatcaaaagaaggtgctttggctgaagaaaacatgagagccatctgctttgaagtatgtgatgttgtgctgcacgctgatgctatccacagaggaggtggtcaaatcattcctactgccaggagagtcttctatgcttcccagattactgccaaacccaggcttcttgagcctgtctactgg

SEQ ID NO: 287690 - DNA, 296 bp, Glycine max
  unsure (1)..(296): unsure at all n locations
ggttattcttctgtgggatttggctgagggtaagcgtctttactccctcgatgctggttctatcatacatgcnctctgcttcagccccaacaggtactggctttgcgccgccactgaacagagcatcaagatctgggatttggagagcaagagtatcgttgaagatttgnaggntgacctaaagactgaggctgatgccaccaccggtggtggtaaccccaacaagaagaaggttatctactgcacaagtttgaactggagttcggatggaagcactttgtttagtggctataccg

SEQ ID NO: 287691 - DNA, 299 bp, Glycine max
  unsure (1)..(299): unsure at all n locations
angaanaagaccaaggttttaattagancctagtttgtgcaagtnataaataggttcacattganctattcttttatncaagctcttttgcttatcttgggaagaaaatgaaccangacatgaatggggttgaggctgagaagaggcaaganaatggacatgagacagtggattatgatgtgcaggananaatagactatgtgnttaaggtggtggtgataggggactcagcagttggcaagactcaaatactctcaaggttgcnaagaatgagttctgctttgactcaaagtccacca

SEQ ID NO: 287692 - DNA, 305 bp, Glycine max
  unsure (1)..(305): unsure at all n locations
caaaacacncataacacaaanccacaaagcaaagctcatccttgagttaaaaaatggcagcagctttctttccatggctctctcatccccatccttggctggcaaggccgtgaagctgggcccatcagccccagaagtgggaagggtgagcatgaggaagaccgtcaccaagcaggtctcctcaggaagcccatggtacggcccagaccgagtcaagtacttgggcccattctctggcgagcccccgtcctacctaaccggtgagttcccaggcgatacggctgggacactgctgggtttccgca

SEQ ID NO: 287693 - DNA, 294 bp, Glycine max
  unsure (1)..(294): unsure at all n locations
ctcatttccagagcatctagaagaattggagcaacttctgaaggggatagctatgatgaaagaattgactaaaaggactcaggactatttagtctcctttggagaatgcatgtcgacaaggatctttgctgcatatcttaataaaataggtgtcaaggctcgccaatatgatgcatttgagattggttttatagcaactgacgacttcacaaatgcggncattttggaagcaacttatccagctgttgcaaagagattgcatggtgattggctctccgatcctgcaattgcaat

SEQ ID NO: 287694 - DNA, 288 bp, Glycine max
  unsure (1)..(288): unsure at all n locations
aagctatcaagattttccagactaaaccactcantgctgatgtgggacactctcaagtactctttgacatcaatggagattgctgcacggtgtggaaagacttcttttacaccaaactttgctcttagtgcattgtatgaagaactgaaatcttcaagtggctttatattatccctgatgctgaaacttgttcaaaagacacgaagtaataattctcttcatgttctacaaagatttagaggtgttcaactcttggcagaatcaatttgttctggggttccctgaatt

SEQ ID NO: 287695 - DNA, 297 bp, Glycine max
  unsure (1)..(297): unsure at all n locations
attctttctctcttctctctctgtccgaagatggcttcacgcaggttcgtatcttctctgattcgatcctcccttcgtagatctcaatcgaaaccctcgatttccgcatccgcatcgagangacangtcatccaaccgtgcctctccgcacggttacttgctgaaccgcgtcgccgaatacgctaccgcggcggcggctgctaccgctcctccctctgctccgcctccgggcaagaaggaggttagcggcggcgggaagatcaccgatgagttcaccgggaaggtcgatcgggcagt

SEQ ID NO: 287696 - DNA, 295 bp, Glycine max
  unsure (1)..(295): unsure at all n locations
ccatcatcatggccacctctgctattcagcaatcagcattcgcaggtcaaactgctctgaagcagctcaatgagttggtccgcaagaccggtggcgccggcaaaggtcgcaccaacatgcgccgtaccgtcaagagtgctcctcagagcatttggtatggccctgatcgtcccaagtacctgggtccattctcagagcagattccgtcatacctgaccggagaattccccggtgactacggatgggacactgctggactatcagctgncccggaaaccttcgccaggaaccggga

SEQ ID NO: 287697 - DNA, 297 bp, Glycine max
aatctgcgtgtgtttgtgaattgttgttgagatctgaatcaaaatcagaaacgataatggctacaccggaccacctcttcaacctccgcaacaacttctacctcggcgcttaccaagccgccatcaacagcagcgacgttgccaacctctcccaagaagataccctcgagcgcgacaccctcgtccaccgctgctacatcgccctcggccagctccagttcgtcatctccgagatccacgacgatgctcccacaccactccaagccgtcaaactctcgccctctattctctctccga

SEQ ID NO: 287698 - DNA, 169 bp, Glycine max
  unsure (1)..(169): unsure at all n locations
cgttgatcgagataactagaaacagtgtgatgaaaatgaaggtccttgttttcttcgttgctacanttttngtagcatgggcaatgccatgcgtacgatatgttccctctccgaatgaacactggctatggtgcccgtactccggaggtgaaatgcgcaagttggaggc

SEQ ID NO: 287699 - DNA, 161 bp, Glycine max
ctcaggacaatgggttggtcccaattgtggagccagagatcttgcttgatggggagcatggtattgatagaacttttgaagtagcccaaaaggtctgggcagaggttttcttctaccttgctgagaacaatgtcctttttgagggtattctccttaagcct

SEQ ID NO: 287700 - DNA, 170 bp, Glycine max
cagggttaagcggtgagatttgcgaatctgagaaatggcggattcttctcgggaggagaacgtttacatggcgaaattggcggagcaggccgagcgttacgaggagatggttgagttcatggagaaggttgcaaagactgtggaggttgaggagttgacggtggaggaga

SEQ ID NO: 287701 - DNA, 162 bp, Glycine max
ggtgaagcccgcgaagggtactacaactcttgcttttatatttaaagagggtgttatggtagctgctgattctcgagctagcatgggcggatatatatcgtcgcagtctgtgaagaaaattatcgaaatcaatccgtatatgcttgggacaatggctggtgg

SEQ ID NO: 287702 - DNA, 154 bp, Glycine max
  unsure (1)..(154): unsure at all n locations
atctccatttccntttcctctctctcagtttccaagaatcttaagctatgggaaagtcttacccaaccgtgagcgctgattaccagaaggnccgttgagaaggcgaagaagaagctcagaggcttcatcgctgagaagagatgcgctcctctaa

SEQ ID NO: 287703 - DNA, 158 bp, Glycine max
  unsure (1)..(158): unsure at all n locations
cntatgtcgaggaggaagattatgatagattgcgcgagtcaattgatttgcacgataactttgatcaaataggccttgctcaaaagattganaagcatgagcttcttgagatgagacgtgttgctgcttatatttacaagaaggcaggtaggtggaag

SEQ ID NO: 287704 - DNA, 157 bp, Glycine max
  unsure (1)..(157): unsure at all n locations
atcgagataactagaaacagtgtgatgaaaatgaaggtccttgttttcttcgttgctacaantttngtagcatggcaatgccatgcgtacgatatgttccctctccgaatgaacactggctatggtgcccgtactccggaggtgaaatgcgcaagtt

SEQ ID NO: 287705 - DNA, 157 bp, Glycine max
  unsure (1)..(157): unsure at all n locations
ctctaagatgacttctccctacattaaatgtacagtctctttcttcatagcatttggaaatttggctgatgacaccatcaattttgaggcctttccccacaagctggtgcantttggagaaattcaggaaaaagttgtattgaaatttccacaagag

SEQ ID NO: 287706 - DNA, 152 bp, Glycine max
atctccatttccatttcctctctctcagtttccaagaatcttaagctatgggaaagtcttacccaaccgtgagcgctgattaccagaaggccgttgagaaggcgaagaagaagctcagaggcttcatcgctgagaagagatgcgctcctcta

SEQ ID NO: 287707 - DNA, 157 bp, Glycine max
  unsure (1)..(157): unsure at all n locations
ggaagcacacaacatccgagctgnttaaaancattcctgaagagtgcgttgaacnaacaaaggactannttaatggcgacgcaatttagatcagactctaaaacagttaancaacaagctttcttttatgctagtgaacgcgaagtccatnacaang

SEQ ID NO: 287708 - DNA, 161 bp, Glycine max
  unsure (1)..(161): unsure at all n locations
cgccttgctgctattgactacatcgtttgtnatgaaagtaatgtatttgtcactaacaacaatggtaacatggccaaaatccttgctggtcgtaggaggtatatgggtcacaaaagcaccatcagaccaaatgcaaagaagcttagtgcgctgttcatgtc

SEQ ID NO: 287709 - DNA, 151 bp, Glycine max
  unsure (1)..(151): unsure at all n locations
ctgccgccaaggcctaccacgagcagttgtcggtgccaganatcacnaatgccgtgtttgagcccgcgagcatgatggccaagtgtgatcccaggcatggcaantacatggcttgctgcttgatgtaccgtggtgatgttgttcctaagga

SEQ ID NO: 287710 - DNA, 162 bp, Glycine max
  unsure (1)..(162): unsure at all n locations
tcataanaccaaagcacaacgcaangctcatccttgagttnaanactggcagcagcttcttccntggctctctcatccccntccttggctggcanggccgtgangctgggcccntcagnccnagaagtgggaagggtgnncntgaggacgnccgtcaccacg

SEQ ID NO: 287711 - DNA, 149 bp, Glycine max
  unsure (1)..(149): unsure at all n locations
gcacncnggggccaagnttccttctgttgggttaggcacttggcaagctgagcctggtgttgtagccaaagctgtcaccacagccattctggttggatncaggcatcttgnttgtgctcaagcgtatnacaatcaagcagagattggnt

SEQ ID NO: 287712 - DNA, 155 bp, Glycine max
  unsure (1)..(155): unsure at all n locations
ccntntcatacccttcactttcctggnannaanttggaacctgcctctcttaaagtttgtatttttttgngtgggtgggttgnttgagagtactgtgcaagctttgganctttgtcccaacctgctacttcaatggctactgangaggttanaca

SEQ ID NO: 287713 - DNA, 306 bp, Glycine max
  unsure (1)..(306): unsure at all n locations
aaggcagaaagcaagctcatcctagagttttaaaaatggcagcagcctcctccatggntctctcttccccanccntnggtnggcaaggcggtgaagctgggcccatcagcccccgaagtcgggagggtcagcatgaggaagaccgtcaccaagcaggcctcctccggaagcccatggtacggcccagaccgcgtcaagtacttgggcccattctctggcgagcccccgtcctacctcactggcgagttcccaggtgactacggctgggacatgctgggctttcggccgacccagaaaccttcgcca

SEQ ID NO: 287714 - DNA, 283 bp, Glycine max
  unsure (1)..(283): unsure at all n locations
ttctcttcagttttaagttacatagtttttcattgttttacttaatctacaatggctgcttcaacaatggctctctcttcatcatcattgggctggccnagtatcaaagtttccccctccaaccctgaagcttggggtnggangggttagcntgaggnaaacagcctccaaaactgtttcctcaggaagcccatggtacggcccagaccgtgtcaagtacttgggcccattctcaggtgagccccnatcctatntnannggngaattccnaggngactatggt

SEQ ID NO: 287715 - DNA, 299 bp, Glycine max
  unsure (1)..(299): unsure at all n locations
cataattnatggaaacagtntggtttatattttggagaaggaactggagtcagagcttttcgaccttgcnaattcctgtaagggttntncngtgttgtcgagttgcacccttgcaaaaggcaggaattgttgatttgataaagagccgcacanatgatatgacactggccataggtgatggggccaatgacgtgtcaatgatccaaatggcagatgttggtgtagggatatgtgggcaggaagggcgccaagcagtgatggcatcagattttgctatgggacagtttcagttcttgaaa

SEQ ID NO: 287716 - DNA, 267 bp, Glycine max
  unsure (1)..(267): unsure at all n locations
cactagctagggtattgggagctctcgttgtttcggagttagggaccttacgcagccatggccactgctacgaatgccgccgccgccccaaccaacgccnagctctcccagaaaggaaagcngaccttccnagattgatgttnggcngcngaggtcnacntnggcacnangaattgnganttcnaantggaaggtnacntcttcaanngcggnaangacgggtttnncatnattaaccttggnaaannntgggagaancttnancna

SEQ ID NO: 287717 - DNA, 282 bp, Glycine max
  unsure (1)..(282): unsure at all n locations
ggactatctcattccatatttgaggaaaataaatgcaactaccacaaagacttatgctaccagaaccatatttttcttgaaaagtgatggnctttgacgccattggccattgagttaagtnagccggntccntcaagggtgagcattatggtccntgtaagcgaantctangtgcnttcgagcgaaggagttgaagcttatccttggtnattggcaaaggcttatgtngttgtaaatgactcgtgctaccatcaactcgttagccattggctaaacactcac

SEQ ID NO: 287718 - DNA, 291 bp, Glycine max
  unsure (1)..(291): unsure at all n locations
ttgaacacacacatagaaacccaacaacaagaatgangaagatgattctaaccctcttcttcaatattnttttancncntccngntccntntcccacgcctccgtggtggatttctgcgtagagactacacaggccccaatggccccgcaggtactcatgcnagagcccagcaaaggtcacggtggacgacttcgtctactccggccttggcaccgccggcaacacctcaaacatcatcaaagccgcggtgacgccggcgttcgacgcgcaattccccggcgtcaacgggt

SEQ ID NO: 287719 - DNA, 286 bp, Glycine max
  unsure (1)..(286): unsure at all n locations
gntaactagaaacagtgtgatgaaaatgaaggtcctntcccttcttcgttgctacaattttngtngcntggcnattgcaatggnagnnnatgttccctctcngaatgancactggctatggtgcccgtactccggaggtgaaatgcgcaagtnggaggcttgctgtggaagcacacaanctctttggctttgagaccattcctgaagactgcgttgaagcaacaaaggaatacatccatggcgaacaatatagatcagactccaaaacagttaaccaacaagctta

SEQ ID NO: 287720 - DNA, 281 bp, Glycine max
  unsure (1)..(281): unsure at all n locations
cttgttcagcatcaacctactcaatatcccacttcggaggagttgagtattgggaagataaagtttaaggctttcgaatttggggggcnacnagattgcccgtagggtctggaaggactattacgctcaggtngatgctgtagtgtacctggttgatgcatttgacaaggaaaggttttcagaatcaaagaaggagttggatgctcttctcnctgacgagtcactagcaaatgtgcctttcctcatcttgggaaacaagattgatataccttatgctgctt

SEQ ID NO: 287721 - DNA, 292 bp, Glycine max
  unsure (1)..(292): unsure at all n locations
cattttgatgcatgtaagtggacaaaatcagaaccacattcctgggaattgatcttcccaatanangtatgtagntccnaataatggttttgaaatggggagtncnaantgggcaaatcaaacttcatggcatttgagtntccttattgacaatcccaaacaatctacagtttttnntattctcttgggaatctctcaagattttgaaattgctggtaatactcttatgccagctttttctgttccacaggctactgccagatcttctgaaaatgcggaatcctctgcatga

SEQ ID NO: 287722 - DNA, 289 bp, Glycine max
  unsure (1)..(289): unsure at all n locations
ttttgtcttggaagagtactacttaagaggaacagaattcttgttctagatgaagctaaccgcatccattgacntcggcnanagantgcnattctacaacaaataattagacaagaatttgtagaatgcacggttataactgtggctcacagggttccaactgtaatagatagtgacatggtcatggtcctctcctatgggaaattggtggaatatgaggagccttcaagactaatggagaccaactcctcattctcgaagctggtagctgaatattggtnccagctgc

SEQ ID NO: 287723 - DNA, 287 bp, Glycine max
  unsure (1)..(287): unsure at all n locations
tcagttgcaggaaaaatggtttcgctgaaactgcagaagcgggctcgccgcgagcntgctcaagtgtggcagaggaaaagttggccttgacccnattggaacnncatcgncaatctccatggccaattctcgccaaaacataaggaagctggttaaggatgggtttatcatcaggaagcccaccaagattcactctcgctcacgtgctcgtcgaatgaaggaagccaagaggaaaggacgtcactctggatacggtaagcgtaagggtacaagggaggcaaggcttc

SEQ ID NO: 287724 - DNA, 284 bp, Glycine max
  unsure (1)..(284): unsure at all n locations
ctcttgcagtcgcagaggaaaaccctagctagtagtctcagttcgtttgagagagaaaaaatggcagagggtctcgttctccgcggaaaccatgcngcgcccacaccgacgtccntgacggcgattgccactcccatcgacaactccgacatgatcgtgacggcgtcgcgcgacaaatccatcattctctggcacctcaccaaggaggacaagacctacggtgtcccccgccgccgcctcaccggacattctcacttcgtccaggacgtcgtcctctcatccga

SEQ ID NO: 287725 - DNA, 295 bp, Glycine max
  unsure (1)..(295): unsure at all n locations
gaagaattnaagaatgtaagaggggatggaactggtgagcgcaaggnatgggataggatctatgattatgatgtctacaatgacttgggcgatccagataagggtgaaaagtatgcacgccccgttcttggaggttctgctttaccttaccctcgagaggaagaaccggaagaggaaaaactagaaaagatcccaacagtgagaagccgggcgattttgtttaccttccaagagatgaagcatttggtcattgaagtcatcagattttctagcttatggaatcaaatctgtggcc

SEQ ID NO: 287726 - DNA, 287 bp, Glycine max
  unsure (1)..(287): unsure at all n locations
gtgccagtgggacgtgttgagactggtgtcgtgaagcccggtatggtggtgactttnnntcccactgggctgacaactgaggttaagtctgttgagatgcaccatgaggctcncacagaggctcttccaggtgacaatgttggctttaatggaagaatgttgcagtcaaggatctcaagcgtggttttgttgcatccaactccaaggatgaccctgccaaggaagctgccaacttcacatctcaagtcattatcatgaaccaccctggccagattggaaatggatac

SEQ ID NO: 287727 - DNA, 279 bp, Glycine max
agcttccaaaccctaacactcctcttcctcttcgatcatcacctctccacaatgccgccgaagttcgacccctcccagatagtcgacgtcttcgtccgcgttaccggcggcgaagtcggcgcggcgagttccctggccccgagatcggtcccctcggtctctcccccaagaagatcggagaagacatcgccaaagaaaccgccaaggactggaagggcctccgcgtcaccgtcaagctcaccgttcagaatcgtcaggcgacggtcacggtggtcccct

SEQ ID NO: 287728 - DNA, 287 bp, Glycine max
  unsure (1)..(287): unsure at all n locations
ttttgttgttcgaagccaaaaccctagcagccggcgagaatggcagacgttgaggttgatgcggcggcagcggcaggggcagcgcagccgaagaagagaacgttcaaganattcagcttcaggggcgtggatctggacgcgcttctggactgtccaccgacgaactggtgaagatgttcagtgcgcgtgcacgtagaaggttccagagaggtctgacgaggaagcccatggccttgattaagaagctccgcaaagctaaaagggaagcaccagcaggtgagaagcca

SEQ ID NO: 287729 - DNA, 287 bp, Glycine max
  unsure (1)..(287): unsure at all n locations
gtttgttgtgagctataagctagtttatcgtgaggnnaatatgaagttgtttgttttctttgttgctgcagtagttttggtagcatggccatgccatggcgcaggctaccaaaggttccctctccgaatganaactggctatggtgagcgtcttcggaggtaaaatgcgcaagttttaggcttnctgtggaagcncacaacntccgancntttaaaaccatncctgaaaantgcgttgacccaccnaaggtctanattnntggcgnacnatttagntnagnctcnaa

SEQ ID NO: 287730 - DNA, 291 bp, Glycine max
  unsure (1)..(291): unsure at all n locations
cacaagccaggnaatatgctatagtcaaagaacttgccgagtctgtcagtcttaaggatggaactnttgttcttcagtttgagactcgccttcagaatggcctcgaatgtggtggtgcatatattaaatatcttcgaccccaggagagcggatggaaaccaaaggaatttgacaacgaatctccatattctatcatgtttggtcctgataagtgtggtgctacaaacaaggttcacttcattttcaagcataagaacccaaagagtggggagtatgttgagcatcatctca

SEQ ID NO: 287731 - DNA, 264 bp, Glycine max
  unsure (1)..(264): unsure at all n locations
tcttagatctcttctttctcnacgccgcnccgctganncccatggccggaaaaggngagggtcctgctanccggaatcgntctcggaaccacctactcttgcgtcggtgtgtggcaacatgaccggttgaaatcatcgccaacgaccaagggaacagnaccacgccgtcttacgtcggattcactgacaccgagcgtctcatcggtgatgcggccaagaatcaagtcgccatgaaccccatcaacaccgtcttcgatgccaana

SEQ ID NO: 287732 - DNA, 285 bp, Glycine max
  unsure (1)..(285): unsure at all n locations
tcgagataactagaaacagtgtgatgaaaatgaaggtccttgttttcttcgttgctacaattttggtagcatngcaatgccatgcgtacgatatgttccctctccgaatgaacactggctatggtgcccgtactccggaggtgaaatgccaagttggaggcttgctgtggaagcacacnacatctttggctttgagaccattcctgaagagtgcgttgaagcaacaaaggaatacatccatggcgaacaatatagatcagactccaaaacagttaaccaacaagc

SEQ ID NO: 287733 - DNA, 287 bp, Glycine max
  unsure (1)..(287): unsure at all n locations
gataactagaaacagtgtgatgaaaatgaaggtccttgttttcttcgttgctacaattttngtagcatggcaatgccatgcgtacgatatgttccctctccgaatgaacactggctatggtgcccgtactccggaggtgaaatgcncaagtggaggcttgctgnggaagcacacaacatctttggctttgagaccattcctgaagagtgcgttgaagcaacaaaggaatacatccatggcgaacaatatagatcagactccaaaacagttaaccaacaagcttactt

SEQ ID NO: 287734 - DNA, 291 bp, Glycine max
  unsure (1)..(291): unsure at all n locations
gaatggctcccaagggtttaacctttctgggctgtgttaatatgcgtttcagcactgtcactgagtccttctgttgcgggggaagggcaaaataatggccttgttatgaacttctacaaggaatcatgccctcaggctgaagacatcatcacgaacaagtcaagcttctctacaagcgccacangaacactgctttctcctggctcaggaacatcttccatgactgtgctgttcagagttgtgatgcttcactgttgctggactccacaagaaggagcttgtctgagaagg

SEQ ID NO: 287735 - DNA, 286 bp, Glycine max
tttcttcaggatgacttccctgatatggatgttattggaatctctggcaatttctgttcggacaagaaagccgcagccgtgaattggattgaagggcgtggcaagtctgtggtgtgtgaggccataattaaggaggatgttgtgaagaagggttgaaaaccagtgtggaggccctggtcgaacttaatatgctcaaaaaccttacgggctcagccatggctggtgctcttggtgggttcaatgctcatgctagcaatattgtgtctgctatctacattgccatggt

SEQ ID NO: 287736 - DNA, 290 bp, Glycine max
  unsure (1)..(290): unsure at all n locations
caattttctagggttttattcattttccgatggcttctgcagatgttgagtaccgttgctttgtcggtgggctcgcttgggccactgacgaccatgccctcgagagagccttctctcagtacggcgaaatcgttgaaacgaagattatcaacatcgtgagactggcagatccaggggttttggatttgtgaccttcgtctcggancagtccatgaaagatgcgatcggagcgatgaatggacagaacttggacggccgtaatatcactgtcaatgaagctcagtcccgcg

SEQ ID NO: 287737 - DNA, 289 bp, Glycine max
  unsure (1)..(289): unsure at all n locations
gctgaacatggangcaatgatagaagcgatgacccctgaggagagggaaaagccagaactgttgggcagaanccccctgtcaggaggaaaagggttgctcaggattcagggaaaacagagcagcaggtaagccaacttgtagctcaactttncaaatgcgtgttcgtatgaagaacctgatgggtgtaatggaaagtggatcacttccaacacttagtaatcttgaggaagcgcttaaagcagaggaaaaggctcctcctggcactgctaggaggaggaagagatcggc

SEQ ID NO: 287738 - DNA, 283 bp, Glycine max
  unsure (1)..(283): unsure at all n locations
ctttgcaatagcatttttaatgagatgctcattagatatagctatgaaaaattactgcgccaggctaaagctccaagtatgtttttacaatccttcaaaaattttgtttcttngtgtgtgtatggtgatgataacttaattagtgttatgaatatgtcaagccttactttagtggttctaaatngaaaagctttctagctggtcataatatcaccattactgatggtattgacaaaactagtgcaactttgcaatttagaaagttagcagattgtgattttct

SEQ ID NO: 287739 - DNA, 287 bp, Glycine max
  unsure (1)..(287): unsure at all n locations
aactgaaccaaatcatcacacacacatannangggaanaacaattcttctacaatggatctcntccttctggaaaagantctcataggnntcttcctcgctgcggtggtcgccatcgccgtctccaccctccgcggccggnaatnccaagtcccaccgggcccactccccgtcccaatcttcggcaactggctccaagtcggcgacgacctcaaccaccgcaacctcaccgatttggccaaaaaattcggtgacatcttcctcctccgcatggggcagcgcaacctc

SEQ ID NO: 287740 - DNA, 288 bp, Glycine max
  unsure (1)..(288): unsure at all n locations
cctaacttgggtgggctcaccgttgagcaggctatccagagcaagaagttgttcatcttagatcaccatgactatctcattccatatttgaggaaaataaatgcaactaccacaaagacttacgctnccaagaaccatatttttcttgaaagtgatggaaccttgacgccattggccattgagttaagtaagccgcatcctcagggtgaaggatatggtcctgttagcgaagtctacgtgccttcgagcgagggagttgaagcttacatttggttactggcaaaggct

SEQ ID NO: 287741 - DNA, 289 bp, Glycine max
  unsure (1)..(289): unsure at all n locations
ccatatccccgttttccttcactcttgaaccccgattcatttccacaannacnagaaacccgnangcaatatcaataccttctcacatgaaagcttggacatactntgagtatggaaaatccaaggaagttctcaagtttaatcagagtgggctttgcctgaggtgaaggaagaccaggtcctcatcaaggtcgctgctgcttcccttaaccccattgatcataagagaatggaaggctatttcaagaacagcgactcccctttacctactgctccgggttatgatgtt

SEQ ID NO: 287742 - DNA, 296 bp, Glycine max
  unsure (1)..(296): unsure at all n locations
gcgagngcacactcagcgcctctcgctctccccggatcctatcaaggttactctccccgacggcagcgtcaaggaggcgaagaagtggcatacgacgccgcttgatgttgcgcgtgaaatctcgaagaatttggccaacagcgcgctcatcgcgaaggcaatggcgtgctctgggacatgactcgccctctcgaggacgattgccagctccagatcttcaagttcgacgacgacgaaggccgcgacaccttctggcactccagcgcccacattctcggccagtcacttgagacgga

SEQ ID NO: 287743 - DNA, 284 bp, Glycine max
  unsure (1)..(284): unsure at all n locations
tcatcatngccacctctgcnattcagcaatcagcattcgnnccgtcaaactgctctgaagcagctcaatgngttggtccgncagaccggtggcgccggnaaaggtcgcaccaacatgcgncgtaccgtcaagagtgctcctcagagcattggtatggcnntgatcgncccaagnacctgggncnattctcagancngattncgtcatanctgaccggagaattccccggtgactacggatggnacatgctggactatcagntganccggaaancttcnccaggt

SEQ ID NO: 287744 - DNA, 255 bp, Glycine max
  unsure (1)..(255): unsure at all n locations
aggatctgatagaccccaaagggtggttggantggaatgacncgtttgcattggatacgttgtattatggngagtacaacaataggggtcccggttcaaacacaagtgcaaganttactggcctggttatagggttatcaagaacgccactgaggcaaaccagttcacagttcgcaatttcattcaagggaatgaatggttgagttccaccgacattccattcttctctgatttcagttgaatacgttatggtta

SEQ ID NO: 287745 - DNA, 301 bp, Glycine max
  unsure (1)..(301): unsure at all n locations
ctcnatnngnntngggcncgnngtgnanttntgcaattttcaagancctgaatcngagaatagctaataatggctacaccggaccacctgttcaacctccgcaacaacttgtatcncggggcgtaccaagccgccatcaacagcggcgacgtcaccaaccctcccaagaagactccctcgagcgcgacaccctcgtccaccgctgctacatcgccctcggccagcttcagttcgtcatctccgagatccatgacgacgctcccacacctctccaagccgtcaaactcctcgctctctattt

SEQ ID NO: 287746 - DNA, 288 bp, Glycine max
  unsure (1)..(288): unsure at all n locations
aaaacagcagcgagagaganactgataaggcagggatacaacattnttgggatcattggttctttcatctggcatgcacacacttgcatagttttggaaaccaagaatttttgaagggtagcatcaacaagaagttctggaaatggagataccaatgtcagcgagtatgaagctattgcaaagcagaagttgccaaagatggtgtttgactactacgcatctggtgcagaggaccagtggactctgcaggagaacagaaatgccttttccagantttgtttcggccac

SEQ ID NO: 287747 - DNA, 287 bp, Glycine max
  unsure (1)..(287): unsure at all n locations
agtgatncaggtggataagtctgcatgganngactgatgaagaatttgctagagaancgattgctggtgttaatccaaatgtcattaagattcttgaggagttcccaccacgtagcaagcnagattctcaagcctacggtgatcatacctctataataacaaaacaacacttggnncctaacttgggtgggctcaccgttgagcaggctatccagagcaagaagttgttcatcttagatcaccatgactatctcattccancatttgaggaaaatncaatgcaactt

SEQ ID NO: 287748 - DNA, 287 bp, Glycine max
  unsure (1)..(287): unsure at all n locations
gcttgtcggcgcaaaaaactgttgtttctggcaacaaaagaggttttgctgataccanggatgggttttctcaggggaagttcgctggtaatacagggatgaacgcaatgctatcacctaggccttctggagctcagccttctgctatgaaagaaataccaagcaagttgcaagaaaggccctgttcaactaagaatggaaccggtcataaccatacaggtgcttccatcagtggcagcgcaccggcttctaaggcacaggttgttggttggcctcctataagatct

SEQ ID NO: 287749 - DNA, 280 bp, Glycine max
  unsure (1)..(280): unsure at all n locations
cgcgttggtgcaaagcatccttcgcttcaatctctcnctctctctttgcgctttctgcaaaccgaacatttcatctccaaagggatcaacaggtcgaaggagaaatggggctgacattcacgaagcttttcagccggcttttcggaagaaggaaatgcgaattctgatggttggtcttgatgctgctggtaagaccactatcctctacaagctcaagctcggagagatcgttactacaattcctaccattgggttcaatgttgagactgtggaatacaag

SEQ ID NO: 287750 - DNA, 283 bp, Glycine max
  unsure (1)..(283): unsure at all n locations
gaagagggggtcagagtgagaaagagaaagagagaattcgtaaaccctaatttcggaaagatcggcgatgactgcctccaaggatcgcgagancttcgtctacatcgccaaactcgccgagcaggccgagcgttacgaagagatggggaatcaatgaagaacgttgcgaatctcgacgttgaactgacggtggaggagcggaatttgctttctgttgggtacaagaatgtgattggtgctcgcagagcgtcctggaggatcctgtcttccattgagcagaagg

SEQ ID NO: 287751 - DNA, 284 bp, Glycine max
caaagaaaaaaaaaaccctagccaacacaaccatcatggccacctctgctattcagcaatcagcattcactggtcaaactgctctgaagcagctcaatgagttcgtccgcaagaccggtggcgccggcaaaggtcgcactaacatgcccgcaccgtcaagagtgctcctcagagcatttggtatggccctgaccgtcccaagtacttgggtccattctcggagcagattccatcatacctgaccggagaattccctggtgactacggatgggacactgctggat

SEQ ID NO: 287752 - DNA, 289 bp, Glycine max
  unsure (1)..(289): unsure at all n locations
ctgtcattgccttccagacctatgcagttgnaagcagtggaggatacaagaagggtgtgacagaagcaaaactgaaggttgccataaacggatttggaaggattggncggaacttcttgaggtgctggcacggtcgcaaagactcccctctgatgtcattgccatcaacgacaccggtggcgtgaaacaagcctctcaccttctcaagtacgattcgatcctcggaaccttcgatgctgatgtcaagcctgttggcagcgacatcatctctgtcgatggaaaggaaatc

SEQ ID NO: 287753 - DNA, 270 bp, Glycine max
ggtgcaggagaaaaggtggaatcaggttcaccatcaatggccactcttacttcaatttagtccttgtaaccaatgttggaggtgctggtgatgtgcattctgtgtccatcaaaggttcaagaactagatggcaagccatgtcaaggaactgggggcaaaactggcaaagcaattcctacttgaatggtcagagtctttcctttgtagtcaccaccagcaatggacacagtgtggtgtcatacaatgttgccccagctggttggtctttgg

SEQ ID NO: 287754 - DNA, 266 bp, Glycine max
  unsure (1)..(266): unsure at all n locations
aagaacctgttttcggaactaaccgacgacatcgttctgaacatcttctacaaactcgaagacgntcctcgccactgggctcgcttagcctgtgtctgcaccaaattctcttccctcgttagggatttctgttggaagaccaaatgctccctcaccatcccccaagacctcctctccgccgccgcctccgacccccctctctccctccacaaactctccttctgctgccccggcctccgccacgcggctcctgttcgacactccga

SEQ ID NO: 287755 - DNA, 167 bp, Glycine max
  unsure (1)..(167): unsure at all n locations
gtttgttgatcgagataactagaaacagtgtgatgaaaatgaaggtccttgtnttcttcgttgctacaattttngtagcatggcaatgccatnngtacgatatgttncctntcngaatgancnctggcnatngtgcccgtactccggangtnanntncgcnagntng

SEQ ID NO: 287756 - DNA, 264 bp, Glycine max
  unsure (1)..(264): unsure at all n locations
cctccccaattctcaagccaaccatgtcttccttcaagagcaagtaccaagatgaactcattgccaatgctgcttacattggcaccccagggaagggtatccttgctgctgatgagtcaactggtacaattggcaagcgattggccagcattaatgtcgagaatgttgaagcaaataggcgtgctcttcgtgaactcctnttcaccacacctggtgcttttgagtgcctcagtggtgtgatcttgtttgaggaaaccctatacc

SEQ ID NO: 287757 - DNA, 265 bp, Glycine max
atgctctcacatcttttatttctggttatgtgagtggggggatgtactcacgaaatgggggtaaacactggattaaatccatgattcttactgcttctctgttcccattcatgtgctttggaattggatttatcttaaacacaatcgctatattctatgggtctctagcagcaattccatttggcacaatggtggttgtatttgtcattgggctttcatctctttccctctagcacttcttggcacagttgttggaagaaatgga

SEQ ID NO: 287758 - DNA, 276 bp, Glycine max
  unsure (1)..(276): unsure at all n locations
cngcgtcgtcgtcatgggccggcgcgcttctcgaganggccgngcgcctcctcgagcggggaattcaccccatcaggatcgccgagggttacgaaatggcgtccaggatcgccgtcgagcatctcgagcgcgtcgccaacnagttcgagttcgacgagtccaatttggagcccctcattcaaacttgcatgaccaccctctcctccaaaattgtgaatcggtgtaagcgtanttggctgagattgtgttaaggctgttcttgctgttgctgatctg

SEQ ID NO: 287759 - DNA, 276 bp, Glycine max
  unsure (1)..(276): unsure at all n locations
caactaccactggtcatttgatctacaagcttggaggtattgacaagcgtgtgattganaggttcgagaaggaggctgctgagatgaacaagaggtcattcaagtatgcctgggtgcttgacaagctcaaggctgagcgcgaaagaggaattaccattgatattgctttgtggaagtttgaaaccaccaagtactactgcacagtcatcgatgcccccggacatcgtgactttatcaagaacatgattactggtacctcccaggctgattgtgctg

SEQ ID NO: 287760 - DNA, 273 bp, Glycine max
  unsure (1)..(273): unsure at all n locations
cagaaccacattcctgggaattgatcttcccaatagaggtatgtggtcccaataatggttttgaaatcgtggagttctgagtgggcnaatcaaacttcatggcatttgagtntccttattgacaatcccaaacaatctacagtttttgatantctctngggaatctctcaagattttgaaattgctggtaatactcttatgccagctttttctgttccacaggctactgccagatcttctgaaaatgcggaatcctctgcatgatctggaatt

SEQ ID NO: 287761 - DNA, 268 bp, Glycine max
  unsure (1)..(268): unsure at all n locations
gaccattcctgaagagtgcgttgaagcaacaaaggaatacatccatggcgaacaatatagatcagactccaaaacagttaaccaacaagcttacttttatgccagagacctcgaagtccatcccaaggacacatttgtgttcagtatagatggcaccgtactctctaatattccatactacaaaaaacatngatatggggtggagaaatttaactcgaccttgtatgatgaatgggttaacaagggcaatgcaccggcactgcccgag

SEQ ID NO: 287762 - DNA, 265 bp, Glycine max
  unsure (1)..(265): unsure at all n locations
cttcaagactgatctgcgtttccagagccatgctgtgcttgcantgcaagaagctgctgaggcataccttgttggactctttgaggatactaatctgtgtgccattcacgctaagcgtgtaactattatgcccaaagatatccagctggcaagaaggattcgtggtgagcnnnnnnnnnnnnnnnnnnnnnnnnnnnnnnnnnnnnnnnnngatgggtggctgcggatggtgttttgttattcagatttcttttttattcaaaga

SEQ ID NO: 287763 - DNA, 265 bp, Glycine max
  unsure (1)..(265): unsure at all n locations
cggggcagtagccgagattccgtgagtngcaaaaatgaagacgattctttccaccgagaccatgaacatcccggacggcgtgagcatcaaagttcatgccaaggtcatcgaagttgagggcccccgcggaaaattggtgcgagacttcaagcatttgaatctcgattttcagctcattactgacgaaaacggtaaaagaaagctgaaaatcgacgcgtggtttggttctcggaaaacatccgccgccattcgcaccgccttgagc

SEQ ID NO: 287764 - DNA, 263 bp, Glycine max
  unsure (1)..(263): unsure at all n locations
gggtcacataaacccagcagtgacatttgggctcttcntggctcgcaaggtgtctttgattagagngataatgtacatggncnctcagtgcttgggagccatatgtggagttgggttggttaaggccttccaaaaggcttactacaacaggtatggtggtggggccaatgagctcagtgaagggtacagcacgggtgttggattgggtgctgagatcattggaaccttngntttggtttacactgtgttctctgcaactgatc

SEQ ID NO: 287765 - DNA, 270 bp, Glycine max
atttattttttgcaggaaatgggggtttgagaagctggtgtacaaagattcaaagaaagggattagaagggatcgaaaatatgcagtgcaaccaaggagtttgtatgcaactggggttcacatgtcacaaaaccttgcaggaaagaccactcacaaaactgaagggaaaataatgtactaccactatcatggaaccatagctgaaaagagagaatcatgtaaaatgcttataaattcaacagaaatcacatatgacaaaaccccctatgt

SEQ ID NO: 287766 - DNA, 277 bp, Glycine max
  unsure (1)..(277): unsure at all n locations
caactcagtgaaaganaatccgaggcgaagagaagagaaaaattaagatggaggggaaggagcaggatntntcgctgggagcnaacaagttcccggagagacagccgattgggacgnccggcgcagagccaagacgacggcaaggactaccaggagccggcgccggcgccactggttgacccgacggagtttacgtcatggtcttttacagagcagggatagcagagtttgtggccattttctgtttctatacatcactgtcttaaccgtcatggga

SEQ ID NO: 287767 - DNA, 274 bp, Glycine max
tccgcagctgcttttattcgcaccgcaaacagtgagccatggccgtcggaaagaacaagcgcatctccaaggggaagaagggtggcaagaagaaggcagctgatccctttgccaagaaggattggtatgacattaaggctccttctgtttttcaagtgaaaaatgttggcaaaaccctcgtctctcgtactcagggtaccaagattgcttctgaaggactcaagcatagagtgtttgaggtctcctggctgatcttcaaggggatgaggatcat

SEQ ID NO: 287768 - DNA, 267 bp, Glycine max
attgggatcactaatccaacacactactttttgccaaaatctcaaagtgctgcagattacaaggcagcaagtagagctctggacttcttctttggttggtattctgatccggttttctatggtgactatccggagagtatgaaatcttcagtaggttctaggctcccaaaattcacaaaagctgaatctgaaggtctaaaaaattccatagattttcttggtgtgaattactacaccacttattatgcggaacatgctgaacctgtc

SEQ ID NO: 287769 - DNA, 265 bp, Glycine max
  unsure (1)..(265): unsure at all n locations
ctagagcgncagatagcaatctcatctcattcatttcaatggcaactcaaggtcaagtcattacctgcaaagctgcggtggcctgggaacccaacaagcccttaactgtccaagacgttcaggtggctccgcctcaggccggcgaggtccgtgtccaaatcctcttcaccgctctctgccacaccgatgcttacactnggggcggcaaggatcccgaagtctcttcccctgtattcttggccatgaagctgcagggattgtggag

SEQ ID NO: 287770 - DNA, 262 bp, Glycine max
  unsure (1)..(262): unsure at all n locations
ctagaaacagtgtgatgaaaatgaaggtccttgttttcttcgtngctacaattttngtagcatggcaatgccatgcgtacgatatgttccctctccgaatgaacactggctatggtgcccgtactccggaggtgaaatgcgcaagttggaggcttgctgtgnaagcacacaacatctttggctttgagaccattcctgaagagtgcgttgaagcaacaaaggaatacatccatggcgaacaatatagatcagactccaaaac

SEQ ID NO: 287771 - DNA, 264 bp, Glycine max
  unsure (1)..(264): unsure at all n locations
catttctccatttccattttctctctcacttttcaagaatcgtaagctatgggaaagtcttacccaactgtgagtgctgattaccagaaggccgttgagaaggcgaagaagaagctcagaggcttcatcgctgagaagagatgcgctcctctaatgctccgtttggcatggcactctgnnnnaaacctttgacaagggcacgaagaccggtggacccttcggaaccatcaagcaccctgccgaactggctcacagcgctaacaa

SEQ ID NO: 287772 - DNA, 267 bp, Glycine max
  unsure (1)..(267): unsure at all n locations
ttganttctccagagagaagaagaaacttaatcgatcatcacttcacttcactaatacatcatggcagacgagacccagaacaagtatgagagctctgaggttgaggtccaggatcgtggtgtttttgactttctcggtaaganaaaggatgaagaagacaagcctcatcctcaggaggnggtcatcgccaccgagtttcaaaaagtcactgtctcagaccaaggagagaacaagcacagcctcttagaaaagcttcaccgatctga

SEQ ID NO: 287773 - DNA, 262 bp, Glycine max
cccccacaacgttgtgttcgacgaggacgagattcctagcggcgtggatgcagggaaaatctccatgagcgatgaagaccttctcaatgcgcctggtgagacttacagcgttactttggatgctaagggaacctacagtttcttctgttcgcctcaccaaggagctggtatggtgggaaaagtcactgttaattaattattgtctcaagggctcgtctcctacgtctaagttctcatatggttccttcttctaatatttttg

SEQ ID NO: 287774 - DNA, 263 bp, Glycine max
  unsure (1)..(263): unsure at all n locations
ttctaaganaccttaaaaaacaagtagtgttccgaaaagatggctcagcaggaagtggtagaagggttcaagttcgaacagaggcacgggaaanancgcgtganantggcgcgcgtgtggaanacgaggcaggggcagcacttcgttgtggagtggcgcgtgggcatcactctcttctcagactgcntcaactcgtatctccgcgatgacaactctgacatcgttgctactgataccatgaaaaacacagtgtatgcaaaanc

SEQ ID NO: 287775 - DNA, 263 bp, Glycine max
caaagctgccggagcatttggtggcatcagaatttggagccgccctctcattcctgttccttttcctcctcctgccggggactttaccatacttgctggagattggttcaagctcgaccaccgaaggctgagacgactcctagagaatggtcataatctccccttccctgatggccttcttatcaatggacgcggttggaatggaaacacattcactgttgatcaaggtaagacttatagatttaggatatcaaatgtggggc

SEQ ID NO: 287776 - DNA, 259 bp, Glycine max; identical to SEQ ID NO: 276844

SEQ ID NO: 287777 - DNA, 264 bp, Glycine max
  unsure (1)..(264): unsure at all n locations
cagcttattgcactggtctcctgttggcccgaagagtcctcaaaacacttnaaatggatgaggagtatgaaggaaatgttgaggctactggagaggattattcagtggaacctgccgagagcaggaggccattccgtgcactccttgatgttggtcttgttaggactacaacaggaaatcgcgtctttggtgcccttaagggagctctggatgggggtttggatattcctcacagcgacaagaggtttgctgggtttgataagg

SEQ ID NO: 287778 - DNA, 261 bp, Glycine max
  unsure (1)..(261): unsure at all n locations
ccgagaacaaaaaaaaaaacgtgattcgctcttctcttcgaataanccacaaaaccaacaaaccagaagaggagtgaganaagatggggttgtcgttcacgaagctgttcagcaggttgtttgcgaagaaggaaatgaggattctgatggtaggtctcgatgctgctggtaagacaaccatcttgtacaagctcaagcttggagaaatcgtcaccaccatccccaccatcggatttaatgttgagactgtggagtacaaga

SEQ ID NO: 287779 - DNA, 269 bp, Glycine max
  unsure (1)..(269): unsure at all n locations
agctagtttatcgtgaggagaatatgaagttgtttgttttctttgttgctgcagtagttttggtagcatggccatgccatggcgcaggctaccaaaggttccctctccgaatgaaaactggctatggtgagcgttcttcggaggtaaaatgcgcaagttttaggcttgctgtggaagcacacaacatccgagcctttaaaaccattcctgangagtgcgttgaaccaacaaaggactacattaatggcgaacatttagatcagactcta

SEQ ID NO: 287780 - DNA, 280 bp, Glycine max
gagagagagcgagcagtttcagacacagagagaggggtttgggattggagggattgacgctgcgtctcttcctcttctctttcgatccatccctcattcctaatcctccaatccaaccacctcagcctcacactcacatatacacatatctgaacgcgtatcgtccctcctatggcttcaaagcgcatcctcaaggagctcaaggacttgcagaaagacccaccaacttcttgcagcgctggtccagtagctgaggacatgttccattggcaagcaacaa

SEQ ID NO: 287781 - DNA, 280 bp, Glycine max
  unsure (1)..(280): unsure at all n locations
caacatggnatggattttacattgctccagcttttatggacaaacttgttgttcacattaccaagaacttcatgaccctgcccncacatcaaggttcctctcattcttggtatctggggaggcangggacaaggaaaatctttccaatgtgagcttgtctttgccaagatgggaatcaaccccatcatgatgagtgctggagagttggaaagtggaaatgcaggagagccagcaaaactgatcaggcagagataccgtgaagccgcagacttgatcaaga

SEQ ID NO: 287782 - DNA, 279 bp, Glycine max
gttgaagaggcctacaacaagctaatagttgaacttgagagaagtgttcctacattggttggcattgaatgtcccaaggatgagaaacttcctcgtcgcaaaatttttgacaaacctaagacgcgctgcttcactattctccctatggagtttaatcttgtggttcgtcagaagtttttaaattttgtgaggttcattatgaagaaaagggacaagcttagttgtcaagttggaatcaacccatactccatggaatggactggtttggccaatagatta

SEQ ID NO: 287783 - DNA, 278 bp, Glycine max
agccaacatttctggtggccatgtgaaccctgctgtgacctttgggttggctcttgggggccacatcaccatcctcactggtctcttctactggattgcacagcttctcggctccatagtggcatccttactcctcaagtttgtcactggctatgatactcctatccacagtgttgctgcgggaattggagctggtgaaggagtagttacagagatcataatcacatttggattagtgtacacagtgtatgccacagcagcagaccctaagaagggtc

SEQ ID NO: 287784 - DNA, 258 bp, Glycine max
  unsure (1)..(258): unsure at all n locations
taaaccctatggccgacgaaaccaaagccaaaggcaacncagccttctcctccggggactatcctgccgccatccaccacttctccgatgccatcgccctggctccctccaaccatgtcctctattccaaccgatccgccgcatcacgcctccctcaaaaactacgcagatgcattagcggatgccaaaaagacagttgaactcaagcccgactggtccaagggttacagccgtctcggtgccgcgcatcttggcctt

SEQ ID NO: 287785 - DNA, 280 bp, Glycine max
ggctccgggctcttgccgctaagaagaagcctgagaaggtttcgaatccgttgttcgagaagcgtccaaagcagttcggaatcggaggggcgttgcctccgaagagagacttgactcggttcgtgaagtggccaaagaatgttcaaattcagaggaagaagaggattctgaagcagaggttgaaggttcctgcagctttgaaccagttcaccaaaactcttgacaaaaacctagcaacaagtctgttcaagttacttctgaaatacaggccagaggacaa

SEQ ID NO: 287786 - DNA, 278 bp, Glycine max
gtcttgacatcgctgttaggcttttggagccactcaaagcggagtttcctattttgagctacgccgatttctaccagttggctggcgttgttgccgttgaggtcaccggtggacctgaagttcccttccatcctggaagagacgacaaacctgagccaccaccagagggtcgcttgcccgatgccactaagggttctgaccatttgagagatgtgtttggcaaagctatggggcttagtgaccgagatatcgttgctctgtctgggggtcacactatt

SEQ ID NO: 287787 - DNA, 277 bp, Glycine max
  unsure (1)..(277): unsure at all n locations
agaaacagtgtgatgaaaatgaaggtccttgttttcttcgttgctacaattttggtagcatggcaatgccatgcgtacgatatgttccctctccgaatgaacactggctatggtgcccgtactccggaggtgaaatgcgcaagttggaggcttnctgtggaagcacacaacatctttggcnttgagaccattcctgaagagtgcgttgaagcaacaaaggaatacatccatggcgaacaatatagatcagactccaaaacagttaaccaacaagctt

SEQ ID NO: 287788 - DNA, 277 bp, Glycine max
  unsure (1)..(277): unsure at all n locations
gtgcntcanatttgctcataatcggagggaatcgaatcgaatcgaaaggaaaggaaagtgcagaatggatgacatgccgttgccggcgctctttgagcaagcccgcaagatccacgccgcagccaccgattccggcgccgaccaggaggttgtgaagaaggggtgcgaggctctgcatagatgcgaggacatggtcaataatctaggtttgttctctcccaacgagaccaaagaagatatcagcaccacgaatctcaaatacattctggtgccattt

SEQ ID NO: 287789 - DNA, 276 bp, Glycine max
  unsure (1)..(276): unsure at all n locations
gggggtcagagtgagaaagagaaaganagaattcgtaaaccctaatttcggaaagatcggcgatgactgcctccaaggatcgcgagancttcgtctacatcgccaaactcgccgagcaggccgagcgttacgaagagatggtggaatcaatgaagaacgttgcgaatctcgacgttgaactgacggtggangagcggaatttgctttctgttgggtacaagaatgtgattggtgctcgcagacgtccctggaggatcctgtcttccattgagcaga

SEQ ID NO: 287790 - DNA, 281 bp, Glycine max
cacaaggcagaaagcaagctcatcctagagttttaaaaatggcagcagcctcctccatggctctctcttccccatccttggctggcaaggccgtgaagctgggcccatcagcccccgaagtcgggagggtcagcatgaggaagaccgtcaccaagcaggcctcctccggaagcccatggtacggcccagaccgcgtcaagtacttgggcccattctctggcgagcccccgtcctacctcactggcgagttcccaggtgactacggctgggacactgctggg

SEQ ID NO: 287791 - DNA, 279 bp, Glycine max
ctccgccacttctgaatctattgaatcaacaatcatgtcggacgaagagcaccatttcgagtccaaggccgacgccggagcctccaaaacctaccctcagcaagccggtaccatccgcaagaacggctacatcgtcatcaaaggccgcccctgcaaggttgtggaagtttcgacttccaaaactggaaagcacggtcacgctaagtgtcactttgttggaattgatattttcactgccaagaaacttgaggatattgtgccctcttctcacaactgcga

SEQ ID NO: 287792 - DNA, 275 bp, Glycine max
  unsure (1)..(275): unsure at all n locations
gctgaacatggaagcnntgatagangcgannatcnctgaggacagggagaagccanaantgttggcagaantccnctgtacaggnggaaaanggntgctcaggantcagggaanacanancagcaggtangccaanttgtagctcnncntttccaaatgcgtgttcgtatgaagaacctgatgggtgtaatggnnatggatcacttncaacacttagtaatcttgaggaagcgcttaaagcagacntnaaggctcctcctggnactgctaggagg

SEQ ID NO: 287793 - DNA, 274 bp, Glycine max
  unsure (1)..(274): unsure at all n locations
gttggcancaagacctcttgtggttatggggtggctacagggggacccttagcctggggcttatgctacagcaaggaattgantcctgataaattctactgcgatgactactataaattaacctacccttgcactcctggcgcacatactatggccgtggtgccatcccactttactggaactacaactatggaaaagccggggaagccttgaaggtggatctgttgaaccatccagaatacatagaacacaacgccactctagccttccaggc

SEQ ID NO: 287794 - DNA, 211 bp, Glycine max
  unsure (1)..(211): unsure at all n locations
ggctatcgcggtgcatggtggcgctggtgtcgaccctaatctcccactcgagcgccaagaagaagcgaaacaacttctcacgcgctgtctcaatcttggaatctctgctctaaattctaatcttcccgncatagatgtcgtcgaacttgtggtgagggaattgganacggatccgctgttcaattcgggccgtggatctgccctgacagaa

SEQ ID NO: 287795 - DNA, 277 bp, Glycine max
  unsure (1)..(277): unsure at all n locations
agagaagagcggaagagaaaatgacgaccaggttcaagaagaacaggaagaagagaggtcacgtncagcgccggacacggccgtatcggaaagcaccgcaagcatcccggaggtcgcggtaacgccggtggcatgcatcaccaccgtatcctcttcgacaagtaccatcctggtttcttcgggaaggtaggcatgcgctacttccacaaacttcgcaacaaattctacaatccgatcatcaacatcgacaagctgtggtccctcctcccccaggagg

SEQ ID NO: 287796 - DNA, 277 bp, Glycine max
  unsure (1)..(277): unsure at all n locations
gctagaagcaataagatgaaaatgaaagtncttgttttgtttgttgctacagttttggtagcatatgaatgccatggctcagactaccagaagttccctctccaaatgaaaactgggtttggtgggcaatacagcaatgaggtggcatgtgccagttggaggcttggcgtggaagcaaacaacgtagtcaagtggcaaactgttcctgcagcttgcggagagtacatagctgactacgttctaggagaccaatatagatcagattccaaaacagtta

SEQ ID NO: 287797 - DNA, 280 bp, Glycine max
cagagccaacgcgttgctaacctttgccgtaaccattctggcgcttatgtgcgctatggcttctgtatccgacaacttcaacacccccactccctctgcacaagtccaggttctgaacatcaactggtttcagaaacaacccaatggcaacgacgaggtcagcatgacgatgaatatttccgcagacttgcagtcccttttcacatggaacacaaaacaggtttttgtttttctagctgctgagtatgaaactcctaagaattccttgaatcagatatcc

SEQ ID NO: 287798 - DNA, 277 bp, Glycine max
aatgaattccagaccaaccttgtgccataccccaggattcacttcatgctttcatcttatgctcccgtgatttcagctgagaaggctcaccatgagcagttatcagttggtgaaatcacaaacagcgcattcgagccatcatctatgatggccaagtgtgatcctcgccatggaaaatacatggcttgctgtctcatgtaccggggtgatgttgtgcctaaagatgttaatgcagctgtgggaattatcaagaccaagcgcactattcaatttgttg

SEQ ID NO: 287799 - DNA, 280 bp, Glycine max
  unsure (1)..(280): unsure at all n locations
gggaacnttgggnagagatncgcacggaccttcgccttgtgatagangactacccttatggctgttganggactagaaatatgggatgctattcagacatgggttaagaactatgtctccttgtattacccaacagatgatgacnattaagaaagactctgagctccaagcttggtggaaggaagctgttgagacgggtcacggtgacttgaaagacaagccatggtggcctaagttgaacactcntcaagatttggttcacatttgctccatatcatat

SEQ ID NO: 287800 - DNA, 274 bp, Glycine max
  unsure (1)..(274): unsure at all n locations
ctgggaaatggctagggaatgcttcacaacgaacgacgttgcagtttccgctcgccccaagcttcctcgtcgctgagctcatgtgctacaacaacgccatgttgctcgtngcgccctacggtccctattggcgcgaactaaggaagatcattgtgacggagatcctctcctcgagccgtgtagagcaactacaagatgttcgtgtgtccgaagttcaaaattcgatcgtagaactctacgacgtttggcgtagcaaaagaacgagtctgactat

SEQ ID NO: 287801 - DNA, 274 bp, Glycine max
caagaacatctctctggtaaacacagcaaatcaacgttcttgagctgggaggacagacttcgtatagcagtggatgcagccttaggattggagtatctgcaaaatggttgcaagcctccaataatccacagagatgtaaaatctacaaacatcttgttgaatgaacacttccaagcaaaattgtctgattttggtctatccaaagctatcccaactgatggggaatctctcgtgtcaactgtccttgctggtactcctggttatctggaccctc

SEQ ID NO: 287802 - DNA, 274 bp, Glycine max
gcagaagaacaagtagttgagaactaagaaggagaagcaaatggcttcctccaatgatctcttccccagctgttaccactgtcaaccgtgccggtgccggcatggttgctccattcactggcctcaagtccatggctggcttccccaccaggaagaccaacaatgacattacctccattgctagcaacggtggaagagtgcaatgcatgcaggtgtggccaccagttggcaagaagaagtttgagactctttcctacctgccagaccttgatga

SEQ ID NO: 287803 - DNA, 272 bp, Glycine max
ataactagaaacagtgtgatgaaaatgaaggtccttgttttcttcgttgctacaattttggtagcatggcaatgccatgcgtaacgatatgttccctctccgaatgaacactggctatggtgcccgtactccggaggtgaaatgcgcaagttggaggcttgctgtggaagcacacaacatctttggctttgagaccattcctgaagagtgcgttgaagcaacaaaggaatacatccatggcgaacaatatagatcagactccaaaacagtta

SEQ ID NO: 287804 - DNA, 275 bp, Glycine max
  unsure (1)..(275): unsure at all n locations
tccggcgatatagccgcgactccgccgggcataaagatggttttctgagctacggcacgaaacgggcaacgtggtgcagcagngcttccatacctacgccgccggcagncaccggcggcaccggcgagttcaagcactacgccgacgaaaccaacgtcccgaacctcggcttcacctcctattccgacaacgccaacggcngaacccaatctttctcttcctactccgaaaacggcaatgccggcgagcagacattcacctcgtacggcaaaaat

SEQ ID NO: 287805 - DNA, 268 bp, Glycine max
  unsure (1)..(268): unsure at all n locations
ggacccttggnggtccatgagctatgtggtgagggatgtgattgctgtctttggtttggctgctgctgctgcgtatctcaataattggttggtttggcctctctattgggctgctcaaggcactatgttctgggctctgtttgttcttggtcatgattgtggtcatggaagcttttcaaacaactccaaattgaacagtgttgttggacatctgctgcattcttcaattctagtgccatatcatggatggagaatcagtcataggact

SEQ ID NO: 287806 - DNA, 267 bp, Glycine max
  unsure (1)..(267): unsure at all n locations
cnagaaggtgctgcagttcgcggggattgatgatgttttcacctcctccagaggatccaccaagaccctcggcaacttcgttaaggctacttttgattgcttgatgaaaacctatggattcctgacaccagaattctggaaggagactcgcttctccaaatctccattccaagagtacacagatctactggcaaaaccaacaggaaagactctaatcttggaggaggaaagggtggatgctgatttgctagttttgctttatggatg

SEQ ID NO: 287807 - DNA, 268 bp, Glycine max
  unsure (1)..(268): unsure at all n locations
ctttcaacccaatccaatcctcgcacacatgcatgctgtctctgccaaagttggggccaagtcataactacatttccattgttacgattctttctttccatcccaaccacttatnnagcgtctgatccaatttctttctctcaccatggatcatcgcaaaccattgttacccacttcctctgacgatgctccaaatccacgcactcggaaggaccttgttctaatgatttgcggtttgtttttgctctcttcccttgttgcctttgga

SEQ ID NO: 287808 - DNA, 266 bp, Glycine max
  unsure (1)..(266): unsure at all n locations
cncagcgtcaagctacaaaggacgctggtgtcatttccgggctcaacgtgatgcgaattatcaacgagcctacagcggccattgcttatggactcgacaagaaggccactagctctggggagaagaatgttctcatcttcgacctcggtggtgggacncttgatgtctcccttctcaccattgaggagggtattttcgaagtgaaagccactgctggtgatactcacttgggaggtgaagattttgataacagaatggtgaaccat

SEQ ID NO: 287809 - DNA, 266 bp, Glycine max
  unsure (1)..(266): unsure at all n locations
gttgatcgagataactagaaacagtgtgatgaaaatgaaggtccttgttttcttcgttgctacaattttngtagcatggcaatgccatgcgtacgatatgttccctctccgaatgaacactggctatggtgcccgtactccggaggtgaaatgcgcncnttggaggcttgctgtggaagcacacaacatctttggctttgagaccattcctgaagagtgcgttgaagcaacaaaggaatacatccatggcgaacaatatagatcag

SEQ ID NO: 287810 - DNA, 264 bp, Glycine max
  unsure (1)..(264): unsure at all n locations
ctcttactancaatntncnanggttnatacaattntcnatggcttcntcagntgcngagtaccgntgtttgtcgntgggctcgcttgggccactgacgancangctctcgagnganccttctctcagnacggcgaaatcgntnaaacgaanatnatcaacgatcgtgagactggaanctccaggggttttgganntgtgacnttcgnctcggagcagncnatganagacgccatcgatgggatgaacggccanaaccttgacgg

SEQ ID NO: 287811 - DNA, 265 bp, Glycine max
ctaaacgactctatctctcttcgttttgttcttccttgcgctcctcctcgttcgttcgttctccctcgcgtagatcggcaatggcggagaccgagacgtttgctttccaggctgagatcaaccagctcctcagtctcatcatcaacaccttctactccaacaaggaaatcttccttcgtgaactcatcagcaacgcctctgatgctttggacaagattagatttgagagtttgacggacaagagcaagctcgatgctcagccaga

SEQ ID NO: 287812 - DNA, 266 bp, Glycine max
  unsure (1)..(266): unsure at all n locations
ctcgtcgttaataatgacttcacgcagtggntagatgnatgctatcngcggnaggctaaccccaccatcaacngccagggtaancgttacaccgctcccgcagaccctgatgccaaagaggtgacgaagcgcgtggacacagacgatagagagtggngtggttngaattggaggacggnaggggacataatggtaaatggngcgttctttgtaccctcaggggcggggcagagtgcacagtcacgcagaggccaccantntgcaag

SEQ ID NO: 287813 - DNA, 244 bp, Glycine max
  unsure (1)..(244): unsure at all n locations
cagagcttttgtcaattttctattannncttctcggtggaggaattttagtgganaaaactaggagattggatcacacttatacaaaattctccaattagtaacttgttgagagttgcngcttggaagaaattccgtttaatggtcaagattgtgatgtctgggaatgcagcagtcaaaaggagtgattgggcctcattggtacaagtgtttttaacaaacagcaacagtacagagcattttga

SEQ ID NO: 287814 - DNA, 265 bp, Glycine max
  unsure (1)..(265): unsure at all n locations
cccctcaaccccaacaaagcaagagangtagggtttttgtgcttggcaaaaganagagaagagaagatggtgtcaggttcggggatctgcgcgaagcgtgggtggtggacgcccggcaccacatgctgggtcggctcgcctcgattgtggcaaaggagctgctgaacggacaaaaagtggtggtcgtgcgatgcgaagagatttgcatctccggtggtctggtgaggcagaaaatgaagtacttgaggttcctccgcaaacgcat

SEQ ID NO: 287815 - DNA, 278 bp, Glycine max
  unsure (1)..(278): unsure at all n locations
ctaanacnttcncaccttgcagaaagnaagctcatcctagagttttaaaaatgggcagcagcctcctccatggctctctcttccccatccttggctggcaaggccgtgaagctgggcccatcagcccccgaagtcgggagggtcagcatgaggaagaccgtcaccaagcaggcctcctccggaagcccatggtacggcccagaccgcgtcaagtacttgggcccattctctggcgagcccccgtcctacctcactggcgagttcccaggtgactacgg

SEQ ID NO: 287816 - DNA, 262 bp, Glycine max
  unsure (1)..(262): unsure at all n locations
ctgggcnggantattctnaacttttgcangagttcatgactgctgncaagcaaaactacggngaaanagttcttgttcagtttgangantttgcaaaccacaatgcttttgagttgcttgcaaaatatggcacaactcatcttgttttcaacgacgatattcaggggactgcatctgntgttcttgctggggttgtggcagccnnnaagctcattggaggtactctggctgaccacacattcttgtttcttggtgctggaga

SEQ ID NO: 287817 - DNA, 265 bp, Glycine max
  unsure (1)..(265): unsure at all n locations
tgccaattgatttcaagaacaaatgtaatgttggctatgcattcatcaatatgattgatcctggacaaattatnccattccaccaggcttntcatgggggaaaatgggaganttcaacagtgaaanggtcgcggtactcgcctatgcccganttcaaggaaaatctgcncttattgctcattttcagaattcaagcctaatgaatgaagatanacgttgccgccccattctcttccatacagatggcccaaatgctggtgatccg

SEQ ID NO: 287818 - DNA, 261 bp, Glycine max
  unsure (1)..(261): unsure at all n locations
ctgatatttcccctatatataanangccttagaatagagtatagaagataaaganaagaganatggcaacagacacaaaagtggcagtattaggtggcatcaccgaagtgcagggagctgncaacagcgtcgagatcaacaatctcgctcgctttgctgtagaggaacaaaacaaaagagagaattcagttctggagtttgtgagggtgattagtgcacagcagcangtggtttctggagtgaattactacataacattgg

SEQ ID NO: 287819 - DNA, 260 bp, Glycine max
  unsure (1)..(260): unsure at all n locations
ggatgtctaatgttttgtgggtggctcctgaggacaaggcgagtttgtggtcacaacttcattatgtttcgtgtaataatctggaaatgcaagaagcttatcttgtcatctcgtaaatgtgttacgagaattgtatttgcacagtccagaggnagctcgccaattgagaaggaaagctctttctcgtattgaatggctgcaaaaagctgatgtgcctaccatagcacagattgaagagttccattcgatgcagaggatga

SEQ ID NO: 287820 - DNA, 260 bp, Glycine max
  unsure (1)..(260): unsure at all n locations
agaaattagaggcttaagtggtaaganagatttcttggatgaagatgatattcaaaagttttcctacttaagggcagtgataaaagagacacttagattgcacttaccagcaccacnacntataccaagagaaacaaataaaaaatgcatgttagatggctacgaaattccagccaagacattatnatatgtgaatgcttgggcaattcatagagatcctaaggcttggnaagatccagaagagtttatacctgagaggt

SEQ ID NO: 287821 - DNA, 257 bp, Glycine max
  unsure (1)..(257): unsure at all n locations
ctaganacagtgtgatgnaaatgaaggtccttgttttcttcgttgcnacaattttngtagcatggcaatgccatgcgtacgatatgttccctctccgaatgaacactggctatggtgcccgtactccggaggtgaaatgcgcaagttggaggcttgctgtggaagcacacaacatctttggcttgagaccattcctgaagagtgcgttgaagcaacaaaggaatacatccatggcgaacaatatagatcagactcca

SEQ ID NO: 287822 - DNA, 257 bp, Glycine max
  unsure (1)..(257): unsure at all n locations
tgctttgnttgctgagttcattgccacaatgctcttcctttacatcacantgctcactgtgattggttacaagagccngagtgatgtnanggctgggggtgatgtgtgtggtggagttggcattcttggcattgcttgggcctttggtggcatgatcttcattctggcgtactgcactgctggaatctcnggnggtcacataaacccagcagtgacatttgggctcttcttggctcgcaaggtgtcttgattagagc

SEQ ID NO: 287823 - DNA, 143 bp, Glycine max
  unsure (1)..(143): unsure at all n locations
cgnnataactagnaacngtgtgntgaaaatgnaggtccttgttttcttcgntgctncaatttnggtngcatggcaatgccatgtntacaatatgttccctctccgaatgaacactgnctatgntgcccgtaccccggaggtga

SEQ ID NO: 287824 - DNA, 259 bp, Glycine max
  unsure (1)..(259): unsure at all n locations
ctttgcaaagcaacctttccaaacaaaatcaggctcttgtggtaccgtagtcaganatgcagaactcaaggttgttgaccctgaaactggtcgttctcttgggctacaatcaacccggtgaaatttgcatccgagggcaacagatcatgaanggatatctgaacgatgaggcagcgacagcatcgaccatagattcagagggttggcttcacaccggtgatgttggcnacgtagatgatgatgacgaaattttcattgt

SEQ ID NO: 287825 - DNA, 285 bp, Glycine max
  unsure (1)..(285): unsure at all n locations
tcaantagcaaagatgtttggnatcatccggaggaaacaagggtcacaagataaaggggaacttggtgattatgcgaaanaatgtgttggatatcaacagcattaccagtgttaagggtgtcatcggaaccggcattaacattcttggaggagtcgtcgacaccgttactgctttggcgtcccacatctccatccagctcatagtgccaccaaggctgatggacatgggaaaggaaagttggaaangctacaaatttaagaggacnagtgtcgttaccaaccttg

SEQ ID NO: 287826 - DNA, 292 bp, Glycine max
  unsure (1)..(292): unsure at all n locations
cacacttatacaaaattctccaattagtaacttgttgagagttgctgcttggaagaaaggctgtttaatggtcaagattgtgatgtctgggaatgcagcagtcaaaaggagtgattgggcctcattggtacaagtgtttttaacaaacagtcaacagtacagagcattttgatgcatgtaagtggacaaaatcagaaccacattcctgggaattgatcttcccaatagaggtatgtggtcccaataatggttttgaaatgccnggntctgagtgggcaaatcnaacttcatg

SEQ ID NO: 287827 - DNA, 291 bp, Glycine max
  unsure (1)..(291): unsure at all n locations
caagaatgagggagatattgcacgtgcaaggtgggcaatgcgggaaccaaatcggttccaagttctgggaagtgatatgcgacgaacacggcatcgaccccaccggaaagtacaccggcgacgaggcctccgatctccaactggagaggatcaacgtctactacaatgangcctccggcggaaggtacgttccccgggccgtccttcatggatctggagcccggcaccatggacagcatcagatccggcccatacggcaagatcttcaggcccgacaattcgtctttggcc

SEQ ID NO: 287828 - DNA, 293 bp, Glycine max
  unsure (1)..(293): unsure at all n locations
ctataagctagtttatcgtgaggagaatatgaagttgtttgttttctttgttgctgcagtagttttggtagcatggccatgccatggcgcaggctaccaaaggttccctctccgaatgaaaactggctatggtgagcgttcttcggaggtaaaatgcgcaagttttaggcttgctgtggaagcacacaacatccgagcctttaaaaccattcctgaagantgcgttgaaccaacaaaggactacattaatggcgaacaatttagatcagactctaaaacagttaaccaacaag

SEQ ID NO: 287829 - DNA, 290 bp, Glycine max
gttgctccaccacctaatcacttcccctgtaaatcacgtttagttcgcacaaggttttaaaaaatggctgatgctgaggacattcaacctcttgttgttgataatggaactggaatggtcaaggctggttttgcaggtgatgacgctcctagggccgtgttccccagtattattgggcgaccacgccataccggtgtaatggttgggatgggtcagaaggatgcttacgtgggtgatgaagctcaatcaaaaaggggtatactcaccttgaagtatcctatagagcatgg

SEQ ID NO: 287830 - DNA, 294 bp, Glycine max
  unsure (1)..(294): unsure at all n locations
ctcttatctattttatnancctgtccttttcgcctacggcttttattgggttgaactatgatctgaaatctccaaagtttgagttcttgtcacatgcaaagccttcactttttgaataccccaagcctactactgttcccaccactacttcaaccgtgaancttcccactgctgttctgtcaacctcagctaaggctaaagctagggctaagaaagctgaagaacagaaggctaatgctgaaatttcatctgctcccgatctgcatcagtgtcccaagtggtggaaaaggaaag

SEQ ID NO: 287831 - DNA, 288 bp, Glycine max
  unsure (1)..(288): unsure at all n locations
gatgattcaaaacagaaaaaaaatgaggttttttacagtgaaagtagctctgtgctgtgtggtggttatgctactaaccctctcagatgcacagctagataactctttttacaaggacacgtgtccaagagtgcattctattgtgcgtgaagttgtcagaaatgtttccaaatctgatccccgcattcttgccagtctcataaggctccactttcatgattgtttcgttcaagggtgtgatgcatcaattctgttgaacgacacagctacgatcgtgagcnagcaaag

SEQ ID NO: 287832 - DNA, 290 bp, Glycine max
  unsure (1)..(290): unsure at all n locations
catgatggagacgacggcgaacgaaaacgctgtgcgttncgccaatcgcggcgttgttgttggtggtgctactcgcggcgagtgtggtggtggaggctcaggagaactcggacgtgaagacgctggtgaagcacatgcacgggaagaagtactgcgacaaaggatgggaatgtaagggctggtcaatttactgttgtaacctcactattactgattatttccagacctaccagttcgngaatctcttctccaagcggaattcgccggtggcgcacgccgtcggattttgg

SEQ ID NO: 287833 - DNA, 290 bp, Glycine max
  unsure (1)..(290): unsure at all n locations
caatgatgatgccccatcatcggctccacctgctggaagtcagcaaaatggggtgaatgttgctgagttaatagtgggccgtggctttggaactgtcattagacatcgtgactttgaagagagatctaactattatgattctcttcttgctgctgaatcgcgtgcaatttctggaaggaaaggcacccactctgccanggatcctccagtgatgcatataactgatttgaccatggcatcggctaagaaagccagagacttcttgcctttctgcaccgaagtagaagagt

SEQ ID NO: 287834 - DNA, 288 bp, Glycine max
tgatattggggcagcgcacaatacgtaacaagttctatcattgaggaagtttccggtctccgaaaatgaacgacgcagatgtctcgaagcaaatccagcagatggtgcggttcatccgccaggaagctgaggaaaaggccaacgagatctctgtctccgccgaagaggaattcaatatcgagaagctgcagttggtcgaagccgacaagaagaagatcaggcaagaatacgaacgcaaagagcgccaagtcgaaattcgcaagaagattgggtatcgatgcagctgaa

SEQ ID NO: 287835 - DNA, 197 bp, Glycine max
  unsure (1)..(197): unsure at all n locations
tcganntanctanananagtgtgatganaatganggtccttgttttcntcgttgccacaatttncgtagcatgncnntgccatgcgtacgatatgttccctctccgaatgaacactggntatggtgcccgnactccggangtgaaatgcgcaagtnggaggcttgntgtggaagcanacaacatntttggctttgag

SEQ ID NO: 287836 - DNA, 292 bp, Glycine max
  unsure (1)..(292): unsure at all n locations
gcgcggcacacacagacacacacatttcgtcggaatgggaagggtgattcgcgcacagcgtaaggntgcggggtcggtgttcaagtcccacacccaccaccgcaagggtccggcgaggttccgcagcctcgacttcggcgagcgcaacggctacctcaaaggggtcgtcaccgatatcatccacgaccctggtcgcggtgctcctctagccaaggtggcgttccgccaccccttccgctacaagaagcagatggagctcttcgtcgccgccgagttctctacaccggccagt

SEQ ID NO: 287837 - DNA, 270 bp, Glycine max
  unsure (1)..(270): unsure at all n locations
cagagcttttgtcaattttntatngannttctcggtggangaattttagtggacaaaaanggagattggatcacacttatacaaaattntncaattagtaacttgttgagagtngctgcttggaagaantgngtntaatggtcaagattgtgatgtctgggaatgcagcagtcaaaaggagtgattgggcctcattggtacaagtgtttttaacaaacagcaacagtacagagcatttgatgcatgtaagtggacaaaatcagaaccaca

SEQ ID NO: 287838 - DNA, 285 bp, Glycine max
  unsure (1)..(285): unsure at all n locations
ccatttntcatancaacaaacangcatnttagcgtgctccaccctatttatanacttccngttgcctcactatcgtgacaccatgaacatcaatggantngcaagacaatcactcatcaatgcaggtggcattattgagcaatcatttctgcctgggccatttgctgtggagatgtctcggcagtttacaangggtgggttttcactgntcaagccctcctgcggntcttatcaagagaggnatggcagtggaggnnccatcctctccctatgggcttcgtnttg

SEQ ID NO: 287839 - DNA, 286 bp, Glycine max
  unsure (1)..(286): unsure at all n locations
tcagccacagtttcggaggagaagaaaatagtcgttcganatggcccgtacgaagcaaactgctgcgtaagtccacaggaggaaaggctcctaggaagcagcttgcaaccaaggctgcacgtaagtctgcaccaactactggtggtgtgaagaagccacatcgttaccgtcctggtaccgttgctcttcgtgagattaggaaataccagaagagtaccgagcttttgatcaggaagctccccttccagaggctggttcgtgaaattgctcaggacttcaagatgat

SEQ ID NO: 287840 - DNA, 285 bp, Glycine max
  unsure (1)..(285): unsure at all n locations
ttggaatctggtttgcaaaaagacagagggttaattgtggagtattttggaaggatgtcttacgttgctcataacgttaatcagccccaaganaaagatttgttagagggaaatttttcctttgatattaaatctcgctctagattggactcagtttcctctacaaaagcacaatttgttagtggaaaaaccttcaaatatgatataattggtgctggttcacattcttcagaagattttcctgaaaaggaagatcaagaaaaacccaaaaagatgatgccagat

SEQ ID NO: 287841 - DNA, 280 bp, Glycine max
  unsure (1)..(280): unsure at all n locations
tttaatgtgggtaacccaaacaatgaggttactgttaggcagcttgctgaaataatgattaangtttattcaaaggtaantggcgaacaaactcctgaaacacctaccgttgatgtgagctcaaaagaattttatggtgagggatatnntgntagtgacaagagantccctgacatgaccataataaacaggcagcttggatggnntcccaagacttcactttgggaccngcttgagtccactctgacatatcancacangacatatgctgaagccgtta

SEQ ID NO: 287842 - DNA, 281 bp, Glycine max
  unsure (1)..(281): unsure at all n locations
gccctttgtacantggctctacntgtgctacaatcaaagagagccagaattgcatcatcantgggaggcatgactccacctaccttcgctggagatggaaaccaagtgaatgccatcttccaaggtttgaaccaaacacttttctccaactcataagaaacaagcatgtagctttngttggggactctatggctangaaccanntagagtcccttctttgcttgcnagccactgcatcaatccaaaacgtgtccaccacaagggttctcgtagtggcattt

SEQ ID NO: 287843 - DNA, 280 bp, Glycine max
  unsure (1)..(280): unsure at all n locations
tngnacaaagacttacgctacaagaaccatatttttcttgaaaagtgatggaaacttgacgccattggccattgagttaagtaagccgcatcctcagggtgaaggatactgtcctgttagcgaagtctacgtgccttcgagcgagggagttgaagcttacatttggttactggcaaaggcttatgttgtggnnnaatgattcgngctaccatcaantcgtcagccactggctaaacactcatgcggttgttgagccattcgtcatagcaacaaacaggca

SEQ ID NO: 287844 - DNA, 279 bp, Glycine max
  unsure (1)..(279): unsure at all n locations
gaaggtccttgttttcttcgttgctacaattttcgtagcatggcaatgccatgcgtacgatatgttccctctccgaatgaacactggctatggtgcccgtactccggaggtgaaatgcgcaaantggaggcttgctgtggaagcacacaacatctttggctttgagaccattcctgaagagtgcgttgaagcaacaaaggaatacatccatggcgaacaatatagatcagactccaaaacagttaaccaacaagcttacttttatgccaganactcgaa

SEQ ID NO: 287845 - DNA, 276 bp, Glycine max
  unsure (1)..(276): unsure at all n locations
ctgcagcaactatgcctaaccctaaggtcttcttcgacatgaccatcggcggtcaatctgcnggcngcatcgtgatggagctctacgccgacgtnantccccgcaccgccgagaacttccgcgcgctttgcaccggcgagaagggcgtagggcggagggnaagcccctccatacaagggctcgtcttccaccgcgtgatccccgagtttcatgtgtcagggtggcgacttcaccgncggaaacggaaccgnggngagtcgattntggcgccaagtt

SEQ ID NO: 287846 - DNA, 282 bp, Glycine max
  unsure (1)..(282): unsure at all n locations
tttgttgatcgagataactagaaacagtgtgatgaaaatgaaggtccttgttttcttgcgttgctacaatnttngtagcatggcaatgccatgcgtacgatatgttccctctccnaatgaacactggctatggtgcccgtactccggaggtgaaatgcgcaagttggaggcttgctgtggaagcacacaacatctttggctttgagaccantcctgaagagtgcgttnaagcaacaaaggaatacatccatggcgaacaatatagatcagactccaaaacag

SEQ ID NO: 287847 - DNA, 281 bp, Glycine max
aaggagttgtaaattaagagcatggctgcacaagctcttgtatcatcatcatctcttaccttctcagccgaggctacaagacaaagtcttggaccaagatcactccaatctccatttggcttctccagaaaagcctcctttcttgttaaggcagctgctactccccctgtcaagcaaggatcagacagacctttgtggtttgcatcaaagcaaagtctttcctacttgggatggcagccttccgggtgactatggatttgaccctctgggactttcggacc

SEQ ID NO: 287848 - DNA, 283 bp, Glycine max
  unsure (1)..(283): unsure at all n locations
gagagtggtttcagtgagtgatcggtgttcacttgatccttcataagtgcgtcatcatgcatgcatcatgcatcaccgttgattgaagaagatgccgatcagaaacatcgccatcggaaggcctgaagaggctactcaccccgacacgttgaaggcggggttggctgagttcatntccaccttgatcttcgtgttcgccggttcaggttccggcatcgcctacaacaagctcaccgacaacggcgccgccantcccgccggcctcatctccgttccatcgccc

SEQ ID NO: 287849 - DNA, 278 bp, Glycine max
  unsure (1)..(278): unsure at all n locations
ttgngctgnggagggctgtgctgctcttggcaagctgttggagccacaagattgtnttgcacatatactcccggtnattgttaacttctcccaggataagtcttggcgcgtgccttacatggttgcaaatcaattgtatgagctttgtgaagctgtaggccctgaacctaccagaacggaattggtacctgcttatgtggcggttgcttcgagataatnaggctgaagtggcgcatagcagctgctggaaaagtgaccaagttttgccggattttana

SEQ ID NO: 287850 - DNA, 285 bp, Glycine max
caaggactcaaagctttctcccatcggatttaagtggtatttttggaggacaacttagaagtttggtgagagctaaaggaaatagagcttctgctactgttcaaccatatctcttgctccatcttgacatctatcctgatgctgttcacacaattgaggatgcacttcacttgttttctgcaccagagactcttgaagggtaccgaacatcactcactgcaaaggccggtgttgtgactgcaaggaaatctgttcgaatagtgacactcccgaaaataatgatat

SEQ ID NO: 287851 - DNA, 281 bp, Glycine max
  unsure (1)..(281): unsure at all n locations
atgaacatcaatggactcgcaagacaatcactcatcaatgcaggtggcattattgagcaatcatttctgcctgggccatttgctgtggagatgtcttcggcagtttacaaggggtgggttttcactgatcaagcccttcctgcggatcttatcaagagaggaatggcagtggaggatccatcctctccctatggccttcgccttgtgatagatgactacccttatgctgttgatggatancagatatggagtgctatccagacatgggttaaggactacgt

SEQ ID NO: 287852 - DNA, 283 bp, Glycine max
ggtgctcaaccctagtaagccgcaatggtgaagtactcaagggagcctgacaatccaactaagtcttgcaaggctagaggcgccgaccttagggttcattttaagaacacaagggaaactgcctttgcaatcaggaagttgcccttggtcaaggctaaaaggtacttggaagatgttcttgcccacaagcaggcaattccattcagacgtttttgtcgaggtgttggaaggacagcccaggctaagaatagacactctaatggccaaggacggtggcctgtca

SEQ ID NO: 287853 - DNA, 215 bp, Glycine max
tgattgaagaagatgccgatcagaaacatcgccatcggaaggcctgaagaggctactcaccccgacacgttgaaggcggggttggctgagttcatctccaccttgatcttcgtgttcgccggttcaggttccggcatcgcctacaacaagctcaccgacaacggcgccgccactcccgccggcctcatctccgcttccatcgcccatgctttcgc

SEQ ID NO: 287854 - DNA, 287 bp, Glycine max
ttctgcaatttgagaggaaatgaattcttctgcgaggttgatgacgattacatccaggacgacttcaacctctgtggattgagcagtcaagtgccttactatgattatgctctggatttgattttggatgttgaatcctctcatggtgacatgtttaccgaggaacagaatgagttaattgaatcagcagccgagatgcttatggtctgattcatgcccggtacatattgacaagcaaaggaatggctgcaatgctcgacaagtacaagaactatgattttggcaga

SEQ ID NO: 287855 - DNA, 291 bp, Glycine max
  unsure (1)..(291): unsure at all n locations
tgaagagcgaagagaatggctcccaagggtttaatctttttggctgtgttatgcttctcagcactgtcactgagtcgttgtcttgcggaggataatggacttgttatgaacttctacaaggaatcatgccctcaggctgaagacatcatcaaagaacaagtcaagcttctctacaagcgccacaagaacacngctttctcctggctcagaaacatcttccatgactgtgctgttcagagttgtgatgcttcactgttgctggactccacaagaaggagcttgtctgagaag

SEQ ID NO: 287856 - DNA, 286 bp, Glycine max
  unsure (1)..(286): unsure at all n locations
tgtccgtcaaatgttaaatagtgtagctggtttacgtgaatggtttgctcaatcagatgaaaganatgctcatccaagaattcctgtcatggttaatatgtcctcaacagctgtttcttcaaagaagaatcagaagccaaatgatttttctgtcaatcctacttctcttgatcaaatgaatgctacaagcagaagttctgccttgatagatgaatattctgatgatgaagaagattttcaaatagcagaacctgaacaagaggcataccaaattggtcttgagaat

SEQ ID NO: 287857 - DNA, 284 bp, Glycine max
  unsure (1)..(284): unsure at all n locations
acaacttctgctacttcctactccaaccgcactncctgctccgcaattatcatgggcaaggtcaagatcggtatcaacggatttggaagaattggccgtttggtagccagagtggctctgcagagagacgatgttgaactcgttgccgttaacgaccctttcatcaccaccgattacatgacatacatgtttaaatacgacagtnttcatggacactggaagcatcacgatgtcaccgttaaggacgagaagacccttctcttcggtgacaagccagtcactat

SEQ ID NO: 287858 - DNA, 282 bp, Glycine max
  unsure (1)..(282): unsure at all n locations
tnttgatcgagataactagaaacagtgtgatgaaaatgaaggtccttgttttcttcgttgctacaattttngtagcatggcaatgccatgcgtacgatatgttccctctccgaatgaacactggctatggtgcccgtactccggaggtgaaatgcgcaagttggaggcttgctgtggaagcacacaacatctttggctttgagaccattcctgaagagtgcgttgaagcaacaaaggaatacatccatggcgaacaatatagatcagactccaaaacagtta

SEQ ID NO: 287859 - DNA, 285 bp, Glycine max
  unsure (1)..(285): unsure at all n locations
atcgagataactagaaacagtgtgatgaaaatgaaggtccttgttttcttcgttgctacaattttngtagcatggcaatgccatgcgtacgatatgttccctctccgaatgaacactggctatggtgcccgtactccggaggtgaaatgcgcaagttggaggcttgctgtggaagcacacaacatctttggcttgagactcttcctgaagagtgcgttgaagcaacaaaggaatacatccatggcgaacaatatagatcagactccaaaacagttaaccaacaag

SEQ ID NO: 287860 - DNA, 288 bp, Glycine max
  unsure (1)..(288): unsure at all n locations
attaaatcttctntcacaatatntgtnatnccangacaaaggcacctatanaggagnntcgcaagaagatatggcttgtaganttcaaagggtttgattgttggttcaagaaaggcttcacttcaacacttcaagcagccttgggctcatgagcatgagcctgtaggcagttctcttagaagctgttaaggtaatcaagcctacagttttgattgggtcatcaggagtgggaaaaactttacaaaggaagtattgaggctgtgacttctataaatgaaaaacctcttg

SEQ ID NO: 287861 - DNA, 271 bp, Glycine max
  unsure (1)..(271): unsure at all n locations
cagagnttttgtcaattttctatactaccttctcggtggannaattttagtggacaaaacangagattngatcacacttatacaaaattctccaattagtaacttgttgagagttgntgcttggaagaaatgcgtntaatggtcaagattgtgatgtcctnggaatgcagcanngaaaaggagtgattgggcctcattggtacaagtgtttttancaaacagcnacagtacagagcattttgatgnatgtaagtggacaaaatcagaacca

SEQ ID NO: 287862 - DNA, 281 bp, Glycine max
  unsure (1)..(281): unsure at all n locations
tcgagataactaganacagtgtgatgaaaatgaaggtccttgtnttcttcgntgcnacaattttggnagcatggcaatgccatncgtacgatatgttccctctccgaatgaacactggctatggtgcccgtactccggaggtgaaatgcgcaagttggaggcttgtcgtngaagcacacaacatctttggctttgagaccattcctgaagagtgcgttgaagcaacaaaggatacatccatggcgaacnatatagatcagactccaaaacagttaaccaac

SEQ ID NO: 287863 - DNA, 258 bp, Glycine max
  unsure (1)..(258): unsure at all n locations
cagagcttttgtcaattttctatacgaccttctcggtggancgaattttagtggacaaaacncggagattggatcacacttatacaaaattctccaattagtaacttgttgagagttgctgcttggaagaaagnccgtctaatggtcaagattgtgatgtctgggaatgcagcagtcaaaaggagtgattgggcctcattggtacaagtgtttttaacaaacagcaacagtacagagcattttgatgcatgtaagtgg

SEQ ID NO: 287864 - DNA, 284 bp, Glycine max
  unsure (1)..(284): unsure at all n locations
ctccctcgctctatttctcagtctctgtntttgcngctgaggattccgaacgagtgaccttcttcgtttctcgcaaagtttaagtaatcatgggtaaggaaaaggttcacatcaacattgtcgtcattggacatgtcgactctgggaagtcaactaccactggtcacttgatctacaagcttggaggtattgacaagcgtgtgattganaggttcgagaaggaggctgccgagatgaacaagaggtcatcaagtatgcctgggtgctcgacaagctcaaagctg

SEQ ID NO: 287865 - DNA, 277 bp, Glycine max
gttgctaagcatttgaatcgcttgaacaagcctcctgttaagaccattcagagtccagatggggatacaatagactgtgtgcctatttcgaagcagcctgcatttgaccatcctttcctcaaagatcacaagattcagacaaggcctagtttccaccctgaagggctttttgaagagaacaagttatctgaaaagcctgatgcaaaaacacatacccccatcactcagctgtggcatgcgaatggtagatgccctgaggacacaatacccgtcagga

SEQ ID NO: 287866 - DNA, 280 bp, Glycine max
  unsure (1)..(280): unsure at all n locations
cactcttcttcatcgtcgtcgcaatgggacgtgtgatccgtgcgcagcgtaaggnagcaggctcggtcttcaagtcccacacgcaccaccgcaagggccctgcacgcttccggagcctggacttcggggagcgcaacggctacctcaagggcgtggtcaccgacgtcatccatgaccctggccgcggcgcgccgcttcgccaaggtcgccttccgccaccctttcagatacaagaagcagaacgagctcttcattgccgccgagggcctctacaccggtc

SEQ ID NO: 287867 - DNA, 276 bp, Glycine max
  unsure (1)..(276): unsure at all n locations
ggcagctttgaacgacgcagaaggttcatccaatctccgaatcctttaatcgcattgcaaccatgtcgaggagaaaggtcagagagccaaaggaggaaaacgtgactcttggcccagctgttagagatggcgaacatgtctttggcgtcgctcgcatatttgcctcctttaatgataccttcattcatgtcactgatctgtctggncgggaaacgcttgtccgcatcactggtggaatgaaggttaaggctgacagagatgaatcatctccttatg

SEQ ID NO: 287868 - DNA, 279 bp, Glycine max
  unsure (1)..(279): unsure at all n locations
gnggaaaatggcttcattgaaactgccagaggttgttccttctcccacacaagacagtgaacgactcagaaaggctttccaanngatttgggacagatgagaaagcggtgatattggtattgggacacaggaatgctcaacaaaggaagaaaattggagaaacttatcagcagctttacaatgaatcgcttgtcgatcgtcttcattctgaattgtctggtgattttagaaatgctgtaattctctggacctacgatcctccagaaaggcatgcgagac

SEQ ID NO: 287869 - DNA, 281 bp, Glycine max
ccacaaggctgtgaggcacattgatacagttcgggcatacacatttggatctcactactttgttgaggttgatattgtcctgccatcggatatgcccttgcaagaggctcatgatattggggaatcgttgcaagaaaagcttgagcttttgcccgagattgagcgtgcttttgttcatcttgattatgagtacagtcacaaacctgagcatgctcaagcacactcttagcagcaatcaggaaagcactgccttcttgtttatttcagttgcccttcatctc

SEQ ID NO: 287870 - DNA, 280 bp, Glycine max
ttttctctctcccttagtcaaagggattcatcgttcttcttcccaggttatttagaaaagcaaaatggtgaagatttgctgcattggtgctggatatgtggggggtcctactatggcagtcattgtacttaagtgcccatccattgaagtcgctgttgttgatatctctaaatcccgcattgcagcctggaacagcgaccagcttcctatctatgaacctggccttgatggtgttgtgaagcaatgccgtggcaagaacctcttcttcagcactgatgtt

SEQ ID NO: 287871 - DNA, 279 bp, Glycine max
  unsure (1)..(279): unsure at all n locations
ctcataacacaaagcacaaagcaaagctcatccttgagttaaaaaatggcagcagcttcttccatggctctcttcatccccatccttggctggcaaggccgtgaagctgggcccatcagccccagaagtgggaagggtgagcatgaggaagaccgtcaccaagcaggtctcctcaggaagcccatggtacggcccagaccgagtcaagtacttgggcccattctctggcgagcccccgttcctacctaaccggtnagttcccaggcgactacggctggg

SEQ ID NO: 287872 - DNA, 278 bp, Glycine max
  unsure (1)..(278): unsure at all n locations
ttgctcctgcgctgattgctggaaactccattgtgctcaagcctccaactcagggagctgtttctgctcttcatatggttcactgctttcacttggctggttttcccaaaggcctaatcaactgtgtcactggcaaaggctcagaaattggtgacttccttacaatgcatccaggagtgaactgtataagcttnactggtggtgatactggcattgcaatttcaaagaaggcaggcatgattcctctgcaaatggagttgggaggaaaagatgcctgc

SEQ ID NO: 287873 - DNA, 281 bp, Glycine max
  unsure (1)..(281): unsure at all n locations
aaagcttgctacattctgctttgctcgaaattctcatcatgtcaagcctcaatgcggctgaacccatagcatttctttaacctttgcngtttcatggcttccctcacttgttctgtatcaagccaatgaccatttctgctatgtacaatctgccatgaagcttacaagccgacacgagagagctccatnctcttgcacttggtttcatgggcattgttctcagtattttcagagcatcttcaagcttccctgaccttccaagaagatcgactaggcattca

SEQ ID NO: 287874 - DNA, 285 bp, Glycine max
  unsure (1)..(285): unsure at all n locations
attgattcaggctgtgcatgataatcaggtcttggtggttattggagaaactggttcaggtaagactactcaagtcacacagtatcttgctgaagcgggttacaccacaagangcaaaattggatgtactcaaccccgtaggtgggctgcaatgtcagttgcaaagagagttgcagaagagtttggttgtcncattgggagaggaagttggttatgccattcggtttgaggattgcactggaccagataccgttatcaagtacatgacggatggtatgcttctta

SEQ ID NO: 287875 - DNA, 281 bp, Glycine max
gggccatgctcggagccttgggctgcgtcttcccggagttgctgtcccgcaacggggtgaagttcggagaagccgtgtggttcaaggccgggtcccagatcttcagcgagggtgggctcgactacttgggcaacccaagcctgatccacgcccagagcatcctcgccatctgggccacacaagttatcctaatgggtgccgttgaaggttaccgtattgctggtggccccctcggtgaggtcactgacccaatctacccaggtggcagttcgacccattgg

SEQ ID NO: 287876 - DNA, 277 bp, Glycine max
aagaagattcctggattgattgtgaagatggctgagtcggacaacgactcgggaggggcgcagaacgcgggaaacagtggaaacttgagcgagttgtcgcctcgggaacaggaccggtttctccccatagcgaacgtgagcaggatcatgaagaaggccttgccggcgaacgcgaagatctcgaaggacgcgaaggagacggtgcaggaatgcgtgttcggagttcatcagcttcataacgggtgaggcgtcggacaagtgccagagggagaagcgc

SEQ ID NO: 287877 - DNA, 275 bp, Glycine max
gagaaaaatggggtgtttccatctcacagtgactagtctgtgctttgtagtggttgtggttggagtgcttccactgctccttagatgcacaactagatccctcgttttacagagacacgtgtcccaaggttcactccattgttcgcgaagtggtgaggaacgtttccaagaaagatccccgcatgcttgccagtctcattagacttcactttcatgactgttttgttcaaggatgtgacgcatcagttttgttgaacaacactgccaccatagag

SEQ ID NO: 287878 - DNA, 275 bp, Glycine max
  unsure (1)..(275): unsure at all n locations
cctccttccaccccgaaatcgaagncacttctttacagctctgtggagaatgaagaacacatatgcgtgctgaaggaccgcagcaagccgattatcttcaccatggcaaggttggaccgtgtgaagaacatcacaggactcgtggagtggtacggtaagaacgcgaactgagggagttggtgaaccttgtggttgttgccggagacaggaggaaggagtcgaaggacttggaagagaaggctgagatgaagaagatgtacggcctgatcgagacc

SEQ ID NO: 287879 - DNA, 273 bp, Glycine max
gttttctcttcctcgttcgtttcatttcgtttcgttgaagagcaacttttctctctctgtctctgtacaattctcccttttcttccctcgtagatcgaaagggaatattcttccatggcctccaagcggattctgaaggagctcaaggacctacagaaagaccctccaacctcttgcagtgccggtcccgtagcagaagatatgtttcattggcaagcaactataatgggtccccctgatagccctatgctgggggtgtttttctagttacta

SEQ ID NO: 287880 - DNA, 277 bp, Glycine max
  unsure (1)..(277): unsure at all n locations
caaccttgntggactctctgtggaacaggcactgagtggtaacagattgttcatattagatcaccatgatgcattcatcgcatatctgaggaagatcaatgaccttcccactgcaaagtcttatgccacaaggaccatccttttcttgaaagatgatggcaccttaaagccattggccatcgaattaagtttgccacatcctaggggagatgagtttggtgccgttagtagagtcgtcttgcccgcagaccaaggtgctgaaagtacaatttggcta

SEQ ID NO: 287881 - DNA, 282 bp, Glycine max
ccgtctccgtctccacctcctgtccttcgttgcacttcgctttttccaaaaccaatcacatcagcatcactctcgtcgccgccgtcgtcgaccaccgcaagagccatcgcactccgccgtcatccgttagggcaaaaatgagtcgaggaagtggaggtggatacgatcgtcacatcactattttctcccctgaaggacgtctcttccaagtcgagtatgctttcaaggctgttaaggccgcaggaatcacctcaattggtgtccgaggaaaggattcgattt

SEQ ID NO: 287882 - DNA, 268 bp, Glycine max
  unsure (1)..(268): unsure at all n locations
gatcgagataactagaaacagtgtgatgaaaatgaaggtccttgttttcttcgttgctacaattttngtagcatggcaatgccatgcgtacgatatgttccctctccgaatgaacactggctatggtgcccgtactccggaggtgaaatgcgcaagttggaggcttgctgtggaggcacncaacatctttggcttngggnccatccctgaaaantnnttnannccancangggattacanccatggccgaacatatagtcagcctcca

SEQ ID NO: 287883 - DNA, 263 bp, Glycine max
  unsure (1)..(263): unsure at all n locations
aaagaaaganaganagaaaaccctagcttaccttttcaactttcaagatgcaaatctttgttaagacactcactggtaagacaatcacccttgaggtggagagttcagataccatagataatgtaaagtccaagattcaagacaaggaagggatcccaccagaccagcaacgtctcatttttgctggcaagcagcttgaggatggacgtacacttgctgattacaacattcaaaaggagtccactctacacttggtgctccgt

SEQ ID NO: 287884 - DNA, 254 bp, Glycine max
  unsure (1)..(254): unsure at all n locations
gccgggcgattttgtttaccttccaaganatgaagcatttggtcacttgaagtcatcagattttctagcttatggaatcaaatctgtggcccaagatgtcttgcctgtgttgactgatgcattcgatggaaatcttttgagccttgagttcgataattttgctgaagtgcacaaactctatgaaggtggagttacattgcctacaaactttcttagcaatatcactcctataccaataattaaggaatttttcg

SEQ ID NO: 287885 - DNA, 254 bp, Glycine max
aacaattacaagaaagattgaggcccttgtggacctttcagtgatagagatattgtcaagacatgcttctgatgagatctaccttgggaagagggacagtgacgattggactgatgaccaaaaggcaattcaagcctttgaaaagtttggaaccaagctgaaggaaattgaggccaaaatcaattcgaggaacaaagattcaagccttagaaaccgtaatggaccggttcagatgccttatactgtgcttcttc

SEQ ID NO: 287886 - DNA, 253 bp, Glycine max
  unsure (1)..(253): unsure at all n locations
tatctggaccccatcgcaatcggatcctacggcgcagtttccagaggagtgttcgtgtcctcttccgccggcaacgatggtcccagcggaatgtcagtnacgaaccttgctccatggttaacaacagtaggcgcaggcaccattgatcgtgacttcccctcacaggtgattctgggcgacggtcggagactctccggcgtgtcgctatacgccggagcagctttgaaggggaaaatgtatcaattgtttaccc

SEQ ID NO: 287887 - DNA, 259 bp, Glycine max
ggcagaaaaacaagtagttgagaactaagaagaaggaaatggcttcctcaatgatctcctccccagctgttaccaccgtcaaccgtgccggtgccggcatggttgctccattcaccggcctcaaatccatggctggcttccccacgaggaagaccaacaatgacattacctccattgctagcaacggtggaagagtacaatgcatgcaggtgtggccaacaattggcaagaagaagttcgagactctttcctacttgcc

SEQ ID NO: 287888 - DNA, 266 bp, Glycine max
  unsure (1)..(266): unsure at all n locations
gcaaagcaatggcatcgtcactacaagcagcagctactttcatgnaacccaccaagtttttgcacgctaaagtctactcaggccatatctaaggcttttggtttggaacctgctggagttaataaggtcacatgctcccttcaggctgatcttaaggacttggctcacaagtgtgttgatgctaccaaaattgcaggctttgcccttgccacctctgctctcgttgtttctggggcaagtgctgaaggagtaccaaagcggctaac

SEQ ID NO: 287889 - DNA, 261 bp, Glycine max
  unsure (1)..(261): unsure at all n locations
ccccattcactgccgaacttgggttggacaagataggagttgaaactgacaagattggacggattttggtnnatgaaagatttnccacaaatntctctngngtttatgccttggngatgtaattccaggcccaatgttngcacncaangcggaagaanatggtgttgcntgnnttgngtactagctggtnaggtnggncatgtggattatnacaaagtccctggcgttgtctatacaatgcccgangttgcatctgttggg

SEQ ID NO: 287890 - DNA, 256 bp, Glycine max
cagaaatgggcagtgcttctctgattccagtttcctggttgccttggcgggccactttctcctttcaagggaacggtgaaaaccttggtcgcaaaaccatggctgaagaagattcagcaagcaagacccctcatttccgtggttaacaaggctgcctctctatcttcccccgtgacagcacccagcgtcggcgttcggtttcggctggacaatttggggccgcaaccgggttcgaggaagagggctaagagaaagg

SEQ ID NO: 287891 - DNA, 200 bp, Glycine max
  unsure (1)..(200): unsure at all n locations
atccatagttttcagacgctctaaccctgcctatgccggcgaacttctccgccatgcctaccagctatttgattttgctgacaaatacagaggcaaatatgacagcagcatcacggttgcccaaaagtattacagatccatcagtggttacnccgatgaattgctctgggctgctgcttggttgtatcaagcatctaaca

SEQ ID NO: 287892 - DNA, 261 bp, Glycine max
  unsure (1)..(261): unsure at all n locations
ctacaacaagctaatagttnannttgagatnagtnttcctacattggttggcattgaatgtcccanggatgagananttcctcgtcncaanatttttgncaaacctnagacgcgctgcntcgctattctgcctatggagtcnaatcttgtggttcgtcagaagtttttanattttgtgaggttcattatgnagnaaagggacaagcttagttgtcaagttggaatcaacccatnctccatgngnntgnactcgttcggnca

SEQ ID NO: 287893 - DNA, 251 bp, Glycine max
  unsure (1)..(251): unsure at all n locations
atcgagataactagaaacagtgtgatgaaaatgaaggtccttgttttcttcgttgctacaattttngtagcatggcaatgccatgcgtacgatatgttccctctccgaatgaacactggctatggtgcccgtactccggaggtgaaatgcgcaagttggaggcttgctgtggaagcacacaacatctttggctttgagaccattcctgaagagtgcgttgaagcaacaaaggaatacatccatggcgaaca

SEQ ID NO: 287894 - DNA, 249 bp, Glycine max
  unsure (1)..(249): unsure at all n locations
aagctttcttgagttgagttaacagcatggagntngaggaagatgttaaggttggagcacagaaattctcagagaggcaagcattggggacaggagctcagggtgacaaggactacaaggaggcaccaccagcacccttgtttganccaggggagttaaagtcatggtctttttacagagctgggattgcagagtttgtggccacattcttgttcctctacatcactgtcttgactgtcatgggtgtca

SEQ ID NO: 287895 - DNA, 253 bp, Glycine max
aagaatctctcgagtcaaaggttaatgagaccaaggccatggtgaagttccagcttaagaaggtgctttgcatgggagtagccgtggggaatgttagcatggaggaaaagcaaatcttccaaaatgtacaactgagtgttaacttccttgtctctttgttgaaaaagaattggcagaacgttcgctgcctgtatctgaagagtaccatggggaaatcgtaccgtgtcttttgagttgttcttaaattcagtga

SEQ ID NO: 287896 - DNA, 254 bp, Glycine max
tcgaagaactcctttacagctcagtggagaatgaagaacacatatgtgtgctgaaagaccgcagcaagccaattatcttcaccatggcaaggttggatcgagtgaagaacatcacaggacttgtggagtggtacggtaagaacgcgaactgagggagctggtgaaccttgtggttgttgctggagacaggaggaaggagtcaaaggacttggaagaaaaggccgagatgaagaagatgtacggcctgatcgaga

SEQ ID NO: 287897 - DNA, 259 bp, Glycine max
  unsure (1)..(259): unsure at all n locations
tatcgagataactagaaacagtgtgatgaaaatgaaggtccttgttttcttcgttgctacaantttngtagcatggcaatgccatgcgtacgatatgttccctctccgaatgaacactggctatggtgcccgtactccggaggtgaaatgcgcaagtnggaggcttgctgtggaagcacacaacatctttggctttgagaccattcctgaagantgcgttgaagcaacaaaggaatacatccatggcgaacaatataga

SEQ ID NO: 287898 - DNA, 258 bp, Glycine max
  unsure (1)..(258): unsure at all n locations
tttggagaaattcaggaaaaagttgtattgaaattttcacaagaggaatttcttacagcttggtcaactcaggtgcgtcctgcaacaactctgttgggctgatgggtgcccatatttgtatgcnatggtgcatgatagttcagtgtctacaataccaggtgattttgtcattggtgtcaagttgacaaccataaacaatatgtgtgcatatgggctcaatcctggtatttcaggttctcgtcttttgggcaccattcc

SEQ ID NO: 287899 - DNA, 258 bp, Glycine max
  unsure (1)..(258): unsure at all n locations
atgcagtgatgaggcccntgcgagacatagccttatattccgcgggttggttcccgtgttgagtgcagnttctgctagagcttctcatgctgaaacaacagaagaagcaatagaattcgccatgcaacatgccaagtccaagggtctctgacacaacggggattcagtggtggcactgcatcgtgtgggcactgnatctatcatcaagatcttgactgtgaaatgatcacccccattacaaggaattcttctgctgtt

SEQ ID NO: 287900 - DNA, 254 bp, Glycine max
  unsure (1)..(254): unsure at all n locations
atgactacagccctgatgaacccatcatcagcaatgcctcttgcaccactaactgccttgcaccctttgtcaaggtccttgatcagaaattcggtatcatcaagggtaccatgaccaccantcactcctacaccggtgaccaaaggcttcttgatgcgagccaccgtgacctgaggcgtgcaagggcagcagcactcancattgtccccacttcaacaggagcagcanaggcagtggcccttgtctcccaaccc

SEQ ID NO: 287901 - DNA, 248 bp, Glycine max
ctccataacacaaggcagaaagcaagctcatcctagagttttaaaaatggcagcagcctcctccatggctctctcttccccatccttggctggcaaggccgtgaagctgggcccatcagcccccgaagtcgggagggtcagcatgaggaagaccgtcaccaagcaggcctcctccggaagcccatggtacggcccagaccgcgtcaagtattgggcccattctctggcgagccccgtcttacttaatg

SEQ ID NO: 287902 - DNA, 248 bp, Glycine max
  unsure (1)..(248): unsure at all n locations
aaaaacntcttttttntctctcttgcaanacntanttttcatttnttccctcaaatttcaaaatgcgtgagatcnttnacatccagggtggccaatgcggcaaccagatanngcgccaagttctgggaggtggtttgcgcggagcacgggatcgaccctaccggaaggtacggtggggactcggagttgcagnatgagaggatcaatgtntantacaacgaggccagttgcggtcggttcgtgccgcg

SEQ ID NO: 287903 - DNA, 248 bp, Glycine max
  unsure (1)..(248): unsure at all n locations
ttctctgcacttttcagttacaaagcatttcattgttttacaatatacaacactacaatggctgcttcaacaatggntctctcttcatcatcattggctggccaagctatcaagcttgccccctccacccctcagcttggtgttggaagggttagcatgagaaaaacagcctccaagactgttacctcaggaagcccatggtacggcccagatcgtgtcaagtacttgggcccattctctggtgagcc

SEQ ID NO: 287904 - DNA, 257 bp, Glycine max
  unsure (1)..(257): unsure at all n locations
ataactagaaacagtgtgatgaaaatgaaggtccttgttttcttcgttgctacaattttngtagcatggcaatgccatgcgtacgatatgttccctctccgaatgaacactggctatggtgcccgtactccggaggtgaaatgcgcaagttggaggcttgctgtggaagcacacaacatctttggctttgncaccattcctgaagagtgcgttgaagcaacaaaggaatacatccatggcgaacaatatagatcaga

SEQ ID NO: 287905 - DNA, 249 bp, Glycine max
catttctacatattccatcttgattttgacattgatggtgtggaaaattcctttgtgaagaccagtctcaagactctacaagtcacagacaacagttccaagagaaagagctattggacaactagtaatgaagttgttaagactgaatctgatgcaaagacaaaactagggttcagtccagctgagatagtaattgtgaaccctaataagaagacttccactggaaatgaagtagggtaccgtttggtt

SEQ ID NO: 287906 - DNA, 189 bp, Glycine max
cctgggcatcggatccagatccaaatccagtttaacaaagaaaatgcagtacaagaacctgggccgatcgggactgaaggtgagccagctctcctacggggcgtgggtgagcttcggtaaccagctagacgtgaaggaggccaaggccctcctccagtgctgccgcgaccacggcgtgaacttcttcga

SEQ ID NO: 287907 - DNA, 247 bp, Glycine max
  unsure (1)..(247): unsure at all n locations
ccgcaaggatgatccatcgtcttttacattaaacccatcattttcacttttccctcagtttatgttcaatctgcgacgctcacagtttgtacaggtttttaacaacagtccagacgagactgcatatttccgcatgttgttagacagncaaaatattagtaatgctgccgttatgattcagccgtcattgatatcgtattcatttaatgcactgcctgcaccagcattgttagatgtggcttccatt

SEQ ID NO: 287908 - DNA, 249 bp, Glycine max
  unsure (1)..(249): unsure at all n locations
caaaaatatgccactcccatgatgcccctagatgaagaaattctttctaaggttgcacaagacatggttgangaatggtttgattgtgttgatgaggaggattcctttgaggaagtctctttaagtgcagcactcaatggtgttgagggtttggactatatggaaagaattcctcttgccacatctgagggttttcctcatgtgctttcacgcaaaaatggtgncaaaggcaaaaggagatttgtttct

SEQ ID NO: 287909 - DNA, 252 bp, Glycine max
  unsure (1)..(252): unsure at all n locations
catcatcaaagttttttcctttctctgctctttgccttctctgacacatttggtgccttgtagancgtgttttgggcaggaaggtggtatggcgaaggacgttgaggttgctgagcgtggctccttctctgggaaggactaccaggaccctccaccagcaccactcattgatgctgaggagctcacaaagtggtccttttacagggctctcattgctgaattcattgccactttgctcttcctctacatnnc

SEQ ID NO: 287910 - DNA, 297 bp, Glycine max
  unsure (1)..(297): unsure at all n locations
caattttcaaactcaattaccattccataacctaaatctcctctttgtttccgagtcagagagcaatggcacgtaccaagcaaaccgctcgcaagtccaccggcggaaaggcgccgaggaagcaattggcgactaaagccgctcgcaagtcagctccggccaccggcggagtgaagaagccccaccgttcaggcccggaacgtggctctgagggagatcagaaagtaccagaagagcactgaattctgatccgaaantcccattccagaggtcgtcagagaatcgtcaggattcaaa

SEQ ID NO: 287911 - DNA, 292 bp, Glycine max
  unsure (1)..(292): unsure at all n locations
gcgcaaacgacaagcagtggtgtcactccggcagcccttccatcttcatcaccgccaccaacttctgtccccctaactacgctcttccaaacgacaatggcggctggtgcaaccctcctcgccctcacttcgacctcgccatgcccatgttcttaaaatcgccgaataccgcgccggatcgtgcctgtcgcttccgcagggtggcatgtaggaagcatggtgggatcaggttccaaataaacggttcccggtatttaacctggtttnanagcaactagcggtgcaggggatt

SEQ ID NO: 287912 - DNA, 279 bp, Glycine max
  unsure (1)..(279): unsure at all n locations
cgcttggntcaaccntgaccgtttcgttctctctgctggatctggctgcatgctccaatatgctctccttcancttgctggctatnacactgttcaggaacaagaccttaaggaattccgacaatggggaagcagaactcctggacatcctgagaactttgagacccttggagttgaagtgaccacaggtcctcttggtcagggcattgccaatgctgttggattagcatagctgagaagcacttggctgcacgattaacaagcctgacaatgagatgt

SEQ ID NO: 287913 - DNA, 279 bp, Glycine max
  unsure (1)..(279): unsure at all n locations
ttcctaacctaaaccctactcattctccatacctcaacgaagaggttaaagagacggcaacactttgctgtccgccttgaccgagcagagcttcgtcttggccctcgattttgccctaaagtactctcagtcacaacagacacnnnnnnnnnnnnnnnnnnnnnnaatggcaccgaagcagaccaaggctgagaagaagatcgcttacgatgcgaantgtgcgacctaatggaggagtacggccagatcctcgttgtgaatccgataacgtgggatcga

SEQ ID NO: 287914 - DNA, 278 bp, Glycine max
  unsure (1)..(278): unsure at all n locations
gagctataagctagtttatcgtgaggagaatatgaagttgtttgttttctttgttgctgcagtagttttggtagcatggccatgccatggcgcaggctaccaaaggttccctctccgaatgaaaactggctatggtgagcgttcttcggaggtaaaatgcgcaagttttaggcttgctgtggaagcacacaacatccgagccttaaaaccattcctgaagagtgcnttgaaccaacaaaggactacattaatggcgaacaatttagatcagactctaa

SEQ ID NO: 287915 - DNA, 278 bp, Glycine max
agagagggagtcagagaaaccctaggtaagaagaaaagatgccggctggtcatggtttgagatcccgcaccagagattccttctctcgtcctttcaggaagaagggaaccatcgccctcaccacatacctgagaacctaccacgtcggcgactatgttgacgtcaaggttaacggtgccgttcacaagggaatgccccacaaattctaccatggccgcaccggacgcgtctggaatgtcaccaaacgtgctgttggcgtcgaagtcaacaagcaggtt

SEQ ID NO: 287916 - DNA, 276 bp, Glycine max
  unsure (1)..(276): unsure at all n locations
ttaaaatccaactgtttttaccaaggaagattttctgccctttgatatagaanggacatggaaagctatggaagagtgttacaagttgggattagcaaagtccattggcatatgcaattatggtgtcaaaaaactcaccaaactcttggaaatagccacctttcctcctgcagtcaatcaggtggaaatgaacccatcttggcagcaaggaaaactcagggagttctgcaagcagaaaggaattcatgttagtgcttggtcagctcttggtgctta

SEQ ID NO: 287917 - DNA, 288 bp, Glycine max
  unsure (1)..(288): unsure at all n locations
gtcctgttatttctcagcgcgtaaagcatggctttgttggtggagaaaaccacgagtggtcgcgagtacaaggtcaaggacctttcccaggccgacttcggccgcctcgagatcgagctngccgaggttgagatgcccggcctcatggcctgtcggaccgagttcggcccctcccagcccttcaagggggcccgcatcaccggctcctccacatgaccatccagaccgccgttctcattgagaccctcaccgcccttggcgccgaggtccgctggtgctctgcaacat

SEQ ID NO: 287918 - DNA, 289 bp, Glycine max
  unsure (1)..(289): unsure at all n locations
cnaattcccatcatgatttactcgcttcttacttaggaagtcacgagaaggccaaggaagcaattatatactcgtacaataagtacatcaatggctttgctgccctacttgaagaggaagaagcatcacagattgcaaaanatccaaatgtagtttctattttcttgagcaaagagcgcaaattgttcactaccaggtcatgggattttcttggactggaaaannatggaaaagtcactgcaaactccgcttggaggaaagcaagatatggagaanatataatcttgct

SEQ ID NO: 287919 - DNA, 284 bp, Glycine max
  unsure (1)..(284): unsure at all n locations
cntttctccgtcaaagcctncgccaaanagattgcctttgaccagcattcccgctctgctatgcaggccggcattgacaagctcgccgacgccgtcgggctcactcttgggcccaggnggangaatgttgtgttggatgagtttggaagtcctaaagtggttaacgatggtgtcaccattnctcgcgccatcgagcttccagatcctatggaaaatgccggtgcagctcttattagagaggttgctagtaagactaacgactctgccggtgatgggacgaccac

SEQ ID NO: 287920 - DNA, 276 bp, Glycine max
aggaagagagagggagattctttgtttgctaccttctctcggaaaaatggttacgttcaggtttcaccagtaccaggtggttgggagggctcttcccacggaagcagatcagcaccccaagatctaccgaatgaagctctgggccaccaacgaggttcgcgccaagtccaagttctggtattttctgaggaaactgaaaaaggtgaagaagagcaatggccaagtgcttgccatcaacgagatttttgagaagaacccaaccaaaattaagaacta

SEQ ID NO: 287921 - DNA, 277 bp, Glycine max
  unsure (1)..(277): unsure at all n locations
canttgttgtaactttttgattcctaaattctctaaaattcganattctaatttcgttaggggaaaganattgtttgtntgtgagtnagtatggctggaaaaggcgacggtcctgctatcggaatcgatttgggaacgacgtactcttgcgtcggcgtgtggcaacacgatcgtttgaaatcatagccaacgatcagggtaacagaactaccccatcctacgtggctttcaccgacacagaacggttgatcggcgatgcggcgaagaaccaggtcgc

SEQ ID NO: 287922 - DNA, 255 bp, Glycine max
ctctctctctcccctccgccatggctgaggataaggagatgtctacctctgtcatcaatgggaatgattccctaactggtcacatcatatctacaactattggaggcaaaaatggggaacccaaacagactattagctacatggcagaacgggttgtaggaactggatcatttggaatcgttttccaggcaaaatgcttggaaactggggaggcagtggcaattaaaaaggttttacaagacagaagatacaaga

SEQ ID NO: 287923 - DNA, 280 bp, Glycine max
aggcagaaagcaagctcatcctagagttttaaaaatggcagcagcctcctccatggctctctcttccccatccttggctggcaaggccgtgaagctgggcccatcagcccccgaagtcgggagggtcagcatgaggaagaccgtcaccaagcaggcctcctccggaagcccatggtacggcccagaccgcgtcaagtacttgggcccattctctggcgagcccccgtcctacctcactggcgagttcccaggtgatacggctgggacatgctgggtttcg

SEQ ID NO: 287924 - DNA, 292 bp, Glycine max
  unsure (1)..(292): unsure at all n locations
ctgcagggggtctagtttgctttcttgacatttatcgtcaaaattnctatgtttgtaacccattgactcaatccttaaaggagttaccagctcgttcagttagggttgggtctcgtgcgtctgnagggatgacagtaaatggaaactcaactagtgctggctacaagatcctattagttggttgtgatggagaatatgaactttatgactcagtgacaaagtcttggagccatccagaaaacatgctgcagatattaagctcccgctgncatccattttaggtcacaggcgg

SEQ ID NO: 287925 - DNA, 280 bp, Glycine max
  unsure (1)..(280): unsure at all n locations
caacnagtggggatacagctcacgtgtcattgacctgcttgtattcgttgccaagaagtctttttaaggtggtgtactgcaaagttgcttgtctacacattatgtgcttgtctagttgcgatttagtgtcttgctcgtgcaaaanatgagaggtctgaataaatcggtttctggaaccagtggatttaccttgttaggagcattagctctattttggactttgcctcttgtggaggaggatggagtttttggattttatatattgcnaatgtacttgtcg

SEQ ID NO: 287926 - DNA, 280 bp, Glycine max
  unsure (1)..(280): unsure at all n locations
ctcatttatcaagtttcaaccaagaaaagcagcaacaatgtcgggncgcggaaagggtgggaagggtttaggaaagggaggagcaaagaggcatcgcaaggtgctccgcgacaatatccagggaatcacgaagcccgcgattcggagactggcgagaagaggtggcgtgaagagaatcagtggtttgatctacgaagagaccaggggcgtgctcaagatctttctcgagaacgtgattcgcgatgccgtgacgtacacggagcacgctaggaggaagaca

SEQ ID NO: 287927 - DNA, 273 bp, Glycine max
  unsure (1)..(273): unsure at all n locations
tctgattctgatctagatgaagatgaggatgagtatgaccagctcccaccatttaagcctatgaagaaatctcaggttgctaagcttactaaagaacagcagaaagcatattttgatgagtacgattatcgggtgaaacttctacagaaaaagcnatggagagaggagttgagaaggatgagaganatgaaganaaaaggtaacacaaaaganatgactatggttacatggaagcccgatgatccaagagatggaagtccagcagcatgccnt

SEQ ID NO: 287928 - DNA, 224 bp, Glycine max
  unsure (1)..(224): unsure at all n locations
ccctcccactcatccttcctacnaggagatgattaaagacgcaattacctcgctgaaggagaaaaccggttcgagccaacacgcgattgcnaagttcatcgaggagaagcacaagcagcttccaccgaacttcaggaancttcttctctaccatttgaagaaacttgtagccgctggaaaactcgtcaaagtcaaaggctccttcaagctcccacctacccgac

SEQ ID NO: 287929 - DNA, 288 bp, Glycine max
  unsure (1)..(288): unsure at all n locations
cgnaatcaccgccgaattacccatctatttgggcgaattcgttgaacagtttgcntctggagggtcaaannaccgctgcaattgagattctgcagcagttcaactgggaggtgccggattgggttattgtacccgggggcaatctgggaaatatttatgctttttacaagggttttaagatgtgcaaggnattagggcttgtggagangattccaangctagtntgtgtcaggctgcgaatgcnaacccttgtattgcactacaagatgggttaaggatttnacgctg

SEQ ID NO: 287930 - DNA, 272 bp, Glycine max
  unsure (1)..(272): unsure at all n locations
cgcgttttattcattttccgatggcttctgcagatgttgagtaccgttgctttgtcggtgggctcgcttggnccactgacgaccatgccctcgaganagccttctctcagtacggcgaaatcgttgaaacgaagattatcaacgatcgtgagacnngcagatccaggggttttggatttgtgaccttcncctcggagcagtccatgaaagatgcgatcggagcgatgaatggacagaacttggacggccgtaatatcactgtcaatgaagct

SEQ ID NO: 287931 - DNA, 273 bp, Glycine max
  unsure (1)..(273): unsure at all n locations
gtgaaaccaagatgaaggtagcatttgtagctgttctacttatttgccntgtcctaagctcctccttgttcgaggtgtcaatggccggttctgctttctgctcctccaagtgcgcgaagaggtgttctagggctgggatgaaggacaggtgcacgaggttctgcgggatttgctgcagcaagtgtaggtgtgtgccatctgggacttatgggaacaagcacgagtgcccttgctacagagacatgaagaactccaagggcaagcccaaatgcc

SEQ ID NO: 287932 - DNA, 281 bp, Glycine max
  unsure (1)..(281): unsure at all n locations
caatcgggccagcaccaacagcatcgggcggcgacagtcacttctccgacaacaacacttccgcggcgaaaaatgtctctggtggcgaacgaggatttccagcacattctgcgtgtgctgaacaccaacgtggatgggaagcagaagataatgttcgctatgacctccatcaagggtattggaaggagattcgccaacatcgcttgcaagaaggccgatgttgacatgaacaaaagggctggtgagttgagtgctgcagagtnngatagtgtgatgactgt

SEQ ID NO: 287933 - DNA, 285 bp, Glycine max
  unsure (1)..(285): unsure at all n locations
ccccnctttcagctttgaactttngttggaaactaaggcctnatcaaaatggtgaagttcacagctgaagagctacgtcgtattatggactataagcntaatatccgtaatatgtctgtcattgctcatgttgatcacggaaaatcaaccctcactgattctcttgtggctgctgctggtattattgctcaagaagttgccggtgatgtccgtatgactgatacccgtgcagatgangctgagcgtggtattaccatcaagtctannggtatctcactctactat

SEQ ID NO: 287934 - DNA, 268 bp, Glycine max
  unsure (1)..(268): unsure at all n locations
cncgtttggaccttgcagggcgtgatcncactgatgccctgatgaaaatcttgactgagcgtggttactctttcaccacatctgcggaggggaaattgtgagggacatgaaggaccnactggcctacattgctcttgattatgagcaggagttggaaactgccaagaccagctcagcagttgagaagagctatgagctacctgacgggcaggngattacgancggtgctgaacgattccngtgccctgnagttctcttccagccatcc

SEQ ID NO: 287935 - DNA, 266 bp, Glycine max
gctgttctttcaatgtggagatattttgttggagatctcgtctttgaagtttctaagatgacttctccctacattaaatgtacagtctctttcttcatagcatttggaaatttggctgatgacaccatcaattttgaggcctttccccacaagctggtgcagtttggagaaattcaggaaaaagttgtattgaaattttcacaagaggaatttcttacagcttggtcaactcaggtgcgtcctgcaacaactctgttggctgatgg

SEQ ID NO: 287936 - DNA, 271 bp, Glycine max
  unsure (1)..(271): unsure at all n locations
ctgggaaacaatagcagcagttccaggaatggtgggagggttgctgctgcacttaaagtctctgaggaagttccagcacagtggtggatggatcaaggcactgctcgaggaagcggagaatganaggatgcacctgatgaccatggtggagcttgtgaagcccagctgncacgagaggctgttgattttcaccgcgcagggtgttttcttcaacgccttcttcgtgttctacctcctctcgccaaaggggcacatagatttgttggttact

SEQ ID NO: 287937 - DNA, 278 bp, Glycine max
  unsure (1)..(278): unsure at all n locations
cttctctctgagaacaacaccccacactcctctctctctctccgcanccttctcttctcacacctccatggcccacacttcccttccctccgccgatgccggcatggacgctgtccagcgccgtctcatgttcgaagacgaatgcattttggtggatgagaatgaccgtgtggttggtcatgattcaaaatacaattgtcacttgatggaaaagattgaagctgagaatttgctgcatagagctttcagtgtatctgttcaactcaaagtatgagttg

SEQ ID NO: 287938 - DNA, 280 bp, Glycine max
  unsure (1)..(280): unsure at all n locations
ttccaatatattccattctctctgtgtatttccctaccttctcccttcaagatgcagatcttcgtcaagaccctcaccggcaagaccatcacccttgaggtggaaagctctgacaccatcgacaacgtcaaggccaagatccaggacaaggaaggaatccccccggaccagcaacgnctcattttcgccggaaagcaacttgaggacggccgtanccttgctgactacaacattcagaaggagagtatcttcaactcgtctccgtctccgtggtggnang

SEQ ID NO: 287939 - DNA, 266 bp, Glycine max
  unsure (1)..(266): unsure at all n locations
cttctgtnagcctttctttcaggttcttaacttgatcagtgtgcagtgtccaaatcataagggtagtccgcaaattgcaatggctaagcatgatgttgagggtggttccttctctgcaaaggactaccatgatcctcctccagcaccgttgattgatgctgaggaactcacacagtggtccttctacagggcttgattgcngagttcattgccacaatgctcttcctttacatcacagtgctcactgtgattggttacaagagcca

SEQ ID NO: 287940 - DNA, 264 bp, Glycine max
  unsure (1)..(264): unsure at all n locations
aacaaagaaaaaaaaaaccctagccaacacaaccatcatggccacctctgctattcagcaatcagcattcactggtcaaactgctctgaagcagctcaatgagttcgtccgcaagaccggtggcgccggcaaaggtcgcactaacatgcgccgcaccgtcaagagtgctcctcagagcatttggtatggccctgaccgtcccaagtacttgggtccattctcggagcagattccatcatacctgaccggagaattcccnggtga

SEQ ID NO: 287941 - DNA, 265 bp, Glycine max
cacagaaatgggcagtgttctctgattccagtttcctggttgccttggcggccactttctcctttcaagggaacggtgaaaaccttggtcgcaaaaccatggctgaagaagattcagcaagcaagacccctcatttccgtggttaacaaggctgcctctctatcttcccccgtgacagcacccagcgtcggcgttcggtttcggctggacaatttggggccgcaaccgggttcgaggaagagggctaagagaaagggtagaggaa

SEQ ID NO: 287942 - DNA, 268 bp, Glycine max
  unsure (1)..(268): unsure at all n locations
caagaatgttgctgttaaggatctcaagcgtggttatgttgcctcgaactcaaaggatgatcctgccaaggaggctgctaacttcactgcccaggttatcatcatgaaccatcctggtcagattggaaatggctatgcccctgttcttgactgccacacttcccacattgctgtcaagtttgctgaactcatgaccaagattgacaggcgatctggcaaagagcttgagaaggaacccaagtttttgaagaatggtgatgcnggtttt

SEQ ID NO: 287943 - DNA, 269 bp, Glycine max
  unsure (1)..(269): unsure at all n locations
ccttacatgggagangttgttcctttcaaaaactatctttaccgatatactactccctacttggcctccaatagctccagtcccctctggtatgcagtcaggcgtgcgtctgctcatataattgtgctatccagctattcaccattcgtgaaatacactcctcaatacatgtggcttaaagaagagctgaagcgagttgagagggagaagactccttggctcattgtgctcatgcacgtgccgctctacaatagtaatggagctcacta

SEQ ID NO: 287944 - DNA, 278 bp, Glycine max
  unsure (1)..(278): unsure at all n locations
ctgttatttctcagcgcgtaaagcatggctttgttggtggagaaaaccacgagtggtcgcgagtacaaggtcaaggacctttcccaggccgacttcggccgcctcgagatcgagctggccgaggttgagatgcccggcctcatggcctgtncggaccgagttcggcccctcccagcccttcaagggggcccgcatcaccggctccctccacatgaccatccagaccgccgttctcattgagaccctcaccgcccttggcgccgaggtccgctggtgct

SEQ ID NO: 287945 - DNA, 256 bp, Glycine max
  unsure (1)..(256): unsure at all n locations
cacaggggnaaatnagggagntcctttcacgtgcagggagggcaatgcnggaaccagatcggttccaagttctgggaagtggtgtgcgacgagcacggcatagatccgacggggaagtacgtcggaaactcagatctgcaactcgagcgcgtgaacgtctactacaatgaagcctcgtgcgggcgcttcgtgccacgcgcggtgctgatggacctggagcccggaaccatggacagcgtgcggaccgggccgtacg

SEQ ID NO: 287946 - DNA, 273 bp, Glycine max
  unsure (1)..(273): unsure at all n locations
aagtcctcaagtttccaccacctcatgtcatgccaagttagtaagtctgcatggatgactgatgaagaatttggaaganagatgcttgctggtgttaatccatgcctaattgagtgccttcaagtgttccctccaaagagcaagctagatcccacagtgtatggtgatcaaactagtacaataaccaaagaacacttagagatcaaccttggtggactctctgtggaacaggcactgagtggtaacagattgttcatattagatcaccatgat

SEQ ID NO: 287947 - DNA, 210 bp, Glycine max
  unsure (1)..(210): unsure at all n locations
gacaaactgttgcttaccctcttgatgttattcgtcgnagaatgcagatggttggttggaaccacgctgcttctgttctaactggtgatggaagaggcaaagtcccacttgaatacactggaatgattgatgcattcagaaaaactgttcagcacgagggatttggtgcactatacaagggtctggtgcccaactctgtaaaggtggtcc

SEQ ID NO: 287948 - DNA, 264 bp, Glycine max
cccaacacagtggcctttgcgccactttaaggagctacttgaagagcttgtagccattgctagggtaagcaaagggaagcaacggttcaacattgatctcacaccatttcgtgaataaaaaaaatggtgatggttttcagttattctgaatgtaatttctttaccatcggtcttttaagattgttcaagggtgaatgcaaaactgtctcctctcacaagttccttataaggagagtttatcttaaaaatattatttgatgatca

SEQ ID NO: 287949 - DNA, 264 bp, Glycine max
cttggaagaaaggctgtttaatggtcaagattgtgatgtctgggaatgcagcagtcaaaaggagtgattgggcctcattggtacaagtgtttttaacaaacagcaacagtacagagcattttgatgcatgtaagtggacaaaatcagaaccacattcctgggaattgatcttcccaatagaggtatgtggtcccaataatggttttgaaatgtggagttctgagtgggcaaatcaaacttcatggcatttgagtttccttattg

SEQ ID NO: 287950 - DNA, 274 bp, Glycine max
  unsure (1)..(274): unsure at all n locations
catnanttgcaagaatggcacttcgttgcttggtgatgtccctctctgttctcttcactcttggtcttgcgagagaaagccatgccagagacgaagatttttggcatgctgtttggcnaaacactcccattccaagttcattgcgagatcttctaaagcctggccctgcaagtgttgaaatcgatgatcanccctatgcaaattgaagaaacacagtacccgaaaaccttcttctataaagaagaccttcatccaggcaaaacaatganagtac

SEQ ID NO: 287951 - DNA, 269 bp, Glycine max
gcagcaagaaggacgggaggtcggggattacccgcggcggatgaggcggcgacggcggaggctgcggcggtgatgcggatggagatggagagggagctggaggagaaagtaaagagagcggaggtggcgaagagtgggagtttagtattctgtgcgggtgaggcgcaggtgtatacgctggaccagctcatgaagggttcagctgaacttttagggagagggtgtttgggaaccacttataaggcggttcttgatagccgtctgatggt

SEQ ID NO: 287952 - DNA, 268 bp, Glycine max
  unsure (1)..(268): unsure at all n locations
gctgcggaaaacgttgttgagttcacagacttacccgtcaagaggccaagagaagaagaagaaggaaccaatggcgtctccaacgacgccgtttcagcgctccccaatgaccctcaataccctggcatctctgcggttattcccggttggttctccgaaatcagcccaatgtggcccggggaggcacattccttgaagatggaaaagattttntttcaagggaagtctgactatcagaatgtcatggtcttccagtcatcaacatatg

SEQ ID NO: 287953 - DNA, 266 bp, Glycine max
  unsure (1)..(266): unsure at all n locations
aaattgggttaccattatctcataaaccatggcatatacttgttcaccatacccgttcttctcgtggngtttagtgctgaggttgggagcctcagcaaagaggacctatggaagaagctttgggaagacgcgcgttacgaccttgctacggttcttgcttcctttggggtcttcgttttcaccttgtccgtctacttcatgtcgaggccacgtcccatttacctcattgattttgcatgttataaacccgatgacgaactcaaggt

SEQ ID NO: 287954 - DNA, 265 bp, Glycine max
  unsure (1)..(265): unsure at all n locations
ttgatcgagataactagaaacagtgtgatgaaaatgaaggtccttgttttcttcgttgctacanttttngtagcatggcaatgccatgcgtaacgatatgttccctctccgaatgaacactggctatggtgcccgtactccggaggtgaaatgcgcaagttggaggcttgctgtggaagcacacancatctttggctttgagaccattcctgnagagtgcgttgaagcaacaaaggaatacatccatggcgaacaatatagatca

SEQ ID NO: 287955 - DNA, 262 bp, Glycine max
  unsure (1)..(262): unsure at all n locations
cnacctcaagcnattcactctctttagacatcgattccttatctccttcacctcaggaacatatcatcagaacacgtcatggttccgtatctgttgctgtatatggagaccaggataagccagctcttatcacatacccagatttggctttaaattatgtctcctgctttcaggggttattattttgtcccgaggcatattaccttctgctccataatttctgcatttatcatattagtccacctggacatgagttgggagc

SEQ ID NO: 287956 - DNA, 263 bp, Glycine max
  unsure (1)..(263): unsure at all n locations
ccctctctctcttctgcaccggancccttcncgccggcggcctctactggttcgtctgtgttctgggccccgccgagcagaagggcaaacgcgccgccgatctatccggcggctccatctccgccgagaaagtccaagacaactacaagancatactggtccttcttccgccgccccaaggagatcgagaccgccgacaaagttcccgacttcgtcgacaccttctacaatctagtcaccgacatctacnagtggggctgggg

SEQ ID NO: 287957 - DNA, 268 bp, Glycine max
  unsure (1)..(268): unsure at all n locations
tatttccctacctctcccttcaagatnncagatcttcgtcaagaccctcaccggcaagaccatcacccttgangtggaaagctctgacaccatcgacaacgtcaaggccaagatccaggacaaggaaggaatccccccggaccagcaacgtctcattttcgccggaaagcaacttgaggacggccgtacccttgctgactacaacattcagaaggagagtactcttcacctcgtcctccgtctccgtggtggcatgcagatcttcgtt

SEQ ID NO: 287958 - DNA, 267 bp, Glycine max
  unsure (1)..(267): unsure at all n locations
cagagctncantatggtgactactttggcattacagtcgctggttatccagagncacatccggatgttatagaaanaacatgggttggctacatcagagngttatcaaaatgatcttgcttattgaagagcaaggttgatgctggagcagatctgattgtcactcagttattttatnatacggatanattcctcaaatttgtgaacgnctgtcgccaaattggaataacgtgccctattgtacctggaattatgcccattaataatt

SEQ ID NO: 287959 - DNA, 268 bp, Glycine max
  unsure (1)..(268): unsure at all n locations
ccnaagaaaagacccctgttaagatagatattggacctgtctacactgttgatcctgcaaaaaggaatgcctatgcacagagtggcgataataatgtctttgccccagttganagggagttgatttttgatatagatatgtcagantatgatgatgttagatactgctgttcgggtgccgatgtttgtctggtttgctggccgttgatgactatagcgatcaaagtgattgatactgccttaagagatgactttggtttcaagcacat

SEQ ID NO: 287960 - DNA, 263 bp, Glycine max
  unsure (1)..(263): unsure at all n locations
ctagantcttcagtttctcctcgntgttcttcgctttcctgttntcaatttcnattctttcgttaattnaataagatgtttggnagggcaccgaagaagagcgataatacgaggtactacgaaatcctcggcgtctccaagaacgcttcgcaggatgatctgaaganggcttacaagaaagccgccattaagaatcancccgacaagggcggtgatcccgagangtttaaagagctggcgcaacttatgaggntcagngttnc

SEQ ID NO: 287961 - DNA, 267 bp, Glycine max
  unsure (1)..(267): unsure at all n locations
caagaggcgtgccactggtggcaagaagaaggcatggagaaagaagagaaagtatgagcttgggcgtcaggccgcaaacaccaagttatcaagcaacaaaactatccggaggattcgtgtncgaggtggcaatgttaaatggagggcattgaggttggataccggcaattactcatggggtagtaannnagttactcgcaagactcgtattctagatgttgtttacaatgcctcaaacaatgagcttgtgcgaatcagaccctggtc

SEQ ID NO: 287962 - DNA, 208 bp, Glycine max
  unsure (1)..(208): unsure at all n locations
aacagaagaacaaccaccaccacacacaatgggtcgcgtgagaacaaaaacggtgaagaaatcctcccgccaggtgattgagcgttactactcgcgcatgaccctcgacttccacacaaacaaaaagcntctcgaagaagtggccatcatcccttccaagaggctgcggaacaagatcgcgggtttctccacgcatctcatgaagcgc

SEQ ID NO: 287963 - DNA, 262 bp, Glycine max
  unsure (1)..(262): unsure at all n locations
acaattttaatggagcagtcaantcaccacctattggacgttttacagaatggcataatgcaaccttccataatggtgttggttttgagagtggaaatggcttagggtctngtgagcaaggttttgctattggaggtcaagaacggctaagtcgaatgaatggttacctgtcagaattggctgctgcagcttttgtttgcagaggtggtgttcaaagagttcacttgctggatggaactattagtggagttttgttgttgga

SEQ ID NO: 287964 - DNA, 262 bp, Glycine max
  unsure (1)..(262): unsure at all n locations
gnaatttcntacagcttggtcaactcaggtgcgtcctgcaacaactctgttggctgatgggtgcccatatttgtatgctanggtgcatgatagtgcagtgtctacaataccaggtgantttntcattggtgtcaagttgacaaccataaacaatatgtgtgcatatgggctcaatcctggtatttcaggttctcgtcttttgggcaccattcctcagtccatttcacagcaaactgtttggaatcaaatggcaacagtgaga

SEQ ID NO: 287965 - DNA, 256 bp, Glycine max
tttgttacggttcctgctaccattcgtctcttcttccatgattgcctcgtgcagggttgtgatgcctcggttttggttgcatccacaaaaaacaacaaagcagagaaggatcacccagataatgtttcactagctggagatggatttgacacagtgattaaagcaaaagaagcagttgatgcagttccattgtgcaggaacaaagtttcatgtgctgatattttagccttggcaacccgtgatgttattgaactgg

SEQ ID NO: 287966 - DNA, 257 bp, Glycine max
  unsure (1)..(257): unsure at all n locations
ctgcatctgatgtcaacttaccataggctatttgccacggttttaccactcttngttgcagtttctgtcggtgccaacatctctggtggccatgtcaaccctgctgtgacttttggattggctcttggtggccacatcaccatcctcactggcttcttccactggattgcacagcttcttggctccatcgtggcatgttttcttctcaactatgtcacaggaggcttgccaactccaatccacagtgtggcttcagg

SEQ ID NO: 287967 - DNA, 262 bp, Glycine max
atccctatttttcttcctcagtagtgtcatttacgcttctcttctctgcagcaactatgcctaaccctaaggtcttcttcgacatgaccatcggcggtcaatctgctggccgcatcgtgatggagctctacgccgacgtcactccccgcaccgccgagaacttccgcgcgctttgcaccggcgagaagggcgtagggcggagggcaagcccctccactacaagggctcgtccttccaccgcgtgatcccgagtttcatgtgt

SEQ ID NO: 287968 - DNA, 262 bp, Glycine max
  unsure (1)..(262): unsure at all n locations
gnntgatatcntntannanagtnaancgtcctgagaaaatgttccaaaggaagntctggcatgtcaaaattcctgaatangaacaattttcaacgaaacttgatttcgtctggnggcaatgaatcgtattatgggtattttaanaggagatcatacacttnantttatatgggaactggaactgtgggtngggattacaagtgctagaatcagggtgccaaatgtaggatgtgaaggattcatgtgctcaagtcatctgtca

SEQ ID NO: 287969 - DNA, 261 bp, Glycine max
  unsure (1)..(261): unsure at all n locations
cntcgatcatcaagcctaatagagggctaatccttcacttgtntgttcttgtggtgtattattacattttgcaccatgccttctctcttcgctaganaccagaggttctcattggctactctcctgcttcttctggaactattgacaggaaaccttcgcatggcagatgctcaaattggtgtgtgttatggcatgctgggcaacaatctaccgtcagcaaacgatgttataggtctttatagatcaaataacataaagaga

SEQ ID NO: 287970 - DNA, 237 bp, Glycine max
  unsure (1)..(237): unsure at all n locations
caaagaaaaaaaaaaccctagccaaccncaaccatcatggcaccctctgctattcagcaatnngcattcactggtcaaactgctctgaagcagctcaatgagttcgtccgcaagaccggtggcgccggcaaaggtcgcactaacatgcgccgcaccgtcaagagtgctcctcagagcatttggtatggccctgaccgtcccaagtacttgggtccattctcggagcagattccatca

SEQ ID NO: 287971 - DNA, 256 bp, Glycine max
  unsure (1)..(256): unsure at all n locations
ctcgttagtcgtttgtaacgcctttntttgcnttttttgcacatangaattaacacgtatatagcaagcatggcagtcacactctacgaccttagctctgcctctgggttggagaagcttgatgagtaccttctcccacgcagctacatcaccgggtaccaagctacaaaggatgatcttactgtttatgcagctttgccaactgctccatcagatgaatatggaaatgtttccaggtggtacaagcacattnatg

SEQ ID NO: 287972 - DNA, 254 bp, Glycine max
  unsure (1)..(254): unsure at all n locations
cnacaccaaaaatatctgtngctctctgctctgcttagggttccaacttccaacccaacacttatccttctcatgcaacaagngaaaatgaggcctattttctgtggaaattttgaatatgatgcccggcagtcagagctggagcngctttttagacgntatgggaaggttgatagggtggatatgaagtctggttttgcttttatctatatggaagacgagagacatgctgaggctgctattcgtgctcttga

SEQ ID NO: 287973 - DNA, 239 bp, Glycine max
  unsure (1)..(239): unsure at all n locations
aagatctgaacaatttcgttacccttttctcgattcgatcttcagatctgtcgccgaaagcaaacatggttgatcaggtccaacaccctacaatcatggacaaggttgctngtcagctccatctccgttctggtctttcntcnggtattagaagttatgatggagcctaccgccacccagctatntaccaaagaccctcttttgggaattactcgaatgctgcattgcagtttcctgtg

SEQ ID NO: 287974 - DNA, 257 bp, Glycine max
cctctctctgttcttcactcactctcattcattcaccatgacgaaacaacatgccaattggtctccttacgataacaacggaggatcatgtgttgcgattgctggagcagattactgcgttatcgccgcagatacgagaatgtccaccggttacaacatcctcactcgcgattactccaaaatctcccaactggctgagaagtgtgtgatggcttcatctggctttcaagctgatgtcaaagtttgcagaaggtttt

SEQ ID NO: 287975 - DNA, 260 bp, Glycine max
ggaaaagaaattgagagttgaagacgctcttaatgctacaaaggcagctgtagaggaaggtattgttgttggtggtggttgcactcttctgagacttgcatcaaaggtggatgcaatcaaggatagccttgataatgatgaagaaaaagttggagctgatattgtgaaaagagctcttagttaccctttgaaattaattgccaagaatgctggtgtcaatggtagtgttgtcagtgagaaggtattgtccagtgacaatc

SEQ ID NO: 287976 - DNA, 260 bp, Glycine max
accaaactccatttctcactcgccgtcgtctcttccgtctagggtttctcctcttcacaaaaatggttgccgcaaaaaaaactaagaagacccatgagagcatcaacaacaggctcgctctcgtcatgaagagtggcaaattcaccctcggttacaagaccgttctcaaatctcttaggagctccaaagggaaattgattatcattgctaacaactgcccccctttgaggaagtcagagattgaatactatgctatgttg

SEQ ID NO: 287977 - DNA, 251 bp, Glycine max
  unsure (1)..(251): unsure at all n locations
ccgtacacgtgatgagatttctggtgtgagacaggagcgtgatccaattgagagagtaagaaagctactattgactcacgagattgctactgaaaaggagctaaaggacattgaaaaggaaataagaaaagaagttgatgaagccattgccaaagcaaaggaaagtcaaatgccagagccatctgatttatttaccaatgtatatgtanaaggctttggtgtcgaggcttgtggcgctgataggaaagaag

SEQ ID NO: 287978 - DNA, 141 bp, Glycine max
  unsure (1)..(141): unsure at all n locations
tgaatgattcgtgctaccatcaactcgtcagccactggctaaacactcatgcggttgttgagccattcgtcatagcaacaaacaggcntctgagccgtggttcaccctatttacaaacttttgtttcctcactatcgtgac

SEQ ID NO: 287979 - DNA, 298 bp, Glycine max
  unsure (1)..(298): unsure at all n locations
atgggnacaagtgagganaangannattcagatgaagtgcttcnagccacaattganaagagnaanaaggttcttgctttgcaaagggaattgcttcaacagatttctnaaagaaagaaactggtttcttcaataaatagngaaancacccctgnaataggagacagtatttcttatgagcacagtgacaaatccctgtcaagtgactcaaatccacagaaaggttctgccagaagaggcagtgcttttgannacgaaaatggtggtgttgtttcaagcaatnatgtcgaatcnantg

SEQ ID NO: 287980 - DNA, 295 bp, Glycine max
  unsure (1)..(295): unsure at all n locations
gatcgagataactagaaacagtgtgatgaaaatgaaggtccttgttttcttcgttgctacaattttggtagcatggcaatgccatgcgtacgatatgttccctctccgaatgaacactggctatggtgcccgtactccggaggtgaaatgcgcaagttggaggcttgctgtggaagcacacaacatctttggctttgagaccantcatgaagagtgcgttgaagcaacaaaggaatacatccatggcgaacaanatagatcagactccaaaacagttaaccaacaagttatttta

SEQ ID NO: 287981 - DNA, 293 bp, Glycine max
  unsure (1)..(293): unsure at all n locations
acatttggtgccttgtagagcgtgttttggcaggaaggtggtatggcgaaggacgttgaggttgctgagcgtggctccttctctgggaaggactaccaggaccctccaccagcaccactcattgatgctgaggagctcacaaagtggtccttttacagggctctcattgctgaattcantgccactttgctcttcctctacattactgtgctcacagtcatagggtacaatcaccagactgacctcaaggaaaatggtgaaatctgtggtggggttggattcttggcattgca

SEQ ID NO: 287982 - DNA, 297 bp, Glycine max
  unsure (1)..(297): unsure at all n locations
aagagacctagcaagggaagcagtgagaaaatctcttgtgctgcttaagaatgggaaaaatgaaagtgcttctacttctgcctcttccaaagaaagtcccaaaaatcctagttgctggatctcatgctgataatttgggttaccaatgtggtgggtggacaatcaaatggcaaggattcagtggcaacagtgacacaagaggaacaactattctcaatgccatanaatcagcagttgatacaagcacagaagtagtctttcgtgacaaccctgacaatgagtttgttaagtccaata

SEQ ID NO: 287983 - DNA, 297 bp, Glycine max
  unsure (1)..(297): unsure at all n locations
cataacacaaggcagaaagcaagctcatcctagagtttnaaaaatgggcagcagcctcctccatggctctctcttccccatccttggctggcaaggccgtgaagctgggcccatcagcccccgaagtcgggagggtcagcatgaggaagaccgtcaccaagcaggcctcctccggaagcccatggtacggcccagaccgcgtcaagtacttgggcccattctctggcgagcccccgtcctacctcactggcgagttcccaggtgactacggctgggacactgctgggctttcggccg

SEQ ID NO: 287984 - DNA, 294 bp, Glycine max
  unsure (1)..(294): unsure at all n locations
aattaacatatacaaattctctgtgttgtgttgtgtacttgtgttaattgtgttgttgttgtaggaaatttaagtgaagagagaatgatgatgaagtctgctatgtgtgcattggtgcttgtngcactggttgtggttgaagtggggcccatggctgaggctgcggtgacttgcaacccaacacagttgactccttgtcttccggcaattaattcaggttctgcaccttcgagtgcttgttgccagaagctgaaggagcaaaagccatgcttctgtggctacctcaaaaaccct

SEQ ID NO: 287985 - DNA, 296 bp, Glycine max
  unsure (1)..(296): unsure at all n locations
atcggatactcctcctgtgacttgcanagtttctgacagtggcatgtncttcactttggatgctgcncaanaattaggcatccctgacgtgtttttgtcgacagctantgcatgtgggnacatgngnnacatgaaatatccaagacttgttgatatgggcttaacacatctcaaagactcaagttactnanaaaattccatcgattgggtaccaggcatcaaagaaattcgannaaaggacttgccnagcttcatgagaaccacaaacccacaagatctcatgatgatggatttca

SEQ ID NO: 287986 - DNA, 295 bp, Glycine max
  unsure (1)..(295): unsure at all n locations
cagataactagaaacagtgtgatgaaaatgaaggtccttgttttcttcgttgctacaatttnngtagcatggcaatgccatgcgnacgatatgttccctctccgaatgaacactggctatggtgcacgnactccggaggtgaaatgcgcaagttggaggcttgctgtggaanaacacaacatctttggctttgagaccanacctgaagagtgcgttgaagcaacaaaggaatacatccatggcgaacaatatagatcagactcnaaaacagttaaccaacaagcttacttttatg

SEQ ID NO: 287987 - DNA, 294 bp, Glycine max
  unsure (1)..(294): unsure at all n locations
aaaggtcagtgatgtggagnttgatcaaatcancnnttctnccaaatgctgagtatttgcttacgagcttcctcagcatttggnagaaggctganttgacannaggtcagtgatgtggagcttgagttcctcaccggaagtgacaagattgatgatgaatctgctttgtcattgtcacnccccaatttgaagttgctccttgtcactcttggagaacatggttccagatactacaccgagaatttcaaaggatcagtagatgcttttcatgttaatacagttgatacaactggt

SEQ ID NO: 287988 - DNA, 290 bp, Glycine max
aaacatcttcacaaactagtaatattattcttcgaatccattttattattcataatgggtattttcacatttgaggatgaaaccacctcccctgtggctcctgctaccctttacaaagctctagttacagatgccgacaacgtcatcccaaaggctgtcgaagccttcaggagtgttgaaaaccttgaggggaacggtggccctggaaccatcaagaagatcatttcgttgaggatggagaaagcaagtttgttttgcacaaaatagaatcagttgatgaggcaaattgg

SEQ ID NO: 287989 - DNA, 293 bp, Glycine max
  unsure (1)..(293): unsure at all n locations
gcaaaatttttgacaaacctaagacgcgctgcttcacnattctccctatggagtttaatcttgtggttcgtcagaagttttnaaattttgtnaggttcattatgaagaaaagggacaagcttagttgtcaagttggaatcaacccatactccatggaatggactggtttggccaatagattactgagtaagggcaacgatattctgtgttgcgattatgctagttttgatggtttgattaccaagcaagttatgagcaagatggcagaaatgataaacagtctttgtggtggt

SEQ ID NO: 287990 - DNA, 289 bp, Glycine max
  unsure (1)..(289): unsure at all n locations
tttgttgtgagctataagctagtttatcgtgaggagaatatgaagttgtttgttttctttgttgctgcagtagttttggtagcatggccatgccatggcgcaggctaccaaaggttccctctccgaatgaaaactggctatggtgagcgttcttcggaggtaaaatgcgcaagttttaggcttgctgtggaagcacacaacatccgagcnttnaaaaccattcctgaagagtgcgttnaaccaacaaaggactacattaatggcgaacaatttagatcagactctaaaa

SEQ ID NO: 287991 - DNA, 293 bp, Glycine max
  unsure (1)..(293): unsure at all n locations
gcaagcccactatcatcaccaacgccganggccnnagaaccacgccctccgtngtggcctacaccaagaatggcgacaggctcgttggccaaatcgccaagcgtcaggccgtcgtcaaccccgagaacactttcttctccgtcaagaggttcatcggccgcaanatgtctgaggtcgacgaagagtccaagcaggtctcttacagagtcatcagagacgacaacggcaacgtcaaactcgactgccccgccattggcaaacagttcgctgccgaggaaatttctgcccaggtt

SEQ ID NO: 287992 - DNA, 291 bp, Glycine max
  unsure (1)..(291): unsure at all n locations
caactgccncgganatttactgatgctctncgcacttttgtcaanantgncncataccattccttnnattgttgttgagtcaaggagggaggtcgatgaagtgaaagaattgattatcatagtgaaagagtatgtcttgggtctgcagatggagctcaaaagaagggaaattaaggacaatccagcacgccagcaagancttgcagcttatcncacccactgcaatcttnaaacacctcacttgaggctagctttgctgaatgccatgactgtctgtacaaggcaaagaac

SEQ ID NO: 287993 - DNA, 289 bp, Glycine max
atccacctgctcagaaggaggccattgaagcgctgcctaccgtcataatcaatgagaattcgcagtgttctgtgtgtctggatgattttgaagttggttctgaagccaaagagatgccttgtaaacataggtttcatagtgggtgtatccttccctggctggagcttcatagttcttgtccagtttgcaggcttcagttgccattggatgagtctaagcaagactctgatctgtcaagggatagcagaagccaaagggaggatgaaagtattgaacatgacaatgatga

SEQ ID NO: 287994 - DNA, 287 bp, Glycine max
aatgatacatcaagtttcacaggtgaacagacggcagctggcaacgttaattccataaggggttttggtgtaatagacaacatcaagtctcaagttgagagcttatgtcctggtgttgtttcttgtgctgatattctcactgtagctgcaagggactctgttgttgctcttggtggacctagttggacagtgcaattgggcagaagagactcaaccactgcaagtttaagttctgcaaactcagacttgccccgttttgatttaagtctgcaacaactcagcgataa

SEQ ID NO: 287995 - DNA, 288 bp, Glycine max
  unsure (1)..(288): unsure at all n locations
aaacnctactcattctccatacctcaacgaagaggttaaagagacggcaacactttgctgtccgccttgaccgagcagagcttcgtcttggccctcgattttgccctaaagtactctcagtcacaacagacacnnnnnnnnnnnnnnnnnnnnnnaatggcaccgaagcagaccaaggctgagaagaagatcgcttacgatgcgaantgtgcgacctaatggaggagtacggccagatcctcgttgtgaatccgataacgtgggatcgaaccagctcnagaacattcg

SEQ ID NO: 287996 - DNA, 288 bp, Glycine max
  unsure (1)..(288): unsure at all n locations
gttgatcgagataactagaaacagtgtgatgaaaatgaaggtcttgttttcttcgttgctacaatttnngtagcatggcaatgccatgcgtacgatatgttccctctccgaatgaacactggctatggtgcccgtactccggaggtgaaatgcgcaagtnggaggcttgctgtggaagcacacaacatnnttggctttgagaccattcctgaagagtgcgttgaagcaacaaaggaatacatccatggcgaacaatatagatcagactccaaaacagttaaccaacaa

SEQ ID NO: 287997 - DNA, 287 bp, Glycine max
  unsure (1)..(287): unsure at all n locations
gaccttgttctgttgctgttcganactgctcttctcacttctggtttcagccttgacgaacccaacacttttggaaacaggatccacagaatgttgaagcttggactgagcatcgacgaggatgcagctgaagctgatgctgatatgcccccactggaggaggaggctgaagctgatgctgagggcagcaaaatggaggangttgattaaacttnnanatcatgcggaaggagttggcnatgttttttctctttttttcctttcggattgctctgacaagnntntaa

SEQ ID NO: 287998 - DNA, 287 bp, Glycine max
  unsure (1)..(287): unsure at all n locations
atgcatctgatgtcaacttaccataggntatttgccacggtttnncactctttgttgcagtttctgtcggtgccaacatctctggtggccatgtcaaccctgctgtgacttttggattggctcttggtggccacatcaccatcctcactggcttcttctactggattgcacagcttcttggctccatcgtggcatgttttcttctcaacnatgtcacaggaggcttgccaactccaatccacagtgtggcttcaggggttggagcagttgaaggagttgtgaccgag

SEQ ID NO: 287999 - DNA, 285 bp, Glycine max
agaaagcaagctcatcctagagttttaaaaatggcagcagcctcctccatggctctctcttccccatccttggctggcaaggccgtgaagctgggcccatcagcccccgaagtcgggagggtcagcatgaggaagaccgtcaccaagcaggcctcctccggaagcccatggtacggcccagaccgcgtcaagtacttgggcccattctctggcgagcccccgtcctacctcactggcgagttcccaggtgatacggctgggacactgctgggctttcggccgacc

SEQ ID NO: 288000 - DNA, 281 bp, Glycine max
  unsure (1)..(281): unsure at all n locations
gcttccctccctcctttgaagaaacaaatnagaagagtgtgttgtgttgtgttgaagtagcaagctagcaaagatgtttggcatcttaggaggcaataaggggcacaagatcaagggtactgtggtgttgatgagcaagaatgtgttggacttcaacgaaatagtgtccactactcagggtggtttggttggtgctgccaccggcatcttcggtgctgccaccggtattgttggtggagttgtcgatggtgtactgccatcttcagtcgcaacattgccat

SEQ ID NO: 288001 - DNA, 284 bp, Glycine max
  unsure (1)..(284): unsure at all n locations
gatgaggggaagacaganaagctggaacactccttgcagctgttaacaanaatgataccagccacantgttcatgttccatctggtccaaatgctctttctgatgtacttataagtacgcctatttttactggtgatggggaaggtggaagtggttttnnnnnnnnnnnnnnnnnnnnnnnagctggtggtgtatccggatttgagtttggcgtggatccaaacttggatccagaattggctcttgctctaagagtttcaatggaagaggagagagccaggcag

SEQ ID NO: 288002 - DNA, 287 bp, Glycine max
aatgctgcgcaagaacaagcttggcaccgttcccgttcacctcaacgtctatgatctcaccccaattaatggctacgcctattggtttggccttggactctaccattctggggttcaagttcatgggctggaatatggatttggtgcgaacgagcacgacacaacggggattttccaagttcaaccgaaacactgccctgggttcaccttcagaaagtcaattttcatcggaacaacagatctgggtgccaaggatgttcgagcattcatgggagaagctagctcaa

SEQ ID NO: 288003 - DNA, 283 bp, Glycine max
  unsure (1)..(283): unsure at all n locations
caaagagattcagagactcgaaggccccaccgatagggtttggagcttggattgaaacccggccaccggtcacgccggtatcccactcgtnttcgcttcttgcagcggcgacaaaaccgtccgaatctgggagcagaatntctcctctggcctctgggcctgccaggcggtttttggaccctgacgcacactcgaactgttcgatcttgtgcntggtcaccgtcgggtaagtattggccactgcaagcttcgatgccatcatgccattgggaaaatgttggtg

SEQ ID NO: 288004 - DNA, 284 bp, Glycine max
  unsure (1)..(284): unsure at all n locations
tantgtgtggttgaaatnaanaagtagcaaanatcgtntccattcgggcacaagggtcaaaagatanaggggacnatggtggttatgcagaagaatgtgttggatatcaacagcatcaccagtgttgacgggatcgtcggcaccggcttagacttcttangcagtgcactcgatacagttattttttagcctcctcccatctccatccaacttattagtgctaccaaggctgatggtgggaaaggaaaagttggaaaggctacaaatttgagaggaaagataac

SEQ ID NO: 288005 - DNA, 265 bp, Glycine max
  unsure (1)..(265): unsure at all n locations
gtagagcagcacagaagagggaanacngcaccgccgccgncacaagaaaacaaccatggtgaacgtctccttttacaggaactatgggaagacattcaagaagccgcgtcgtccgtacgagaaggagcgtctcgacgcggagttgaagctggttggtgagtacgggcttcggtgcaaganagagctgtggagggtgcagtacgcgctcagccgcatccgcaacaacgcgcggaacctcctcaccctcgacgagaagaacccgcgc

SEQ ID NO: 288006 - DNA, 284 bp, Glycine max
  unsure (1)..(284): unsure at all n locations
gcaccttttgacctctttgacacaaggaagaagcctaacaanattaagctttatgtccgccgtgtctttatcatggacaactgtgaggagttgattcctgagtatttnggctttgtcaagggtattgtggattccgaagatcnaccactcaacatttcaagagaaatgttgcaacagaacaagatcttgaaggtcatcagaaagaacttggttaagaagtgccttgagctcttctttgaaattgcanagaacaaggaggattacaacaagttctatgaggcttt

SEQ ID NO: 288007 - DNA, 285 bp, Glycine max
  unsure (1)..(285): unsure at all n locations
aaggacccaacttgttgcaactttcaaccgctacanaganntccatggcacttccatctctaagaaattggtggatgaaggatctgatgagtttcagagggcattgtacactgccattcgtgccatcaatgatccnattaagtactatgaaaaggtggtgcgcaatgcaatcaaaaaggttggaaccgatgaggatgcactcactcgcgtggttgtgagccgggccgagaaggacctgaagataatctcagaggtttactacaagagaaacagcgttcttcttga

SEQ ID NO: 288008 - DNA, 279 bp, Glycine max
  unsure (1)..(279): unsure at all n locations
gcanactagtatccgatcctctgtcctctcgaagctttcatcgttcaacatattctcaccatctcagtcatgggcctgctatcttgtttnaggtctaccgtcctgagaaaatgttccaaaggaagctctggcatgtcaagattcctgnatacgaacaattttcaacgaaacttgatttcgtctggtggcaatgaatcgtatnatgggtattttaacaggagatcatacacttcactttatatgggaatggaatgtgggtgggatacaagtgctagaatc

SEQ ID NO: 288009 - DNA, 281 bp, Glycine max
  unsure (1)..(281): unsure at all n locations
agagacgaaacccnaggtttnagtgagtggcgaaaatggcggtgattttttcaagtgcaataccaggaggggcagcaccagcagcaatcgagcaagtgcagtgcttcgggcggaagaagacggcggtggcagtgacctactgcaagcgcggccgaggcctcattaagatcaacggctgcccgatcgagctggtggagccggagatcctccgcttcaaggccttcgagccaatcctcctcctcggtcgccaccgcttcgccggcgtggacatgcgcatccgc

SEQ ID NO: 288010 - DNA, 284 bp, Glycine max
tgaattttgattctagcaagcagagcttttgtcaattttctattgaccttctcggtggaggaattttagtggacaaaactggagattggatcacacttatacaaaattctccaattagtaacttgttgagagttgctgcttggaagaaaggctgtttaatggtcaagattgtgatgtctgggaatgcagcagtcaaaaggagtgattgggcctcattggtacaagtgtttttaacaaacagcaacagtacagagcattttgatgcatgtaagtggacaaaatca

SEQ ID NO: 288011 - DNA, 292 bp, Glycine max
  unsure (1)..(292): unsure at all n locations
cnnagantncnnnangctcatccgagaccngaacccantnntngcgatcgatctcaagggnnggaggtaaaagcaanaaaaccaaaagaanagcacccaagtccaatgatatctatcttaagctcttggtcaagctttatcgcttccttgttcggagaactggcagcaaattcaatgccgttatactcaagagattgttcatgagcaaggttaacaagcccccattgtctntgtcaaggttgattaagtatancaaggggaangngntnagattgctgtggtggtgggcaat

SEQ ID NO: 288012 - DNA, 286 bp, Glycine max
tcaaaacaaccttctttctttcaggttcttgatcagtgtcaaaaccaaaagggtggttgcaaattgcaatggctaagcatgatgttgagggtggttccttcgctgcaaaggactaccatgatcctcctccagcaccattgattgatgctgaggaactcacacagtggtccttctacagggctttgattgctgagttcattgccacaatgctcttcctttacatcacagtgctcactgtgattggttacaagagccagagtgatgtaaaggctgggggtgatgtgtg

SEQ ID NO: 288013 - DNA, 285 bp, Glycine max
ttggaattatcaagaccaagcgcactattcaatttgttgactggtgccccaccgggttcaagtgtggaatcaattaccagcctccgactgttgttccaggtggtgatcttgccaaggttcagagggccgtgtgcatgatctccaattccaccagtgttgttgaggtcttctctcgcatcgaccacaaatttgacctcatgtatgccaagagggcgttcgttcattggtatgttggtgagggtatggaagagggggagttctctgaggcccgtgaagatcttgctg

SEQ ID NO: 288014 - DNA, 287 bp, Glycine max
gagaagactccagaacaggaaaggttggaaagaagacggcaaatgccttatcatatgcacatcaatcttgagctcctggagacagtacatcttgctatctgctatgctgctggaagttcctaatatggcagccaatgttcatgatgcaaaacgcaaactcatatctaagactttccgtcgcttgcttgaggtgagtgacagacaaacattcactggtccaccagaaaatgtaagagatcatgttatggctgccacgaggtttcttagcaagggagacttccagaagg

SEQ ID NO: 288015 - DNA, 278 bp, Glycine max
  unsure (1)..(278): unsure at all n locations
tagcagattgtgattttctcaagagaaactttaagcagatgtctaatgttttgtgggtggctcctgaggacaaggcgagtttgtggtcacaacttcattatgtttcgtgtaataatctggaaatgcaagaagcttatcttgtcaatctcgtaaatgtgttacgagaattgtatttgcacagtccagaggaagctcgccaattgagaaggaaagctctttctcgtattgatggctgccaaaagcggntgtgctaacctagcncngattgaagagttcct

SEQ ID NO: 288016 - DNA, 288 bp, Glycine max
  unsure (1)..(288): unsure at all n locations
caagctttctactgcgtcatctgttccagaagtgcaattagctcagtatgttccagcactggaaagactggctaccatgaggttgctgcaacaggtgtctaatgtgtaccaatctatgaagattgagaccttatcagggatgatccccttctttgactttgctcaagtggnaaagatttctgtagatgctgttaagcagaagtttgtatcgatgaaagttgaccacatgaaaaatgctgtgatttttagtaaaaagagtctcgagtctgatggcttaagggatcactt

SEQ ID NO: 288017 - DNA, 288 bp, Glycine max
  unsure (1)..(288): unsure at all n locations
aaacactcatgnggttgttgagccattcgtcatagcaacaaataggcatctgagtgtggttcaccctatttacaaacttttgtttccacacnataganaancgggngaatattaantcacttgcccgcaaatccttggtnaatgcagacngtattatagagnaaacatttttgtggggtaggtacgctttggaaaggnctgctgttgtttacaaggactgggttttcactgatcaagcactgcccaatgatcttgtcaagagaggagttgccgttaaggatccatctg

SEQ ID NO: 288018 - DNA, 215 bp, Glycine max
  unsure (1)..(215): unsure at all n locations
cttcgaatcgaaactcagaagtagaaaaaaacacaaatcacaatcgctatggctaggtacgaccgagcaatcaccgtgttctcccctgacggccatctcttccaggtcgagtacgccctcgaagccgtccgcaagggcaacgccgccgtcgggtccgcggcaccgacaatgttgtctcggcgtcgagaagaatccacggcaaactccaagantcc

SEQ ID NO: 288019 - DNA, 282 bp, Glycine max
  unsure (1)..(282): unsure at all n locations
cctgatcttggaaggatagagaagtgggtattacgcaatgcatttgatgacgataagaatccatatttaccaaagcacatattgtacaggcagaaggaacaattcagtgatggggttggttacagctggattgatggcttgaaggatcacgcaaacaaacaagtcacagatgcgacgatgatggctgccaattttatttaccctgaaaacactcctaccacaaaagaaggatacctctacaggacaatttttgagaagtctttccaaagantgcagcaaagg

SEQ ID NO: 288020 - DNA, 283 bp, Glycine max
atccctctttcttcctcttcctcagtagtgcgattttcgattctcttctctgcaactatgcctaaccctaaggtcttcttcgacatgaccatcggcggtcaacctgccggccgcatcgtgatggagctctacgccgacgtgactccgagcaccgccgagaacttccgcgcgctctgcaccggcgagaagggcgccgggcggagggcaagcccctccactacaaaggctcgtccttccaccgcgtgatcccgaacttcatgtgccagggcggcgacttcaccgc

SEQ ID NO: 288021 - DNA, 274 bp, Glycine max
  unsure (1)..(274): unsure at all n locations
ctctcgttgattcggatctagagtcttttttcactcttcagttctcgttgttgttacncgctttcctgaaactagggttttcaatttcgattcattcgttaataattaaagatgtttgggagggcaccgaagaagagcgataatacgaggtactacgaaatcctcggcgtctcgaagaacgcttcgcaggatgatctgaaganggcttacaagaaagccgccatcaagaatcaccctgacaagggcggtgatcccgagaagtttaaagagctgg

SEQ ID NO: 288022 - DNA, 283 bp, Glycine max
  unsure (1)..(283): unsure at all n locations
ctgaatcngtgaacgaggggcaccctgancaagctctgtgaccagatctccgatgctgtgctcgatgcatgcttggagcaggaccctgacagcaaggttgcctgtgaaacctgcaccaagaccaacatggtgatggttttcggagagatcacaaccaaggccaacgtggactatgagaagattgtgcgtgacacatgcaggaacattggttttgtctctgatgatgttggtcttgatgctgacaactgcaaggtcctcntcaacattgagcaacagagtcctg

SEQ ID NO: 288023 - DNA, 281 bp, Glycine max
acagatcgatgatcaagtgaagatcatagcagcaataaaagaagccggaaacatcaagaggctcctcccatcggaatttgggcacgacgtggatcatcacaatgcagtggaaccagtgagtagcttcttcgagaaaaaagtgaaaatccgaagggcaattgaagctgaaggaattccatacacttacatcagttcaaattcctttgctggacacttcctacctaacttgttacaacaaaatgtcacagctcctcccagggatgaggttgtcattctaggag

SEQ ID NO: 288024 - DNA, 281 bp, Glycine max
cacaactctgctaccctcttctctctctctcggttgtgagtgcagatttcttgcgcggtttatcatgggggatagtcagtattcgttttctctcaccacatttagcccttctggaaagcttgttcagattgagcatgctttgacggctgtcgggtctggacaaacgtctttgggaattaaagctgcaaatggagttgtcattgctaccgagaagaaattgccatctatattggttgatgaagcatcagtccagaaaattcagttattaacaccaaatatag

SEQ ID NO: 288025 - DNA, 282 bp, Glycine max
  unsure (1)..(282): unsure at all n locations
tcaattatttctttccgcggttttggtgattctgaactctacgttttgttcgattctngntatccgcagatgtgttggatccattttttccgnctcggagtttgagccaggttctgaacatgatggaccaggtcatggacaatccgttcctctccgcgtcgcgcgggatcggagctggcgctggagtgcntcgcggatgggacgcgaggnagacagangatgctctgcatctgcgcgtggacatgcctgggctcggcaaggaagacgtgaagatctccgtgg

SEQ ID NO: 288026 - DNA, 284 bp, Glycine max
gagtccatacgcaatgcaattatagttcttcaagatatcggggcattgtcaaatgatgaaaaactcacccaactaggggagaagcttggttctcttcctgttcacccattaatatgcaggatgcttttttttgctatattgatgaactgccttgatccagctttaactcttgcatgtgcatctgattatagagatccatttacacttccaatgttacctgaagaaaagaagagagcttcagctgccaaatatgagcttgcttctttatatgggggttgtagtga

SEQ ID NO: 288027 - DNA, 284 bp, Glycine max
  unsure (1)..(284): unsure at all n locations
ctcattcttcatccatagacatggccaccgtcacttctgcagccgttgctattccctcattcactggcctcaaggcaagcgcaggnaaagtncagtgccgcagttaaagtctnagctccccaagccacaaggttgggcatcaaggcttcgctgaaagacgttggagtcgctgttgtggccactgccgcgagtgcagtgctnncnagcaacgccatggnnattgaagtgttgctgggtggtnatgacgggtctctgnctttcgttccnaanaatttctccgtggt

SEQ ID NO: 288028 - DNA, 267 bp, Glycine max
  unsure (1)..(267): unsure at all n locations
ctcagcaccttccaacagatgtggattncgaaggcagagtatgannaatctggacccatcaatcgtacacaggaaatgcttctaagttataacaatggagtatgaaagatggaccagggaaattactatttatacgaacactacaaaaataccatcaagtggttgaggaactttcattttcctaccctttaccattccttttatctatcttgtttttgtgttttcctttctttgatatgttgagataagagcatgaaggctagcaag

SEQ ID NO: 288029 - DNA, 279 bp, Glycine max
  unsure (1)..(279): unsure at all n locations
cttcttcttctccagatgctctgcgcatganagagcaggccatcacaaacctcactgagcatctcagggaacagaatagggcagaggatttgcacagccttcttacacagttgangcccttcttttccttgattcctaaggcaaaaactgcaaagatagtgaggggcataattgatactgttgcaaaaataccagggacttctgatctacaaattacactatgcaaagaaatgatgcaatggactcgtgctgaaaagcgtacctttctgaggcagcgag

SEQ ID NO: 288030 - DNA, 279 bp, Glycine max
  unsure (1)..(279): unsure at all n locations
ttgaaactgccagangttgttccttctcccacacaagacagtgantgnactcagaaaggctttccaaggatttgggacagatgagaaagcggcgatattggtattgggacacaggaatgctcaacaaaggaagaaaattggagaaacttatcagcagctttacaatgaatcgcttgtcgatcgtcttcattctgaattgtctggtgattttagaaatgctgtaattctctggacctacgatcctccagaaaggcatgcgagactagcaaaggatgcatt

SEQ ID NO: 288031 - DNA, 283 bp, Glycine max
  unsure (1)..(283): unsure at all n locations
gcctgctatcttgttttaggccctaccgtcctgaganaatgttccaaaggaagctctggcatgtcaagattcctgtatacgaacaattttcaacgaaanttgatttcgtctggtggcaatgaatcgtattatgggtattttaacaggagatcatacacttcactttatatgggaactggaactgtgggtgggattacaagtgctagaatcagggtgccaaatgtaggatgtgaaggattcatgtgctcaagtcatctgtcaatcactcaaagaaattcaagat

SEQ ID NO: 288032 - DNA, 281 bp, Glycine max
  unsure (1)..(281): unsure at all n locations
cccctactcattctccatacctcaacgaagaggttaaagagacggcaacactttgctgtccgccttgaccgagcagagcttcgtcttggccctcgattttgccctaaagtactcncagtcacaacagacacnnnnnnnnnnnnnnnnnnnnnnaatggcaccgnagcagaccaaggctgagaagaagatcgcttacgatgcgaanttgtgcgacctaatggaggagtacggccagatcctcgttgtgaactccgataacgtgggatcgaaccagctccaga

SEQ ID NO: 288033 - DNA, 278 bp, Glycine max
  unsure (1)..(278): unsure at all n locations
cgcgnctgccaccccantgcaagatgttcaggttnnaattgantggtttatttccnctcaggaatgtgtncncagnacctatngtgtnttaaatccncaaaatccttttgtgttaaataggtggatggganaactgactttcccccagggcanttcccgaagtgttangataatgcctctntctatagggggaggagctggtncaaagaatgctattctcntgaacatgccaaatgcngttctntcnatgtggagatnttntgctngatntctcgtcg

SEQ ID NO: 288034 - DNA, 279 bp, Glycine max
  unsure (1)..(279): unsure at all n locations
cgganaacagttagagagaaggcaagcttgttgtcggagtcncaagacatactatccaccattganattgagactcaggatatnccancatgctcggacctatcttctgactttgaaggaaataagagtcaagaaaggtcttacagatgatcttggtgcagaggctctgatgatagangcattggacaagantganaaggntttanaaaaacctttactgagnnatgataagaaaggnatggaccttctcttggcagagtnngatangttaataaggnc

SEQ ID NO: 288035 - DNA, 281 bp, Glycine max
  unsure (1)..(281): unsure at all n locations
ctgaaaganaacaacacgtttcccatagatctcaccaatgataacatcaaagcagtgctcttgaacttacttgtaggagctacaggtacaactgaagtcacaacaatctgggccatgactgaactaataaaaaatccaagcattatgaagaaagtgcaagangaaattagaggcttaagtggtaaganagatttcttggatgaagatgatattcaaaagttttcctacttaagggcagtgataaaagagacacttagattgcacttaccagcaccactact

SEQ ID NO: 288036 - DNA, 280 bp, Glycine max
  unsure (1)..(280): unsure at all n locations
gcagacttaacaacagcacaaagcgggttactgtctgttcaagctaccatctctcnctctctttcttagtgcctccttgccagaagttaaaatggcccaagaaactttcctattcacatctgaatcagtgnacgaggggcaccctgacaagctctgtgaccagatctccgatgctgtgctcgatgcatgctcggagcaggaccctgacagcaaggttgcctgtgaaacctgcaccaagnccaacntggtgatggttttcggagannncaanccaagggca

SEQ ID NO: 288037 - DNA, 282 bp, Glycine max
  unsure (1)..(282): unsure at all n locations
cngataactagaaacagtgtgatgaaaatgaaggtccttgttttcttcgttgctacaattttngtagcatggcaatgccatgcgtacgatatgttccctctccgaatgaacactggctatggtgcccgtactccggaggtgaaatgcgcaagttggaggcttgctgtggaagcacacaancnctttggctttgagaccattcctgaagccgcgttgaagcaacaaaggaatacatccatggcgaacaatatagatcagactccaaaanagtnaaccaacaag

SEQ ID NO: 288038 - DNA, 278 bp, Glycine max
  unsure (1)..(278): unsure at all n locations
cagactgacctcaaggaaaatggtgaaatctgtggtggggttggcattcttggcattncatgggcctttggtggcatgancttcatccttgtctactgcactgctgggatttcagggggtcacattaacccagcggtgacatttgggctgtttttggctcgcaaggtgtctttgatccnagccatcatgtacatggtggctcagtgcttaggtgctatctgtggagttggtttggttaaggctttccaaaantcttacttcaacaagtatcnnggtgg

SEQ ID NO: 288039 - DNA, 277 bp, Glycine max; identical to SEQ ID NO: 204955

SEQ ID NO: 288040 - DNA, 274 bp, Glycine max
  unsure (1)..(274): unsure at all n locations
anactcctaaagnttccatgttggntcttaaantttctcaatctaaanttgcacttcccaanaannnagtgggnggaaccattctgcgtngtgntctantggcgaattttttgacaganggcaattttagagnaagtnttgntttgcagcgcactcatcgtattaaaggaatgattaaaatggtggctacagttggtattcctgagaanacaggtatagcattggccgtgctatgaanngttcntttagggggcgcgccagtnccganatntac

SEQ ID NO: 288041 - DNA, 249 bp, Glycine max
  unsure (1)..(249): unsure at all n locations
tcgagataactagaaacagtgtgatgaaaatgaaggtacctgttttacncgttgctaccaattttngtagcatggcaatgccatgcgtacgatatgttccctctccgaatgaacactggctatggtgcccgtactccggaggtgaaatgcgcaagttnnaggcttgctgtggaagcacacaacatctttggctttgagaccattacngaagagtgcgttgaagcaacaaaggnctacatccatggcgaa

SEQ ID NO: 288042 - DNA, 275 bp, Glycine max
  unsure (1)..(275): unsure at all n locations
cctctgcttcagccccaacaggtactggctctgcgccgccaccgngcagagcatcaagatctgggatttggagagcaagagtatcgttgaggatttgaaggttgacctcaagactgaggctgatgccacctccggtggnngtaacgccaacaagaagaaggttatttattgcacaagtttgaactggagtgcggatggaagcactttgtttagtggctntaccgatggtgtggtcagaatttgggctattggacgttattaggttaagcttttta

SEQ ID NO: 288043 - DNA, 271 bp, Glycine max
  unsure (1)..(271): unsure at all n locations
ctctgctcgtgcctctagggttatcatatctccatttccatttcctctctctcagtttccaagaatcttaagctatgggaaagtcttacccaaccgtgagcgctgattaccagaaggccgttgagaaggcgaagaagaagctcagaggnttcatcgctgagaagagatgcgctcctctaatgctccgtttgggcatggcatctgctggaacttacgacgtgngctcgaagacgggtggtcctncggaaccataaagcaccccttccgaatt

SEQ ID NO: 288044 - DNA, 279 bp, Glycine max
actttcaatgtgcctgccatgtatgttgcaattcaggctgtcttgtctctgtatgccagtggaagaactacaggtattgtgcttgattctggtgatggtgtgagccacacagttcccatatatgaagggtatgctcttcctcatgcaattcttcggttggaccttgctggccgtgatttaacagagtacttggtgaaaatccttactgagagaggatactccttcagcacctctgctgaaaaggaaattgtccgtgatgtgaaggagaaattggcatat

SEQ ID NO: 288045 - DNA, 281 bp, Glycine max
  unsure (1)..(281): unsure at all n locations
gtggatgggaaaactgactttcccccagggcacttcccgaagtgttaagagaatgcctctttctatagggggaggagctggtgcaaagaatgctattctcatgaacatgccaaatgctgttcttcaatgtggagatattttgttggagactcgtctttgaagtttctaagatgacttctccctacattaaatgtacagtctctttcttcatagcatttggaaatttggctgatgacaccatcaattttgaggcctttccacacaagntagtatnngcnaaa

SEQ ID NO: 288046 - DNA, 279 bp, Glycine max
cgtgcctctagggttatcatttctccatttccattttctctctcacttttcaagaatcgtaagctatgggaaagtcttacccaactgtgagtgctgattaccagaaggccgttgagaaggcgaagaagaagctcagaggcttcatcgctagaagagatgcgctcctctaatgctccgtttggcatggcactctgctggaacctttgacaagggcacgaagaccggtggacccttcggaaccatcaagcaccctgccgaatggctcacagcgctaacaag

SEQ ID NO: 288047 - DNA, 214 bp, Glycine max
tagtgcctccttgccagaagttaaaatggcccaagaaactttcctattcacatctgaatcagtgaacgaggggcaccctgacagctctgtgaccagatctccgatgctgtgctcgatgcatgcttggagcaggaccctgacagcaaggttgcctgtgaaacctgcaccaagaccaacatggtgatggttttcggagagatcacaaccaaggcca

SEQ ID NO: 288048 - DNA, 277 bp, Glycine max
  unsure (1)..(277): unsure at all n locations
attttcttccccaaatcgtagatctacggtttaactggagtagtgtggtaagatgggaggtggatttagagtgcttcatttagttaggccgtttctatcgtttcttcctgaagttcaaactgctgacaggaaagtgccatttagaggaaggtcatatacactgtgatctctcttttcattttcctggtttgtagtcagctccctctatatgggatacactcaacaacaggtgctgatccatctattggatgcgagtnattctcgcttcaaatcgtgg

SEQ ID NO: 288049 - DNA, 280 bp, Glycine max
  unsure (1)..(280): unsure at all n locations
ctctttctctagtcctgtnatttctcagcgcgtaaagcatggcnttgttggtggagaaaaccacgagtggtcgcgagtacaaggtcaaggacctttcccaggccgacttcggccgcctcgagatcgagctggccgaggttgagatgccggcctcatggcctgtcggaccgagttcggcccctcccagcncttcaangggggcccgcatcaccggctccctccacatgaccatccagatccgccgttctcattgagaccctcaccgcccttggcgccgagg

SEQ ID NO: 288050 - DNA, 290 bp, Glycine max
tgagaattatgtgtacgcatatcttaatagaaaagatgttcaagaggctctccatgccaatgtaaccaacctccaaacatgactgggaaccctgcagcgatgtcataacaaagtgggttgatcaagcttcaacagttcttccacttttacatgattcctcaacaatagcctcagggtttggattttcagtggtgacacagatggaagggtgcctattacatcaaccaagtattcagttaagaagatgaaccttcccattaaatctgtttggcacccttggttttcctatg

SEQ ID NO: 288051 - DNA, 290 bp, Glycine max
gtcattggtgtcaagttgacaaccataaacaatatgtgtgcatatgggctcaatcctggtatttcaggttctcgtcttttgggcaccattcctcagtccatttcacagcaaactgtttggaatcaaatggcaacagtgagaacaccattgaatttgattctagcaagcagagcttttgtcaattttctattgaccttctcggtggaggaattttagtggacaaaactggagattggatcacacttatacaaaattctccaattagtaattgttgagagttgctgctggga

SEQ ID NO: 288052 - DNA, 278 bp, Glycine max
  unsure (1)..(278): unsure at all n locations
gcgcctttcagaggcggaaggcccattcgggtggttacatttccgaataccattgtgcagattgaaccagacatgaattcaangtttcagcttttgagtaccactaccaatggtgattttgttcaaggaaaagatctcgcgatggttaagttaatgtaacatgtgctgctgttggcttgacatcaagttacactccagctccattgttggaatctggtttgcnaaaagacagagggttaattgtggagtatttggaaggatgtcttacgttgctcata

SEQ ID NO: 288053 - DNA, 280 bp, Glycine max
  unsure (1)..(280): unsure at all n locations
attcttattctttttctctctttctctctgcttgcggtgcttcacaagccaaatctnacttgtctctgttttctccgatctagtactactatcaatggccggancaaggagatggtcctgctatcggaatcgatctcggcaccacctctcctgcgtcggagtgtngcagcacgaccgtgtcgaaatcatcgccaatgaccagggtaacagaaccacgccgtcttacgtcgctttccactgattccgagtccntgatcggngacgccgccaagaaccaggt

SEQ ID NO: 288054 - DNA, 280 bp, Glycine max
  unsure (1)..(280): unsure at all n locations
ctccaaaaagatgctagtatttcatcctctggggtgttacaactcaccaaagttggcagcaacggcgtgcccacctncgggatctctcggtcgtgccctttacgctgccccaatccagatttgggacagcgaaaccggcaaggtagccactgggctacatcctttaaattcaacattttcgcacccaacaaatcaaactcagctgacgggcttgccttcttcttggcacccgtcgggtctcagccccaatccgacgatggatttcttggtcttttcaacc

SEQ ID NO: 288055 - DNA, 279 bp, Glycine max
  unsure (1)..(279): unsure at all n locations
tagaaacagtgtgatgaaaatgaaggtccttgttttcttcgttgctacaattttggtagcatggcaatgccatgcgtacgatatgttccctctccgaatgaacactggctatggtgcccgtactccggaggtgaaatgcgcaagttgaggcttgctgnngaagcacacaacatctttggctttgagnccattcctgaagagtgcgttgaagcaacaaaggaatacatccatggcgaacaatatagatcagactccaaaacagttaaccaacaagcttat

SEQ ID NO: 288056 - DNA, 282 bp, Glycine max
gctaaatccctcaaactcaccaacaaagatgtctttgtcttggacgttgacgacactactctctctaatctccagtattttgctaaccatggatttggtgtggaaccacacaatacgacggcgtttaagaactgggttcttgatggcgagcattcgcactgccagagactcttaaaatgtacaacaaactgttggctctcggcatcaagattgtattcttatcagaaagaccactgagtctaggggatgtaacagccaagaattaaaggaggttggattcaa

SEQ ID NO: 288057 - DNA, 276 bp, Glycine max
caatgacaagggtagactgtcaaaggaagatatcgagaagatggttcaagaggctgagaagtacaaatctgaggatgaagagcacaaaaagaaggttgaggccaagaatgctttggaaaactatgcatacaacatgaggaacacgtgaaggatgacaaaattggtgagaaacttgatcctactgacaagaagaagattgaggacgcaattgagcaagctatccagtggctagacagcaaccagctcgcagaagcagatgaatttgaggacaaaatg

SEQ ID NO: 288058 - DNA, 275 bp, Glycine max
  unsure (1)..(275): unsure at all n locations
gttctgaaggctgtaatagagaaaacaaatgtggaccctgcggaagtnggagatattgtcgtnnggcacagtactggcacctggatcagatagaggaattgagtgcagaatggctgccttttatgcaggtttcccagagactgtgctcttcgaactgtcaatcggcagtgttcatctggacttcaggcggtttctgacgtagctgcctatataanagccgggttctatgacattggtattggggctggactggagtctatgacagtagatcgtnt

SEQ ID NO: 288059 - DNA, 275 bp, Glycine max
  unsure (1)..(275): unsure at all n locations
ctgaaagcactcagtagggtttgcggtttcagagtttgtgacgcacgcatccatggccaccaccaccaacgccgccgcagccccgccgcgccagctctcccagaaggaagccgacatccagatgatgttagccgccgacgtccactcggcaccaaaaactgcgacttccaaatggaacgttacatcttcaagcgccgcaacgacgggatttacattattaaccttgggaagattgggnaaagcttcagttnccnncnagggttattnttcnaatt

SEQ ID NO: 288060 - DNA, 279 bp, Glycine max
  unsure (1)..(279): unsure at all n locations
gagacctcgaagtccatcccaaggacacatttgtgttcagtatagatggnntccgtactctctaatattccatactacaaaaaacatggatatggggtggagaaatttaactcgaccttgtatgatgaatgggttaacaagggcaatcaccggcactgcccgagactcttaagaattacaacaagctggtgtctcttggcttcaagattatattcttgtcaggaagaacactggacaaacaggccgtaacagaagcaaattaaagaaggctggctacca

SEQ ID NO: 288061 - DNA, 288 bp, Glycine max
caccaagctgtggccctaagggttggtggggacctctcagcattcttcaattgtgacatcctagcattccaagacaccctttatgtccacaacaatcgccaattctttgtgaagtgcctaattgctggcacagtggatttcatctttggcaatctgcagtggtgttccaagactgtgacatccacgccaggcttcctagctcgggccagaagaacatggtcacggcccaaggaagagttgaccctaaccaaaacactggcattgtgatccagaagtgtaggattggtg

SEQ ID NO: 288062 - DNA, 278 bp, Glycine max
  unsure (1)..(278): unsure at all n locations
gagagtagtgtgtggttganagttaagaagtagcaaagatgtttccattcgggcacaagggnccaaaagataaaggggactatggtggttatgcagaagaatgtgttggatatcaacagcatcaccagtgttgacgggatcgtcggaccggnctagacttcttaggcagtgcactcgatacagttacttttttagcctcctccatctccatccaacttattagtgctaccaaggctgatggtgggaaaggaaaagttggaaaggctacaaatttgaga

SEQ ID NO: 288063 - DNA, 257 bp, Glycine max
  unsure (1)..(257): unsure at all n locations
tctaaaagagatctttttctgctctttgaagaaagaagggtctttgcttgattttggagatgtctctgctctcagatctcatcaaccttaacctctccgataccaccgagaaggtgatcgcagagtnatatggatcggtggatcaggaatggacctgaggagcaaagcaaggactctcccaggaccagttagcgacccttcagagcttcccaagtggaatatgatggttccagcacaggtcaagctcctggtgaaga

SEQ ID NO: 288064 - DNA, 274 bp, Glycine max
ttggtgtcaatcttggaaagaacaagacaagtgaagatgctgcgtcagattatgttcaaggagttcatacattgtcccaatatgctgattacttggtgattaatgtttcatcacccaatacccctggtttgcgcatgcttcaagaagaaagcaattgaaggatcttgtgaagaaggttcaagctgctcgtgatgaaatgcaatggggtgaggagggcccacctccattgctggtaaaaattgctccagatttgtcaaaagaagaccttgaagat

SEQ ID NO: 288065 - DNA, 273 bp, Glycine max
  unsure (1)..(273): unsure at all n locations
ttttcctttcgtttcctttcattttccctcactttctcgctccccaaacgcccctctctctcctccaatggccgaccagctcaccgacgaccagatcgccgagttcaaggaggccttcagcctcttcgacaaggacggcgatgttgcattancaccaaggaacttgggactgttatgaggtcacttggtcaaaacccaactgaggcagaactgcaggatatgataaacgaggttgatgctgatggcaacggaaccatcgatttcccagagttc

SEQ ID NO: 288066 - DNA, 280 bp, Glycine max
  unsure (1)..(280): unsure at all n locations
gatntanggntatgatgtcnacaaggacntggacnngccagatanagggtgannagtatncangccncgatcttggnangntcagcttnaaattacagtaggcagaggagagancccggaagaggaangactagagnagatccnaacagtagaagccgggcgagtttgtnnaccatccaaganatgaagcatttgggcacttgaagtnntcagatgttctagcnnatggaatcaaatctgnggcccaagatgtcttgcctgngtngatgcngcagcgntg

SEQ ID NO: 288067 - DNA, 277 bp, Glycine max
  unsure (1)..(277): unsure at all n locations
cctgatttacaagcttggaggcattgacaagcgtgttattgagaggtttgagaaggaagctgctgagatgaacaagaggtctttcaagtatgcctgggtgctggncaaacttaaggctgagcgtgaaagaggaatcaccattgatatgctttgtggaagtttganacaacaaagtattattgcacagttattgatgcgcctggacatagggatttcataagaatatgattactgggacatcccaagctgactgtgctgttcttatcattgatcgacc

SEQ ID NO: 288068 - DNA, 289 bp, Glycine max
  unsure (1)..(289): unsure at all n locations
ggagaagatgatgcgtgattccttggcggagtgcgagcgtgcaccgagccgcggcgagacaaaacgctgcgttgggtcgctcgaggacatgatcgactttgccacctctgttttgggccgaaacgtcgccgttcggactacccagaacgtgaagggtccaagaagagtgtggtggnggggcccgttagggaatcaacggtggtaaagtcacccaatccgtgtcgtgccaccagagcctgttcccttatctgctttactactgccacgcggttcctaaggttcgggtcta

SEQ ID NO: 288069 - DNA, 274 bp, Glycine max
gatcgagataactagaaacagtgtgatgaaaatgaaggtccttgttttcttcgttgctacaattttggtagcatggcaatgccatgcgtacgatatgttccctctccgaatgaacactggctatggtgcccgtactccggagtgaaatgcgcaagttggaggcttgctgtggaagcacacaacatctttggctttgagaccattcctgaagagtgcgttgaagcaacaaaggaatacatccatggcgaacaatatagatcagactccaaaacag

SEQ ID NO: 288070 - DNA, 272 bp, Glycine max
  unsure (1)..(272): unsure at all n locations
gaagaacgctcgctcgcactgtccagatcttaatcaagaggagtgagtnttgtttttccagccatgacgccgctgatcctgcatgctgggaaaaccaacaaaaattcttacaagacactcattgcagccgagtatgctggctccaagttgattttgcccctaattttgagatgggtgtctccaataaaactcctgaatttctcaagatcantcctattggcaaggttcctgtgctggaaacccccgatggtccaatattcgagagcaatgcc

SEQ ID NO: 288071 - DNA, 272 bp, Glycine max
  unsure (1)..(272): unsure at all n locations
gatcgagataactagaaacagtgtgatgaaaatgaaggtccttgttttcttcgttgctacaattttngtagcatggcaatgccatgcgtacgatatgttccctctccgaatgaacactggctatggtgcccgtactccggagtgaaatgcgcaagttggaggcttgctgtggaagcacacaacatctttggctttgagaccattcctgaagagtgcgttgaagcaacaaaggaatacatccatggcgaacaatatagatcagactccanaac

SEQ ID NO: 288072 - DNA, 271 bp, Glycine max
ccagaacaccaagctcatgactcgtctcacctacaccctggacgagattgagggtcccttcgaggttacatccgatggaaccgtgaaattcgaggagaaagacggaattgactatgctgctgtcactgttcagcttcccggggagagcgtgtgccattcctctttaccattaagcagttggtggcatctgggaaaccagacagcttcagtggggagttcctagtgccttcttaccgtggttcctctttcttggaccccaagggaaggggtg

SEQ ID NO: 288073 - DNA, 243 bp, Glycine max
  unsure (1)..(243): unsure at all n locations
cttatttgttctttttttanttttaagagaaaaaacngcttatcacnttacttcnaacnangatgtggttactgctgtgggggatttgtcacctttgttagcgctttctttgttctaaatagtattcaacctgtactctcaggggtggctgttggagcagggtggcagagcactgtagcgtatgtgaacatagggtgttattacctcataggtattccagttggaatagtacttggtaacatt

SEQ ID NO: 288074 - DNA, 277 bp, Glycine max
  unsure (1)..(277): unsure at all n locations
gaagtaaccaacgcaaccacatcactctttctttcaaatctagggtttcctccttctgcaaccatcaatgtcggcaatcgcggctccccaacacagatcctcgaagacagagtcctacgtggacaataagcgcaaggnggatatcgccatgccaacatcgtggccgcacgctcagtcgccaacgcggttcgcaccagtctgggccctaagggcatggacaagatgatctccacctcctccgacgaggtcatcatcaccaacgacggcgccaccatcc

SEQ ID NO: 288075 - DNA, 234 bp, Glycine max
  unsure (1)..(234): unsure at all n locations
gttctattcttcttccacaatgggtatctctcgtgattccatgcacaagaggcgcgccaccggcggcaagaagaagtcttggaggaagaagagaaagtatgagctgggaggcagccagcaaacacaaagctatcaagcaacaagacggtgaggnggattagggttcgcggtnnanacgtgaagtggcgtgctttgaggcntgnggccgggaatactcttgggggagtgaggctg

SEQ ID NO: 288076 - DNA, 271 bp, Glycine max
  unsure (1)..(271): unsure at all n locations
cgacattcattcatctatggctacccttattgctcccagcaaccactctccccaagaagacgctgaggctctcagaaaggcttttgaaggatgggggactgatgagaaaactgtcatagtaatattgggtcatagaactgttatcagaggcagcaaatcagaagantctatgaggaaattttccaggaggatcttgtgaaacgcctagantctgagatcaaaggagactttgagaaagccgtgtaccgatggatactagaacctgcagatc

SEQ ID NO: 288077 - DNA, 272 bp, Glycine max
  unsure (1)..(272): unsure at all n locations
ctttctcttccttctcatcattctcatattattgtcgccacttcgacctcaatcaccctcgcgccctcgctcttcccttcctggtnnccgacaatgtcgactcctgctaggaagaggctgatgagagacttcaagaggctgcacaagacccgcctgcagggatcagcggtgccccccaggataacaacacaatgctgtggaangctgtcatatttggtcctgatgatactccatgggatggaggcacgttcaagttgactctccagtttatg

SEQ ID NO: 288078 - DNA, 270 bp, Glycine max
  unsure (1)..(270): unsure at all n locations
gatcgagataactagaaacagtgtgatgaaaatgaaggtccttgtnttcttcgttgctacaantttngtngcatggcaatgccatgcgtatnatatgttccctctccgaatgaacactggctatggtgcccgtactccggggtgaaatgcgcaagttggaggcttgctgtggaagcacacaacatctttggctttgagaccattcctgaagantgcgttgaagcaacannggaatanntcccnnggcgancaatatancngantcnnnac

SEQ ID NO: 288079 - DNA, 272 bp, Glycine max
  unsure (1)..(272): unsure at all n locations
ggagccacaacactggatgaatataggaagcacattgaaaangatccagctttggagaggcgattccagccagttaaagtgccagagccaactgtcaatgaaaccatacaaatactgaaaggactcagagaacgctatgaattcaccacaagcttcattacacagatgatgctcttgtagctgctgcccagctatcacaccaatatattagtgatcgatttttgccagacaaagctatagatttaattgatgaagcaggttctcgagtccgg

SEQ ID NO: 288080 - DNA, 265 bp, Glycine max
  unsure (1)..(265): unsure at all n locations
caaacaaccttctttctttttctgtgagcctttctttcaggttcttaacttganncagtgtgcagtgtccaaatcataagggtagttgcaaattgcaatggctaagcatgatgttgagggtggttccttctctgaaaggactaccatgatcctcctccagcaccgttgattgatgctgaggaactcacacagtggtccttctacagggctttgattgctgagttcatgccacaatgctcttcctttacatcacagtgctcactgt

SEQ ID NO: 288081 - DNA, 257 bp, Glycine max
  unsure (1)..(257): unsure at all n locations
ggtgttctccttctagaaaatgtgacggttttacaaggaggacgaaaagaatgaccccgagantgcaaaaaagcttgcctctctggcagatctgtatgtgaatgatgcatttggtactgctcacgggcacatgcatcaacagagggtgttactaaatacctgaagccatctgttgctggttttcttttgcaaaaggaacttgattaccttgttggggcagtatcaaaccccaaaaggccatttgctgccattgttgg

SEQ ID NO: 288082 - DNA, 288 bp, Glycine max
caaagagcttgagaaggagcccaagtttttgaagaacggtgatgctggttttgttaagatgattccaaccaaacccatggttgttgaaactttctccgagtatcctccacttggtaggtttgctgttagggacatgcgtcaaactgttgctgtgggagtcatcaagaacgttgagaagaaggatcctaccggagccaaggtcaccaaggctgcccagaagaagaagtgaatcgtgcgggctggttcatcaggggatgttggttacaataaatgttggtttctttctgt

SEQ ID NO: 288083 - DNA, 291 bp, Glycine max
  unsure (1)..(291): unsure at all n locations
gggactctaggtgatatatgggaaactgtctctggaagtgatcttgtgatgctgttaatttctgattctgcacaggctgataacncatgagaagatattgtctcacatnaagccaaacagtatacttgggctttcccatggttttcttcttgggcatttacaatcattgggacttgactttccaaagaacattagtgtacattgctgtgtgcccaaagcgaatgggtccatctgtaaggaggctctatgtccaaggcaaagagataaatggtgctggnattaatgcaagtt

SEQ ID NO: 288084 - DNA, 288 bp, Glycine max
  unsure (1)..(288): unsure at all n locations
caatctccgaactccgaagcccttcagcaaccatgtcgaggagaaaggttagggagccaaaggaggaaaatgtcactcttggtccagccgttagagacggtgaacatgttttcggcgtggctcgcatctntgcctccttcaacgacaccttcatccatgtcactgatttgtctgggagggaaacccttgttcgnatcactggtgggatgaaagttaaagctgacagagatgaatcatctccatatgctgctatgcttgcagcacaggatgttgctgccagatgtaagg

SEQ ID NO: 288085 - DNA, 292 bp, Glycine max
  unsure (1)..(292): unsure at all n locations
atttttcttcctcagtagtgtcatttacgcttctcttctctgcagcaactatgcctaaccctaaggtcttcttcgacatgaccatcggcggtnaatctgctggccgcatcgngatggagctctangccgacgtcactccccgnnanngccgagaaatttncgcgcgctttgtanngncgagaagngcgtagggcggancagcaagancctcnactacaagggctcgtccttccaccgcgtgatcccgagntncatgtgtccagggtggcgantcaccgccggaaaaggaacc

SEQ ID NO: 288086 - DNA, 288 bp, Glycine max
  unsure (1)..(288): unsure at all n locations
tccagcagccgtcacagaaaaanggctggttgcaatatcaatgggttgccctaagcttcactcattgctctatttctgccaccagatgacaaatgctgcactcataacggtggctaagaactgcccaaattttatccgattcangctgtgtatccttgatgcaacaaaacccgaccctgatacaatgcagccactggacgaaggttttggcgcaattgttcagtcttgcaggcgactcaggcgcctatccctctcggggcaattgaccgancaggttttcctttacat

SEQ ID NO: 288087 - DNA, 281 bp, Glycine max
  unsure (1)..(281): unsure at all n locations
ccatatcattagaggtgnagctgatgtgatgctttgtggaggctcagatgctgctatnataccaattggtttgggaggctttgtggcatgcagggcactctcacaaaggaatantgatcctaccaaagcntcangccttgggactnaancgtgatggatttgtcannggtgaagggcttgcagtctgccngtagaggaactngagcatgccaaggaaagagngtgcaacatatatgnngnatcctggtggaagtttcacctgtgatgcatatcatgtnatg

SEQ ID NO: 288088 - DNA, 291 bp, Glycine max
  unsure (1)..(291): unsure at all n locations
gaagaaccacagcttcaagcgagtgacatccaccagccatgggtcgtatgcacagccgcggtaagggtatatcctcttctgctttgccctacaaaaggacaccccctagctggctcaagatctcttcgcaagatgtggaagaaaatatctgcaagtttgcgaagaagggtttgaccccgtctcagattggtgtcattcttcgagattctcacggtattgctcaggtcaacagcgtctntggcagcaaaatccttcgcatcctcaaagctcacgggcttgcgcctganattc

SEQ ID NO: 288089 - DNA, 292 bp, Glycine max
  unsure (1)..(292): unsure at all n locations
gtctctccgcagcagccacacttcttcgccgtttcagctgaagagncatccgcaggtaangcaatggttaagcataataatgttatccccaatgggcacttccggaaacactggcaaaactatgtgaagacttggtttaatcaancagcccganagatcagaagacggttggctcggcagaagaaggctgtcaagattttccccangcctactgctggatctctcaggcctattgttcatggccagactctgaaatacaacatgaaagtcagagccgggagaggatttcatg

SEQ ID NO: 288090 - DNA, 286 bp, Glycine max
cactcataacacaaagcacaaagcaaagctcatccttgagttaaaaaatggcagcagcttcttccatggctctctcatccccatccttggctggcaaggccgtgaagctgggcccatcagccccagaagtgggaagggtgagcatgaggaagaccgtcaccaagcaggtctcctcaggaagcccatggtacggcccagaccgagtcaagtacttgggcccattctctggcgagcccccgtctacctaaccggtgagttcccaggcgatacggctgggacatgctgg

SEQ ID NO: 288091 - DNA, 286 bp, Glycine max
gtaacttgttgagagttgctgcttggaagaaaggctgtttaatggtcaagattgtgatgtctgggaatgcagcagtcaaaaggagtgattgggcctcattggtacaagtgtttttaacaaacagcaacagtacagagcattttgatgcatgtaagtggacaaaatcagaaccacattcctgggaattgatcttcccaatagaggtatgtggtcccaataatggttttgaaatgtggagttctgagtgggcaaatcaaacttcatggcattgagtttccttattgac

SEQ ID NO: 288092 - DNA, 288 bp, Glycine max
  unsure (1)..(288): unsure at all n locations
gttcctgaaatacaacagggacggncgatctcctcttctcctgcnccaaggacnacaacccaaccgtctggtttgccgacaatggcgaacgcttgggcacttatcgcggccacaanggcgccgttnggacctgcgacgtctcaagagattcggttcgtctgatcangggtagtgncgatcagancgccaagctatgggacgtgcaaagcggtctgcaattgtacaccttcaatttcgattcccctgncagtccgtcgatttctccgtcngtgataggctggcgntatc

SEQ ID NO: 288093 - DNA, 287 bp, Glycine max
cttttgagttgcattgttgcatcaccgcaagtccacaacatggctgccactgccgctgcaggcatagcttccttgttttcttcttctattaacagtgtcaaatgtcttcgttcctccaagaactgctccattatagacccccttataaccacagtgccctcaaaccgtggcatgtttgtgtcacacttggtggaacctttgtccattgggggtgccattaattcgcacaagttgtgggggctagaatttctgctgctgttgcacaagaagaggctgttgttgtggtg

SEQ ID NO: 288094 - DNA, 290 bp, Glycine max
gggataggggttaatgttgaccctagtttgccaccagaagatgtaacatttgctgtggttcccactttctcttactttgagttcataccactccacaggaatgaaaaaaatttcagctcaggaggtgatgatttcattgaagacaagcctattccactgtctcagatcaaagttggacaagagtatgaagtagtcctcacaactttcaccggactgtacaggtgcaggttaggggatgtggtggaagtggcaggcttccacaatgggaccccaaagttgaactttgtgtg

SEQ ID NO: 288095 - DNA, 290 bp, Glycine max
  unsure (1)..(290): unsure at all n locations
gtctccagggaaccactgtgagggttgaatttggtgacgcaaccaccactgctgaccccactgatgcactcaccgtctgcagggctttcctaacacttatggacntcctttggctcactttctcagggcactgccaaagtcctgatgctcagatcataactgagttcctcctattagggtggggattgtcttttgtgggagacaatctcctggagggcataatgtcatttggggtatccacaatgctctcaaaattcacaatcccaacagtgnttgcttggatttcttgg

SEQ ID NO: 288096 - DNA, 285 bp, Glycine max
  unsure (1)..(285): unsure at all n locations
gttcaaatacagtggtgcctcagctgctcttcactgtagacccttcactacacttgtcaagagcttctagcattgngatgttgattgcatatgttgtctacattntctttcaactgtggacacacagggagttatttnaagaagaagatgacggtaaagatggcgaggatggttcagnagaacaagctgtgattngattatggagtggcattgcttggttggttggnatgactgcattcattgctgtgntgnctgaatatntggtggatacaatngaggatgcat

SEQ ID NO: 288097 - DNA, 195 bp, Glycine max
  unsure (1)..(195): unsure at all n locations
ggggctcagcatttgagtgaggaactgaaacgtaggttctaccaagaactggtgcaagtcccagaagaaggccttcaccaagtactctaagcagtatganactgaggagggaaaganaaacattgaggcgcacnggagaaactgaagangtatgctactgtggttcgtgttttggctcacactcagatcaggaaa

SEQ ID NO: 288098 - DNA, 285 bp, Glycine max
  unsure (1)..(285): unsure at all n locations
gaagggcctaacagcaacattaacagctgcaagaccaaactttttggggtgtcgctgcagtccaagaaaagggtgcacccggattatggatctaatccagagaccaacaaggctcgtttggttttggaaaaggatgacttgggcttgaatctcatgcctccatccacttgttagttccactactgatgattaattctaagtatgatatgatatcccaagcnagctatatagctgcttaaattaattttcttttactacttgctttgatttgttttctatttaact

SEQ ID NO: 288099 - DNA, 288 bp, Glycine max
  unsure (1)..(288): unsure at all n locations
tgttatttctcagcgcgtaaagcatgggctttgttggtggagaaaaccacgagtggtcgcgagtacaaggtcaaggacctttcccaggccgacttcggccgcctcgagatcgagctggccgaggttgagatgcccggcctcatggcctgtcggaccgagttcggcncctcccagcccttcaagggggcccgcatcaccggctccctccacatgaccatccagaccgccgttctcattgagaccctcaccgcccttggcgccgagntccgctggtgctcctgcaacatc

SEQ ID NO: 288100 - DNA, 283 bp, Glycine max
  unsure (1)..(283): unsure at all n locations
ctatgatggccaagtgtgatccccgccatggcaaatacatggngngctgtctcatgtacagaggngacgtagtgcctaaagatgttaatgcagcngttggnattatcaanancaagcgcactatnccantttgttgactggtgccccancgggttcaagtgtggaatcaattnccagcctccgactgtngttccangtggtnatctgncaaggttcananggccgtgtgcatgatctccaattccaccagtgttgttgangtcttctctcgcatcgagaaaaa

SEQ ID NO: 288101 - DNA, 284 bp, Glycine max
  unsure (1)..(284): unsure at all n locations
caagtaggctatactaaggtgaaaaangagagatggcagctgcaacatctagtgctgtgttaaacgggtttggatctcacttcttgtgtggaggaaagaggagccatgcccttcttgctgctagcattggagggaaagttggtgcttctgttagtcctaaaagagttattgtggcagttgctgctgcaccaaagaagtcatggatccccgctgtaaaaggtggtgggagtttcatagacccagaatggcttgatggctcgctaccaggtgactatggttttnac

SEQ ID NO: 288102 - DNA, 283 bp, Glycine max
  unsure (1)..(283): unsure at all n locations
gttgatcgagataactagaaacagtgtgatgaaaatgaaggtccttgttttcttcgttgctacaantttngtagcatggcaatgccatgcgtacgatatgttccctctccgaatgaacactggctatggtgcccgtactccggaggtgaaatgcgcaagttggaggcttgctgtggaagcacacaacatctttggctttgagaccattcctgaagagtgcgttgaagcaacaaaggaatacatccatggcgaacaatatagatcagactccaaaacagttaac

SEQ ID NO: 288103 - DNA, 285 bp, Glycine max
gtcgtgaagcccggtatggtggtgacttttggtcccactgggctgacaactgaggttaagtctgttgagatgcaccatgaggctctcacagaggctcttccaggtgacaatgttggctttaatgtgaagaatgttgcagtcaaggatctcaagcgtggttttgttgcatccaactccaaggatgaccctgccaaggaagctgccaacttcacatctcaagtcattatcatgaaccaccctggccagattggaaatggatacgcaccggtattgacagcatgtgag

SEQ ID NO: 288104 - DNA, 219 bp, Glycine max
  unsure (1)..(219): unsure at all n locations
cgaanncggagcacagcatcccaaaaccctagctcgcgttctgctttcgtcttttacatcaggatgnnagtctcaggtgaagcacgcacttgttgtcaaagttactgggtcgtactggatccagaggacaagtaacccaggttagagtgaaatttttggatgatcagaaccgtcacatcatgaggaatgtgaaaggacctgtgcgagaaggagacattc

SEQ ID NO: 288105 - DNA, 290 bp, Glycine max
  unsure (1)..(290): unsure at all n locations
tgttgatcgagataactagaaacagtgtgatgaaaatgaaggtccttgttttcttcgttgctacaantttggtagcatggcaatgccatgcgtacgatatgttncctctccgaatgaacactgggctatggtgcccgtactccggaggtgaaatgcgcaagttggaggcttgctgtggaagcacacaacatctttggctttgagaccattcctgaagagtgcgttgaagcaacaaaggaatacatccatggcgaacaatatagatcagatccaaaacagttaaccaacaa

SEQ ID NO: 288106 - DNA, 282 bp, Glycine max
  unsure (1)..(282): unsure at all n locations
gaagcgagttgcaactcgagcgagtcaacgtctacaatgcaaccctatcagtgcaccagctcgttgagaatgcagangaatgcatggttttggataacgaagctctctatgacatctgcttccgcacgcttaagctcaccactccaagctttggggatctgaaccatctaatttcagccaccatgagtggtgtgacatgttgtcttcgtttccctgggcaactcaactgcagatcttcgcaaacttgctgtgaatctcattcccttccctcgtctgcatttt

SEQ ID NO: 288107 - DNA, 280 bp, Glycine max
  unsure (1)..(280): unsure at all n locations
gcgaantgttctgttatccccgtgaggagggggtactgggggaacaagatcgggaagccccacaccgtcccgtgcaaggttacggggaagtgcggctccgttaccgttaggatggttcccgcgccgagaggttcggggatcgtggcggctagggttcccaagaaggtgcngcagttcgcggggattgatgatgttttcacctcctccagaggatccaccaagaccctcggcaattcgttaaggctattttgattgcttgatgacaacctatggattcctg

SEQ ID NO: 288108 - DNA, 282 bp, Glycine max
  unsure (1)..(282): unsure at all n locations
gtggaatgaagggtggtagcaaggttgttgttcagccccatagacatgacggtattttcattgccaagggtaaagaagatgctctcgttaccaagaatcttgttcccggtgaagctgtttacaatgagaaaaggattactgttcagaatgaagatggtaccaaagaggagtacagagtttggaatcctttccgatccaagttggctgctgccatccttggtggagttgncaacatatggattaaacccggagccagagtctttaccttggagctgcttctgg

SEQ ID NO: 288109 - DNA, 278 bp, Glycine max
  unsure (1)..(278): unsure at all n locations
tgaggttcaggctcagatggaaacaaattngtttaaattgtctcttgatgatgttgaaantcctaaaggttccatcttggatctaaanttnctcaatctaaaattgcacttcccaagaacacagttggnggaaccattctgcgtagtgatctantggcanatttnttgacagagggcaattttagagcaagtgttgatttgcagcgnacttcatcgtattanaggaatgattaanatggtggnacagttggtattgccgnagaatacaggtatagcat

SEQ ID NO: 288110 - DNA, 277 bp, Glycine max
  unsure (1)..(277): unsure at all n locations
cagaagtattctaaggacgagagtgtcactnttgctatgtatggagatggcgctgccaatcagggacagctctttgangcgcttaatatcgccgcgctttgggatcttcctgctatntnggtctncgagaataatcactatgggatggggactgcggagtggagagctgccaagantcctgcttatnanaagcgtggggattacgtgcctggcttgaaggttganggtatggatgttcttgctgttaaacaagcttgcaaatntgcnaaggaacatg

SEQ ID NO: 288111 - DNA, 280 bp, Glycine max
  unsure (1)..(280): unsure at all n locations
cttgtccaagtgggtcatggtgatttgaaagataagncatggtggcaaaanatgcaaactccgtgaagagttgattgangcctcggctaccctcgtatggatcgcttcagcccttcatgcngctgttaactttggacagtatccntatggaggtttaatcctaaacaggccaaccattagcaggagattcatgcctgagaaagggtctgctgagtatgcagctttggctaagaaccctgagaangagtttttgaagaccatnactngcaagaaggagacc

SEQ ID NO: 288112 - DNA, 280 bp, Glycine max
  unsure (1)..(280): unsure at all n locations
ccatcatcatggccacctctgctattcagcaatcagcattcgcaggtcaaactgctctgaagcagctcaatgagttggtccgcaagaccggtggcgccggcaaaggtcgcaccaacatgcgccgtaccgtcaagagtgctcctcagagcatttggtaactcaacattatgattnttagtgttatnattgttatggaatgtaactataagttggtatgcatgaacaaaacaacaggtatggccctgatcgtcccaagtactgggtccattctcagagcaga

SEQ ID NO: 288113 - DNA, 282 bp, Glycine max
  unsure (1)..(282): unsure at all n locations
agccagcatntgacgacagacactaactaaacctacggctggtttaggnctggtctccaaccacgtttaggnttagcttgagcgatgtcgggcctgtataactccaacttctcaccatcgagagtgcttctcctcagattagaaccaacccagaagtcgacagtcagtaccttacggagttgctggcagagcatcagaagtttggtcccttcatgcaagcccttcccatatgcagtcgtctcttgaatcaagaaatattaagagtttctggaatgctgtcca

SEQ ID NO: 288114 - DNA, 270 bp, Glycine max
  unsure (1)..(270): unsure at all n locations
cagaacttttatcaaccagttgcctgattggagcatgcttcttgctgctatcacaacaattttcttggccgctgaaaagcagtggatgatgcttgattggaagccacggcgacctgacatgcttattgacccctttgggataggaaaaattgttcaggatggtcttgtgttccgtgaaaacttttctattagatcatatgagattggtgctgatcgtaccgcatctatagaaacagtaatgaaccatttgcnaganactgcacttaatca

SEQ ID NO: 288115 - DNA, 267 bp, Glycine max
  unsure (1)..(267): unsure at all n locations
gcgaanagaatggctcncaagggtttaatctttttggctgtgttatgcttctcagcactgtcactgagtcgttgtctttcggangagaatggacttgttatgaacttctaacaaggaatcatgccctcaggctgcagacatcatcaaagaacaagtcaagcttctctacaagggccaaagaaaacngttttcccgggtcncanaaaatattncncaanntgcncnacacaggntgaggggcccanantntggncggaacccccaaaa

SEQ ID NO: 288116 - DNA, 265 bp, Glycine max
gttaccactcatggcagagcttgagagtcctaatgttatgcctaagcttatatcatttctctcatctctcctcaaaagggtagctgaatctaatgatcttaaccagcaacaactcctacaccaaaaggtctcagttttccatgtcttgactcgccccaccatctcaattcaaagctaccttgagagaattttcaagtatgccaactgcagtccatcatgcttcattgttgcatacgtctaccttgatcgcttcactcaaaggcaa

SEQ ID NO: 288117 - DNA, 261 bp, Glycine max
ggccagccacgatcttcgattcttcgagttgaacacaggcgctaagataccttccgttggtttgggaacgtggctcgctgaacctggcgttgttgctcgcgccttggccactgcaataaacgttggatatcggcatatagattgtgcgcaaatttatggcaatgaaaaggagattggtgctgccttgaagaagttatttgctgatggtgtagttaagcgtgaagatatgtttatcacctccaagctatggtgtaatgatca

SEQ ID NO: 288118 - DNA, 260 bp, Glycine max
  unsure (1)..(260): unsure at all n locations
tcatctctcggaaggtaaacaaaatcagtggctcaagacgtcttgcccgtgttgactgatgcgtttgatggcaatcttttgagccttgagtttgataactttgctgaagtgcgcaaactctatgaaggtggagttacactacctacaaactttcttagcaagatcgcccctataccagtngtcaaggaaatttttcgaactgatggcgaacagttcctcaagtatccaccacctaaagtgatgcaggtggataagtctgc

SEQ ID NO: 288119 - DNA, 262 bp, Glycine max
  unsure (1)..(262): unsure at all n locations
cacaccccattctcccaaactaacaaacaaancccagggagccaccaaccatggcttccaagctctgcgactcatgcaaatcagccactgctaccttgtactgccgccccgacgcggccttcctctgcggcgcctgtgactctaaggttcatgccgccaacaagctcgcatcgcgccacccgcgcgtcgtgctctgcgaggtgtgcgagcaggcgcccgcgcatgtgacctgtaaagccgacgccgccgcgctctgccttgc

SEQ ID NO: 288120 - DNA, 260 bp, Glycine max
  unsure (1)..(260): unsure at all n locations
tttatctccgcactccgtcttcatcaatcagcatcaccaccgctccaacacaggggaaaatgagggagatccttcacgttcagggagggcaatgcgggaaccagatcggttcgaagttctgggaagtggtgtgcnacgagcacggcatagatccgacggggaagtacgtcggaaactcagatctacaactcgagcgcgtgaacgtgtactacaacgaagcttcctgcgggcggtttgtcccacgcgcatgctgatggact

SEQ ID NO: 288121 - DNA, 265 bp, Glycine max
caaaacactcataacacaaagcacaaagcaaagctcatccttgagttaaaaaatggcagcagcttcttccatggctctctcatccccatccttggctggcaaggccgtgaagctgggcccatcagccccagaagtgggaagggtgagcatgaggaagaccgtcaccaagcaggtctcctcaggaagcccatggaccggcccagaccgagtcaagtacttgggcccattctctggcgagcccccgtcctacctaaccggtgagttc

SEQ ID NO: 288122 - DNA, 261 bp, Glycine max
tttctccaaactgcaccagcttgtggggaaaggcctcaaaattgatggtgtcatcagccaaatttccaaatgctatgatgcatgatagttcagtgtctacaataccaggtgattttgtcattggtgtcaagttgacaaccataaacaatatgtgtgcatatgggctcaatcctggtatttcaggttctcgtcttttgggcaccattcctcagtccatttcacagcaaactgtttggaatcaaatggcaacagtgagaacac

SEQ ID NO: 288123 - DNA, 262 bp, Glycine max
  unsure (1)..(262): unsure at all n locations
tgcctagcacaatgatggctcagataaataccctttttgtgaagcaaggtactactctagacagacaccttggaagcttcaaaattcccccagcaagtttggctgcctttgttaccgtgtccttgcttgtntgcattgtgctctatgaccgtttctttgtgaagatcatgcaaaggtttaccaagaacccaagaggcattacccttcttcagaggatgggaattggccttgtaatccacacattgatcatgatcattgcatc

SEQ ID NO: 288124 - DNA, 262 bp, Glycine max
cagcaacctgtttatttgagtggtgaggttgtgagcaaccatgatgagctaatgtcaaacttttttgcacaaccagatgcccttgcctatgggaagaccgctgaacaattgcaaaaggagaatgttcctccacatcttgtgccacacaagacattctcaggcaaccgaccttctctcagccttctgcttccatcattgaatgcttataatattggacagttgttggcaatctatgaacacagagttgctgtagaaggtttta

SEQ ID NO: 288125 - DNA, 261 bp, Glycine max
ttttgttgcactctatggcctcagagacagaagctgctcttgctgccactccctctgatggtcccaccgtatttgacaagatcatcaataaggaaattccttctactgtggtctatgaggatgataaggtccttgcctttagggacatagatccacaagctcctacccatattctaatcattcctaaagttagggatgggttaactggtctgtccaaggctgaggagaggcactgtgagattctaggtcgacttttgtgca

SEQ ID NO: 288126 - DNA, 267 bp, Glycine max
  unsure (1)..(267): unsure at all n locations
tttaatccaaacccgtgttctgatgcatggagtttggaatttctgaagcgtaccggatttcantgtgatatcatttgtgtcactggatggactgccaccccaancgcaggatgttcaggttacaattgattggtttatttcctctcaggaatgtgttcccagaacctattgtgttttaaatccacaaaatccttttgtgttaaataggtggatgggaaaactgatttcccccagggcattcccgaantgttaagagaatgcctccnt

SEQ ID NO: 288127 - DNA, 261 bp, Glycine max
  unsure (1)..(261): unsure at all n locations
ccaattccaattattaacccaccaaccacaccagggaagggagggaacactccatgcccaccaccaaagtctcctgcgcaggctacgtgccccattgacacgctcaaacttggtgcctgtgtggatcttcttggagggttggttcacnttggtttgggtgaccctgttgcgaaccagtgctgccccgtgcttcaagggcttgttgaggttgaagctgcggtntgtctttgcaccactcttaaactgaagcttctcaacctc

SEQ ID NO: 288128 - DNA, 260 bp, Glycine max
  unsure (1)..(260): unsure at all n locations
tactctcntgactggnctgagtgtccttttgttcatcccggagagaatgctcggaggagagaccccaggaagttccattacagctgtgtgccgtgccctgattttagaaaaggggcttgcaggcgtggagacatgtgtgaatatgctcatggggtgtttgagtgctggctgcacccggctcagtatcggacacgcctctgcaaagatggcaccagttgcaatcgaagggtgtgtttttttgctcacactgcagaggagct

SEQ ID NO: 288129 - DNA, 259 bp, Glycine max
  unsure (1)..(259): unsure at all n locations
ctttcaccgtttgtngtttccagatttgctgcagctttgagagatttgaatgtttgggtcatgaatgtggttacaatagactccccagatactcttcctattntttatgaacgaggtctttttggtatatatcatgattggtgtgaatcatttagcacctatcctaggacctatgatctcctccatgctgatcatttgttttcaaagcttaagaaaaggtgcaatttggctgctgtagtggctgaggctgatcggattc

SEQ ID NO: 288130 - DNA, 260 bp, Glycine max
  unsure (1)..(260): unsure at all n locations
cttcttggatttcttctgggacttttcttaatggtcactcacgtcnnggggtatggttttggaggttggaccaatgcacatgccaccttctatggaggtggtgatgcttctgggacaatgggtggggcttgtggttatggaaatctgtatagccnaggttatggaactgatacaacagcactgagcactgctctgttcaacaatggcttgagctgtggtgcatgctatcaaattaantgtgtgaatgatccacagtgggc

SEQ ID NO: 288131 - DNA, 239 bp, Glycine max
  unsure (1)..(239): unsure at all n locations
atcagcattcacataggtcaggacgggatccaggttggacnctcctgctgggaactctaangcctggaacatggcatccagcccgatggcatgatgccaagtgactcctccttcggtgtagcccacgacgccttcaacaccttcttcagcgaaaccggatccggcaagcacgtccctcgcgccgncttcgtcgatctcgagcccaccgtcatcgacgaagtccgttgtggcacttaccg

SEQ ID NO: 288132 - DNA, 261 bp, Glycine max
  unsure (1)..(261): unsure at all n locations
gcttgctgtggaagcacacaacatctttggctttgagaccattcctgaagagtgcgttgaagcaacaaaggaatacatccatggcgaacaatatagatcagactccaaaacagttaaccaacaagcttacttttatgccagagacctcgaagtccatcccaaggacacatttgtgntcagtatagatggcaccgtactctctnatantccatactacaanaaacatggatatggggtggagaaatntaattcgaccttgta

SEQ ID NO: 288133 - DNA, 263 bp, Glycine max
  unsure (1)..(263): unsure at all n locations
actagccgcagcacgaggagcagcctcaggaggagaaggatntctcacaggaagttcgagcacccaaggcacggttcactgggatttcttcccaggaagcgtgctgctcgtcacaggggaaaagtgaaggcattccccaaggatgacccatccaaggcacccaagctcactgcattcttgggttacaaggcacgtatgactcacattgttagagaggtcgagaagccaggatcaaagcttcacaagaaggaaacttgtgaggc

SEQ ID NO: 288134 - DNA, 184 bp, Glycine max
tgattgaagaagatgccgatcagaaacatcgccatcggaaggcctgaagaggctactcaccccgacacgttgaaggcggggttggctgagttcatctccaccttgatcttcgtgttcgccggttcaggttccggcatcgcctacaacaagctcaccgacaacggcgccgccactcccgccggcc

SEQ ID NO: 288135 - DNA, 266 bp, Glycine max
  unsure (1)..(266): unsure at all n locations
ctcgagataactagaaacagtgtgatgaaaatgaaggtccttgttttcttcgttgctacaattttngtagcatggcaatgccatgcgtacgatatgttccctctccgaatgaacactggctatggtgcccgtactccggaggtgaaatgcgcaagttggaggcttgctgtggaagcacacaacatctttggctttgagaccattcctgangagtgcgttgaagcaacaaaggaatacatccatggcgaacaatatagatcagactc

SEQ ID NO: 288136 - DNA, 259 bp, Glycine max
  unsure (1)..(259): unsure at all n locations
caggggctccaattcctactctncngccgcagatctctcagggcttgcatcttctcaggtaagttgtgaagatgtacacatcaaggaagcnaatccacaaggataaggatgctgaaccaactgagtttgaagagtcagttggacaggcattgtttgatctggaaaataccaaccaggagcttaaaagtgatctgaagganttatacataaactcagctgtgcaagttgatgtttctgggaaccgcaaggctgttgttat

SEQ ID NO: 288137 - DNA, 261 bp, Glycine max
  unsure (1)..(261): unsure at all n locations
cgaaacaganagtggtttcagtgagtgatcggtgttcacttgatccttcataagnnnnnnnnnnnnnnnnnnnncatcaccgttgattgaagaagatgccgatcagaaacatcgccatcggaaggcctgaagaggctactcancccgacacgttgnaggcggggttggctgagttcatctccaccttgatcttcgtgttcgccggttcaggttccggcatcgcctacaacaagctcaccgacaacggcgccgccactcccg

SEQ ID NO: 288138 - DNA, 115 bp, Glycine max
  unsure (1)..(115): unsure at all n locations
tgagtttgttgatcgagataactagaaacagtgtgatganaatgnnggtccttgtnttcttcgttgctncaattntggtagcatggcaatgccatgcgtacganatgttccctct

SEQ ID NO: 288139 - DNA, 261 bp, Glycine max
  unsure (1)..(261): unsure at all n locations
gcaataactcagccacagccacaacacacaaacacaaacnccttcgttcctctctcgttcccttcttcaattcgatcaaacacagaatagtacttttttattatgatggccgtggcccgaaaggaaatggaccggatcaagggcccgtggagcccggaggaggacgaggctcttcagaagctcgtggagcggcatgggcccagaaactggtccctcatcagcaggtccattccgggccggtctgggaaatcgtgcaggcgc

SEQ ID NO: 288140 - DNA, 257 bp, Glycine max
  unsure (1)..(257): unsure at all n locations
gccatgaaccacacagatttcattatcaccagtaccttccaggagattgctggaagcanggacactgttggacagtatgagtctcacacagcctttacccttcctggactctaccgtgttgtgcacggcattgatgtctttgatccaaaattcaacattgtctcccctggagctgatcaaaccatttacttcccccccaccgaaactagccgtagttgacctccttccaccccgaaatcgaagaacttctttacagc

SEQ ID NO: 288141 - DNA, 260 bp, Glycine max
  unsure (1)..(260): unsure at all n locations
gcagaaagcaagctcatcctagagttttaaaaatggcagcagcctcctccatggctctctcttccccatccttggctggcaaggccgtgaagctgggcccatcagcccccgaagtcgggagggtcagcatgaggaagaccgtcaccaagcaggcctcctccggaagcccatggtacggcccagaccgcgtcaagtacttgggcccattctctggcgagcccccgtcctanctcactggcgagttcccaggtgactacggc

SEQ ID NO: 288142 - DNA, 264 bp, Glycine max
  unsure (1)..(264): unsure at all n locations
ccaaactcacaaattctcaaatccaaatccnatnccaattccaattcccaatcttctcaaaccctaattcctcatcttgaaaatgagagnnatcttgcacatccagggagggcaatgcgggnancagatcggagcgaagttctgggaggtgatatgcgacgagcncggcatcgaccacaccggaaagtacnatggcgactactgaactccaatnggaacgcancaatgtntattacaacgangcgagtggcggcangtacgttt

SEQ ID NO: 288143 - DNA, 257 bp, Glycine max
  unsure (1)..(257): unsure at all n locations
ccagaacaccaagctcatgactcgtctcacctacaccctggacgagattgaggntcccttcgaggttacatccgatggaaccgtgaaattcgaggagaaacacggaattgactatgctgctgtcacncttcagcttcccgggggagagcgtgtgccattcctctttaccattaagcagttggtggcatctgggaaaccagacagcttcagtggggagttcctagtgccttcttaccgtggttcctctttcttggacc

SEQ ID NO: 288144 - DNA, 229 bp, Glycine max
  unsure (1)..(229): unsure at all n locations
aatggcaccgaagcagaccaaggctgagaagaagatcgcttacgatgcgaantgtgcgacctaatggaggagtacggccagatccncgttgtgaactccgataacgtgggatcgaaccagctccagaacattcgcaagggtctccgtggcgactccgtcgtcctcatggggaagaacaccatgatgaagcgctcagtcaggatgcacgctgagaaaaccggaaacaacg

SEQ ID NO: 288145 - DNA, 260 bp, Glycine max
  unsure (1)..(260): unsure at all n locations
ccgataccgtttctttcaccttcaacaagttcaacccagtccaaccaaacattatgctccaaaaagatgctagtatttcatcctctggggtgttacaactcaccaaagttggcagcaacggcgtgcccacctcgggatctctcggtcgtgccctttacgctgccccaatccagatttgggacagcgaaaccggcaaggtngccagctgggctacatcctttaaattcaacattttcgcacccaacaaatcaaatcngctg

SEQ ID NO: 288146 - DNA, 257 bp, Glycine max
ctttcactcaaaagttctctccgttatggtgaaaatcctcatcaaaaagctgcattctatattgacaaaagcatttctgaggttaatgctggtggaattgctacagccatccaacaccatggaaaggagatgtcatataataactacttggatgctgatgctgcttggaactgtgtatgcgagtttaggaaccccacgtgtgtagtggtgaagcatactaatccatgtggggtagcatcgcgtgatgatattcttga

SEQ ID NO: 288147 - DNA, 259 bp, Glycine max
  unsure (1)..(259): unsure at all n locations
cttcctcaccgattgcnagaatggaatttcgatgctcagtcatctcttttaccattctcttctctcttgctcttgcaggagagagccatgtccncgcatcgctacctgaggaagntattgggaagctgtttggccaaacactcccattcccactgcactgcgagagcttctaaagcctctccctgcaggtgttgaaatcgntgaactccctaagcaaattgatgatacacagtacccaaaaacattcttctataaagaa

SEQ ID NO: 288148 - DNA, 266 bp, Glycine max
  unsure (1)..(266): unsure at all n locations
gactgatcgcattttctttgccaacaatacatatcttccaagcgagacaccagcgcccacttttgaagtacagagaagaagaattgaagaatgtaagaggggatggaactggagagcgcaaggaatgggataggatctatgattatgatgtctacaatgacttgggcaacccggatagcggtgataaanatgcacgccccgttcttggtggttcagccttaccttaccctcgcagaggaagaaccggaagaggaaaaactagaaaa

SEQ ID NO: 288149 - DNA, 275 bp, Glycine max
  unsure (1)..(275): unsure at all n locations
atcgagataactagaaacagtgtgatgaaaatgaaggtccttgttttcttcgttgctacaattttnngtagcatggcaatgccatgcgtacgatatgttccctctccgaatgaacactggctatggtgcccgtactccggaggtgaaatgcgcaagttggaggcttgctgtggaagcacacaacatctttggctttgagaccattcctgaagagtgcgttgaagcaacaaaggaatacatccatggcgaacaatatagatcagactccaaaacag

SEQ ID NO: 288150 - DNA, 276 bp, Glycine max
  unsure (1)..(276): unsure at all n locations
gttgaatcgagattnactagaaaacagtgtnnatgaaaatgaaggtccttgttttcttcgttgctacaattttcgtagcatgggcaatgccatgcgtacgatatgttccctctccgaatgnacactggntatggtgcccgtactccggaggtgaaatgcgcaagttggaggcttgctgtggaagcacacaacatctttggctttgagaccattcctgaagagtgcgttgaagcaacaaaggaatacatccatgggcgaacaatatagatcagactc

SEQ ID NO: 288151 - DNA, 243 bp, Glycine max
  unsure (1)..(243): unsure at all n locations
tcttagatctcttctttctctacgccgcacgccgaaaccatggccggaaaaggagagggtcctgctatcggaatcgatctcggaaccacctactcttgcgtcggtgtgtggcaacatgaccgcgttgnaatcatcgccaacgaccaagggaacagaaccacgccgtcttacgtcggattcactgacaccgagcgtctcatcggtgatgcggccaagaatcaagtcgccatgaaccccatcaac

SEQ ID NO: 288152 - DNA, 277 bp, Glycine max
  unsure (1)..(277): unsure at all n locations
ttgaaaacacaaaagaaaaaaaatgggttcttctctgtggacctgtctgattttgttatcacttgcttctgcttccttcgccgccaacccaagagcaccaattgatgtgccatttggcagaaactatgtgcctacctgggcctttgatcacatcaaatacctcaatggtggttctgagattcagcttcatcttgataaatacacaggtactggcttccaatcaaaagggtctaacttgtttggtccacttccgcatgtacataaatggttgccggng

SEQ ID NO: 288153 - DNA, 276 bp, Glycine max
caacagcagctgcagcagcaatggctcccaaacgaggtggaaaggctccggctcttgccgctaagaagaagcctgagaaggtcacgaatccgttgttcgagaagcgtccgaagcagttcggaatcggaggggcgttgcctccgaagagagacttgactaggttcgtgaagtggccaaagaatgttcaaattcagaggaagaagaggattctgaagcagaggttgaaggttcccccagctttgaaccagtttaccaaaactcttgacaaaaacctag

SEQ ID NO: 288154 - DNA, 273 bp, Glycine max
  unsure (1)..(273): unsure at all n locations
tctaagtgtagtaccgttgggattcaaggaatcgcttggncccttcggtggcatcnatcttcgccctcgtttactgcaccgctggcatctcagggggacacataaacccggcggtgacatttgggctgtttttggcgaggaagttgtcgttgcccagggcgattttctacatcgtgatgcaatgcttgggtgctatttgtggcgctggcgtggtgaagggtttcgaggggaaaacaaaatacggtgcgttgaatggtggtgccaatttgttgc

SEQ ID NO: 288155 - DNA, 275 bp, Glycine max
  unsure (1)..(275): unsure at all n locations
gagtaatggcttcgtcgcgagtagatctggatgggaaccccataaagcccatcaccatttgcatgattggcgccggtggcttcattgggtcccacctctgcgagaagctcatgtcggagacccctcacagtgtcctcgccttggatgtctacaatgacaagatcaaacacctcttggaaccccacacgctcccttgggcctctcgcatccagttccatcgcctcaacatcaagcacgattcccgtctcgaaggcctcancaaaatgtcagatctg

SEQ ID NO: 288156 - DNA, 271 bp, Glycine max
ctttttcttctatagagacacacggagagagtctcagagcaataaacacccttcaatggctaccactaaagtttacattgtttactattctacgtacggacatgttgagaagttagctgaagagattaaaaagggagctggttccgttgaaggtgtggaagcaaagctatggcaggtacctgaaacactttctgaagaggtccttgggaagatgggtgcacctccaaagagtgatgtaccgattattacacccaacgagctacctgaggct

SEQ ID NO: 288157 - DNA, 271 bp, Glycine max
  unsure (1)..(271): unsure at all n locations
tgttgtggagggtctcttagcattgggctttggttctgagtgtttgcntgatgtgcaatggaggctcaagcagccccttcattaggaaagttgagaagacagtggatatgccacttgacagcgatgtctttgctgttcctcctggttataatgctccccagcaggttcatataacgcaaggtgaccttgtggggaaagcagtgatcgtgtcatgggtgacagtnnatgaaccggggtcgagcgaagtgcattactggagtgagaacagtga

SEQ ID NO: 288158 - DNA, 277 bp, Glycine max
  unsure (1)..(277): unsure at all n locations
gatgatgaacggttgaagaagttgggtgcgttgggtttgactatgagtaagcctgtggctgtgtgggatgaggatacccgaaatccgaagaagaagacggtgcaggatgtgctggggaagtttagctttgatgatgatgttatggcnattggagatgtgttctatgctgaagtggaacnggaatgggtgatgcaaccgggtgggccaattgctcacaaatgcacgactctcattgaacctaatcggcttattttactcactgctcagcggtttattc

SEQ ID NO: 288159 - DNA, 273 bp, Glycine max
  unsure (1)..(273): unsure at all n locations
ggaaaaatggtttcgctgaaactgcagaagcggctcgccgcgagcntgctcaagtgtggcagaggaaaggtttggcttgaccccaatgaagtcaacgaaatctccatggccaattctcgccaaaacataaggaagctggttaaggatgggtttatcatcaggaagcccaccaagattcgctctcgctcacgtgctcgtcgaatgaaggaagccaagaggaaaggacgtcactctggatacggtaagcgtaagggtacaagggaggcaaggctt

SEQ ID NO: 288160 - DNA, 271 bp, Glycine max
  unsure (1)..(271): unsure at all n locations
ctttggtaaggatgagaagtccttgaaggatttgaagctcaaggaagtgaagaatggaaggttggctatgttggcaatcttgggttantttgttcaagctcttgtcacaggtgttggcccataccaaaacctcctagatcatttggctgaccccgtgcacaacaacatcttgaccagtctcaagttccactgaatgtnttatatgttattttacatattctttacgttgccaaaactcanctacctttctacntttntatatcatgtggac

SEQ ID NO: 288161 - DNA, 277 bp, Glycine max
  unsure (1)..(277): unsure at all n locations
cacagaacatgagggatatgatccttttcttggtggaattcaaaaatatgccactcccatgatgcccctagatgaagaaattctttctaaggttgcacaagacatggttgangaatggtttgattgtgttgatgaggaggattcctttgaggaagtctctttaagtgcagcactcaatggtgttgagggtttggactatatggaaagaattcctcttgccacatctgagggttttcctcatgtgctttcacgcaaaaatggtganaaaggcaaaagg

SEQ ID NO: 288162 - DNA, 271 bp, Glycine max
gcaaggcaagcgcttctcctctttgtgttctggctatgcttcttggcaagagttagatcggacgaggattgcgtgtacacggtgtacgttcggacgggttcgatcatcaagggaggcaccgattcagtaattggtctgaagctatacgacaagtccggctacggcatatacatcaccaacctcgaggcatggggcgggttaatggatccgggtcacaactactacgagcggggcaacctcgacatattcagtggtagaggcccttgcttgg

SEQ ID NO: 288163 - DNA, 273 bp, Glycine max
  unsure (1)..(273): unsure at all n locations
gttatctatcacaagaacaagcagcattagcaaccaagcaagagaatggcgacgacagcagccttgtgcggcactatgatgagcagctccttcctgaggagaaaagcagtggtcacaagcctgaaggcattccccaatgctaacgcagtgtttggtgtaaagggtggacgtggaggtgncgtgactgccatggctagcttcaaggtgaagctgataaccccagagggagagaaagaatttgaatgcccagatgatgtatacattcttgaccag

SEQ ID NO: 288164 - DNA, 272 bp, Glycine max
  unsure (1)..(272): unsure at all n locations
gttcgacgacgacgaaggccgcgacaccttctggcactccagcgcccacattctcggccagtcacttgagacggagtatggatgcaagctctgcattgggccttgcactacaagaggagagngattctattatgatgcattttacggggagttgggtctcaatgacgatcactttaagcagattgaggctggagcattgaaggctgttgcggaaaagcaaccctttgagcgtattgaagttacacgtgatcaggcacttgagatgttttcag

SEQ ID NO: 288165 - DNA, 268 bp, Glycine max
  unsure (1)..(268): unsure at all n locations
tagggtttttgtgatctgcaagctacgatgggtaagggaacggggagtttcggtaagagaaggaacaagacccacaccctctgtgtgangtgtggccgccgcagtttccacctccagaagagtcnttgcgccgcgtgcgctttccccgctgcgcgcaccaggaaatataactggagcgtgaaggccattaggagaaagaccaccggaactggaaggatgaggtacttgcgtaacgtgccccgtagatttaagagtggcttcagagacg

SEQ ID NO: 288166 - DNA, 233 bp, Glycine max
  unsure (1)..(233): unsure at all n locations
gagagagtattggcgcttcatcaagatgggtatntctagggattccatgcacaagacgcgtgccactggtggcaagaaaaangcttggagaaagaagagaaagtatgagcttgggcgtcaggcagcaaacaccaagttatcaagcaacaagacaatcaggaggattcgtgttagaggtggcaattttaaatggagggcattgaggctggatactggcaattactcatggggta

SEQ ID NO: 288167 - DNA, 274 bp, Glycine max
  unsure (1)..(274): unsure at all n locations
gctcttgcagtcgcagaggaaaaccctagctagtagtctcagttcgtttgagagagaaaaaatggcagagggtctcgttctccgcggaaccatgcgcgcccacaccgacgtcgtgacggcgattgccactcccatcgacaactccgacatgatcgtgacggcgtcgcgcgacaaatccatcattctctggcacctcaccaaggaggacaagacctacggtgtccccngccgcgcttnacgggaattctcatttggccaggagtggcctntaacc

SEQ ID NO: 288168 - DNA, 269 bp, Glycine max
  unsure (1)..(269): unsure at all n locations
accgtggtttcgtggaatctcatgatgtcttgtttagctaagaataacaaagaggagaaggctcttgaacttttcaatgaaatgctcgagcagggttttgaacccgacgatgcttccttggtcacggtgttacctgtttgtnctcgcttgggagctgtggatattggcgagtggatccattcctatgcaaattccaaggggttcctacaagacactattaacgtggggaactcgctcgtggatttctattgcaaatgtggcaacttgca

SEQ ID NO: 288169 - DNA, 271 bp, Glycine max
cgcgacggggtattgtaagtggcagagtggccttgctggccacgatccactgagattcagcccttgtcgctttgattcgtctgcaaaggattctacccgccgctcgatgggaattgcgcttcaaggcgtctcgtagggctaatccgcctcacgagggtcaccaacggcactgcctttggggggccgaggccccctactgctggtcggcaaacggacggcgggcgcacgcgtcgcttctagcccggattctgacttagaggcgttcagtcat

SEQ ID NO: 288170 - DNA, 270 bp, Glycine max
  unsure (1)..(270): unsure at all n locations
aaaccctaactcttgggctccgccatttttcgtagctgctgttcttgcgcgtgaacaagcctcaggtaagccaaaaccatggttaancataacaatgttatcccaaacggacacttccgtaagcactggcagaactatgtgaagacttgnctcaatcagccagcacggaagacaaggagacgattggctcgtcagaagaaagctgtgaagatattccccagacctacggctggacctctcaggccnattgtacatggtcaaactttgaaa

SEQ ID NO: 288171 - DNA, 265 bp, Glycine max
  unsure (1)..(265): unsure at all n locations
aggagtctgacatgtgtgcgagtcaacgggcgagtaaacccgtaaggcgcaaggaagctgattggtgggatccccctgtgggttgcaccgccgaccgaccctgatcttctgtgaagggttcgagtgagagcatacctgtcgggacccgaaagatggtganctatgcctgancggggcgaacaggaggaaactctggtggaggcccgcagcgatactgacgtgcaaatcgttcgtctgacttgggtataggggcgaaagactaatc

SEQ ID NO: 288172 - DNA, 265 bp, Glycine max
  unsure (1)..(265): unsure at all n locations
gnaggataggaagagcgacaaagcgaagggggagctgatgctggctgtttggatgggtacacaggctgatgaggcttttcccgaagcttggcactcggatgctgcgatggttagtgggagtnatgctcttgcgaacattagatcgaaagtttatctgtctcccaagctttggtatttganggttaatgtgatanacgcacaggacctgatgccaactgataagggtagataccctgaggtatttgtnaaggctattctggggaat

SEQ ID NO: 288173 - DNA, 254 bp, Glycine max
  unsure (1)..(254): unsure at all n locations
caaatatttatataagattgtgttactgcaagttccaagttaccaagttcatncacaaccgancttttcctctgagaagacgtgtcggtagctgaagcattttataagcctccactttcctgnactagttttaacatacaatctttcaagtacacctccccagnttccatttaagaatggagatcnctagaataggccaatggttangtcttctgatatgtgtacnactattactgcagacagaaggggttcct

SEQ ID NO: 288174 - DNA, 272 bp, Glycine max
ggctgttggaaaagtccttcctgctttgaacggaaaattgactggtatggcattccgtgttcccaccgtggatgtctctgttgttgacctcacagtgaggctggagaaggaagcctcctacgatgaaattaaaaatgctatcaaggaggaatcagagggcaagttgaagggaattcttggttacactgaagatgatgtggtctccaccgactttgtgggcgatagcagatcaagtatttttgatgcaaaggctggaattgcattgaataaga

SEQ ID NO: 288175 - DNA, 253 bp, Glycine max
  unsure (1)..(253): unsure at all n locations
ggagtagagtctaatggaaatgaaaacgcagttacccaaaagaaaaaggaggtnattattagaggagtcctttctgttactgtaatatctgctgaagacttgcctgcaacagatttcatggggaaatctgatccttttgttgttcttaccttgaagaaagcagaaacaaaaaacaaaaccagggttgtgaatgacagcttgaatcctgtttggaatcaaacatttgactttgttgttgaggatggattacatg

SEQ ID NO: 288176 - DNA, 272 bp, Glycine max
atgggcttcactgttgatccaggatacactgaatggacaagatacttctctcagcctaggaagggacacaatccacttcaaggaagagcatactaccaactcctagaatgccttggggtaattaggattcactctcccatgaggtctaagaggatgaaagactggtcagatatacctagtcgagaaatgataagtgaagcacatgcagcagcattgcgcttgaaaaggagtcaagctggtcagggtggtgatttaggtcagtttggcaattg

SEQ ID NO: 288177 - DNA, 266 bp, Glycine max
cattgctgaggaccccaaaaattggttaaaccctgagaagtttgaccctgagagattcatctctgggggtgaggaagcagacataactggggtcacaggggtgaagatgatgccatttggggttgggagaaggatttgccctggcttggctatggccacagtgcatattcacctcatgatggcaaggatggtgcaggagtttgagtggggtgcataccctccagagaagaagatggatttcactggcaagtgggagttcactgtgg

SEQ ID NO: 288178 - DNA, 267 bp, Glycine max
atcaaattagttcattctctttgcgcagttccctacctctcctttcaagatgcagatcttcgtcaagaccctcaccggaaagaccatcacccttgaggtggaaagctctgacaccatcgacaacgtcaaggccaagatccaggacaaggaaggaattcccccggatcagcaacgtctcatcttcgccggaaagcagctcgaggacggccgtaccctcgccgatacaacattcagaaggagtcaacccttcaccttgtccttcgtctc

SEQ ID NO: 288179 - DNA, 249 bp, Glycine max
  unsure (1)..(249): unsure at all n locations
ggagaaggggaagagtagagagagaacagagagagatgggaaacggaagagtggagttgaagacgattgagaacaagatcaacaggcaagtnacctttgcaaaacgaaggaacgggcttttgaagaaagcttatgagctttccgttctttgtgatgccgaggttgctctcatcatcttctccaatagaggaaagcagtacgagttttgcagcggttcaagcatgctcaaaacgttggagaggtaccaga

SEQ ID NO: 288180 - DNA, 281 bp, Glycine max
  unsure (1)..(281): unsure at all n locations
gctaggctgctcccctcaagacagtttgacaccaanaccaaaacaaacccactaagatggcttcctttgtanccttcctagtgctgcttcttgcagcccttatcctcatgcctcaagggcttggtattactanaaancaattaagaagccancagtggtanaagcctccagtgtacaagccaccagtgtacaaaccaccggtttataagccaaaaccaccggtttacaagccgaaaccaccggtttacaagccaccatataagaggccaccatacaaggaa

SEQ ID NO: 288181 - DNA, 282 bp, Glycine max
  unsure (1)..(282): unsure at all n locations
caaaaggagtgattggggcctcattggtacaagtgtttttaacaaacagcaacagtacagagcattttgatgcatgtaagtggacaaaatcagaaccanattcctgggaattgatcntcccaatagaggtatgtggtccccaataatggttttgaaatgtggagttcctgagtgggcaaatcaaacttcatgggcatttgagtttcctnattgacaatcccaaacaatctaccagtttttgatattctctngggaatctctcaagatttgaaattgcnnggc

SEQ ID NO: 288182 - DNA, 274 bp, Glycine max
  unsure (1)..(274): unsure at all n locations
tggagaaagtgaaggtgcttcggcgactccttgagacaccaggggttcaccaggggccagcctgtttcgacgctctgggtgcgaanttcatagaatccgctggcttcccctactgcatcaccagtggcttctccatcgccgcttccaggttggctctgcccgacaccggcttcatctcctacggcgaaatgctggagcagggccaactcatcanccaagccgtttccattcccgtcattggcgacgccganaacggtacggcaatgccatgaac

SEQ ID NO: 288183 - DNA, 276 bp, Glycine max
  unsure (1)..(276): unsure at all n locations
tagtagtctcagttcgtttgagagagaaaaaatggcagagggtctcgttctccgcggaaccatgcgcgcccanaccgacgtcgtgacggcgattgccactcccatcgacaactccgacatgatcgtgacggcgtcgcgcgacaaatccatcattctctggcacctcaccaaggaggacaagacctacggtgtcccccgccgccgcctcaccggacattctcacttcgtccaggacgtcgtcctctcatccgacggtcagttcgccctctccggctc

SEQ ID NO: 288184 - DNA, 275 bp, Glycine max
  unsure (1)..(275): unsure at all n locations
cctcgacgacggtggtgacgctacccttctcatccacgaaggcgtcaaggccgaggagctctatgagaagaccggcgaactccccgaccccaactccaccgacaacgccgagtttcagatcgtgcttancatcatcagagatgggttgaagaccgatcccaccaggtancgcaagatgaaggagcgtctcgttggggtttctgaggaaaccaccattggagttaagaggntctatcagatgcaggcgaatgggatcttctcttccctgctattaa

SEQ ID NO: 288185 - DNA, 273 bp, Glycine max
  unsure (1)..(273): unsure at all n locations
ttaattttggtgaagaagatgaggggaagacagagaagctggaagcactccttgcagctgttaacaataatgataccagccacattgttcatgttccatctggtccaaatgctcttctgatgtacttataagtacgcctanttttactggtgatggggaaggtggaagtggttttnnnnnnnnnnnnnnnnnnnnnnnagctggtggtgtatccggatttgagtntggcgtggatccaaacttggatccagaattggctcttgctctaagagt

SEQ ID NO: 288186 - DNA, 272 bp, Glycine max
ccacctccaacttctctattgttctctccgtctccctagccttctttttggtgctacttaccaaggcacactcgaccgataccgtttctttcaccttcaacaagttcaacccagtccaaccaaacattatgctccaaaaagatgctagtatttcatcctctggggtgttacaactcaccaaagttggcagcaacggcgtgcccacctcgggatctctcggtcgtgccctttacgctgccccaatccagatttgggacagcgaaaccggcaag

SEQ ID NO: 288187 - DNA, 272 bp, Glycine max
  unsure (1)..(272): unsure at all n locations
cgactccaaaggttttcattggtttgattgtgggtgcaatgcttccttactggttttctgctatgactatcgnagagtgtgggaagtgctgctctgaagatggttgaagaagtacgcaggcaattcaacaccattccagggttgatggagggaactgctaagcctgactatgccacatgtgttaagatctccactgatgcttccattaaagaaatgattccacctggtgctcttgtcatgcttacaccgcttgttgttggaatcctttttgg

SEQ ID NO: 288188 - DNA, 282 bp, Glycine max
  unsure (1)..(282): unsure at all n locations
cccgtcaaactgttgcngtgggagtcatcaagaacgttgagaagaaggntcctaccggagccaaggtcaccaaggctgcccagaagaagaagtgaatcgtgcgggctggttcatcaggggatgttggttacaataaaatgtggtttccntttcctgtattctngtgtccttccttttctaggtaggcttgtttttccggacaaagtttgaagtctccaccancatntcgcaactggttgttcccagaactgggttcttgaatcgacggtggcaaaatngctt

SEQ ID NO: 288189 - DNA, 272 bp, Glycine max
  unsure (1)..(272): unsure at all n locations
cggggagacctacgaagctgactatccagataaaggacttaagtctttttctgaaaaggttagtcatcatccaatgattgtcgcttgtcactgtgagggaaggggttggaagttttgggcagattctaatttgaaaggnaaattctgggggcgttctatccagttagatcctgtgggtgtcctcactctacagtttgangatggtgaaacatttcagtggagcaaggtcaccacttccatatacaatatcatactaggtaaaattattgtga

SEQ ID NO: 288190 - DNA, 268 bp, Glycine max
  unsure (1)..(268): unsure at all n locations
acaagatcaaggttttgatggccacaaatcggnttgatatcctggatcaagccctccttagacctgnanggattgaccggaagattgaatttccaaaccctaatgaagagtctcggctggatattttgaaaatccattcaagaagaatgaatttaatgcgtggcattgatctgaagaagattgccgagaagatgaatggagcatctggtgctgaacttaaggctgtttgcaccgaagctggaatgtttgcattgagggagcggagggt

SEQ ID NO: 288191 - DNA, 272 bp, Glycine max
  unsure (1)..(272): unsure at all n locations
ctaaattggaaaggtgtagcatactacaataggttgatcaattacttgctagagaaaggtattactccatatgcaaatctctaccattatgatcttcctttagcacttgaggagaggtacaacggattattgagtcgccaagttgtgaaagattttgcagattatggcagaattttgtttcaagacttttggagatagagttaagaatgggatgangttnaacgaacctcgtgtggtggctgctcttggctatgataanggttctttgcccc

SEQ ID NO: 288192 - DNA, 266 bp, Glycine max
  unsure (1)..(266): unsure at all n locations
ctagcaaatggtttaaaaccttttgtcactctttttcattgggacnttccacaagctcttgaagatgagtatggaggattccgtagtcctaaagtagtggcggattttcgtggctacgcaaacttctgcttcaagacctttggagacagtctcaaatattgggtcactttgaatgaacccttatcatntagtctcaatggctacaatggtggcacctttgcaccaggtagatgttctaaatacgttgccaattgtagngctggcga

SEQ ID NO: 288193 - DNA, 266 bp, Glycine max
  unsure (1)..(266): unsure at all n locations
tcaagcgttgcaaaggaatcagcagccgctctgtcaacaagcttcaggaacatctctgcatgtncgacatcctctactgaacaggaaatgcctcagcagcttttatagttagtgttgctcgttagtgtttttgggttcattcacgatggatcttggtcgtctagtagtcggttctctttttccagaggataacagttatatttaaacctcttttttgcaggtttccattaattggaaatctgttacaaattttttggcactccgtt

SEQ ID NO: 288194 - DNA, 278 bp, Glycine max
  unsure (1)..(278): unsure at all n locations
gctcancangtccaagaancaacctaccttttgcaatctcaattcaatggcgtcctctctcattgcgaagggctttcctctcctcttncctcttctcnaaggtcnctcttctaccccggncgnttnnngcttcccancggntctttcaanaccaaggccatgcgccagtatgacaaccgngccgaggaccacagcaccgacatcgattcgtcantccgaacgctctttactagcatgcgcgccgtgacgatatcttctcagatgtgttggntccattt

SEQ ID NO: 288195 - DNA, 272 bp, Glycine max
  unsure (1)..(272): unsure at all n locations
cgagaacaccantgaattttgattctagcaagcagagcttttgtcaattttctatngaccttctcggtggaggaattttagtggacaaaactggagattggatcacacttatacaaaattctccaattagtaacttgttgagagtngccgcttggaagaanggcngtttaatggtcaagattgtgatgtctgggaatgcagcagtcaaaaggagtgattgggcctcattggtacaagngtttttaacaaacagcaacagtacagagcatttt

SEQ ID NO: 288196 - DNA, 268 bp, Glycine max
  unsure (1)..(268): unsure at all n locations
gtggatgggaaaactgactttcccccagggcacttcccgaagtgttaagagaatgcctctttctatagggggaggagctggtgcaaagaatgcnattctcatgaanatgccaaatgctgttctntcaatgtggagatantttgttcggagatctcgtctttgaagtttctaagatganttctccctacattaaatgtacagtctctttcttcatagcattnggaaatntggctgatgacaccatcaattttgaggccttnccccacaa

SEQ ID NO: 288197 - DNA, 264 bp, Glycine max
  unsure (1)..(264): unsure at all n locations
cgcaagatgancacgaaggaggtggatgnancagatgataaacgtgcagnncaataactcttngnantntgtcgantagattcccaanaatgtcaagtcnagtntgngtgacattgctcctagaaggctctcnatagcgtcgacattcattggaaacttcgacctcgattcaggagatgttcaggaggtgagcnagcagtgcacggccatgttnaggaggaaggctttcttgcattggtacactggtgaaggctggnccngatg

SEQ ID NO: 288198 - DNA, 266 bp, Glycine max
  unsure (1)..(266): unsure at all n locations
cctgccgccaaggcctaccacgagcagttgtcggtgccggagatcaccaatgccgtgttcgagcccgccagcatgatggccaagtgtgatccaaggcacggcaagtacatggcttgctgcttgatgtaccgtggtgatgttgtccctaaggatgtcaatgctgctgttgccancatcaagactaagaggactgttcagtttgttgattggtgtccaactggattcaagtgtggtatcaataccagccaccttctgttgtcctggtg

SEQ ID NO: 288199 - DNA, 265 bp, Glycine max
cccaaatgcatatttttaacatctccaaataatccagatggaagtataattgatgacgaagttctcttaaaaatactcgagcttcctatattggtgatactggatgaagcatacattgagttttcagcaattgaatcaaggatgagttgggtgaagaaacatgataatttgattgtccttcggacatttagcaaaagagctggtttagctggacttcgagtgggatatggagcttttcctttgagtataattgaggatctttggg

SEQ ID NO: 288200 - DNA, 262 bp, Glycine max
  unsure (1)..(262): unsure at all n locations
cngataatgaggagaaggttccagactttgttgaaggaatgatttatacaccaacagaaggtgtgatgatgacaggnagatatgcttcaaaggaagaggccaagaagaaggggaataagatcaacagtgtaggatgtggttaaaccctggtnctatcagcatgcacagacggcctgaagaaaggagagttttagaatacattcctaccagagaatattatcacaggcaccgagatgcttgtanctgggagggaaacttatcc

SEQ ID NO: 288201 - DNA, 260 bp, Glycine max
gaatttcttacagcttggtcaactcaggtgcgtcctgcaacaactctgttggctgatgggtgcccatatttgtatgctatggtgcatgatagtgcagtgtctacaataccaggtgattttgtcattggtgtcaagttgacaaccataaacaatatgtgtgcatatgggctcaatcctggtattcaggttctcgtcttttgggcaccattcctcagtccatttcacagcaaactgtttggaatcaaatggcaacagtgaga

SEQ ID NO: 288202 - DNA, 267 bp, Glycine max
  unsure (1)..(267): unsure at all n locations
ctcgagataactagaaacagtgtgatgaaaatgaaggtccttgttttcttcgttgctacaattttgngtagcatggcaatgccatgcgtacgatatgttccctctccgaatgaacactggctatggtgcccgtactccggaggtgaaatgcgcaagtnggaggcttgctgtggaagcacacaacatctttggctttgagaccattcctgaagagtcgcgttgaagcaacaaaggaatacatccatgggcgaacaatatagatcagac

SEQ ID NO: 288203 - DNA, 264 bp, Glycine max
  unsure (1)..(264): unsure at all n locations
cggcaacagtgagaacaccattgaatcttgattctagcaagcagagcctttgtccaattttctattgaccttctcggtggaggaattttagtggacaaaactggagattggatcacacttatacaaaattctccaattagtaacttgttgagagtngctgcttggaagaaaggctgtttantggtcaagattgtgatgtctgggaatgcagcngtcaaaaggagtgattgggcctcattggtacaagtgtttttaacaaacagc

SEQ ID NO: 288204 - DNA, 267 bp, Glycine max
  unsure (1)..(267): unsure at all n locations
agaagaacaagtagttgagaactaagaaggagaagcaaatggcttcctcaatgatctcttccccagctgttaccactgtcaaccgtgccggtgccggcatggttgctccattcactggcctcaagtccatggctggcttccccaccaggaagaccaacaatgacattacctccattgctagcaacggtggaagagtgcaatgcatgcaggtgtggccaccagttggcaagaagaagtttgagacnctttcctactgccagacttgat

SEQ ID NO: 288205 - DNA, 292 bp, Glycine max
  unsure (1)..(292): unsure at all n locations
cacctttgttcactcttcttctcttgcggntagggttttagcgcanttcttctagatttaaggnagatgggtanngaaaaggttcacatcngtnttgtggtcattggccatgtcncactctgggacatncactaacactggtcanctgatttaacaagcttggagggcattgacaagcgtgttattgagaggtttgaganggaagctgctgagatgnnacnagaggtctttccaagtatgcctgggtgcnggacnaacntanaggctgagcgtgaangaggaatcaccattg

SEQ ID NO: 288206 - DNA, 280 bp, Glycine max
  unsure (1)..(280): unsure at all n locations
gangtnacatatttccactcttatattgatgntgttgacttcgtttttnttgacagtccaaactttcgccatttacaggntaacatntatgggggaaaccgagaggatattctaaaacgcatggngttgttttgcnaggcagctgctgaggttccttggcatgttccttgtggtggagtttgctatggagatggaaatttggccttcatcgcaaatgattggcatactgctttgctgccagtgtatctgaaagcatattatcgtgaccatggtttaatga

SEQ ID NO: 288207 - DNA, 278 bp, Glycine max
  unsure (1)..(278): unsure at all n locations
gccagggtggctctgcagagagncgatgttgaactcgttgccgttnacgatcctttcattaccaccgattacntgncntacatgtttaaatacgacagtgttcacgggcactggaagcntcacgatgtcaccgttaaggatgagaagacccttctcttcggtgacaagccagtcactgtttttggncacaggaaccctgaagagatcccatggaagtcgactggngctgacatcnttgttgagtccaccggagttttcaccgataaggataaggctgc

SEQ ID NO: 288208 - DNA, 279 bp, Glycine max
  unsure (1)..(279): unsure at all n locations
gaagactttatcatttccgaatttcnttttcagangcctctttgggaatcanntccnnngcatgatgcattgtngcgagcnttgtctacggctccgtcctacgcgttcccttttcgctctggctccgcttccactactccaactgcgntctcgctcactaagcgcagttggaagccacctccgagnatggcaaaaggcccagtcagagccaccgtttctatagagaaagagaccccggaggccaatcgtcccgaaacgtttctcagaggagtggacgag

SEQ ID NO: 288209 - DNA, 275 bp, Glycine max
  unsure (1)..(275): unsure at all n locations
ctctttctctngtcctgtnntttctcagcgcgtaangcntggctttgttggtggagaaaaccacgagtggtcgcgagtncaaggtcnaggncctttcccaggccgncttcggccgcctcgagatcgagctggccgaggttgagnngcccggcctcatggcctgtcggaccgagttcggcccctcccancccttcaagggggcccgcatcaccggctccctccacatgaccntccagaccgccgttctcattgagaccctcancgcccttggcgcc

SEQ ID NO: 288210 - DNA, 271 bp, Glycine max
  unsure (1)..(271): unsure at all n locations
ctcattaattgcaagantggcacttcgttgcttggtgatgtccctttctgttctcttcactcttggtcttgcgagagaaagccntgccagagacgaagntttttggcatgctgtttggccaaacactcccattccaagttcnttgcgagatcttctaaagcctggccctgcaagtgttgaaatcgatgatcaccctatgcaaattgaagaaacacagtacccgaaaaccttcttctataaagaagaccttcatccaggcaaaacaatgaaa

SEQ ID NO: 288211 - DNA, 273 bp, Glycine max
  unsure (1)..(273): unsure at all n locations
ggttatcatttctccatttccattttctctctcacttttcaagnatcgtnagctntgggaaagtcttacccaactgtgagtgctgattaccagaaggccgttgngnaggcgangnagaagctcagaggcttcatcgctgagaagagatgcgctcctctaatgctccgtttggcatggcactctgctggaacctttgacangggcacgaagaccggtggacccttcggaancatcaagcaccctgccgaactggctcacagcgctaacaacggt

SEQ ID NO: 288212 - DNA, 275 bp, Glycine max
  unsure (1)..(275): unsure at all n locations
tanggnaggctacggtgaaggaccttctggcgntgcaggcgtgcaacctgttctgcctccctgagaactancagatgangtantacctctatcacatcctctcctggccccagctcctctacgtcgccgaagactacaacggccgcatcgtcggctacgtcctcgccaagatggaggaagagacnactgactgccacggccacatcacctccctcgccgtcctccgcacccaccgcaagctaggcctcgccantaagctcatgaccgccgcccag

SEQ ID NO: 288213 - DNA, 272 bp, Glycine max
  unsure (1)..(272): unsure at all n locations
cggtcgctgcaaaacccagggcgcgagcccgggncggngggtcgtcggtgcagntcttggtggtagtagcaaatattcaaatgancnctttgaaggccgaagaggggnaaggttccatgtgaacggcacttgcncntgggttagtcgatcctaagggacgggggaagcccgtctgatagcgctctgtgcgcgtactccgaaagggaatcgggttaaaattcctgaaccgggacgtggcggctgacggcnacgttagggagtccgccgccgcc

SEQ ID NO: 288214 - DNA, 269 bp, Glycine max
  unsure (1)..(269): unsure at all n locations
agggtttgtnactttgtcttttgcttgcgaatctgaatcgaataataatcaatcaatcatcatgtcgtcggcgaagaagatcacactgaagagttcggacggcgaggctttcgaggtggacgaggcggtggcgctggagtctcagacgataaagcacatgatcgaggacgactgcgccgacagcggcatccctctgccgaacgtgacgagcaagatcctggcgaaggtgatcgagtactgcaagaagcacgtcgaggccgcgaatcccg

SEQ ID NO: 288215 - DNA, 271 bp, Glycine max
  unsure (1)..(271): unsure at all n locations
gctcnggcatcgcctannacangctcaccgacaacggcgctgcnacccctgccggcctcatctccgcctccatcgcccatgcattcgccctcttcgtcgccgtctccgtcggcgccaanatctccggcggccacgtcaaccccgccgtcaccttcggcgccttcgtcggcggcaacatcaccttcctccgcggcatcgtctacgtcatcgcccagctcctcggctccatcgtcgcctccctcctcctggccttcgtcaccgcctccactgt

SEQ ID NO: 288216 - DNA, 285 bp, Glycine max
  unsure (1)..(285): unsure at all n locations
catctccgtcatggaaatcngcgcgccgatcatttcgccggggntcctcgcggctccncctccctgcagccgnngttnnnataanggcgctcntcgaaaaagccggatgcnnnacgttcgnctcantcatctcctctaacggnctnattaaaacgtttcagtcaacggcggataaaggtttgactattttcgntcctaangatgnancgtttaaggcgaaaggcgtacctgatttgagcaagctcacgaacgctgaagtggtttcgctcttacagtatcacgccg

SEQ ID NO: 288217 - DNA, 280 bp, Glycine max
  unsure (1)..(280): unsure at all n locations
cacaagccaagtgaaagtgaganaaaataaaaatcaaagagcataatgtcagggatcattcacaagnttggggagacccttcatgtgggagggcacaagaaggaggaggagcataagggtgagcaccatgctggagaatacaaaggggagcaccatggtgaacacagtagtgagtacaaaggagagcatcatggtgaacacaaagggggagagtaccatggtgagcacaagccagagcncaaagaggggttcctagacaaagtcaaggacaagatccatg

SEQ ID NO: 288218 - DNA, 272 bp, Glycine max
  unsure (1)..(272): unsure at all n locations
gcaattcaacngctgacaaattggctagcgaaagagcnagagcattcancttcaattggttcttggacccaatcatattcggnaagtaccctacagagatggagaacgttcttggaagcctcttgcccaaattttccagctacgaaaaagagaaactcaagagaggattggatttcattggcgtcaattactacacggctttctatgtccaagattgcatgtactccgcttgtaaaccaggacccgggatctccagaacagagggttcatac

SEQ ID NO: 288219 - DNA, 267 bp, Glycine max
  unsure (1)..(267): unsure at all n locations
cgaaaccctaggttttagtgagtggcgaaaatggcggtgnttttttcaagtgcaataccaggaggggcagcaccagcagcaatcgagcaagtgcagtgcttcgggcggaagaagacggcggtggcagtgacctactgcaagcgcggccgaggcctcattaagatcaacggctgcccgatcgagctggtggagccggagatcctccgcttcaaggccttcgagccaatcctcctcctcggtcgccaccgcttcgccggcgtggacatg

SEQ ID NO: 288220 - DNA, 277 bp, Glycine max
  unsure (1)..(277): unsure at all n locations
tcatcatggccacctctgctattcagcaatcagcattcgcaggtcaaactgctctgaagcagctcaatgagttggtccgcaagaccggtggcgccggcaaaggtcgcaccaanatgcgccgtaccgtcaagagtgctcctcagagcatttggtatggccctgatcgtcccaagtacctgggtccattctcagagcagattccgtcatacctgaccggagaattccccggtgactacggatgggacactgctggactatcagcngacccggaaacctt

SEQ ID NO: 288221 - DNA, 283 bp, Glycine max
  unsure (1)..(283): unsure at all n locations
cggtgggagaagggaaggtgagtngtaatggtcatggntgttgcnnatcagggccaggctntgcttccccactggangccatttctggtcccagagagtctctcntttatgtnanctctgtctacacagggaccggaatagagaagccagactatttggcgacagtggatgtggatccaaactctccaacttattccaaagtcatccataggcttcctgttccttatttaggtgacganttgcatcacacaggctggaattcatgcagctcttgccatggaga

SEQ ID NO: 288222 - DNA, 241 bp, Glycine max
tctttgtttcctgttggattgcccaatacttcccgataggggaaagagaacctccatttgtgctatatttatggtatgtttttatttgtgtggtgtctggaaatggcctatttcattcccaatccgtttcctccagtctctgggggatttgattgatgagaattgcttatggtgggtgtatttccttttccaatgaaatgctacaacatttactgcaatgttggagattgattcttcgatt

SEQ ID NO: 288223 - DNA, 271 bp, Glycine max
  unsure (1)..(271): unsure at all n locations
ggcttttggtttgacagtggttgangccatgacttgcggcttgccancnttcgccacatgcaatggtggtcctgctgagatcattgtgcacggcaagtctggcttccacattgacccttaccatggtgaccgtgctgctgatctccttgttgacttctttgagaagtgcaagcttgacccaactcactgggacaagctctcaaaggctggtctccagcgtattgaagagaagtacacatggcaaatttactctcagaggcttctcactctc

SEQ ID NO: 288224 - DNA, 273 bp, Glycine max
  unsure (1)..(273): unsure at all n locations
gggagtgtagattatgagtnccctttgggcatgaacaactttgagagagtgcacnaagtggaggttccaccnccacagccgtttcctcaagtctctaaagtactctttgaaggagacnttcttccctgatgaccctttgaggcagttcaagaanaagccagcttccaagaagtncatgcttggccttcagttcttctnccccattttcgaatgggctcccaaatanacctntcagttctngaaagctgacctcatagctggcatcancatcgc

SEQ ID NO: 288225 - DNA, 269 bp, Glycine max
  unsure (1)..(269): unsure at all n locations
cnatattgtaaaactcaaaatctagtttcatactttttttcttcttcttgaaatggctctccaggctgcttctcttgttcctgcttctttctcggttcttaaagagggaaagagtggtgtgtctctcaaggactccaccttgttcggtctttcattttcagaacctatcaaagctaacttcagctcttctgcattgaggtccaagagggaattcgaacaaaagctctgtgctgtgagggccgaaacagtggctanagcctctccagcag

SEQ ID NO: 288226 - DNA, 281 bp, Glycine max
  unsure (1)..(281): unsure at all n locations
catcatcgaatgcttaaaatgntcagttcagggnacttgtgnaaacagggaaagacattgaaagtgcatattgggaacttgtagtgaaggatatcnaaaatgcnaaaaangananttgaaaccaatctatgancaaacagatggnggtgatgggtatgtttctgttgaagtatctcctagggctcgctgatgaacactgagggaaccatagaagctgcaaaatggcttcataaagtggntgatcggcccaatgtgtatattaagattcctgnttacagagg

SEQ ID NO: 288227 - DNA, 270 bp, Glycine max
  unsure (1)..(270): unsure at all n locations
cctaggtagagagctcttcctcantctcattcgcnctngccgcagcagcacgtcctctcgtcaccgtnnaggccctcganantnacatggccaccgacgcctccgccaccgtccctatccctgacgtcatgaagtcctccatccgcccggagatcgtcaacttcgtagactcnaacatctcnaagaagagctgagaaccctatgcagtcagccgccgcgctggcnancaganttccgncgagtcctggggaaccggtcgtgccgtctccc

SEQ ID NO: 288228 - DNA, 269 bp, Glycine max
  unsure (1)..(269): unsure at all n locations
gttcacaacttttccttttccttttgcttgcgantctgaatcaaataatcaatcatccattcattattcatcatgtcgtcggcgaagaaaatcacgctgaagagttcggacggcgaggctttcgaggtggaggaggcggtggcgctggagtcgcagacgataaagcacatgatcgaggacgactgcgccgacagcggcatccctctgccgaacgtgacgagcaagatcctggcgacggttatcgngtactgcaagangcacgtcgaggc

SEQ ID NO: 288229 - DNA, 209 bp, Glycine max
  unsure (1)..(209): unsure at all n locations
tgattgangangatgccgatcagaaacatcgccntcggaaggcctgangaggctactcaccccgacacgttganggcggggttggctgagttcatctccaccttgatcttcgtgttcgccggttcaggttccggcatcgcctanaanaagctcaccgacaacggcgccgccactcccgccggcctcatctccgcttccatcgcccatgc

SEQ ID NO: 288230 - DNA, 273 bp, Glycine max
  unsure (1)..(273): unsure at all n locations
ctttgttagagggaaatttttcctttgatattaaatctcgctctagattggnaaaagtttcctctacaaaagcacaatttgttagtggaaaaaccttcaaanatgatataattggtgctggttcacattcttcagannnttntcctgaaaaggaagatcaagaaaaacccaaaaagattgatgccagattgagacanagaatagatcctcaatacaatgaggttcaggctcagatggaaacaaatttgtttaanttgtctcttgatgatgttg

SEQ ID NO: 288231 - DNA, 266 bp, Glycine max
  unsure (1)..(266): unsure at all n locations
ctcaaagcaacacaagaacactctcttgaacattcatggntccagtgngcgtgtggggtaacacgcccttggcgacggtggatcccgagatccatgacctcatcgagaaggagaagcaccgccaatgccgcggcatcgagctcatcgcctccgagaacttcacctccttcgcagtcatcgaggccctcggcagcnccctcaccaacaaatactccgagggcatgcccggnnnccgctactacngcngcnacgaattcntcgancag

SEQ ID NO: 288232 - DNA, 265 bp, Glycine max
cttgacaggctcaggacacccgttgaaaactcattgagggatgcaaaactctcgtttaaggatcttgacgaagtcataccttgttggtggatcaacacgtatcccagctgttcaggagcttgtaaagaagttgactggcaaggacccaaatgtcactgtcaatccagatgaagtggttgcccttggagctgctgttcaggctggtgtcttggctggagatgtcagcgacattgtgctgttggatgtcactccattatctttgggt

SEQ ID NO: 288233 - DNA, 266 bp, Glycine max
  unsure (1)..(266): unsure at all n locations
ctcagtctctgtgtttgcggctgaggattccgaacgagtgaccttcctcgtttctncgcaaagtttaagtnatcatgggtaangaaaaggttcanatcaacattgtcgtcattgganatgtcgantctgggaagtcaactaccactggtcacttgatctanaagcttggaggtattgacaagcgtgtgattganaggttcgagaaggaggctgccgagatgaacaagangnnacnngcgnatgcctgggtgctcgacaagctcaaa

SEQ ID NO: 288234 - DNA, 269 bp, Glycine max
  unsure (1)..(269): unsure at all n locations
ctcactaagctaaacantttcntcangcctgccatggcttcctcgtntgcttcctctgccattgcagctgttgccatctccacaccaagttcccagaagantggatcactcttgggaagcanaaaagcttcttttcttagtgggaggnaactgaaggtgaccagttttacagcaccagttggngcacgatccagcactanagtgtgtgcngttgctgagcctgataggcctctntggttcccaggcagcacccctcctccatggctaga

SEQ ID NO: 288235 - DNA, 279 bp, Glycine max
  unsure (1)..(279): unsure at all n locations
cntccttccactccaaatgcngtttcatacaaaacagcagcgagagagnnantgataaggcngggatannacnttgttgggntcattggagaccnntggngcgatctcctcggaggccacagaggcgaaagcnggaccnttaagcttcctaatcccctgtactacattcngtagttccttcacctctcaanaatctagcttgctcctatctatctatatgtnanaagatgcgttcaaataggggcactagcttcactttatgttgtttcagctgtgtgt

SEQ ID NO: 288236 - DNA, 276 bp, Glycine max
  unsure (1)..(276): unsure at all n locations
ganattctgtcttctagtgcaagtnatttcagaactgcaatggtgagtaaaaatagcaagcctcaagctactgcaatgcatgtgggagctatagaaattatcattgatagtttcgcaagtccngactgtaacatagttggtgcaatgcttttcgntgatacttatcataccaatcctgaaaatgcagttcgtagtatttttgttgcgccntcagaggcggaaggcccattcgggtggttacatttccgaataccattgtgcagattgaaccagact

SEQ ID NO: 288237 - DNA, 282 bp, Glycine max
  unsure (1)..(282): unsure at all n locations
cgccaatgcgttttttcaacacaaccccctttctccnaacccttagggtttattatggaacccaagcatcagtatcgaaactccccgaatacgagatgccatcggtaacatggggcgtaatccagggtcgcaaggagaactcgtttcgcgagtaatcatcttcgattacctcaagtgtttgggaatcatccccgaccaactgcacgacctcgagcttccctccaccgtcgacgtcatgcgcgagcgcgtcgagtttctccaaaaattaggtctcaccgtcga

SEQ ID NO: 288238 - DNA, 281 bp, Glycine max
cctacagtagaaattaccacatcgacctgatcaagataagatcatttctgcaattaaagaagcaggaaatgttaagaagttctatccatctgagtttggaaatgatgtggaccggactcatgcagttgaaccagccaagtctgcatttgcaacaaaggccaaagttcgccgagctattgaggctgaaggaattcccttcacttatgtgtcaagcaacttctttgctggttacttcctgcccaacttgtcacagcctggagccacagctgcccccagagaca

SEQ ID NO: 288239 - DNA, 279 bp, Glycine max
  unsure (1)..(279): unsure at all n locations
ggtttggaaggcaaaggctggtgttgtcccaatccaagagagaagtaaagtaaagcaaaggaatggcgaacatagacatcgaagggatcttgaagcagcagcctgatgatgggcgcgttccgaagacgaaaatagtgtgtactttgggccccgcttctcgatccgtggaaatgactganaagcttcttagggctgggatgaacgttgctcgtttcaatttctctcatggcacccacgactatcatcaggaaaccctcaacaatctcaagactgctatgc

SEQ ID NO: 288240 - DNA, 279 bp, Glycine max
  unsure (1)..(279): unsure at all n locations
ggaccagtgaagaaggctatggaagatgctggattacagaagaatcaaattgacgagattgttcttgtcggtggaagcacaaggattccaaaggtacaacagcttttgaaggactactttgatggaaaggagccaaacaagggtgtcaaccctgatgaagcagttgcctatggtgctgcagtgcaaggnagcattttgagtggngagggtggtgaggaaaccaaagatatccttctcttggatgtggctcccctcacccttggaattgaaactgttggt

SEQ ID NO: 288241 - DNA, 225 bp, Glycine max
  unsure (1)..(225): unsure at all n locations
cctggcatcggatccagatccaaatccagtttaacaaagaaaatgcagtacaagaacctgggccgatcgggactnaaggtgagccagctctcctacggggcgtgggtgagcttcggtaaccagctagacgtgaaggaggccaaggccctcctgccagtgctgccgngaccacggcgngaacttcttcgacaacgccgnggtctacgccaacggccgcgccgaggg

SEQ ID NO: 288242 - DNA, 278 bp, Glycine max
cgatgaagaagtattgactgatgcatgttgggcactgtcatatctttctgatggcacaaatgataaaattcaagctgtaattgaagctggtgtttgtccccgacttgttgagctgctgctgcacccatccccttcagtgctaattcctgctcttcgaactgttggaaatattgtcactggagatgatatgcagactcaggttatcatcaatcaccaggctcttccttgccttcttaatctgttgaccaataattataaaaaaagcatcaagaaggaag

SEQ ID NO: 288243 - DNA, 279 bp, Glycine max
  unsure (1)..(279): unsure at all n locations
cgntacatctggtgagaaccttggtaggggaacaaagataactttgtttcttaaggnagatcaacttgagtatcttgaggnacgccgtctgaaggatttgataaagaagcattctgaattcattagctatccaatctctctctggattganaagactactgaaaaggagatttctgatgatgaggatgaggnngagaagaaggatgaggagggtaaagttgaagatgtggatgaagataaggngaaggaggagaagaanaagaagaccattaaggaggt

SEQ ID NO: 288244 - DNA, 278 bp, Glycine max
tttccctacctctcccttcaagatgcagatcttcgtcaagaccctcaccggcaagaccatcacccttgaggtggaaagctctgacaccatcgacaacgtcaaggccaagatccaggacaaggaaggaatccccccggaccagcaacgtctcattttcgccggaaagcaacttgaggacggccgtacccttgctgactacaacattcagaaggagagtactcttcacctcgtcctccgtctccgtggtggcatgcagatcttcgttaagacactcaccg

SEQ ID NO: 288245 - DNA, 279 bp, Glycine max
  unsure (1)..(279): unsure at all n locations
ggccgtcggggcaaggaccaagccccgatgagtaggagggcgcggcggtcgctgcaaaacccagggcgcgagcccgggtcggagcggttcgtcggtgcagatcttggtggtagtagcaaatattcaaatgananctttgaaggccgaagaggggaaaggttccatctnaacggcacttgcacatgggttagtcgatcctaagggacgggggaagcccgtctgatagcgctctgtgcgcgtactccgaaagggaatcgggttaaaattcctgaaccggga

SEQ ID NO: 288246 - DNA, 261 bp, Glycine max
  unsure (1)..(261): unsure at all n locations
gggcgatccanataagggtgaaaagtatgnacgccncgttcttggaggttctgctttaccttaccctcgagngaagaaccggangaggaaaaactagaaaagatcccaacagtgagaagccgggcgtttnnctacntncaagantgaagcattnggtcacttgcagtcatcagattttctagttatggaatcaaatctgtngcccaagatgnttgctgtgtgatgatgcattcgatggaatctttgagcttgagtcgatat

SEQ ID NO: 288247 - DNA, 279 bp, Glycine max
cgagatcttgagtcgccgatttgaaaagatgagtaagcttcagagtgatgctttgcgtgaagccatctcaggaatcatggccgattccaaggagaagaatcgcaaatttgtggagaccatcgaactccaaatcggtttgaagaactacgatccacagaaggacaagcgtttcagtggctccgtcaagttgccccacatccctcgccccaagatgaaaatttgcatgcttggtgatgctcagcatgttgaagaggcagagaagataggactggactggat

SEQ ID NO: 288248 - DNA, 276 bp, Glycine max
  unsure (1)..(276): unsure at all n locations
aacaaagaaaaaaaaaaccctagccaacacaaccatcatggccacctctgctattcagcaatcagcattcactggtcaaactgctctgaagcagctcaatgagttcgtccgcaagaccggtggcgccggcaaaggtcgcactaacatgcgccgcaccgtcaagagtgctcctcagagcatttggtatggccctgaccgtcccaagtacttgggtccattctcggagcagattccatcatacctgaccggagaattcccnggtgactacggatggga

SEQ ID NO: 288249 - DNA, 274 bp, Glycine max
  unsure (1)..(274): unsure at all n locations
aatgaaggtccttgttttcttcgttgctacaattttngtagcatggcaatgccatgcgtacgatatgttccctctccgaatgaacactggctatggtgcccgtactccggaggtgaaatgcgcaagtacgaggcttgctgtggaagcacacaacatctttggctttgagaccattcctgaagagtgcgttgaagcaacaaaggaatacatccatggcgaacaatatagatcagactccaaaacagttaaccaacaagcttacttttatgccaga

SEQ ID NO: 288250 - DNA, 278 bp, Glycine max
cacatcaaaacaaccttctttctttcaggttcttgatcagtgtcaaaaccaaaagggtggttgcaaattgcaatggctaagcatgatgttgagggtggttccttcgctgcaaaggactaccatgatcctcctccagcaccattgattgatgctgaggaactcacacagtggtccttctacagggctttgattgctgagttcattgccacaatgctcttcctttacatcacagtgctcactgtgattggttacaagagccagagtgatgtaaaggctgg

SEQ ID NO: 288251 - DNA, 282 bp, Glycine max
  unsure (1)..(282): unsure at all n locations
cggccttctccggagcagccatgaaccctgctgtgacatttgggcctgctgtcgtgagccggacctggaccaaccactggatctactgggccggccctctcatcggaggtggaattgctgggcttatctacgaggttgtcttcatcagccacacccacgagcagcttcccagcactgagtactagaggggaaaaatgaaataatanaaannaaaaatgngnatnattgantttctccggaatctncttctgnggatggnttncctncctttgngtttncntt

SEQ ID NO: 288252 - DNA, 278 bp, Glycine max
  unsure (1)..(278): unsure at all n locations
tctgctccggttatggcntccgncttgggcacttcttcaattgcngntctgccttncncgctacttctctncntcttcttccaagccttccattcanactcnctctctaacttcanggcagaactatgggcggaagttttatggaggaattggaatccatggnataaanggaagggctcagctctcggttaccaatgttgncantgnagttaactctgnanaacaggctcagantattgcttctaaagaaagccagaggccagtatacccattttctg

SEQ ID NO: 288253 - DNA, 276 bp, Glycine max
  unsure (1)..(276): unsure at all n locations
cggctattgagttacgtgaaattgtgacatctttgggtccagcatacataaaacttgggcaagcattgagcattcgacctgatatactgtcacctgtagcaatgacggagctgcagaagctttgtgataaagttccttcatttgcagatgntgtggctatggctctaattgaggaggagcttggtcagccatggcaaaacatctattctgaactatcatcttctcccattgcagctgcatctcttggacaggtatataagggtcgcctaatagaat

SEQ ID NO: 288254 - DNA, 274 bp, Glycine max
  unsure (1)..(274): unsure at all n locations
accattcctgaagagtgcgttgaagcaacaacngaatacatccatggcgaacaatatagatcagactccaaaacagttaaccaacaagcttacttttatgccagagacctcgaagtccatcccaaggacacatttgtgttcagtatagatggcaccgtactctctaatattccatactacaaaaaacatggatatggggtggagaaatttaactcgaccttgtatgatgaatgggttaacaagggcaatgcaccggcactgcccgagactctta

SEQ ID NO: 288255 - DNA, 281 bp, Glycine max
  unsure (1)..(281): unsure at all n locations
gnatcatcacacacacatactaanaagcaacaattcttctacaatggatctcctccttctggaaaagaccctcataggtctcttcctcgctgcggtggtcgccatcgccgtctccaccctccgcggcnggnaattcaagctcccaccgggcccactccccgtcccaatcttcggcaatgggctccaagtcgngaagncctcaancaccgcaacctcaccgatttggccaaaaaattcggtgacatttcctctcgcatggggcagcgcaacctcgtcgtggt

SEQ ID NO: 288256 - DNA, 282 bp, Glycine max
  unsure (1)..(282): unsure at all n locations
caagtnacactccaactccattgttggaatctggtttgcaaaaagacagagggttaattgtggagtattttggaaggatgtcttacgttgctcataacgntaatcagccccangagaaagatttgttagagggaaatttttcctttgatattaaatctcgctctagattggaaaaagtttcctctacaaaagcacaatttgtnagtggaaaaaccttcaaatatgatataattggtgctggttcacattcttcagaagattttcctgaaaaggaagatcaag

SEQ ID NO: 288257 - DNA, 275 bp, Glycine max
  unsure (1)..(275): unsure at all n locations
ttgatcgagataactagaaacagtgtgatgaaaatgaaggtccttgttttcttcgttgctacaattttngtagcatggcaatgccatgcgtacgatatgttccctctccgaatgaacactggctatggtgcccgtactccggaggtgaaatgcgcaagttggaggcttgctgtggaagcacacaacatcttnnngctttgagaccattcctgaagagtgcgntgaagcaacaaaggaatacatccatggcgaacaatatagatcagactccaaaa

SEQ ID NO: 288258 - DNA, 275 bp, Glycine max
  unsure (1)..(275): unsure at all n locations
atcgagataactagaaacagtgtgatgaaaatgaaggtccttgttttcttcgttgctacaatnttngtagcatggcaatgccatgcgtacgatatgttccctctccgaatgaacactggctatggtgcccgtactccggaggtgaaatgcgcaagtnggaggcttgctgtggaagcacacaacatctttggctttgagaccattcctgaagagtgcgttgaagcaacaaaggaatacatccatggcgaacaatatagatcagactccaaaacagt

SEQ ID NO: 288259 - DNA, 274 bp, Glycine max
  unsure (1)..(274): unsure at all n locations
cagttcccaaagtttattaacctttttggttatgttttatgcattagcagtgatcacgtttggtactgctgtgccagctggtcaatttgttcctggtataatgataggatcaacatatgggcgtcttgttggcatgtttgtcgtaaagtattacagaaggctcaacattgaagagggaacgtatgnttgctgggagctgcatcctttcttngaggctcaatgcggatgacagtnctctctgtgtcatatgggtgaaatctcaaatnacttaaat

SEQ ID NO: 288260 - DNA, 273 bp, Glycine max
ctcaagtaggctatactaaggtgaaaaaggagagatggcagctgcaacatctagtgctgtgttaaacgggtttggatctcacttcttgtgtggaggaaagaggagccatgcccttcttgctgctagcattggagggaaagttggtgcttctgttagtcctaaaagagttattgtggcagttgctgctgcaccaaagaagtcatggatccccgctgtaaaaggtggtgggagtttcatagacccagaatggcttgatggctcgctaccaggtga

SEQ ID NO: 288261 - DNA, 277 bp, Glycine max
  unsure (1)..(277): unsure at all n locations
agataactagaaacagtgtgatgaaaatgaaggtccttgttttcttcgttgctacaattttggtagcatggcaatgccatgcgtacgatatgttccctctccgaatgaacactgggctatggtgcccgtaactccggaggtgaaatgcgcaagttggaggcttgctgtggaagcacacaacatctttgggctttgagaccattcctgaagantgcgttgaagcaacaaaggaatacatccatgggcgaacaatatagatcagactccaaaacagttt

SEQ ID NO: 288262 - DNA, 273 bp, Glycine max
  unsure (1)..(273): unsure at all n locations
agaaatttaagtgaggagctagagaatgatgatgaagtctgctatgtgtgcagtggtggttgtagcacttcttcttctggcggnggtggggcccatggctgaggctgtgacatgcaccccaacagagttgagtccgtgtcttccagcaatcacttccggtgctaaaccttccaatgcttgttgcacgaagctgaagcagcaaaaaccatgcttatgtggctacctcaaaaacgctagcttgaagcagtatgttaactctcctaatgcccgant

SEQ ID NO: 288263 - DNA, 274 bp, Glycine max
acaaatgaagccatcgagatccttaagctcatgtcttccacattcttgattgcactttgccaagcaattgacttgaggcatttagaggagaatttgaaaaactcggtcaagaacaccgtgagccaagtttccaaaaggattcttaccacaggtgtcaatggagaactccatccttcaagattttgtgagaaggatctgctaaaagtggttgatagggagtatatattttcctacattgatgacccctgcagtgctacatacccattgatgcaaa

SEQ ID NO: 288264 - DNA, 275 bp, Glycine max
gaatggctcccaagggtttaacctttctggctgtgttaatatgcgtttcagcactgtcactgagtccttctgttgcgggggaagggcaaaataatggccttgttatgaacttctacaaggaatcatgccctcaggctgaagacatcatcacagaacaagtcaagcttctctacaagcgccacaagaacactgctttctcctggctcaggaacatcttccatgactgtgctgttcagagttgtgatgcttcactgttgctggactccacaagaagg

SEQ ID NO: 288265 - DNA, 247 bp, Glycine max
  unsure (1)..(247): unsure at all n locations
tcttagatctcttctttctctacgncgcacgccggaaaccatgggccggaaaaggagaggctcctgctatcggaatcgatctcggaaccacctactcttgcgtcggtgtgtggcaacatgaccgcgttgaantcatcgccaacgaccaagggaanaaaaccacgccgtcttacgtcggattcactgacaccgagcgtctcatcggtgatgcggccaagaatcaagtcgccatgaaccccatcaacac

SEQ ID NO: 288266 - DNA, 273 bp, Glycine max
  unsure (1)..(273): unsure at all n locations
gttaaaagccttagccttccctacaactccaaacaccgaagacatcatcatccatggcttgcctccgtctccactgtcggagctgtcnacagagctcttttgaacctgaatggttctggagctggagcttcagctcccagttcagccttctttgggaccagcttgaagaaggttattgcctcaagggtccccaacagcaaggtttccggtggaagcttcaagattgttgctgtagaagagaagaaagagattgaagagacccagcagaccgac

SEQ ID NO: 288267 - DNA, 273 bp, Glycine max
ttgcattcctcaattcttgtgccataccatggatggagaattagccacagaactcaccatcaaaaaccatggacacattgagaaggatgagtcatgggttccattaacagagaagatttacaagaatctagacagcatgacaagactcattagattcactgtgccatttccattgtttgtgtatccaatttatttgttttcaagaagccccggaaaggaaggctctcacttcaatccctacagcaatctgtttccacccagtgagagaaaagg

SEQ ID NO: 288268 - DNA, 275 bp, Glycine max
  unsure (1)..(275): unsure at all n locations
attcattcaagattcagcaagtgcgttttggaagcagagaccgaaatacttcgagatggnccgtacaaagcaaactgctcgtaagtcaactggaggaaaagctcccaggaagcagcttgcaaccaaggctgcacgtaagtctgcaccaacaactggtggtgtgaagaagcctcatcgttatcgccctggaactgttgctcttcgtgagattaggaaataccagaagagcactgagctcctaatcaggaagcttcctttccanaaggttggttcgt

SEQ ID NO: 288269 - DNA, 287 bp, Glycine max
  unsure (1)..(287): unsure at all n locations
aanagaatgctattctcatgaacatgccaaatgctgttctttcaatgtggagatattttgttggagatctccgtctttgaagttnctaagatgacttctccctacattaaatgtacagtctctttcttcatagcatttggaaatttggctgatgacaccatcaattttgaggcctttccccacaagctggtgcagtttggagaaattcaggaaaaagttgtattgaaattttcacaagaggantttcttacagcttggtcaactcaggtgcgtcctgcaacaactct

SEQ ID NO: 288270 - DNA, 274 bp, Glycine max
  unsure (1)..(274): unsure at all n locations
gaacaaacgtccataatgtgttgtntagcattattgatngtttgtgtgggtgtgtctgttttcggtagtttccnagtttncaaatcacatccaacgtgaatncgtcattcaacttgattgaagtatccaacgaaaattcaaacacacactaaccttactgagtgtgttcattgggaantggttcattccacacatnatatnngngannnaaaanccacaatttctcttagtgtgtgcttttttgttgaaattgttgttncttcctctgagttcc

SEQ ID NO: 288271 - DNA, 269 bp, Glycine max
  unsure (1)..(269): unsure at all n locations
tgtcttctccgcccccactcacccaccctccatacacactctcnctgagtcggtcgagttgaatcggtgagtcagtgaccgagtcgaaccatgtcggacgaagaacaccatttcgaatccaaggccgatgctggagcctccaagacctatcctcaacaagccggaaccatccgcaaaaacggttacatcgtcatcaagggtcgtccctgcaagttgttgaagtttctacttccaagactggtaagcacggtcatgccaagtgtcacttt

SEQ ID NO: 288272 - DNA, 268 bp, Glycine max
  unsure (1)..(268): unsure at all n locations
cgccctgacaaggctcgtcgcttggggcttcaaggctaagcagggctatgtgatataccgtgttcgtgttaggaggggtggccncaagaggccagttcccaaaggtattgtttatgggaagcccacaaaccagggtgttacccaactgaaatttcagcgtanaagaggtcagttgccgaggagcgagctggacggaagctgggtggacttagggtcctcaattcttactgggtgaatgaggactctacttataaatactttgaggtga

SEQ ID NO: 288273 - DNA, 272 bp, Glycine max
  unsure (1)..(272): unsure at all n locations
agctcactctttctaagtttcttctatcatctctccaccatggttctctccaaaaccggntncgaatccgacgtctctgtccactcaaccttcgcttntcgctatgtcagaacttcgctnggcaggttcaagatggcggaggagtcgataccgaaggaggcagcataccagatcataaacgacgagttgatgttggatgggaacccaaggttgaatttggcatcatttgtgacgacttgganggagccagagtgtgataaactcatcatggc

SEQ ID NO: 288274 - DNA, 272 bp, Glycine max
  unsure (1)..(272): unsure at all n locations
gtttgttgtangaagaggaatcttgagaaatggcaggggacagcaagagcaagattctgttcatcnggagggactggttacatcggaaaattcatcgtggaagccagcgccaaagctggccacccaactttccttttgtcgagggagtccactctctccaaccccgcaaaatcacccctcatcgacaatttcaaaggcctcggtgtcaatcttgttttaggagatctatacgatcaccaaagtttggtgagtgtataaagcaggtcgatgtg

SEQ ID NO: 288275 - DNA, 269 bp, Glycine max
  unsure (1)..(269): unsure at all n locations
gagataactagaaacagtgtgatgaaaatgaaggtccttgttttcttcgttgctacaattttggtnagcatggcaatgccatgcgtacgatatgttccctctccgaatgaacactggctatggtgcccgtactccggaggtgaaatgcgcaagttggaggcttgctgtggaagcacacaacatctttggctttgagaccattcctgaagagtgcgttgaagcaacaaaggaatacatccatggcgaacaatatagatcagactccaaaa

SEQ ID NO: 288276 - DNA, 271 bp, Glycine max
  unsure (1)..(271): unsure at all n locations
gcagaaagcaagctcatcctagagttttaaaaatggcagcagcctcctccatgggctctctgttncccatctttgggctggcaaggccgtgaagctgggcccatcagcccccgaagtcgggagggtcagcatgaggaagaccgtcaccaagcaggcctcctccggaagcccatggtacggcccagaccgcgtcaagtacttgggcccattctctggcgagcccccgtcctacctcactggcgagttcccaggtgactacggctgggacact

SEQ ID NO: 288277 - DNA, 268 bp, Glycine max
  unsure (1)..(268): unsure at all n locations
tgagattgaaatgtnacaacaatgtaatcatccaaatgttgtccgttatcttgcaagctcntcagggagaagagtatctttggatagtgatggagtattgcggtggtggnagtgttgctgatttgatgagcgtgactgacgagccacttgatgagggtcaaatancatatatctgtaganaggcactgaagggtcttgattatttgcactcaatttttaaagtccatagagacattaaaggtgggaatatcttattaactgaacaagg

SEQ ID NO: 288278 - DNA, 279 bp, Glycine max
  unsure (1)..(279): unsure at all n locations
aagttgttcatcttagatcaccatgactatctcattccatatttgaggnaaataaatgcaagtaaccacaaagacctacgctacaagaancatatttttcttgaaaagtgatggaancttgacgccattggccattgagttaagtaagccgcatcctcatggtnaaggatatggtcctgttagcgaagtctacgtgccttcgagcganggagttgaagcttacatttggttactggcaaaggcntatgttgttgtgaatgattcgtgctaccatcaact

SEQ ID NO: 288279 - DNA, 177 bp, Glycine max
  unsure (1)..(177): unsure at all n locations
cgtnggtgcnggtgttatccantccatcatgggagtggaanttgcctcacttcanttttaattaagtnaattggtgncgtttntacagcttctctacnttgcttgcccttttcttatactttaattgtatttgtaggatgcctattattggataataatatttttctatcccaaatg

SEQ ID NO: 288280 - DNA, 265 bp, Glycine max
  unsure (1)..(265): unsure at all n locations
tctttctctagtcntgttatttctcagcggcgtaaagcatgggtttgttgatggagnaaaccaacgagtcgttngcgagtacaaggtcaaggacctttcccaggccgacttcggccgcctcgagatcgagctggccgaggttgagatgcccggcctcatggcctgtcggancgagttcggcccctcccagcccttcaagggggcccgcatcaccggctccctccanatgaccatccagaccgccgttctcattgagagctcacgc

SEQ ID NO: 288281 - DNA, 270 bp, Glycine max
  unsure (1)..(270): unsure at all n locations
ctanccangatngggtgcctccaannacctgatcnnttnctgggttcttnttcnttgtcatcngttgcataacgggggttagatncatggagtcctgtgattgtatagatacgcagtatccgccggatgancttcttgtgaagtatcagtatatctnggatgtgctaattgctcttgcgtatttttcgattccggtggagctcatctattgtgttcagaagtctgctttctgtncgtatagatgggtgnttatgcaggttggggccttta

SEQ ID NO: 288282 - DNA, 278 bp, Glycine max
  unsure (1)..(278): unsure at all n locations
atcattcattcgcatctttctctcttctctctccanncaaagcctaactcncgnccctgttcccctctcgtatccgtcatgaaaggangaaagtccaagaccgaatctaagagagccgatcccaaacttgctgtgaataagaagggagccgccaccaaggctaggaaacccgccggcaaggggaaggcagcgaaagaccctaacaagccaaagaggcctccaagtgctttcttcgttttcatggaggagttcaggaaggtattcaacaaagaacatcc

SEQ ID NO: 288283 - DNA, 261 bp, Glycine max
  unsure (1)..(261): unsure at all n locations
gaaaaaggcacttaatgaacttgttattcttccaatgagaaggccagagcttttctctcgtgganatctgtacggccctgtaaaggaatattactttttggtcctcctggcactgggaaaacccttctggccaaggcacttgcaaccgaagctggtgcaaattttataagcataactggttcgacccttacttcaaagtggtttggagatgctgaaaaactaaccaaagcgcttttctcatttgccagcaagcttgctcct

SEQ ID NO: 288284 - DNA, 268 bp, Glycine max
  unsure (1)..(268): unsure at all n locations
cacggcgcagatccgaggagtntgggaaaccccaattcattcctctttgcttctatctcnnttaaccctaacnccagtgatggcaggtttggctccagaaggatcgcagtttgatgctcggcaatatgactctaagatgaattaattgctttccgctgatggacaagaatttttcacttcatatgatgaagtctatgatagttttgatgcaatgggccttcaagaaaatcttctcagaggcatatatgcttatggttttgagaggcct

SEQ ID NO: 288285 - DNA, 273 bp, Glycine max
  unsure (1)..(273): unsure at all n locations
gctccatagctgcagcattagggtttttcatctgcttcaatggggaatggaacaaggagttttggtaaagacgaaggaacaagactcacactctctgtgtgaggngtggccgccgcagcttccatctccagaagagtcgttgcgccgcttgtgctttccccgccgcacgcactaggaaatataactggagcgtcaaggcaatccgcagaaagaccaccggaactggcaggatgaggtacttgcgtaacgtgcctcgccgattcaagagtggct

SEQ ID NO: 288286 - DNA, 255 bp, Glycine max
  unsure (1)..(255): unsure at all n locations
tagagttntgatgcttcactgttgctggactccacaagaaggagcttgtctgagaagnaaacagatagaagctttgggttgagaaatttcaggtacattgagaccatcaaagaagctttggaaagagaatgccctggagttgttcatgtgctgatatcctcgttctctctgccagagatggcattgtttcgctaggaggtccccatatccctcttaagactggaagaagggatggtagnaggagcagagctgatg

SEQ ID NO: 288287 - DNA, 254 bp, Glycine max
cctttctggctgtgttaatatgcgtttcagcactgtcactgagtccttctgttgcgggggaagggcaaaataatggccttgttatgaacttctacaaggaatcatgccctcaggctgaagacatcatcacagaacaagtcaacttctctacaagcgccacaagaacactgctttctcctggctcaggaacatcttccatgactgtgctgttcagagttgtgatgcttcactgttgctggactccacaagaagga

SEQ ID NO: 288288 - DNA, 247 bp, Glycine max
  unsure (1)..(247): unsure at all n locations
tgcaacttacgccaatgcaagnnccaccctggaggcaaganagggtgttgggnaggcttcattacggcttttagatctggtgcagttatgggttttctccttgctgcaaatggtcttttggttctttacattgccatcacttgttcaagatttactatggtgatgactggggtggtcttttgaggccatcactggttatggtcttggtgggtcttctatggcntgtttggaagagttggtggaggta

SEQ ID NO: 288289 - DNA, 258 bp, Glycine max
  unsure (1)..(258): unsure at all n locations
attggcataatcctctccatcctaagggtctatctcaacatccctctgccagaaagacttgcttgntacaactacaagcttcttggaataagggtcattaggaagggtatccctccacccccagcaaagaagggccaaagtggagcctatttgtatgcaaccacaggacagttttagaccctgtggttacagctgttgcattaggaaggaaaattagctgtgtcacatatagcataagcaaattcactgaaataattt

SEQ ID NO: 288290 - DNA, 242 bp, Glycine max
  unsure (1)..(242): unsure at all n locations
ctcgccatctgggccacccaagttatcctaatgggtgctgttgagggttatcacnattgctggtgggcccctcggtgaggtcaccgacccaatctaccctggtggcagctttgacccattgggccttgctgatacccagaggcttttgctgagcttaaggtgaaggaactcaagaacgggagattggccatgttctctatgtttgggttcttgttcaggccattgtcaccggtaaggtccat

SEQ ID NO: 288291 - DNA, 251 bp, Glycine max
  unsure (1)..(251): unsure at all n locations
tatgcctgtgcgacacagttgattganaggctgatttatgctgagggtgntgaaaatggcttggagttcacaattgtnaggccttttaactggattggacctcgaatggatttcattcctggcattgatggtccaagtgaggtgttcctcgggttcttgcatgctttagcaataatcttctcagaggagagcccctcaagcttgtggacggtggccagtcccagagaacctttgtttacattaaagatgct

SEQ ID NO: 288292 - DNA, 250 bp, Glycine max
tacggctgggacactgctgggctttccgcagacccagaaaccttcgccaagaaccgtgaactcgaagtgatccactccaggtgggccatgctcggagccttgggctgcgtcttcccggagttgctgtcccgcaacggggtaagttcggagaagccgtgtggttcaaggccgggtcccagatcttcagcgagggtgggctcgactacttgggcaacccaagcctgatccacgcccagagcatcctcgccat

SEQ ID NO: 288293 - DNA, 233 bp, Glycine max
  unsure (1)..(233): unsure at all n locations
tctaaaaganatctttttctgctctttgaagaaagaagggtctttgcttgattttggagatgtctctgctctcagatctcatcaaccttaacctctccgataccaccgagaaggtgatcgcaggtacatatggatcggtggatcaggaatggacctgaggagcaaagcaaggactctcccaggaccagttagcgacccttcagagcttcccaagtggaatatgatggttccag

SEQ ID NO: 288294 - DNA, 251 bp, Glycine max
  unsure (1)..(251): unsure at all n locations
tcaaatggcaacagtgagaacaccattgaattttgattctagcaagcagagcttttgtcaattttctattgaccttctcggtggaggaattttagtggacaaaactgncagattggatcacacttatacaaaattctccattagtaacttgttgagagttgctgcttggaagaaaggctgtttaatggtcaagattgtgatgtctgggaatgcagcagtcaanaggagtgattgggcctcattggtacaag

SEQ ID NO: 288295 - DNA, 252 bp, Glycine max
  unsure (1)..(252): unsure at all n locations
gttgatcgagataactagaaacagtgtgatgaaancgaaggtccttgttttcttcgttgctacaatnttngtagcatggcaatgccatgcgtacgatatgttccctctccgaatgaacactggctatggtgcccgtactcggaggtgaaatgcgcaagttggaggcttgctgtggaagcacacaacatcttnggctttgagaccattcctgaagagtgcgttgaagcaacaaaggaatacatccatggcgaa

SEQ ID NO: 288296 - DNA, 251 bp, Glycine max
aaagggagaaagggtgtgagaatggagagcaaagaggaagatgtaagggttggagcaactaagttctcagaaaggcaaccaattggtacagcagctcagggtgacaaggactacaaagaaccacccccagcacctttgttgagcctggtgagctaaagtcatggtccttctacagagctggaattgctgagtttgtggccactttcttgttcctctacattaccatcttaactgtcatgggtgtcaacagg

SEQ ID NO: 288297 - DNA, 250 bp, Glycine max
  unsure (1)..(250): unsure at all n locations
ctttcaaggaaaatggctcttcttggatttcttccgggacttttcntaatggtcacttcatgtcaaggggtatggttttggaggttggaccaatgcacatgccaccttctatggaggtggtgatgcttctgggacaatggtggggcttgtggttatggaaatctgtatagccaaggttatggaactgatacaacagcactgagcactgctctgttcaacaatggcttgagctgtggtgcatgctatcaaa

SEQ ID NO: 288298 - DNA, 248 bp, Glycine max
  unsure (1)..(248): unsure at all n locations
tccgatcctctgtcctctcgaagctttcatcgttcaacatattctcaccatctcagtcatgggcctgctatcttgttttaggtctaccgtcctgagaaaatgttccaaaggaagctctggcatgtcaagattcctgttacgaacaattttcaacgaaacttgatttcgtctggtggcaatgaatcgtattatgggtattttaacnggagatcatacacttcactttatatgggaactggaactgtggg

SEQ ID NO: 288299 - DNA, 250 bp, Glycine max
gctgttgtttacaaggactgggttttcactgatcaagcactgcccaatgatcttgtcaagagaggagttgccgttaaggatccatctgctccccatggagttcggcttttgattgaggactatccttatgcttctgatggctagagatatgggatgccatcaagtcctgggtgcaagaatatgtgtcattctactacaagttcagatgcagcaattcaacaagaccccgaactccaagctggtggaaaga

SEQ ID NO: 288300 - DNA, 250 bp, Glycine max
caagtgttagggaggacaaataccgcccctttatgcgcgaagacagtgagaagaacatcaaatggagatatggtgctcctccaaattatgacgttgtcaacaaattatttgatgaaggcagaaccaaggtatggcctcgggttcacttgaagaaaaggtgcagactttagtgaagaattgggagatggaaatgttccacaaggaggatttcaaggataacagatcagtggacccagagaaatacactttc

SEQ ID NO: 288301 - DNA, 251 bp, Glycine max
  unsure (1)..(251): unsure at all n locations
cgaaggaagaaataatcgccaatggcaattgaacacgaagacgatctcaaagncgagaagaaccctcgaccccttcgacgaggatgacatcgccctcctcaaaacctacggtttgggaccttattccacaagcataaacangccggagaaggaaatcaaagatatggccaagaaagtgaatgacttatgtggtatcaaggagtctgatactggattagcagcaccaagccagtgggatcttgtttctgata

SEQ ID NO: 288302 - DNA, 249 bp, Glycine max
  unsure (1)..(249): unsure at all n locations
ccacaagccaccccctcccgacaactacaccatcgccctccacaaggccctcctcttcttcaacgcccagaaatccggaaagctccctcgccacaacaatgtttcctggagaggcaactccnggttgcaggacggcaaggtgacggcgtgccgcccgtcattaaggatctggtgggcggttactacgacgccggcgacgccataaaattcaacttccccatgtccttctccatgaccatgctgagctgg

SEQ ID NO: 288303 - DNA, 250 bp, Glycine max
  unsure (1)..(250): unsure at all n locations
cagacagacacacactcggttctgccttcacaaaaaaattanccgagatcccctttttctcctaagaaaagccatggctaagggtcccggtctctactctgacatcggcaagaaagccagggatctgctgttcaaggataccacagtgaccagaagttcaccatcaccacctactcacccactggagttgctataacagcatcaggaaccaggaaaagtgaactgtttgtggctgatgtcaacacccagt

SEQ ID NO: 288304 - DNA, 249 bp, Glycine max
  unsure (1)..(249): unsure at all n locations
gattaactctttcttctcataactctgccgccgcaacagccccaaatccaatggcttcagagaagaaactttcgaacccaatgagggagataaaggtgcagaagctcgtcctcaatatctccgttggcgagagtggagtcgtcttaccagagccgctaaggtgttggaacagcttagtggccaagcccctgtgttttccaaagcaaggtacacggttncgttccttgggattagaagaaatgagaagat

SEQ ID NO: 288305 - DNA, 256 bp, Glycine max
  unsure (1)..(256): unsure at all n locations
gaaaggggtaggtgttgtacagaaatagaaattaaaaaattgagtgaaaaattaaaagncgaaatttttttagaagaagagtgatagggatatggggaggggaagagtggagttgaagaggatagagaacaagataaacaggcaagtcacttttgcaaagaggagaaangggcttctcaagaaagcctatgagctatcctgttctctgtgatgctgaggttgccctcatcatcttctccaaccgaggcaagcttta

SEQ ID NO: 288306 - DNA, 247 bp, Glycine max
  unsure (1)..(247): unsure at all n locations
cgagataactagaaacagtgtgatgaaaatgaaggtccttgttttcttcgttgctacaattttngtagcatggcaatgccatgcgtacgatatgttccctctccgaatgaacactggctatggtgcccgtactccggggtgaaatgcgcaagttggaggcttgctgtggaagcacacaacatctctggctttgagaccattcctgaagagtgcgttgaagcaacaaaggaatacatccatggcgaac

SEQ ID NO: 288307 - DNA, 247 bp, Glycine max
  unsure (1)..(247): unsure at all n locations
tatcgagataactagaaacagtgtgatgaaaatgaaggtccttgttttcttcgttgctacaatnttngtagcatggcaatgccatgcgtacgatatgttccctctccgaatgaacactggctatggtgcccgtactccggaggtgaaatgcgcaagttggaggcttgctgtggaagcacacaacatccttggctttgagaccattcctgaagagtgcgttgaagcaacaaaggaatacatccatggc

SEQ ID NO: 288308 - DNA, 240 bp, Glycine max
  unsure (1)..(240): unsure at all n locations
tgctggactccacaagaaggagcttgtctgagaaggaaacagatagaagctttanggttgagaaatttcaggtacattgagaccatcaaagaagctttggaaagggaatgcccaggagttgtttcctgtctgatatcctcgttctctctgccagagatggcattgtttcgctaggaggtccccatatccctcttaaaacaggaagaagggatggtagaaggagcagagccgatgtggtag

SEQ ID NO: 288309 - DNA, 254 bp, Glycine max
  unsure (1)..(254): unsure at all n locations
gcagaactctgcttcttcggattccgattcgcacgcgccgtcaccatggtgaacgttccgaaaacaaagaagncatnctgcaagagtaaggagtgcaggaagcacacgctgcacaaggttacccaatacaagaagggtaagatagcattgctgcccaaggaaaacgccgttatgatcgcaaacaatccggttatggtggacaaactaagcccgtcttccacaagaaggctaaaaccaccaagaagattgttctg

SEQ ID NO: 288310 - DNA, 162 bp, Glycine max
  unsure (1)..(162): unsure at all n locations
atttgactttgaccctcttgatgttactaagacttggcctgaggacattatacccttgcancctgttggtcgcttggncctgaataaaaacatngatnatttcnttgcngngnatgaacaanttnnantttgncctggcantnngggtncnggnggatactc

SEQ ID NO: 288311 - DNA, 159 bp, Glycine max
  unsure (1)..(159): unsure at all n locations
aaccatggaaaaatctaagcgactctttatgaaatccaagcgatcttttcgnaggcgtttgcccccgatccaatcgggggnccgnattgnttatnaaaacntngggttaattagnnggtttattngnggacnagggaaaattttatncannngggntaa

SEQ ID NO: 288312 - DNA, 285 bp, Glycine max
  unsure (1)..(285): unsure at all n locations
ctcgtgcctctagggttatcatatctccatttccatttcctctctctcagtttccaagaatcttaagctatgggaaagtcttacccaaccgtgagcgctgattaccagaaggccgttgagaaggcgaagaagaagctcagaggcttcatcgctgagaagagatgcgctcctctaatgctccgtttggcatggcactctgctggaacttacgacgtgagctcgaagaccggtggtcccttcggaaccataaagcacccctccgaactcgctcacggcgctaacncc

SEQ ID NO: 288313 - DNA, 284 bp, Glycine max
  unsure (1)..(284): unsure at all n locations
cgctctgtttctgtctctgtgtttgcggctgaggattccgaacgagcgaccttcttcgtttctcgcaaagtttaagtcatcatgggtaangnaaagactcacatcaacattgtcgtcattggacatgtcgactctgggaagtcaactaccactggtcatttgatctacaagcttggaggtattgacaagcgtgtgattganaggttcgagaaggaggctgctgagatgaacaagaggtcattcaagtatgcctgggtgcttgacaagctcaaggctgagcgcga

SEQ ID NO: 288314 - DNA, 280 bp, Glycine max
  unsure (1)..(280): unsure at all n locations
gtctgtcttctcttctcttctccggttatngcgtccgccttgggcacttcttcaattgcggttctgccttcngggtactctcttcttcttcttccaagccttccattcacactctctctctaacttcagggcagaactatgggcggaagttttatggaggaattggaatccatggcataaagggaagggctcagctctcggttaccaatgttgccactgaagttaactctgtagaacaggctcagagtattgcttctaaagaaagccagaggccagtata

SEQ ID NO: 288315 - DNA, 280 bp, Glycine max
  unsure (1)..(280): unsure at all n locations
gagtgcggtgcggcgatcctagcactctcttctgcanctttcgccgacagcttcattcaccatggctgagcaaaccgagaaggcttttttgaaacaaccaaaagtgtttctcagcccgaagaaaactgggaagggaaagagacccggaaagggtgggaaccgcttttggaaatccattgggcttggatttaagactcccagggaagccatcgaaggaacctacattgacaagaagtgccccttcactggcaatgtttccatccgtggccgtatcttggct

SEQ ID NO: 288316 - DNA, 278 bp, Glycine max
cgccgtttctgtgcttttactctgctaccttgtgacaatggtgagggttagtgtgttgaatgatgctcttaagagcatgtacaatgctgagaaacgggggaagcgccaggtcatgattaggccatcctcaaaagtgattataaaattccttttggtgatgcaaaagcatgggtacattggagagtttgagtacgttgatgatcacagagctggaaaaattgttgttgaattgaatggtagactgaacaaatgtggggttattagtccgcgttttgatg

SEQ ID NO: 288317 - DNA, 279 bp, Glycine max
  unsure (1)..(279): unsure at all n locations
ccatgttgctggaagcaaaggaagactgggatatgcttcattgataccatatgttgagcncagtngtgcaaagctccaaagtgctgaagtttattttgacttcttccctgtggaggttgatagtcaagagggagttgctcacattggtgaattgaaatctggtgtctatgttccattgcctacaaaaactaatttggtggaaactcccaaggaatggcaactggatctaccttgtgacaaaattcctagtgtcttgactacaactgatgagagattggt

SEQ ID NO: 288318 - DNA, 296 bp, Glycine max
  unsure (1)..(296): unsure at all n locations
atgatatcgaatttggcatttgtattccgtaatatcttttccaagaagggcatgaagggaaagtctgtcagtggaatgaattactatgcttgtttatctattttgtcccttgcaattntcacacccttcgcaattgctgtggaaggaccacagatgtgggcngcnggatggcaaacagctatgtctcanattggaccccaattncatatggtgggtagctgctccanagtgtattctatcatctatacaatcaagtntcgtatatgttctctggatcagatctctcccttgangtt

SEQ ID NO: 288319 - DNA, 292 bp, Glycine max
cgatactcaaggggtcttaatctattgaggagctgatgtcttcatacttgccttttctctcataagcaaggctagctatgaaaatattgcaaagaagtggatccctgaactaaggcattatgcccctggtgttccaataattctcgttggaacaaagttagatcttcgggatgataagcaattttttatggaccatcctggtgcagtgccaattactacagcacagggagaagaattgagaaagctgattggtgctccggcctacattgagtgtagttccaaaacgcaacag

SEQ ID NO: 288320 - DNA, 161 bp, Glycine max
  unsure (1)..(161): unsure at all n locations
cgaaactcgagagtgtaaggttttgcatttcatttgacgaagagtgaganagtcttatctgtcgtctctgatctctgatcgcatcttcattcccgaaaatggctgtttcggctatcactggagcgaggctaactctagggatgtctctttcctcttccaca

SEQ ID NO: 288321 - DNA, 283 bp, Glycine max
  unsure (1)..(283): unsure at all n locations
ctatttttcttcctcagtagtgtcatttacgcttctcttctctgcagcaantatgcctaaccctaaggtcttcttcgacatgaccatcggcggtcaatctgctggccgcatcgtgatggagctctacgccgacgtcactccccgcaccgccgagaacttcctcgcgctttgcaccggcgagaagggcgtagggcggagggcaagcccctccactacaagggctcgtccttccaccgcgtgatcccgagtttcatgtgtcagggtggcgattcaccgccggaaa

SEQ ID NO: 288322 - DNA, 282 bp, Glycine max
atttccaccaggaggcctaccatcactaagattacccatggtagtaagtagccatgaaaccagtttagttgctcgatgtcgtagagtgtatgcacacgctcatgattatcacatcaattctatttcaaataacagcgatggtgaaactttcatatcagctgatgatttgcgaataaatctttggaacctggaaattagcaatcaaagttttaatattgttgatgtaaagcctgcaaatatggaggatctgacagaggttataacatcagcagaatttcaccc

SEQ ID NO: 288323 - DNA, 188 bp, Glycine max
  unsure (1)..(188): unsure at all n locations
acgnaactcattaatacacagttccactatggcaagccacattggaactgtgtatnaatgagttttcgtggatttcaattgcgggttgcgcttgagatttacaatgtttcagtcgtgtatgtgttttatngncgagaacaatgtggcttggtggtttagtgatttataaattttttattgttgctaaa

SEQ ID NO: 288324 - DNA, 280 bp, Glycine max
  unsure (1)..(280): unsure at all n locations
caanaccacnatntaagtaagnnttgananaagagtgcgtttgtttgtttgaaattaactaannanannngttngnnatccatcngangaaacaagggtcacaaganaaaggggaacttggtgattatgcgaaagaatgtgttggntatcaacagcatcancagtgttaagggngtcattgganccggcattaacatcattggnngtgtcgtcgacaccgttactgctttggcgtcccacatctccatccagctcatcagtgccaccaaggctgatggac

SEQ ID NO: 288325 - DNA, 278 bp, Glycine max
gcaagctagctaggttgaaaatagtttggttttgtagtaagtgaggtgaggtgccaaaatggtgaaagataactcttggtactttcgatgactcttttggtgttgcctctcttaaggcttatttggcagagttccatgcaactctgattttcgtgttcgctggtgttggttcagccatcgcttacaacgagcttacaaaagatgcagccttggatccaacggggctggtggcagtagctgtggcccatgcatttgcactgtttgtaggtgtctccgtc

SEQ ID NO: 288326 - DNA, 282 bp, Glycine max
  unsure (1)..(282): unsure at all n locations
gcggcggtccaaacactcttctctgcagcttttgcctacaactcccttcaccatggctgaancaaaaccganaaagcttttctgaagcaaccaaaagtgtttctcagcacaaagaagactgggaagggaaagagacctggaaaaggtgggaaccgcttttggaagtccattgggcttggatttaagactcccagggaagccatcgaaggaacctatattgacaagaagtgccccttcactggcaatgtttccatccgtggccgtatcttggctggaacatgt

SEQ ID NO: 288327 - DNA, 286 bp, Glycine max
ctgaagtaactgatgacaagaaggtcataaagaagatcctgaaggacaggggaaggatatgagcgtccaaatgagggggccattgttaaagtgaaactaattggtaagctacaagatggtgctgcctttttgaaaaagggccatgatgaagaagagaagctgtttgaattcaaaacagatgaggaacaagttgttgatggacttgatagagctgtattgactatgaagaagggtgaggttgcatgttgaccatgcacctgaatatgctttggttcatcagagtccc

SEQ ID NO: 288328 - DNA, 278 bp, Glycine max
  unsure (1)..(278): unsure at all n locations
caaccgtctgtacatggaagcaagaccattggaggaaggtcttgctgangccattgatgatgggcaagattggaccaagggatgaccccaaggttcgttccaagatcttgtctgaagagttcggtnnggacaaggatcttgccaagaaaatctggtgctttggccctgagacccttggacccaacatggtggttgatatgtgcaagggagtccagtatttgaatganatcaaggattctgtggttgctggattccagtgggcatcaaaagaagtgctc

SEQ ID NO: 288329 - DNA, 277 bp, Glycine max
cactcattaattgcaagaatggcacttcgttgcttggtgatgtccctttctgttctcttgacttcttggtcttgcgagagaaagccatgccagagacgaagatttttggcatgctgtttggccaaacactcccattccaagttcattgcgagatcttctaaagcctggccctgcaagtgttgaaatcgatgatcaccctatgcaaattgaagaaacacagtacccgaaaaccttcttctataaagaagaccttcatccaggcaaaacaatgaaagta

SEQ ID NO: 288330 - DNA, 279 bp, Glycine max
  unsure (1)..(279): unsure at all n locations
actgtaactagccgcagcacgaggagcagcctcaggaggagaaggatgtctcacaggaagttcgagcacccaaggcacggttcactgggatttcttcccaggaagcgtgctgctcgtcacaggggaaaagtgaaggcattccccaaggatgacccatccaaggcacccaagctcactgcattcttgggttacaaggccggtatgactcacattgttagagaggtcgagaagccaggatcaaagcttcacaaganggaaattgtgagcctgttacaanta

SEQ ID NO: 288331 - DNA, 287 bp, Glycine max
  unsure (1)..(287): unsure at all n locations
ctggttctttgaagaagaacccttctctttgcgcgtgtcccgttcaccttctccaatcctccttccatccccactgtgtgatctgancctaaaccctatagcccatgactaccatggaggttaagctatggaatgacaagcgcgagagagaaatgtatgacaactttggggagctttatgccattatcaaagccgctgagaggcttgagaaggcctatgttagagatataatctcaccccaggaatatgagttagagtgccagaagctcatagctcatttcaaaacc

SEQ ID NO: 288332 - DNA, 279 bp, Glycine max
  unsure (1)..(279): unsure at all n locations
tttcaatgtgcctgccatgtatgttgcaattcaggctgtcttgnctctgtatgccagtggaagaactacaggtattgtgcttgattctggtgatggtgtgagccacacagttcccatatatgaagggtatgctcttcctcatgcaattcttcggttggaccttgctggccgtgatttaacagagtacttggtgaaaatccttactgagagaggatactccttcagcacctctgctgaaaaggaaatgtccgtgatgtgaaggagaaattggcatatgtg

SEQ ID NO: 288333 - DNA, 279 bp, Glycine max
  unsure (1)..(279): unsure at all n locations
gagaaattcgcaaaccctaatttcggaaagatcggcgatggctgcctccaaggatcgcgagancnttcgtctacatccgccaagctcgccgaacaggccgagcgatacgaagagatggtggaatcaatgaagaacgttgcgaatctcgacgttgaactgactgtggaggagcggaatttactttctgttgggtacaagaatgtgattggtgctcggagagcatncgtggaggatcctgtcttccattgagcaaaaggaagaaacaaaagggaacgagtt

SEQ ID NO: 288334 - DNA, 276 bp, Glycine max
  unsure (1)..(276): unsure at all n locations
ctctgctcgtgcctctagggttatcatatctccatttccatttcctctctctcagtttccnagaattcttaagctatgggaaagtcttacccaaccgtgagcgctgattaccagaaggccgttgagaaggcgaagaagaagctcagaggcttcatcgctgagaagagatgcgctcctctaatgctccgtttggcatggcactctgctggaattacgacgtgagctcgaagaccggtggtcccttcggaaccataaagcacccctccggaatcgcta

SEQ ID NO: 288335 - DNA, 288 bp, Glycine max
  unsure (1)..(288): unsure at all n locations
cagagaagctaagangcgcagccgtaagcaaaagctcgtggaattgctagcaatggcgaggattcaaggtttacgagctgaggcagaagacgaaggctgatctgctgaatcaactgaaggacctgaaggcggagttgccttgcttcgtgttgctaaggtcaccggtggtgcccctaacaagctttccaagataaaggtggtgaggttgaacattgcccaggttttgacggtgatttctcaagaagcagaaggccgcgttgagggatgcctacaagnataagaagtact

SEQ ID NO: 288336 - DNA, 218 bp, Glycine max
  unsure (1)..(218): unsure at all n locations
cgttctttcggagagttcgaagatgtcgggcgttaccaacaacaacgaggaagacaagaagccaaccgaacagggagcacacatcaaccttaaggttaaggggcaggatgggaatgaagtttttttcaggatcaagagaagcacttcaattgaagaagcttatgnaatgcttactgtgaccgacagtcggtggatttcaactccattgcttttctgtt

SEQ ID NO: 288337 - DNA, 274 bp, Glycine max
  unsure (1)..(274): unsure at all n locations
gctctgctttcattcacccttggtgtgaaacagatgatttgctgctgtaacaaaatggatgctaactacacccaagtattccaaggccaggtatgatgaaattgtgaaggaagtctcttcctacttgaagaaagtaggatacaaccctgacaagattccttttgttcctatctctggttttgagggagacaacatgattganaggtccacaaaccttgactggtacaagggtccaactctgcttgatgcacttgaccagattagtgagcccaag

SEQ ID NO: 288338 - DNA, 279 bp, Glycine max
  unsure (1)..(279): unsure at all n locations
ctgctgcataggaagaaaccctagcctctcaccctccctgcgacacgatgcagntctttcgtgaaaaccctaacgggtaagacgatcacccttgaggtggagtcttctgacaccatcgacaacgtgaaggccaagatccaggacaaggaaggcatccctccggaccagcagcgccttcatcttcgccggaaagcagctggaggacggccgcaccctncgccgactnacaacatccagaaggagtccacccttccaccttcgtcctccgtctccgcggtg

SEQ ID NO: 288339 - DNA, 286 bp, Glycine max
  unsure (1)..(286): unsure at all n locations
gcaggagcttgcagcttatttcactcactgcaaccttcaaaccccacatttgagngctagctttgttgaatgcaatgactgtgtgcttcaaggcaaagaaccttgcctcagctgctaactttgccaggaggctgcttgagaccaatcctactgttgaaacccaagccaagacagcaagaaaagtgttgcagctgcagagacaaatatgactgatgccaaaccattgaactatgatttcagaaacccatttgttacttgtggtgcaactatgtgcccatctatcgag

SEQ ID NO: 288340 - DNA, 285 bp, Glycine max
  unsure (1)..(285): unsure at all n locations
aatatgcttcgggctatcagaaactgtgatcctgagggtcctctgatgctctatgtctcaaagatgattccagcatctgacaagggcagattttntgcttttggtcgtgtattctctggcagagtttcaactggtttgaaggtgaggattatgggaccaaattatgtccctggggagaagaaggatacgtatgttaaaagtgttcaaagaactgtcattggatgggaaaaagacaggaaactgtggaagatgtcccctgtggtaacactgttgctatggttggtt

SEQ ID NO: 288341 - DNA, 272 bp, Glycine max
  unsure (1)..(272): unsure at all n locations
gatgatgagcgaaggtcaaatcttcattttgtagttgttggaggaggtccaactggtgtggaattcncagccgagctgcatgattatgtccaagaagatctaatcaaactatatccaactgttaaagataaagtgaaaataacattgattcaatctggagatcatatcttgaacatgtttgatgaancgaataagttcatttgcggacaaaagtttacaagagatggggtagaagttcaaacaggatgccgggttgtcgctgttaatgacaa

SEQ ID NO: 288342 - DNA, 272 bp, Glycine max
caacaagtctgttcaagttacttctgaaatacaggccagaggacaaagcagaaaagaaggagaggctcttgaaaagggctcaggcagaggctgaaggcaaaaccgttgaagctaagaagcccattgttgtgaagtatggtctcaaccatgttacctacctcattgagcagaacaaagcacagcttgttgtgattgctcacgatgtggacccaattgaattggttgtcctggctcctgcattgtgcaggaagatggaattccgtatgcattgt

SEQ ID NO: 288343 - DNA, 239 bp, Glycine max
  unsure (1)..(239): unsure at all n locations
gatggcaaatgaactacccgtcaaagcttttggttgggctgcttcagacacttctggcacccttgccccttttcatttctccagaagggaaaatggcgtcgatgacgtcactnctcaagattctcttctgcggggtttgccactctgatctccacactctcaaaaacgactggggtttcaccacctaccctgtcgttcctgggcatgaaattgttggtgttgtgacagaagttggaaac

SEQ ID NO: 288344 - DNA, 270 bp, Glycine max
ggccaatgttgccatcaagaatggcaaaaactacaatgtcattgtggaaatcgccactatcctctccccggaagagcttttggccgtgagacgtgcttatctcaaccgctacaagcactccttggaagaagatgttgcagcttcatacctctggccatctacgccagcttttagtggggttggtgacctcatataggtatgttggtgatgagatcaatccaaaattggcacaaactgaggctgaaattcttcatgatgctgtgaaagaga

SEQ ID NO: 288345 - DNA, 271 bp, Glycine max
  unsure (1)..(271): unsure at all n locations
ctttgcactgaagctgctttgcaatgcattagggagaagatggancgtaattgacttggaggatgagacaattgatgcagaagtactgaattccatggcagttacaaatgagcatttccagactgccctggaacaagcaacccatcagctttncgtgaaactgttgttgaagtgcctaatgtcagctgggatgacattggaggcctcgaaaatgtcaagcgtgaactgcaagagactgtacaatatccagttgagcacccagaaaagtttg

SEQ ID NO: 288346 - DNA, 271 bp, Glycine max
caatagctgatggaagccttcttgatttcttgcgccaagtttccacatttgggctttcacttgtaagacttgatatccgtcaagaatcagatcggcacactgatgttatggatgctattacaaaccacttagagattggatcttatcgagagtggtctgaggaacgcaggcaggaatggctgctatccgagctcagtggaaagcgccctctctttggtctgatcttcctaaaacagaagaaattgctgatgtattggaaaccttccatgtc

SEQ ID NO: 288347 - DNA, 270 bp, Glycine max
cagcaaggctttcattgttagatcggggttttatatatggcaatagctcatatacgtggaggtggtgaaatgggaaggcagtggtatgaaaatgggaagctgttgaagaaaaagaacactttcactgatttcattgcatgtgctgagtatttgattgaaaaaaaattctgttctaaggaaaaactgtgcatcgaaggaagaagtcgctggtggtttgctaattggtgcagttctaatatgagaccagatttattcaaggctgctgttgcc

SEQ ID NO: 288348 - DNA, 272 bp, Glycine max
  unsure (1)..(272): unsure at all n locations
ttagagatatgagcatgtctcccccaggctctcatggagtgaaagatgcttactgtttgctccaactttggagacagtatcacaactgaccacatctctccagctggcagcatacataaggacagtcctgcagccagataccttatagaacgtggggttgatagacgggacttcaactcctatggaanncgccgtggtaatgatgaggtgatggcccgaggaacttttgccaatattcgcattgtcaacaaatttttgaatggagaagttgg

SEQ ID NO: 288349 - DNA, 273 bp, Glycine max
  unsure (1)..(273): unsure at all n locations
ctttggaaagagaatgccctggagttgtttcatgtgctgatatccnccgttctctctgccagagatggcattgtttcgctaggaggtccccatatccctcttaagactggaagaagggatggtagaaggagcagagctgatgtggttgagcagttcctcccagaccacaatgagtccatttctgcagttcttgacaagtttggtgccatgggaattgacacccctggcgtcgttgcatgcttggagcacacagtgttggtcgaacccattgtg

SEQ ID NO: 288350 - DNA, 277 bp, Glycine max
  unsure (1)..(277): unsure at all n locations
cactctgggaagtcaaccaccactgggccacttgntttacaagcttggaggtattgacaagcgtgttattgagaggtttgagaaagaagctgctgagatgaacaagaggtcattcaaatacgcctgggtgctcgacaagcttaaggctgagcgtgagagnngnattaccttgatattgcatatggaagttttganaccaccaaatactactgccangttattgatgctcccaggaccatcgtgattnccntcaggaacatgattacnggaattcccc

SEQ ID NO: 288351 - DNA, 223 bp, Glycine max
  unsure (1)..(223): unsure at all n locations
cttcacctctcaannatcnagcttgctccnatctntctanatgtaataanatgcgttgcaaataggggcactagcttcactttatgttgtttcagctgtgngtcaacaagtcatgtnaganactnactatgttgttttcnctttcgtggntttaataaattatgcggccntgttccataaaacncnnnncacaanaacancaaaaaaaacnaanagggggggc

SEQ ID NO: 288352 - DNA, 268 bp, Glycine max
  unsure (1)..(268): unsure at all n locations
aaccctactcattctccatacctcaacgaagaggttaaagagacggcaacactttgctgtccgccttgaccgagcagagcttcgtcttggccctcgattttggcctaaagtactactcagtcacaacagacacnnnnnnnnnnnnnnnnnnnnnnaatggnaccgaagcagaccanggctgagaagaagatcgcttacgatgcgaagtgtgccgacttaatggaggagtacggcccagatcncgttgtgaactccgataacgtgggat

SEQ ID NO: 288353 - DNA, 273 bp, Glycine max
  unsure (1)..(273): unsure at all n locations
caaagaacaagtcaagcttctctacaagcgccacaagaacactgctttctcctggctcagaaacatcttccatgactgtgctgttcagagttgtgatgcttcactgttgctggactccacaagaaggagcttgtctgagaaggaaacagatagaagcttgggttgagaaatttcaggtacattgagaccatcaaagaagctttggaaagggaatgcccaggngttgtttcctgtgcnccatatcctcgttctctctgcccagagatggcattt

SEQ ID NO: 288354 - DNA, 272 bp, Glycine max
  unsure (1)..(272): unsure at all n locations
atcgtattaaaggaangattaanatggnnggctacagttggtattcctgagaatacnggtataggcattggcctgtgntatgcatagttcttttagggggcgcgncagttcctgatatttacacccatctgctctcaagactgtgaattatggaatcctgcttgcacaaaagcaatggctatgtcatttaatccaaaacccgtgttctgatgcctggagtttggaatttctgcaagcgtnacggatttcatgtgatatcattgtgtcaangg

SEQ ID NO: 288355 - DNA, 272 bp, Glycine max
  unsure (1)..(272): unsure at all n locations
gtgttcccagaacctattgtgttttaaatccacaaaatccttttgtgttaaataggtggatgggaaaactgactttcccccagggcacttcccgangtgttaagagaatgcctctttctatanggggaggagctggtgcaaanaatgctattctcatgaaccatgccaaatgctgttctttcaatgtgganatattttgttggagatntcgtctttgaagtttctnnagatgacttctccctacattaaatgtacagtcctctttcttcntc

SEQ ID NO: 288356 - DNA, 270 bp, Glycine max
  unsure (1)..(270): unsure at all n locations
taagacagcaggacggtggtcatggaagtcgaaatccgctaaggagtgtgtaacaacttcacctgccgaatcaactagccccgaaaatngatggcgctaaagcgcgncgacctatacccggccgtcggggcaaggaccaagccccgatgagtaggagggcgcggcggtcgctgcaaaacccagggcgcgagccggggcggagcggtcgtcggtgcagatcttggtggtagtagcnaaatattcaatgagantttgaaggccgaagagggg

SEQ ID NO: 288357 - DNA, 271 bp, Glycine max
  unsure (1)..(271): unsure at all n locations
ggcaaagctgcaaacacgcctctagtccagtgtacaagccatatgtgtcctattcgagtgcattggcatgtgaagctaaattacaaagagtactggagggtcaagatcacaattcacaaatttcaattacagaatgaactattcacaatggaaccttgttgtgcagcatcctaatttagataatattacccagctcctcagttttaattacaagtcactnaacaccctatgagggcttgaatgatacaagtntgctgtggggagtcaagtt

SEQ ID NO: 288358 - DNA, 262 bp, Glycine max
  unsure (1)..(262): unsure at all n locations
ggttaaggacattgagatggtcgnntcctcggtgctgcccaagttctacaccgaggacgtgcnccccgagagctggagagtcttcaatccttcgggaagcgttacattgtcactgctagtctagggtgatggtggagcantttgttaagacgtttcttggggctgataaggtgcttgggactgagcttgaggccacgaaatcggggaggttcatgggtttgttaaggagcctggtgtgcttgttggggagcacaagaaagtg

SEQ ID NO: 288359 - DNA, 278 bp, Glycine max
  unsure (1)..(278): unsure at all n locations
caaaaatgccagtncaagatgaaatcaagaaggcctatagaaaggctgctcatgaagaaccatccagataagggaggagatcctgaaaagttcaaggagttaggtcaagcatatgaagtttnaagtgatcctggagaagaaagacctgtatgaccagtatggtggaagatgcccttaaagnaggaatggggggangagggctcgtttcataatccctttggncnntttggantcatttttnggtggancaagctttgggtggtggtggtanttncccc

SEQ ID NO: 288360 - DNA, 266 bp, Glycine max
aaagccttcaatcatatagcattctaagaaatgaagagccctaccattttcattctctttctactttctgccttctacacctcactcctaccttcagccaccgctcaagtcgtggttgacatggaaggtaatgatcttcaaaatggtgggaaatattatgtgttgccagtaatagagtcatcatatggtggaataagagtagccgcaactgggaaaagaaagatgccctctcatgttgtacatctgcccgatccgtatgatagggg

SEQ ID NO: 288361 - DNA, 266 bp, Glycine max
attcagtgtggtctgagagaactgagaacccgcattgagtctgtgaagaacacgcagaaaattcacggaggcaatgaagcttgttgctgcagccaaagtgagaagagctcaagaagctgttgtgaacggaagacccttctcagagaccctggttgaagtctctacaacatcaacgagcagctccaaatgaggacgtagacatccctctcacaaaggttagacctgtccaagaaagttgcattgttgtgatcaccggcgaccgcggc

SEQ ID NO: 288362 - DNA, 267 bp, Glycine max
gtgatttcagtgagtgatcggtgttcacttgatctcatcataatcgtcagcgtcaattgaagaagatgccgattcagaaacatcgccgtcggaaggcctgaagaggcgactcaccccgacacgttgaaggcggtttggctgagttcatctccaaccttcatcttcgtgttcgccggcttcaggctccggcatcgcctacaacaagctcaccgacaacggcgctgccacccctggccggcctcatcttccgcctccatcgcccatgca

SEQ ID NO: 288363 - DNA, 267 bp, Glycine max
ctcaggcttccccttcaggatgtgtacaagattggaggtattggaactgtgccagtgggacgtgttgagaccggtgtcttgaagcctggaatggtggtgacttttgcaccaactggactgacaactgaagtccaagtctgtggagatgcaccatgaatctcttacagaggcacatcctggtgacaatgtgggattcaatgttaagaatgttgctgttaaggatttgaagcgtggttatgttgcctcaaactcaaaggatggaccctg

SEQ ID NO: 288364 - DNA, 267 bp, Glycine max
aaggtgaagtatggctccaaggtgcaaattgttctgcaggacacaagcatagtgactactgaggaacaccctatgcatgttcatggattccacttctttgtagttggttcaggttttggcaacttcaacccagcaactgatcccctcaagttcaaccttgtagacccacccgtgaggaacaccattggaacacctcctggaggatgggtggccattcgttttgtggctgacaatcccaggatttggtttgtccattgtcacatagac

SEQ ID NO: 288365 - DNA, 268 bp, Glycine max
  unsure (1)..(268): unsure at all n locations
gatcgagataactagaaacagtgtgatgaaaatgaaggtccttgttttcttcgttgctacaatnttngtagcatggcaatgccatgcgtacgatatgttccctctccgaatgaacactggctatggtgcccgtactccggaggtgaaatgcgcaagttggaggcttgctgtggaagcacacaacatccntggctttgagaccattcctgaagagtgcgttgaagcaacaaaggaatacatccatggcgaacaatatagatccagactc

SEQ ID NO: 288366 - DNA, 265 bp, Glycine max
cacacaacatctttggctttgagaccattcctgaagagtgcgttgaagcaacaaaggaatacattccatggcgaacaatatagatcagactccaaaacagttaaccaacaagcttacttttatgccagagacctcgaagtccatcccaaggacacatttgtgttcagtatagatggcaccgtactctctaatattccatactacaaaaaaactggatatggggtggagaatttaaccgaccttgtatgatgaatgggttaacaag

SEQ ID NO: 288367 - DNA, 194 bp, Glycine max
  unsure (1)..(194): unsure at all n locations
gaaaatanaaaaaaaaaaattgngtattattgaatttctctggaatcttcttctgtgtatggttttccttccttgtgttttcttcctaattcactttcgagggttgtacttgttcctttcgtcttaaatccttggatggttgatgatcatgaagtcctctttaaagtnaaattattatccatttngtggcaaaa

SEQ ID NO: 288368 - DNA, 264 bp, Glycine max
caatggtcttgtgccaatcgtagagcctgaaattcttcttgatggagaccacccaattgagaggacgctggaagtggccgagaaggtctggtcagaagtcttcttctatttggctgaaaacaatgtcctttttgagggaattttgctcaaacccagcatggttacacctggggctgaacacaaggaaaaggcttctccagaaaccattgccaaatatactctaaccatgcttagaagaagagttcctcctgctgtcccggaatc

SEQ ID NO: 288369 - DNA, 260 bp, Glycine max
gggactacatgtgtctgtactgcaatgatcgatgttatccattcagcagcttggaagcagtcaggaaacatatggaggcaaaaagtcactgtaaagtgcattatggtgatggtgatgatgacgaggaggtagaattagatgagttctatgattatagcagcagttatgtggatgatcaaggcaagcagcttgttgcatcttgtgatgcatctaacaatgtagaacttgctggtgggtcgagctcattatcaccacgaatc

SEQ ID NO: 288370 - DNA, 257 bp, Glycine max
  unsure (1)..(257): unsure at all n locations
ttcaaatatgatataattggtgctggttcacattcttcagaagattttcctganaaggaagatcaagaaaaacccaaaaagattgatgccagattgagacaaagaatagatcctcaatacaatgaggttcaggctcagatggaaacaaatttgtttaaattgtnctcttgatgatgttgaaactcctaaaggttccatgttggatctaaaatttctcaatctaaaattgcacttcccaagaacacagttggaggaac

SEQ ID NO: 288371 - DNA, 267 bp, Glycine max
cactcgcaagcaaaaagaaagaatcccaggcgaggagaaagatggaggggaaggagcaggatgtgtcgttgggagcgaacaagttccccgagagacagccgattgggacggcggcgcagagccaagacgacggcaaggactaccaggagccggcgccggcgccgctggttgacccgacggagtttacgtcatggtcgttttacagagcagggatagcagagtttgtggccattttctgtttctctacatcaccgtcttaaccgttat

SEQ ID NO: 288372 - DNA, 268 bp, Glycine max
  unsure (1)..(268): unsure at all n locations
ggnaaagcataatcnaatcanccatggctaccctcattgctcccatcaccttttcgcctggtttagatgcagaagctcttagaaaagctttccaaggatgggggactgatgagaagaccgttatagcaatattgggtcacanaaatgttcatcagaggcaacaaatcagaaagatttatgnggaaatttaccaagaggacctcatcaaacgcctagagtctgagctctctggtgactttgagagagctgtgtaccgttggatgctgga

SEQ ID NO: 288373 - DNA, 264 bp, Glycine max
  unsure (1)..(264): unsure at all n locations
cggaatctgagtaatantcatatttccggcttattttacgacggcagatacaaattctggactaaacacgagancaaacctgctttgacagaagnagaaaagatggaagtgattagaaatagaggcatncctgctgatgttcttgcnaagcgagctcatgaatttgaanaacatgttgctcatgnaagcctcaaggatccaattccggctgttgacaagttgtattctactaaggttaataagtttgcaaaantctggaactta

SEQ ID NO: 288374 - DNA, 266 bp, Glycine max
  unsure (1)..(266): unsure at all n locations
gaaaaacaaaagagtagtggcctttaggtggtgaagaacaagagctcaaatcaaatcgaatcgaaaaaagaaaganagatcatattcatggcgatggcaagcctggctcgacggaagggttacgccgtcgttttgtcgtcgaggtcgtcgttttgtctgacaagctggaggggattcgcgtccggatctgacgaaaacgacgtcgtcgtcatcggcggcggtcccggcggctacgtggcccgccatcaaagccgcgcactcggtct

SEQ ID NO: 288375 - DNA, 265 bp, Glycine max
caagttatctgacttttttgagattctggcaacatctgaggatagagatggaaagactttcgtttccacagcacgtggtaggaaatatcccgtgactgtcaacctatggcaaccagagaaaaatgcttttgaatgggctacatctttgaaagcccctcacacagaggatgcaattcgggttactcagtccacagcaaactttttcataagtgcagctaggaaatccacaaacacactgatgctccaaaaagtgcgagataatctc

SEQ ID NO: 288376 - DNA, 249 bp, Glycine max
  unsure (1)..(249): unsure at all n locations
gatcgagataactagaaacagtgtnntgaaaatgaaggtccctgttttcttcgttgctacaattttggtagcatggcaatgccatgcgtacgatatgttccctctccgaatgaacactggctatggtgcccgtactccggaggtgaaatgcgcaagttggaggcttgctgtggaagcacacaacatctttgggctttgagaccattcccggaagaatggcgttgaagcaacaaaggnatacatccatgg

SEQ ID NO: 288377 - DNA, 271 bp, Glycine max
  unsure (1)..(271): unsure at all n locations
agtgatttcagtgagtgatcggtgttcacttgatctcatcataatcgtcagcgtcaattgaagaagatgccgatcagaaacatcgccgtcggaaggcctgaagaggcgactcaccncgacacgttgaaggcggctttggctgagttcatctcaaccttcatcttcgtgttcgccggctcaggctccggcatcgcctacaacaagctcaccgacaacggcgctgccacccctgccggcctcatctccgcctccatcgcccatgcattcgccc

SEQ ID NO: 288378 - DNA, 265 bp, Glycine max
  unsure (1)..(265): unsure at all n locations
gcaaacngtttggaatcaaatggtgttctcactgttgccatttgattccaaacagttagnacaccattgaattttgattctagcaagcacngcttttgtcaattttctattgaccttctnacgtggaggaattttagtggacaaaactggagattggatcacacttatacaaaattctccaattagtaacttgttgagagttgctgcttggaaganaggctgtttaatggtcaagattgtgatgtctgggaatgcagcagtcana

SEQ ID NO: 288379 - DNA, 266 bp, Glycine max
  unsure (1)..(266): unsure at all n locations
cnaagnnggcntcttcataaacgcctgttttctccgtttgccggttcctcgtncganttcgcttttngatctgcgaaaatgaganagtgcatctccgatccacattggtcagggctggtatccaggtcggaaatgcttgctgggagctctactgcctcgagcacggcatcgngcccgatgggcaaatgccaagtnacaagacagttggcggtggtgatgatgctttcaatactttcttcagcgagactggtgctgganagcacgtc

SEQ ID NO: 288380 - DNA, 211 bp, Glycine max
  unsure (1)..(211): unsure at all n locations
aagcctccagtgtacaagccaccagtgtacaaaccaccggtttataagccaaaaccaccggtttacaagccgaaaccaccggtttacaagccaccatataagaagccaccataaggtggtttcttgtattctttggtattctcagaatcgacaaggagaagcctgagaaggtnaattcttgttgcaagctgttgttggaggtgtggtcagg

SEQ ID NO: 288381 - DNA, 262 bp, Glycine max
  unsure (1)..(262): unsure at all n locations
tgtcacgatagtnagngagttgctgttaaggatccatntgctccccatggagttccacttttgatcgaggactatnccttatgcgtctgatgggctaganatatgggatgctatcaagtcttgggtggaagantatgtctcattctactacaagtcagatgaggaanttcaaaaagancccgagctccaagcttggtggaaagaacttgtagaggtgggtcatggggatntgaaggataagccatggtggcaaaagatgcaa

SEQ ID NO: 288382 - DNA, 257 bp, Glycine max
  unsure (1)..(257): unsure at all n locations
ggaatctgggcagttttggcctggctatctatacttgcatataaaaatanagataaacttgaagacaagcttgtcactgttgaagacatagttcgccagcattgggctacttatgggcgccattattatactcgatatgactatgaaaatgtggatgcaggtgcagcaaaggaactgatggcatatttggtcaagctgcagtcctcactttcagaagtcaatcagattattaaggggataaggtcagatgtttcgaa

SEQ ID NO: 288383 - DNA, 264 bp, Glycine max
  unsure (1)..(264): unsure at all n locations
ctctgtntctgtctctgtgtttgcggctgaggattccgaacgagcgaccttcttcgtgngctcgcnaagtttaagtcatcatgggtaaggcaaagactcacatcaacattgtcgtcattggacatgtcgactctgggaagtcaactaccactggtcatttgatctacaagcttggangtattgacaancgtntgattnagaggttcgagaaggaggctgctgagatgaacaagaggtcattcaagtatgcctgggtgcttgaca

SEQ ID NO: 288384 - DNA, 261 bp, Glycine max
  unsure (1)..(261): unsure at all n locations
accagactggtgtgcttatccaggtctttgagggtgnaagagcaaggaccagagataacaatttgttgggcaaatttgagctatctggcattcctcctgcacccaggggtgttcctcagattacagtgtgctttgacattgatgccaatggtatcttgaatgtctctgccgaagataaaaccactggccagaaaaataagatcactatcaccaatgacaagggtagattgtcaaaggaagatattgagaagatggttcaac

SEQ ID NO: 288385 - DNA, 259 bp, Glycine max
  unsure (1)..(259): unsure at all n locations
cgagataactaganacagtgtgatgaaaatgaaggtccttgttttcttcgttgctacaattttngtagcatggcaatgccntgcgtacnatatgttccctctccgaatgaacactggctatggtgcccgtactccggaggtgaaatgcgcaagttggaggcttgctgtggaagcacacaacatctttggctttgagaccattcctgaagagtgcgttgaagcaacaaaggaatacatccatggcgaacaatatagatca

SEQ ID NO: 288386 - DNA, 221 bp, Glycine max
  unsure (1)..(221): unsure at all n locations
ttaggagggaaatggctgcacctgcgaggcctctgttcgttctcttcggatcctccattgtccaactcagtttcagccatggtggttggggttctcatctttctgacatctactctcgtaaggccgacatattgttgcgaggatactatggatggaactcgcgacgtgccctccaagtccttaatcaagtttttccaaaggatgctgcaatacaancttct

SEQ ID NO: 288387 - DNA, 258 bp, Glycine max
  unsure (1)..(258): unsure at all n locations
gggctcaccatgagcagctatcagttggtgaaatcaccaacagtgcattcgagccatcatctatgatggccaagtgtgntccccgccatggcaaatacatggcgtgctgtctcatgtacagaggtgacgtagtgcctaaagatgttaatgcagctgttggaattatcaagaccaagcncactattcaatttgttgactggtgccccaccgggttcaagtgtggaatcaattaccagcctccgactgttgttccaggtg

SEQ ID NO: 288388 - DNA, 266 bp, Glycine max
ctggcagaaagaagccaaaattctcttccttggtctcgataatgccggcaaaaccaccctccttcacatgctcaaagacgagagattagttcagcaccagccgacgcagcaccccacttcggaggaattgtgcattgggaagatcaagtttaaggctttcgatttggggggccatcaagttgctcgcagggtctggaaagactattatgccaaggtggatgctgtcgtgtacctggttgacgccttcgataaagagaggttcgcgg

SEQ ID NO: 288389 - DNA, 260 bp, Glycine max
cccgtggccactataccattggaaaggagattgttgagctttgcttggatcgcatcagaaagcttgctgacaactgcactggtctccaaggttttctggttttcaatgctgtgggtgggggcactggctctggtcttggttcccttttgctggaacgtctttcagtggactatggcaagaagtccaagcttggtttcactgtctatccttcaccccaagtttcaacctctgttgttgagccttacaacagtgtcctctcc

SEQ ID NO: 288390 - DNA, 269 bp, Glycine max
  unsure (1)..(269): unsure at all n locations
cggangacgnggtgncatgcagatcttcgttaagagccctcaccggcaagactataaacctagaagtcgcnagtcccgacancatcgacaacgtcaaggctaaganccaggacaaggagggtatccccccagaccaggcagaggctgatcttcgccggnaagnaantncgaggacggagtaccncttgntgaattacaacatccagaaagnagttnaagtctccaattggtattgcntcttcntggtggnattgcaantcttgnncaac

SEQ ID NO: 288391 - DNA, 263 bp, Glycine max
  unsure (1)..(263): unsure at all n locations
ggcgaaagcaggacctttaagcttnctaatcccctgtactacattcagtagttccttcacctctcaacaatctagcttgctccnatctatctatatgtaataagatgcgttcaaataggggcactagcttcactttatgttgtttcagctgtgtgtcaacaagtcatgtaagagacttcactatgttgttttctctttncgtggctttaataaattatgcgccttgttccatactttaaaaaanaaaaaaangggnggngcgg

SEQ ID NO: 288392 - DNA, 256 bp, Glycine max
  unsure (1)..(256): unsure at all n locations
tccaaccctcanaatgcattcattcggctacagagccaacgcgttgctaacctttgccgtaaccattctggcgcttatntgcgctatggcttctntntccgacaacttcaacacccccactccctctgcacaagtccaggttctgaacatcaactggtttcagaaacaacccaatggcaacgacgaggtcancntgacgatgaatatttccgcagacttgcagtcccttttcacatggnacacaaaacaggttttt

SEQ ID NO: 288393 - DNA, 287 bp, Glycine max
  unsure (1)..(287): unsure at all n locations
acntgacacaagaaggaaatggcaacaccaacttctgtatgagtgttaacaacaacggctacattagcgctaatgacccgttgaactggggcgcggcggcggaggcgatggccgggagccacctcgacgaggtcaagcgcatggtggaggagtaccggaggccggtcgtgaagctcggcggcgagaccctgacgatctcgcaggtggcggcgatcgcggcgcacgaccagggggtgaaggtggagctggcggatcctccaggccggggttaaggccagcagcgatgg

SEQ ID NO: 288394 - DNA, 282 bp, Glycine max
gaaggcggcgtgagaagcatgttggacatcaacctattcagagaggagaagggccacaaccctgaattcatccgcgaatcccagcgccgtcgtttcgccagcgtcgaagtcgtcgacgaggtcatcaatctcgacaaagaatggcgaaagcgtcaattcgagttggagaatctccgcaaagaatttaacaagatcaacaaggaagtctccaaactcaagcgtgctggcgaggatgcaactaagttcatcagtgaatcagaggaaaccaagaaatcgataggg

SEQ ID NO: 288395 - DNA, 284 bp, Glycine max
  unsure (1)..(284): unsure at all n locations
cgcagagaagaacagagagagatccatccatcaattccaatggccgatcagctcaccgacgaacagatctccgagttcaaggaagccttcagcctcttcgacaaggacggggntggttgtattaccaccaaggaacttgggaccgtgatgcggtcacttggccagaacccaactgaggcagagctgcagganncgataaatgaggttgatgctgatgggaatggtaccattgatttcccagaattcctgaatctcatggctcgcaagatgaaagacactgattc

SEQ ID NO: 288396 - DNA, 278 bp, Glycine max
  unsure (1)..(278): unsure at all n locations
ttgatcgagataactagaaacagtgtgatgaaaatgaaggtccttgttttcttcgttgctannattttggtagcatggcaatgccatgcgtacgatatgttccctctccgaatgaacactggctatggtgcccgtactccggaggtgaaatgcgcaagttggaggcttgctgtgncagcacacnacatctttggctttgagaccattcctgaagagtgcgttgaagcaacaaaggaatacatccatggcgaacaatatagatcagactccaaaacatt

SEQ ID NO: 288397 - DNA, 280 bp, Glycine max
  unsure (1)..(280): unsure at all n locations
cccaattttctagggttttattcattttccgatggcttctgcagatgttgagtaccgttgctttgtcggtgggctcgcttgggccactgacgaccatgccctcgagagagccttctctcagtacggcgaaatcgttgaaacgaagattatcaacgatcgtgagactggcagatccaggggttttggatttgtgaccttcgcctcggancagtccatgaaagatgcgatcggagcgatgaatggacagaacttggacggccgtaatatcactgtcaatgaa

SEQ ID NO: 288398 - DNA, 153 bp, Glycine max
gcaaaggctggaattgcattgaataagaactttgtgaagcttgtctcttggtatgacaacgagtggggatacagctcacgtgtcattgacctgcttgtattcgttgccaagaagtctttttaaggttgtactgaaaaaaaagtagcttgtcta

SEQ ID NO: 288399 - DNA, 275 bp, Glycine max
  unsure (1)..(275): unsure at all n locations
ctaaaccctactcattctccatacctcaacgaagnggttaaagagacggcaacactttgctgtccgccttgaccgagcagagcttcgtcttggccctcgattttgccctaaagtactctcagtcacaacagacacnnnnnnnnnnnnnnnnnnnnnnaatggcaccgaagcagaccaaggctgagaagaagatcgcttacgatgcgaactgtgcgacctaatggaggagtacggccagatcctcgttgtgaatccgataagtgggatcgaaccag

SEQ ID NO: 288400 - DNA, 280 bp, Glycine max
  unsure (1)..(280): unsure at all n locations
gnaagaatggcacttcgttgcttggtgatgtccctttctgttctcttcactcttggtcttgcgagagaaagccatgccagagacgaagatttttggcatgctgtttggccaaacactcccattccaagttcattgcgagancttctaaagcctggccctgcaagtgttgaaatcgatgatcaccctatgcaaattgaagaaacacagtacccgaaaaccttcttctataaagaagaccttcatccaggcaaaacaatgaaagtacaattcagcaagcctc

SEQ ID NO: 288401 - DNA, 279 bp, Glycine max
  unsure (1)..(279): unsure at all n locations
gccagatcncagacaaagaatagatcctcaatacaatgaggttcangctcagatggaaacaaatttgtttaaattgtctcttgatgatgttgaaactcctaaaggttccatgttggatcttaaaatttctcaatctaaaattgcactttccaagaacacagttggnggaaccattctgcgtagtgatctattggcaaattttttgacagagggcaattttagagcaagtgttgattgcagcgcactcatcgtattaaggaatgntaaactgggggccag

SEQ ID NO: 288402 - DNA, 277 bp, Glycine max
  unsure (1)..(277): unsure at all n locations
caaaggaagactgggatatgcttcattgataccatatgttgagccagttgtgcaagctccaaagtgctgaagtttattttgacttcttccctgtggaggttgatagtcancagggagttgctcacattggtgaattgaaatctggtgtctatgttccattgcctacaaaaactaatttggtggaaactcccaaggaatggcaactggatctaccttgtgacaaaattcctagtgtctgactacaatgatgagagattggtagcacagaacatgaggg

SEQ ID NO: 288403 - DNA, 278 bp, Glycine max
  unsure (1)..(278): unsure at all n locations
gttggtcttgatgctgacaactgcaaagttctggtcaacattgagcaacagagccctgatattgctcaaggagttcacggtcatatgaccaagaaacctgaggaaattggtgctggtgaccaaggccacatgtttggttatgctacagacgaaacacctgagttaatgccactcactcatgtgcttgctactaaacttnntgccaggctcactgaggtgagaaagaacaaaacatgcccctggctgaggccagatggtaaaacccaagtgacattgag

SEQ ID NO: 288404 - DNA, 265 bp, Glycine max
  unsure (1)..(265): unsure at all n locations
tgggttttcactgatcaagcattgcctaatgatcttgtcaagagaggagtncgcggttaaggatccatctgctccccatggagttcggcttttgattgaggactatccttatgcttctgatgggctagagatatgggatgccatcaagtcctgggtgcatgaatatgtctcattctactacaagtcagatgcagcaattcaacaagatcccgagctccaagctggtggaaagaacttgtccaagtgggtcatggtgattgaaaga

SEQ ID NO: 288405 - DNA, 277 bp, Glycine max
  unsure (1)..(277): unsure at all n locations
aatgctgntgagactattgcaaaatgctgtcatgaactgcagatcctggacctcagcaaaagtttcaagctaactgatcgttcactctatgagctcgcccttggttgtcgcgatcttacaaaactcaacatcagcggntgnctcagcatttagtgacaatgctctggcttaccttgccagcttctgcagaaaactgaaagttctaaatctttgtggatgtgttagagctgcatccgatactgcattacaggctattggacaatactgcaatcagcta

SEQ ID NO: 288406 - DNA, 274 bp, Glycine max
  unsure (1)..(274): unsure at all n locations
ctgagacttggccccgtggcccagcccaagaggatcaagtttacccctcttctcaaaaatcctagaagatcttcactttactatgtgaatttggtggctattagagttggccggagaattgtggatattccaccggaggctctagcattcaaccctaacactngnacaggcaccgtttttgattcgggtacggtattcacccggctggttgaaccggcttacaccgccgtccggaacgagttccggcgacgagtttctgttcacaagaaatcac

SEQ ID NO: 288407 - DNA, 153 bp, Glycine max
  unsure (1)..(153): unsure at all n locations
tcnagctagtttatcgtgaggngaatatgaagttgtttgttttctttgttgctgcagtagttttggtagcatggccatgccatggcgcaggccaccaaaggttccctctccgaatgaaaactggctatggtgagcgttcttcggaggtaaaat

SEQ ID NO: 288408 - DNA, 276 bp, Glycine max
tcgctactaagagttgctgcttcttcagccactccgcacctcgcagcctctgtgccctcaacaaccatggctgaaatcgaaactaccgttccagatcccacccaaatcgacgtcaaactcttcaatcgctggagcttcgaggatgttgaggttaatgatatgtctctggctgattacattggagtgtccccatcaaagcatgctacatatgttcctcacactgctggtaggtactcagtgaagaggttcaggaaagcgcatgccccatgttgagag

SEQ ID NO: 288409 - DNA, 273 bp, Glycine max
  unsure (1)..(273): unsure at all n locations
gttgatcgagataactagaaacagtgtgatgaaaatgaaggtccttgttttcttcgttgctacaantttggtagcatggcaatgccatgcgtacgatatgttccctctccgaatgaacactggctatggtgcccgtactccggaggtgaaatgcgcaagttggaggcttgctgtggaagcacacaacanncttggcttgagaccattcctgaagantgcgttgaagccacanaggaatacatccatggcgaacaatatagatcaatcccaaac

SEQ ID NO: 288410 - DNA, 271 bp, Glycine max
ttttgaggtcattctggtggatgttgcccacagcgctgttagaaatgatccaagaatcaactggctctgcaacccagtccataaacacagggaactgcgtggcctcacttctgctgggaaaagtaacaggggtttacggggcagaggacatctctaccacaaaaatcgtccatcccgcaggcaacctggaagagaaacaacactctttcccttcgtcgctaccgttgattttgttgcagttatcgtatgttgctcattttccaagtatttg

SEQ ID NO: 288411 - DNA, 270 bp, Glycine max
  unsure (1)..(270): unsure at all n locations
aganacaaagttacaagtaaagtaaattaagaagatcattaatggcttctcttgcaaccttagctgctgttcaaccagctgcgctcaatggccttgctggaagttccctctctggaactaagctctctttcaagccctctcgccacactgtcaaatccaagaacttcaggagtggtgccgtggtagcaaagtatggtgacaagagtgtgtactttgatttggaggatctgggcaacactacggggcagtgggactgtatggctcagatgc

SEQ ID NO: 288412 - DNA, 271 bp, Glycine max
  unsure (1)..(271): unsure at all n locations
taaacatcatcagggcctgtgtttctnagattaaagttcactactgtggaatttgccattctgatctccaccagattaaaaatgatcttggcatgtccaactatcccatggtcccaggacatgaagtggttggtgaggtactggaggtgggatcaaacgttagcaggttcagagcnggagagttggtgggagttggactcctcgtaggttgctgcaaaaactgccagccatgccaacaagacattgagaatactgcagcaagaagatctgg

SEQ ID NO: 288413 - DNA, 272 bp, Glycine max
  unsure (1)..(272): unsure at all n locations
tcggaatgaggctagtggtgccctgagtggattaacacgtgttaggagatttcagcaggatgatgcacatattttctgcagggagtcccagataaaggatgaagtgaggnatggcttgaatttcatcaattatgtctataagatatttggtttcacgtatgagctgaagctttcaacgaggccagagaaatacctaggagatattgcaacttgggacnaagctgaaatgctcttaaagaagctttagatgnttttggcaagcctggcagttg

SEQ ID NO: 288414 - DNA, 275 bp, Glycine max
  unsure (1)..(275): unsure at all n locations
cnactcttcaaaagggagaagaaaaggaaagaaaactctcaaaaaactattatagcaatggcagancaaaaccaaaaccaaacaactgaagctggaaggcaccaagaggttggtcacaagagccttctccagagtgatgctctttaccagtatattctggagacaagtgtctacccaagagaantgaatccatgaaagaactgagagagttgacagcaaaacacccatggaacatcatgacaacctctgcagacganggcagttcttgaacatgc

SEQ ID NO: 288415 - DNA, 270 bp, Glycine max
caaggcagaaagcaagctcatcctagagttttaaaaatggcagcagcctcctccatggctctctcttccccatccttggctggcaaggccgtgaagctgggcccatcagcccccgaagtcgggagggtcagcatgaggaagaccgtcaccaagcaggcctcctccggaagcccatggtacggcccagaccgcgtcaagtacttgggcccattctctggcgagcccccgtcctacctcactggcgagttcccaggtgataggctgggacac

SEQ ID NO: 288416 - DNA, 268 bp, Glycine max
cgagttgaaactggtgtcttgaagcccggtatggtggtgacttttgctcccactggcctgacaactgaagttaagtctgtggagatgcaccatgaagctctccaggaggcccttccaggagacaatgtaggatttaatgtgaagaatgttgcagtcaaggatctcaagcgtggttttgttgcctcaaactctaaggatgatcctgccaaggaggctgccaacttcacatcccaagtcattataatgaaccatcctggccaaattggaa

SEQ ID NO: 288417 - DNA, 273 bp, Glycine max
  unsure (1)..(273): unsure at all n locations
gtgagaacaccattgaattttgattctagcaagcagagcttttgtcaattttctattgaccttctcggtggaggaattttagtggacaaaactggagattggatcacacttatacaaaattctccaattagtaacttgttgagagttgctgcttggaagaaangctgtttaatggtcaagattgtgatgtctgggaatgcagcagtcaaaaggagtgattgggcctcatggtacaagtgtttttaacaaacancaccgnacagagcatttgat

SEQ ID NO: 288418 - DNA, 146 bp, Glycine max
  unsure (1)..(146): unsure at all n locations
cttngaccctaagcagaatattgtaattggnaatgnngctctatanggggccacatctggtgaggcatanttcaatgggatggcagctgaaaggttttgtgtgcgtaattctggagctaaggcagtagtggaaggngttggcgatc

SEQ ID NO: 288419 - DNA, 268 bp, Glycine max
cgctctcgatgtctcaatgtgcgaataaatgcaccaagtgaagaacagattgttcaagttttagaattcattggtaagaaagaaggactgcaacttcctcctggttttgctgctcgcattgcagagaaatcaaatcggaatttaaggagggccatattgtcgtttgagacttgtcgtgtcctacagtatcctttcactaacaaacaagcaattcctccaatggactgggaagagtatatttctgagattgcatctgacataatgaaga

SEQ ID NO: 288420 - DNA, 267 bp, Glycine max
  unsure (1)..(267): unsure at all n locations
caaattagttcattctctttgcgcagttccctacctctcctttcaagatgcagatcttcgtcaagaccctcaccggaaagaccatcacccttgaggtggaaagctctgacaccatcgacaacgtcaaggccaagatccaggacaaggaaggaattcccccggatcagcaacgtctcatcttcgccggaaagcagctcgaggacggccgtaccctcgccgactacaacatccagaaggagtcaacccttcacttgtccttcgtctcng

SEQ ID NO: 288421 - DNA, 265 bp, Glycine max
  unsure (1)..(265): unsure at all n locations
ggaatgggataggatctatgattatgatgtctacaatgacttgggcaacccggatagcggtgataaatatgcacgccccgttcttggtggttcagccttaccttaccctcgcagaggaagaaccggaagaggaaaaactagaaaagatcccaacagtgagaagccgagcgattttgtttaccttccaagagatgaagcatttggtcattgaagtcatcagattttctcgcttttggaatcaaatctgtatcccaagatgtcttnc

SEQ ID NO: 288422 - DNA, 267 bp, Glycine max
  unsure (1)..(267): unsure at all n locations
ctcgcaagcaaaaagaaagaatcccaggcgaggagaaagatgcgaggggaaggagcaggatgtgtcgttgggagcgaacaagttccccgagagacagccgattgggacggcggcgcagagccaagacgacggcaaggactaccaggagccggcgccggcgccgctggttgacccgacggagtttacgtcatggtcgttttacagagcagggatagcagagtttgtggccattttctgtttctctacatcaccgtcttaacgntangg

SEQ ID NO: 288423 - DNA, 266 bp, Glycine max
  unsure (1)..(266): unsure at all n locations
atccgcagctgctgttattcgcaccgcaaacaaacagtgagccatggccgtcggaaagaacaagcgcatctccaaagggaaaaagggtggcaanaagaaggcagctgatccctttgccaagaaggattggtatgacattaaggccccttctctttttcaagtgaaaaatgttggcaaaaccctcncctctcgtacgcagggtaccaagattgcttctgaaggacttaaacatagagtgtttgaggtctccttggctgatcttcaag

SEQ ID NO: 288424 - DNA, 266 bp, Glycine max
  unsure (1)..(266): unsure at all n locations
atggactggtttggccaatagattactgagtaagggcaacgatattctgtgttgcgattatgctagttttgatggtttgattaccaagcaagtnatgagcaagatggcagaaatgataaacagtctttgtggtggtgatgaaaaattgatgcgtgaaaggacacacctgctgttggcttgttgttcaaggatggcaatttgtaaganagatgtttggagagttgaatgtggaatcccttctggatttccgctcacagttatttgaa

SEQ ID NO: 288425 - DNA, 265 bp, Glycine max
  unsure (1)..(265): unsure at all n locations
gcaatgtgccaataaagcgcagagcatgggttgaaggtcagatgtctttcgatcagtctgtagtagcaattatgtctaaatgcaaagccagcatganaatgggaaacactgatgctcaaattttgatggttccagggcgcagattcatagctcatggacattttttcaaaaatctgactcagaaagtgcgagtccaaattgttacatctgaaaaaagttactggcatgtgtatgatcctgacaagtttcagatgtttgacaacat

SEQ ID NO: 288426 - DNA, 269 bp, Glycine max
  unsure (1)..(269): unsure at all n locations
cccagacaagagnaatganctagctcgncntgttcttggnnnggtcnagtgnctatccatatcctgcgcaggggaagaactggtncganaaccaacaacaaaagactctaagagtgagtcaccatccagcagcacntanatcncaagannatgagaactttggtcacttgaagtcatcagatttccttacatatggaataanatccatagctcaaaccgttttacctacatttcaatctgcattggtttaaatgccgagtttgataggt

SEQ ID NO: 288427 - DNA, 261 bp, Glycine max
  unsure (1)..(261): unsure at all n locations
agataactagaaacagtgtgatgaaaatgaaggtccttgttttcttcgttgctacaattttggtagcatggcaatgccatgcgtacgatatgttccctctccgaatgaacactggctatggtgcccgtactccggaggtgaaatgcgcaagttggaggcttgctgtggaagcacacaacatctttggctttgagaccattcctgaagagtgcgttgaagcaacaaaggaatacatccatggcgaacaatatagatcaganc

SEQ ID NO: 288428 - DNA, 262 bp, Glycine max
tggggaagaaagaaacagacaaaaatggcgccaaacgctctctttctcttctctgtcctcgccattcccctcctccttctgccctgcccaaccgccgccggccacgactaccgcgacgccctccgcaaaagcattctcttcttcgaaggccagcgctccggcaaactccccgccgaccagcgcctccgctggcgccacgactctgcattgcacgacggcgccaccgccggagtggattgagcggaggtatacgacgccggga

SEQ ID NO: 288429 - DNA, 264 bp, Glycine max
  unsure (1)..(264): unsure at all n locations
atcgagataactagaaacagtgtgatgaaaatgaaggtccttgtnttcttcgttgctacaattttngtagcatggcaatgccatgcgtacgatatgttccctctccgaatgaacactggctatggtgcccgtactccggaggtgaaatgcgcaagttggaggcttgctgtggaagcacacaacatctttgnntttgagncaatcctgaagatncgttgaagcaacaaaggaatacatccatggcgaacaatatagatcagacnc

SEQ ID NO: 288430 - DNA, 265 bp, Glycine max
  unsure (1)..(265): unsure at all n locations
tgggaagncaactaccantggtcatttgatctacaagcttggaggtattgacaagcgtgtgattgagaggttcgagaaggaggctgctgagatgaacaagaggtcattcaagtatgcctgggtgcttgacaagctcaaggctgagcgcgaaagaggaattacccattgatattgcttgtggaagtttgaaaccaccaagtactactgcacagtcatcgatgcncccggacatcgtgatttatcnagaacatgattatggtactcc

SEQ ID NO: 288431 - DNA, 262 bp, Glycine max
gtacttgcaacaacccttgctcgtcaccgttcaaaaccaaggatctacattggatgtatgaaatctggacctgttctttctcgaagggatgtcaagtatcatgaacctgagttttggaaatttggagaagaggggaacaaatacttccgacatgcaactgggcagatatatgcaatctctaaggatctggccacctacatttccatcaaccagccaatattgcacaaatatgccaatgaagatgtgtcattggtgcatggtc

SEQ ID NO: 288432 - DNA, 261 bp, Glycine max
actagaaacagtgtgatgaaaatgaaggtccttgttttcttcgttgctacaattttggtagcatggcaatgccatgcgtaacgatatgttccctctccgaatgaacactggctatggtgcccgtactccggaggtgaaatgcgcaagttggaggcttgctgtggaagcacacaacatctttggctttgagaccattcctgaagagtgcgttgaagcaacaaaggaatacatccatggcgaacaatatagatcagactccaa

SEQ ID NO: 288433 - DNA, 263 bp, Glycine max
  unsure (1)..(263): unsure at all n locations
gctgtaagaaattcctcttgtgcgtcctgcaacaactctgttagctgacgggtgtccatatttgtatgctatngtgcatgatagttcagtgtctacaataccaggtgattttgttattggtgttaagttgacaaccataaacaatatgtgtgcatatgggcttaatcctggtatttcaggttctcgtcttttgggcaccattcctcagtccatttcacagcaaactgtttgncaatcaaatggcaacagtgagaacaccatga

SEQ ID NO: 288434 - DNA, 262 bp, Glycine max
cgagtttcacagcgaagtcgtaggagggtttcaaaagatggagaacatgcagagcttctggcaattgggcgatgaactccgtggacactcaaaagcatcggaggatcacaaatggttaatggttgcttcgaaattggcggaacagacaagattgaagggggagcgtgtgaacaaccttgatctttcaaagggccccattgaaacaaggtcaagggataaatttgggttccaggaagagaacaaatttgattctcttaactta

SEQ ID NO: 288435 - DNA, 249 bp, Glycine max
cttgttggttgttcttctattgctggttattgtttgtgctgaagtgtcagtggtcctcacatatatgcatctttgtgtggaagattggcagtggtggtggaagtcattctttgcttcaggctctgttgctctttatgtcttcctgtactccattaactacttggttttcgacctgcagagtttgagtggacctgtctcagctatactttatctcggctattccctgctcatggcaattgcaatcatgtg

SEQ ID NO: 288436 - DNA, 261 bp, Glycine max
  unsure (1)..(261): unsure at all n locations
ctgattcacaggccagagggcaaagattttgagcacaatggcctcgacacanngctttttgcaccaccacgccctcaccactccagctagagcttcaacacagcgcctagttatgagcaccaaaccaaaccacattgtttgcaaggcagcacagaagcaggttactgtccaagagggtgaggacactactactggccttgtctctcgcaggttggccctcactgtgctcattggtgctgctgctgttggctctaaggtgga

SEQ ID NO: 288437 - DNA, 261 bp, Glycine max
  unsure (1)..(261): unsure at all n locations
agcgagcgctcccactccacgcgaagagttcgtgtacatggcgaantgngcggagcaggccgagcgctaccgaggagatggtggagttcatggagaaggtctccgcctccgccgagagcgaggagctgaccgtggaggagcgcaacctcctctccgtcgcctacaagaacgtaatcggcgctcgccgcgcctcctggcgcatcatctcctccattgagcagaaggaggagagccgcgactccaaggtcttctacctcaatg

SEQ ID NO: 288438 - DNA, 256 bp, Glycine max
ttagatgtgctggtttgcaatgctgctgtttacttgccaactgctaaggaacctaccttcactgctgagggctttgaacttagtgttgggacaaatcatctggggcatttcctcctctcgcgcctgttgcttgaggacttggaaaaatccgattacccttcaaagcgcttgatcatcgttggttcaataacagggaacacaaacacattggctggtaatgtacctcccaaggctaaccttggtgacttgaggggat

SEQ ID NO: 288439 - DNA, 260 bp, Glycine max
  unsure (1)..(260): unsure at all n locations
aaaaggtgaggtcaccaggtgaagagtttgacaaattattcacagcaatgtgccaagggaaaattattgatcctcttatggagtgccttggggagtggaatggagctcctcttccaatctcttaaatttattgtaactcttaacaaatattttatttgtacctatgcaaganaaaccataatcatttggtttgtctatcatttaacaaatcagtttgaaaagcctaatttcaatgttccttcaatgtcaaataggaccgt

SEQ ID NO: 288440 - DNA, 257 bp, Glycine max
  unsure (1)..(257): unsure at all n locations
gcttagttgtcaagttggaatcaacccatactccatggaatggactggtttggccaatagattactgagtaagggcaacgatattctgtgttgcgattatgctagttttgatggtttgattaccaagcaanttatgagcaagatggcagaaatgataaacagtctttgtggtggtgatgaaaaattgatgcgtgaaaggacacacctgctgttggcttgttgttcaaggatggcaatttgtaagaaagatgtttggg

SEQ ID NO: 288441 - DNA, 258 bp, Glycine max
  unsure (1)..(258): unsure at all n locations
aaccgaataccgggcttcgcatttgaagcctcccttcggtcccaagcttcattcttggtcctcccgtcaaccggatggaccaggctacactctcgatggacacagtatcagctgggccaattggaagttccacatangatatgatncaagagntggtgcggtaatttcaactgcatcaatttacgaccctgagctgcataaatcacgttcagtactatacagagggtacatttctgatnaattcgtgccatatcaagc

SEQ ID NO: 288442 - DNA, 254 bp, Glycine max
ggcactggctgcagcatcaaaatctgttgattgtcgtaaagttgttcatagcttgcatgtctattttcttcttgtgggggattttaacatacccattatatatcaagttaagcgtctccgtgatgggaagagttttgctacaaggaaagtggatgcaattcaaaagggaaatgtcatattcactttgttggctcattcataaggaagaagtagggtttcaccaccaggaagtgtctatcccatcagtccctgcc

SEQ ID NO: 288443 - DNA, 256 bp, Glycine max
  unsure (1)..(256): unsure at all n locations
aactttagccgaggtcaggaggagcactagctaagttcacaatttcaaaatggctaggggactaaagaagcatttgaaaaggctcaatgctcctaagcattggatgcttgacaaactgggtggtgcatttgcgcctaaaccctcatctggaccacacaaatcgagggntgcctccccctcattcttattctgcgaaaccggctgaagtatgctctgacataccgtgaagtcattgctattctgatgcagcgccatt

SEQ ID NO: 288444 - DNA, 254 bp, Glycine max
  unsure (1)..(254): unsure at all n locations
cttgcccgcaaatccttggtcaatgcagacggtattatagagacnacatttttgtggggtaggtacgctttggaaatgtctgctgttgtttacaaggactgggttttcactgatcaagcactgcccaatgatcttgtcaagagaggagttgccgttaaggatccatctgctccccatggagttcggcttttgattgaggactatcttatgcttctgatgggctagagatatgggatgccatcaagtcctgggtc

SEQ ID NO: 288445 - DNA, 256 bp, Glycine max
caaagacttacgctacaagaaccatatttttcttgaaaagtgatggaaccttgacgccattggccattgagttaagtaagccgcatcctcagggtgaaggatatggtcctgttagcgaagtctacgtgccttcgagcgagggagttgaagcttacatttggttactggcaaaggcttatgttgttgtgaatgattcgtgctaccatcaactcgtcagccactggctaaacactcatgcggttgttgagccattcgc

SEQ ID NO: 288446 - DNA, 254 bp, Glycine max
  unsure (1)..(254): unsure at all n locations
aagattctggtgaatgcgtagaaaaggaaaataaagaaattagcgtgaaaaatgttgggtgtgttcagcagctccatagtgtcgccnccggacgagctcgttgccgccggcagccgtacaccgtcgccgaagatgacggcggcggcgctgcggaagtggttcgaggagaagaacccctccgcagtgtcggtggaggtcggagagcatgtccagctcgcttatacccaccagaacgagtcgccgtttcagcccat

SEQ ID NO: 288447 - DNA, 256 bp, Glycine max
  unsure (1)..(256): unsure at all n locations
aaaacgacngcaagatttgcnaggttgcagaatattcagtgtgctattgcgggcaagaatttgtacatgagattccgatgcagcactggtgatgcaatggggatgaacatggtgtcaaaaggtgttcaaaatgtccttgattttcttcagagtgactccctgacatggatgttattggaatttctggaaatttctgttcggacaagaaagctgcagccgtgaattggattgaagggcgtggcaagtctgtggtgtt

SEQ ID NO: 288448 - DNA, 256 bp, Glycine max
  unsure (1)..(256): unsure at all n locations
antgagtttccacactgcataccttangtcttccgaattcgaagttaatttgcaagatggctaaggaaaaggctcagatcaacattgtggtggttggtcatgtggaccctgaggaggcaaccaccattaacgagctgaagaagcctgttgtggagaaagaagctccagggcatgccatatgagggcatgcacgtacggcctcggaggggaaccagaaaattatgttaacaaaataatctggaaccctaatgtatgt

SEQ ID NO: 288449 - DNA, 253 bp, Glycine max
  unsure (1)..(253): unsure at all n locations
gctaagactaaggttacaaagccaaagcaaaaggttgaagatggtatctttggcacttctggaggatttggttttactaagcagaacgagctctttgtgggtcgtgttgctatgcttggttttgcagcatcactgttgggtgaaggaataactgggaaaggaattctagcacaattgaatctggaaactggaattcccctttatgaagcggacctcttcttctgtttttcatcctcttcaccctgctaggana

SEQ ID NO: 288450 - DNA, 252 bp, Glycine max
  unsure (1)..(252): unsure at all n locations
atcgagataactagaaacagtgtgatgaaaatgaaggtccttgttttcttcgttgctacaattttngtagcatggcaatgccatgcgtacgatatgttccctctccgaatgaacactggctatggtgcccgtactccggaggtgaaatgcgcaagttggaggcttgctgtggaagcacacnacatctttggctttnnnnncattcctgaagagtgcgttgaagcaacaaaggaatacatccatggcgaacaa

SEQ ID NO: 288451 - DNA, 257 bp, Glycine max
  unsure (1)..(257): unsure at all n locations
cacctgagttgaccangctgtaagaaattccctccttgtgcgtcctgcaacaactctgtttcgctgatgggtgcccatatttgtatgctatggtgcatgatagttcagtgtctacaataccaggtgattttgtcattggtgtcaagttgacaaccataaacaatatgtgtgcatatgggctcaatcctggtatttcangttctcgtcttttgggcaccattcctcagtccatttcacancaaactgtttggaatcat

SEQ ID NO: 288452 - DNA, 262 bp, Glycine max
gaaagaagggtctttgcttgattttggagatgtctctgctctcagatctcatcaaccttaacctctccgataccaccgagaaggtgatcgcagagtacatatggatcggtggatcaggaatggacctgaggagcaaagcaaggactctcccaggaccagttagcgacccttcagagcttcccaagtggaactatgatggttccagcacaggtcaagctcctggtgaagacagtgaagtgattttatacccacaagccatttt

SEQ ID NO: 288453 - DNA, 261 bp, Glycine max
aagacattaaggagttcaaagaaagcactaaggttgacaaggtggttgtcctgtggacagccaacacagagaggtacagcaacgtagttgtgggactaaacgacaccatggaaaacctctttgcttccttggacagcaatgaggctgagatttccccttccaccttgtatgccattgcttgtgttatggaaaatgttcctttcatcaatggaagccctcagaacacctttgtcccaggactcattgatctggccatcaaaa

SEQ ID NO: 288454 - DNA, 258 bp, Glycine max
cttcgccaagaaccgtgaactcgaagtgatccactccaggtgggccatgctcggagccttgggctgcgtcttcccggagttgctgtcccgcaacggggtgaagttcggagaagccgtgtggttcaaggccgggtcccagatcttcagcgagggtgggctcgactacttgggcaacccaagcctgatccacgcccagagcatcctcgccatctgggccacacaagttatcctaatgggtgccgttgaaggttaccgtat

SEQ ID NO: 288455 - DNA, 258 bp, Glycine max
tagcagcccttgcaatctcaatcttctcttcttttttcaggatacccatttccgtttttcttctcaaatggccctttcttgttccaaagtttcaagcttttctctctcacccgttgtgggtggtggtgatgtttttaaaaatctcactttttcttccttttctttgagtttttctaataagcgtgttggtggaatcaagaacttgagggtgcgtgctgctgcttcaaacgcaccagctccactcgctggggtcatatt

SEQ ID NO: 288456 - DNA, 258 bp, Glycine max
cgaaacatggcaagagtggtggcactccaacagaaccaactatctttctctaccttagcttcctctctttctgacttcagtggaaccagacttcaaactcaacttcagttcaagagaaagcaatgccatccaaaagggtctttctacgtctccgcatcgagcaccaagaaaatcctaataatgggaggcaccaggtttattggtgtgtttttgtctaggctccttgtcaaagagggtcaccaggtgactttattcaca

SEQ ID NO: 288457 - DNA, 128 bp, Glycine max
  unsure (1)..(128): unsure at all n locations
gttttgtttatttgacattaacaagtagcaaagatgtttggaatcatcggaggaaaccagggtcacaagataaaggggaacttggtgattatgcgaaaggnggnngtgcanatcaacagcattaccag

SEQ ID NO: 288458 - DNA, 252 bp, Glycine max
cttttccgggttttctcccaaacccagtgttggggatgctactgaaaaacccaacttgctctgtttctctgagctttgcgaatgtgaaacttggaagcagaaaccttagggtttgtgcctcaactgtgcctctctcaggggtgattttcgaacccttcgaggaggttaagaagggtgaacttgctgttccaacggctccccaagtctcgcttgctcgtcagaactacgctgatgagtgtgaatctgccatta

SEQ ID NO: 288459 - DNA, 257 bp, Glycine max
  unsure (1)..(257): unsure at all n locations
aggaaccctagctagggtttggaagaagctgatccgagaagatggtgcagcgtctcacctaccgcaaacgccacagctatgctaccaaatccaaccagcacagagtcgtcaagactccngntggcaagcttgtttatcagaccacgaagaagagggccagcggacccaagtgccctgtcactggaaagaggattcaagggattccacatttaaggccagcagagtataatagatcaaggttacacagaaaccgaaga

SEQ ID NO: 288460 - DNA, 255 bp, Glycine max
tcagaaccacattcctgggaattgatcttcccaatagaggtatgtggtcccaataatggttttgaaatgtggagttctgagtgggcaaatcaaacttcatggcatttgagtttccttattgacaatcccaaacaatctacagtttttgatattctcttgggaatctctcaagattttgaaattgctggtaatactcttatgccagctttttctgttccacaggctactgccagatcttctgaaaatgcggaatcc

SEQ ID NO: 288461 - DNA, 247 bp, Glycine max
agcaacaaggacattgttgcacaaataatatctgctagcattgccgaccgatttagttcttgctacagcatattcacatgagctgccacgatatggtcttgaagtaggacttacaaattatgcagcagcttattgcactggtctcctgttggcccgaagagtcctcaaaacacttgaaatggatgaggagtatgaaggaaatgttgaggctactggagaggattattcagtggaacctgccgagagc

SEQ ID NO: 288462 - DNA, 257 bp, Glycine max
ctcactgttgagcaggctatccaaaacaagaagttgttcatcttagatcaccatgactatctcattccatatttgaggaaaataaatgcaaataccacaaagacttatgctacaagaaccatatttttcttgaaaaatgatggaactttgacgccattggccattgagttaagtaagccgcatcctcagggtgaagaatatggtcctgttagcgaagtctacgtgccttcgagtgaaggagttgaagcttacatttg

SEQ ID NO: 288463 - DNA, 242 bp, Glycine max
  unsure (1)..(242): unsure at all n locations
cgagataactagaaacagtgtgatgaaaatgaaggtccttgttttcttcgttgctacaattttggtagcatggcaatgccatgcgtacgatatgttccctctccgaancaacactggctatggtgcccgtactccggaggtgaaatgcgcaagttggaggcttgctgtggaagcacacaacatctttggctttgagaccattcctgaagagtgcgttgaagcaacaaaggaatacatccatg

SEQ ID NO: 288464 - DNA, 255 bp, Glycine max
  unsure (1)..(255): unsure at all n locations
ctgcgactgcgcttcagcacaatgggtgcctacaagtatgtntcggagctatggcgcaagaagcagtctgatgttatgagattcttgcagcgggtgaggtgctgggagtatcgccagcaaccttctattgtccgtttgacaaggtctactcgcccagataaggctcgtcgcttgggtttcaaggctaagcagggttacgtgatttaccgtgttcgcgtacgaaggggtggccgtaagagaccagttccaangggt

SEQ ID NO: 288465 - DNA, 251 bp, Glycine max
  unsure (1)..(251): unsure at all n locations
atcaagtccaaganctaacctaccttttgcaatctcaattcaatggcgtcctctctcattgcgaangcttgcctctcctcttcnctcctctccaggtccctccttcgccccgccgcttccgcttcccaccgctctttcaacaccaacgccatgcgccagtatgacaaccgcgccgacgaccacagcaccgacatcgatcgtcactccgaacgctctttacctagcatgcgcgccgcgacgatatcttctca

SEQ ID NO: 288466 - DNA, 259 bp, Glycine max
  unsure (1)..(259): unsure at all n locations
ccaaaggattctacccgccgctcgatgggaattgcgcttcaaggcgtctgcgtagggctaatgccgcctcacgagggtcaccaacggcacgtgcctttggggggccgaggccccctactgctggtcggcaaacggacggcgggcgcacgcgtcgcttctagcccggattctgacttagaggcgttcagtcataatccaacgcacggtagcttcgcgncactggcttttcaaccaagcgcgatgaccaattgtgcgaatc

SEQ ID NO: 288467 - DNA, 253 bp, Glycine max
cttaaagtaaatgttggaactgaacctgatgcagaccttggtccagtcattagcaaacaggcaaaggagcgaatacaccgattaattcaatctggggttgaaagtggtgccagactagttcttgatggaagaaatatagtggtcccaggatatgaatctggcaattttattggcccaaccatcttatcagatgtcaccgccaacatggagtgctacaaggaggagatctttggaccagttcttcttctcacgg

SEQ ID NO: 288468 - DNA, 239 bp, Glycine max
  unsure (1)..(239): unsure at all n locations
cgtgttgcctctctgcaatctacagccaaaatgcctttcaagaggtacgannagatcgggagggttgcccaaatcaactacggcaaggaatatggcaggctcgtcgtcattgtcgacgtcattgatcagaacagagctcttgtccgatgcccctgatatggtgaggtcccaagtcaatttcaaaaggctttccctaaccgatattaagattgacattaagagggtccctaagaagaaag

SEQ ID NO: 288469 - DNA, 251 bp, Glycine max
  unsure (1)..(251): unsure at all n locations
anaggatgnccccatgtttgttgttggtgttaacgagcacgagtacaagccagagcttgacattatttgccaatgctagctgcacaaccaactgccttgccccgctcgccaaggttatcaatgacaggttnggcattntttgagggtttgatgaccactgttcattccatcactgctacccagncagactgttgatgggccatcagccaaagactggagaggtggaagagctgcttcatttnacatcattc

SEQ ID NO: 288470 - DNA, 251 bp, Glycine max
  unsure (1)..(251): unsure at all n locations
gtgaagctctctgctgtgcttatgggttctcatggcctaacaaaggggtctttggcttttctcaactaccctgcacaaatcatgttcaaatccacaaaggttctgccagtgatgataatgggtgccttcataccggntctgagaaggaagtatccgctgcatgaatatatatctgcaatacttcttgtagttggtttgatcttgttcacactagcagatgcacagacatctccaaattncngnaggttggg

SEQ ID NO: 288471 - DNA, 255 bp, Glycine max
ttcgtgagccggctctaccgtcggtctaggcccgtggaaccgggttcgactatctcgtcgaactgcgccgcgatgccaggccgagggttgcaatgctgatctgtcgcaagccaagcactatcaccgccgccacaaggtgtgcgagtttcactccaaagccgccaccgtcatcgccgccggcttgactcagcgattctgccagcaatgcagcaggttccatcttctttctgagtttgataacggaaaacgtagctg

SEQ ID NO: 288472 - DNA, 262 bp, Glycine max
  unsure (1)..(262): unsure at all n locations
aaacacttggctgtgcgaganctatagaagaaaaacggctcagcctcaacaaggaatcatgaaccaccatgcaccaccatgctcattctccgttgggagtcaacgttaacgttccaactttctttcccttctccagcagagtcagcatctctacttccaacgactccgacgaccaatccaactggtgcgactcgccgccacgtggagccacctcattggtgaacggtgcagcagcagccaactacaacacttccgtcacggc

SEQ ID NO: 288473 - DNA, 238 bp, Glycine max
  unsure (1)..(238): unsure at all n locations
tanaggaagaacaaccaagtncagcctgcaaccccagttacaccgccaccatcagtagaacccaagccacagccagtctctgctccttcaccaaaggtgagcactaagttttctgatgtgttggcattcagtgggccagcacctgagaggatcaatggaaggttggccatgattgggtttgtggctgcaatggcagtggaagtagccaaagggcaaggtgtgttagaacaaatatcca

SEQ ID NO: 288474 - DNA, 250 bp, Glycine max
ttttgaggtcattctggtggatgttgcccacagcgctgttagaaatgatccaagaatcaactggctctgcaacccagtccataaacacagggaactgcgtggcctcacttctgctgggaaaagtaacaggggtttacggggcagaggacatctctaccacaaaaatcgtccatcccgcagggcaacctggaagagaaacaacactctttcccttcgtcgctaccgttgattttgttgcagttatcgtatg

SEQ ID NO: 288475 - DNA, 251 bp, Glycine max
  unsure (1)..(251): unsure at all n locations
cnccgttaccggcggancaaaccggtgaatcagcgccgacggagttgccagagatccattcccgacgccgtttctgancaagacgtaccagctcgtcgatgatccctccgcggatgacctaatttcctggaacgaagcacggcaccagcttcattgtatggcgacccgcggaatttgcaagggatttgcttcctaagtacttcaaacacaacaacttttccagtttcgtccgtcaacttaacacctatggg

SEQ ID NO: 288476 - DNA, 245 bp, Glycine max
  unsure (1)..(245): unsure at all n locations
gcgtggtcaacatctgataganagttaaaggatacgtttganaagtttggcaagcttattgaggcaaaggtggttgttgacaagttctctgggcgttctcgtggttttggatttgtcacatttgatgacaagaaagcaatggacgaggctattgatgctatgaatgggatggatttagacgggcgaactattactgttgatagactcagcctcaacaaggatcantagaggtgatggtgnccccc

SEQ ID NO: 288477 - DNA, 251 bp, Glycine max
tgagtgaagctcaatctggaggggcacgagcagcagcaaattatgtagccactgagtccaagcaaattgtgctctttggttcagtgaaattgtggactggtctcaaccactatccaccattccatgcagtggctgagatggcagttcccacagctgcacactggtcagaaaaatacaacaatgtggtcaagggaacaagtgagaagggttatgccgtgtttgactatttgcctctgattccaattgatgac

SEQ ID NO: 288478 - DNA, 254 bp, Glycine max
  unsure (1)..(254): unsure at all n locations
cnacgacttcgttcgttccttctccttccaagttctaaccatttcccactgtcttcgattttagggcattaaatctgccatggcagcagcacccgctagagctcgtgccgattacgattacctcatcaagcttcttcttatcggcgacagggtgtggggaagagttgtctacttttgaggttttctatggctcattcacaaccagttttatcaccaccattggtatcgatttaagataagaaccatgaactaga

SEQ ID NO: 288479 - DNA, 255 bp, Glycine max
  unsure (1)..(255): unsure at all n locations
ggggaggcgctggtgcaaagaatgctattctcatgaatatgccaaatgctgttctttcaatgtggagatattttgttggagatctcgtctttgaagtttctaagatgacttctccctacattaaatgtacagtctctttcttcatagcatttggaaatttggctgatgacaccatcaattttgaggcttttccccataagctggtgcagtttggagagattcaggaaaaagttatnttgaaatttncacaagagg

SEQ ID NO: 288480 - DNA, 253 bp, Glycine max
  unsure (1)..(253): unsure at all n locations
gtcgagtgagaacgaagacggtgaagaaatcctctcggcaggtgatagagcgtcactactcgcgcatgaccctggacttgccacacgaacaagaagnnctctggaggaagtggcgataatgcccgtcgaagaggctaaggaacaagatcgcggggttctcgacgcacctgatgaagcgcatccagaagggccctgtgcgcggcatctccctcaagctccaggaggaggagcgcgaggccgcatggacttcgtc

SEQ ID NO: 288481 - DNA, 245 bp, Glycine max
  unsure (1)..(245): unsure at all n locations
atcgagataactagaaacagtgtgatgaaaatgaaggtccttgttttcttcgttgctacaattttggtagcatggcaatgccatgcgtacgatatgttccctctccgaatgaacactggctatggtgcccgtactccggaggtgaaatgcgcaagttggaggcttgctntggaagcacacaacatctttggctttgagaccattcctgaagagtgcgttgaagcaacaaaggaatacatccatgg

SEQ ID NO: 288482 - DNA, 297 bp, Glycine max
  unsure (1)..(297): unsure at all n locations
cagtttgcgtgccacagcaaactgtatggttcacagtaccaaaatntgattttggagctcaattcctctatcatcggatgcattnatgtcgtgcgccagcagattcaagattttgctagcactcagagcttatcatttggtgttaagtccnctgtaaaattggtattgttagatgaagcagatgccatgacaaaggatgcccaatttgcgctacgtagagtgattgagaaatatacaaaaagcactaggtttgcacttatctgtaatcatgtaaacaagattattcccgcacttcaa

SEQ ID NO: 288483 - DNA, 276 bp, Glycine max
  unsure (1)..(276): unsure at all n locations
gttgatcgagataactagaaacagtgtgatgaaaatgaaggtccttgttttctcgttgctacaantttggtagcatggcaatgccatgcgtacgatatgttccctctccgaatgaacactggctatggtgcccgtactccggaggtgaaatgcgcaagttggaggcttgctgtggaagcacacaacanctttggctttgagaccattcctgaagagtgcgttgaagcaacaaaggaatacatccatggcgaacaatatagatcagactccaaaaca

SEQ ID NO: 288484 - DNA, 265 bp, Glycine max
  unsure (1)..(265): unsure at all n locations
ctttagccagacggttaaatctccggcctcgacaagntgaagtgtggttccaacaatcggagagccagaacaaagctgaagcaaacggangtggactgtgagttcttaaagaaatgctgtgaaacattgaaggacgaaaacaggaggttaaagaaggagctgcaanactgaaggcactgaaactagctcaacccttgtacatgcctatgcctgctgccacatcaccatgtgcccttcttgcgacaggctcggtggcgttaagata

SEQ ID NO: 288485 - DNA, 273 bp, Glycine max
  unsure (1)..(273): unsure at all n locations
tggaactagatctagacgagagacattggagtgatgttaatttctgtcgcaaattcaagttatggcatggggtgtcaaagacaatggcagagaagagcgcgtgggccttggcaatggacagaggagtgaacatggtgtccatcaacgcaggcttaatgatggcgcatgatctctccatcaaacacccttacctaagagnagccgctgagatgtacgaggatggggttttcgtgaccgtcgatttggctttcttggtggacgctcacatctgtg

SEQ ID NO: 288486 - DNA, 279 bp, Glycine max
  unsure (1)..(279): unsure at all n locations
cactcacaaacacacactgaactaaaaaacatcaaaagagacatggctgagcaaaccttcatcatgatcaagcctgatgccgtccaaagagngccttattggcgagatcattagcagatttgagaagaaaggtttctacttgaaaggtttgaaacttgttactgtggaccgtccttttgctgagaagcactatgctgatttgtctgccaagcctttctttagtggtttggtggattacattatctctggccctgttgttgccatgatctgggagggcaa

SEQ ID NO: 288487 - DNA, 272 bp, Glycine max
cttgtgatagaggactacccttatgctgttgatggacttgaaatatgggatgctattaagacatgggttcatgaatatgtctccttgtattacccaacagatgcagcagttcaacaagatactgaactacaagcatggtggaaggaagctgtggagaagggtcatggtgacttaaaagaaaagccttggtggctaaaatgcagacaactgaagatctcattcaatcatgctctattatcgtttggacagcttcggtctccatgctgctgtta

SEQ ID NO: 288488 - DNA, 291 bp, Glycine max
  unsure (1)..(291): unsure at all n locations
cgaatatcttgttgtttggagcgatccgagnaaaactctgtaaacaccgttggtttaccaggacctccttacaggtgatgagcttctnnctgactccttccgttacaaggaaattgagaatggaatgctgtgggaagttgaggggaagtgggttgttaaaggagcagttgatgtagacattggtgcaaacccttctgctgagggtggaggagaagatgagggagttgatgatgcagctgttaaggttgttgacatgttgacacattcagacttcaggagcaacccgcattc

SEQ ID NO: 288489 - DNA, 274 bp, Glycine max
  unsure (1)..(274): unsure at all n locations
gaagaatgaccctgagtttgcaaagaagttggcttctcttgctgatctctacgtgaatgatgctttcggcactgcccacagagctcatgcttctacagnaggantggccaaatacttgaagccctctgttgcaggattccttatgcagaaggaacttgactatctagttggagctgtgtcaaaccccaagagaccatttgctgctatcgttggtgggtcaaaggtgtcttccaagattggagttattgagtccttgttgncgaaantaacgttc

SEQ ID NO: 288490 - DNA, 273 bp, Glycine max
  unsure (1)..(273): unsure at all n locations
aaattttgtgtcatcatcantctnccactgacacaaggggtgatttggtgaagtgtgangcctatgaagcagacagatcanaggttgagggtgcaagcacaccatcagaagctgcaaagaaggtgaaaattgggntatattttgcaacctggtgggctttgaatgtggtgttcaatatttataacaagaaggttttgaatgcttacccttacccttggcttattcaactctctcacttgcatgtgggtctctatgatgttgatctcttgggcc

SEQ ID NO: 288491 - DNA, 270 bp, Glycine max
  unsure (1)..(270): unsure at all n locations
cttgtgatagaggactacccttatgctgttgatggacttgaaatangggatgctattaagacatgggttcatgaatatgtctccttgtattacccaacagatgcagcagttcaacaagatactgaactacaagcatggtggaaggaagctgtggagaagggtcatggtgacttaaaagaaaagccttggtggcctaaaatgcagacaactgaagatctcntcaatcatgctctattatcgtttggacagcttcggctctccagctgctgt

SEQ ID NO: 288492 - DNA, 281 bp, Glycine max
  unsure (1)..(281): unsure at all n locations
gtttgggagaaattcaggaaaaagttgtattgaaattttcacaagangaatttcttacagcttggtcaactgcaggtgcgtcctgcaacaactctgttggctgatgggtgcccatatttgtatgcnatggtgcatgatagttcagtgtctacaataccaggtgattttgtcattggtgtcaagttgacaaccataaacaatatgtgtgcatatgggctcaatcctggntttcaggttctcgtcttttgggcaccattcctcagtccattcacagcaaactg

SEQ ID NO: 288493 - DNA, 273 bp, Glycine max
  unsure (1)..(273): unsure at all n locations
gaaggaggntgccgagatgaanaagaggnanattcaagtatgcntgggtgntacgacaagctnntganctgagcgtgaaagaggaatnnnccattgatattgctttgtggaagtttgaaaccancaagtantantgcacggtcattgatgctcctggacatcgtgantttatnaagaacatgattantggtacctcccaggccgactgtgctgtnnttattatgantccaccantggtggttttgaagntggtattctaaggatggacagacc

SEQ ID NO: 288494 - DNA, 283 bp, Glycine max
  unsure (1)..(283): unsure at all n locations
ctcgaccttgtatgatgaatgggttaacaagggcaatgcaccggcactgcccgagactcttnaagaattacaacaagctggtgtctcttggcttcaagatnatattcttgtcaggaagaacactggacaaacaggccgtaacagaagcaaacttaaagaaggctggctaccacacatgggaaaaattaattctcaaggatccacaagatccttccactccaaatgcagtttcatacaaaacagcagcgagagagaaactgataaggcagggatacaacattgt

SEQ ID NO: 288495 - DNA, 275 bp, Glycine max
  unsure (1)..(275): unsure at all n locations
cattcccccaactggcgtgangccatcttcaagccagttgggggaanntcanagactggcttgaagatggcttcaacattncattggtaactctagctccattcagganactttccgtagagtgagtnagcaattnactgntntgtttaggagnaaggntttcttgcattggtataccggggaaggcatggacganatggagttcacagaggctgagagcaacatgaacgatctcgtgtcggagtatcagcagtaccaggatgccactgctgatg

SEQ ID NO: 288496 - DNA, 290 bp, Glycine max
  unsure (1)..(290): unsure at all n locations
gttgatcgagataactagaaacagnntgatgaaaatgaaggtccttgttttnttcgttgctacaattntggtagcatgggcaatgccatgcgtnacgatatgttccctntncgaatgaaacactgggttatggttgccgtactcnggaggtgaaatgccgcaanttggaggnttncngtggaagcacacaacatctttcngctttgagacnattcctgaagantgngttgangnaacaanggatnnttcnatggcgaacaatatngatcagactccaaaacngttaaccc

SEQ ID NO: 288497 - DNA, 263 bp, Glycine max
  unsure (1)..(263): unsure at all n locations
gcaaatacagagttgttagcaccaaaccaatgcctggaanccgttggatcaatcttctcgttcaaaatgatgttcgncttgaaatatgtaccgagaagaaaacgnttctgtcagttgaagacatcattgctttgattggtgataagtgtgatggagttattggacagctgactgaagactggggagaacagttgttctctactttgagcaaagccggaggcaaagctttcagtaacatggtgttggttataacaacgtggatg

SEQ ID NO: 288498 - DNA, 261 bp, Glycine max
  unsure (1)..(261): unsure at all n locations
cactcttcttctcttgcggctagggttttagcgcanttcttctanatttaaggaagatgggtaaggaaaaggtcacatcagtattgtggtcattggccatgtcgactctgggaaatccactaccactggtcacctgatttacaagcttggaggcatgacaagcgtgttattgagaggtttgagaaggaagctgctgagatgaacaagaggtcttcaagtatgcctgggtgctggacaancttaaggctgagcgtgaaagag

SEQ ID NO: 288499 - DNA, 269 bp, Glycine max
  unsure (1)..(269): unsure at all n locations
cnaagaacacagttggannaaccattntgcgtagtgatntattggnaantttnntgacagagggcaattttagagcaagtgttgatttgcagcgcacnccatcgtattaaaggaatgnttaaaatggtggctacagttggtatncctgagaatacaggtcntancattggcntntgntangaatagttctttagggggcgcgccagttctgatatttacaccatnngtntnaagactgtgagttnaggagtccngcttgcacaaaagna

SEQ ID NO: 288500 - DNA, 303 bp, Glycine max
  unsure (1)..(303): unsure at all n locations
gtgagtttgttgatcgagataactagaaacagtgtgatgaaaatgaaggtccttgttttcttcgttgctacaattttggtagcatgggcaatgccatgcgtacgatatgttccctctccgaatgaacactggctatggtgcccgtactccggaggtgaaatgcgcaagttggaggcttgctgtggaagcacacaacatctttggctttgagaccattcctgaagantgcgttgaagcaacaaaggaatacatccatggcgaacaatatagatcagactccaaaacagttaaccaacaagctta

SEQ ID NO: 288501 - DNA, 289 bp, Glycine max
  unsure (1)..(289): unsure at all n locations
cagggctcgatccctcccagacctctttcttccaggtgctcaacattcctaccaagattaacaagggtactgttgaaatcattacccctgtgganctcattaagaagggagacaaggttggatcttctgaagctgcattgcttnccaagctagggataaggcccttctcgtatgggcttgtggttcttctgtttatgataatggttcagtgttcagtcctgaggttcttgatcttactgaggatgaccttattgagaagtttgctgctggtgtctcaatggttacttca

SEQ ID NO: 288502 - DNA, 231 bp, Glycine max
  unsure (1)..(231): unsure at all n locations
tgattgaagaagatgccgatcagaaacatcgccatcggaaggcctgaagaggctactcacnccgacacgttgaaggcggggttggctgagttcatctccaccttgatcttcgtgttcgccggttcaggttccggcatcgcctacaacaagctcaccgacaacggcgccgccactcccgccgggcctcatctccgcttccatcgcccatgctttcggnctcttcgtcgcgtc

SEQ ID NO: 288503 - DNA, 286 bp, Glycine max
  unsure (1)..(286): unsure at all n locations
caactgttggggagaagcccgtccgcgagcttatagctgatgatgcctggttgaatggtgaattcattactactgttcaacaacgtggtgctgcaattatcaaagctagaaagctttcaagtgcactatcagctgctagtgctgcttgtgaccatattagagattgggttcttggaactcctcagggcacctgggtgtcaatgggagtatncgcctgatggttcctacaatgttccagctggactgatctattcattccctgtcacttgtgccaatggggaatgga

SEQ ID NO: 288504 - DNA, 283 bp, Glycine max
  unsure (1)..(283): unsure at all n locations
gaggaaaccaccactggtgttaagaggctatatcagatgcaggcgaatgggactctactcttccctgctattaatgtcaatgactctgttaccaagancaagtttgacaacttgtacgggtgccgtcactctctccctgatggtctgatgagggctactgatgtgatgattgctggaaaggtggctgttgtggctggatatggtgatgttggcaagggttgtgctgctgcattgaagcaggctggtgctcgtgtcatcgtgactgagattgaccccattgtgc

SEQ ID NO: 288505 - DNA, 295 bp, Glycine max
  unsure (1)..(295): unsure at all n locations
caaaacactcataacacaaagcacaaagcaangctcnccccttgagttaaaaaatggcagcagcttccttccatggctctctcatccccatccttggctggcaaggccgtgaagctgggcccatcagccccagaagtgggaagggtgagcatgaggaagaccgtcaccaagcaggtctcctcaggaagcccatggtacggcccagaccgagtcaagtacttgggcccattctctggcgagcccccgtcctacctaaccggtgagttcccaggcgatacggctgggacatgctggg

SEQ ID NO: 288506 - DNA, 286 bp, Glycine max
  unsure (1)..(286): unsure at all n locations
gcagtactatgagatttcagctaagagcaactacaactttgaaaagccattcttatatttggccaggaaacttgcaggtgatcctaacttgcacttcgtagaatctcctgcattggctccaccagaagttcaaattgatttagctgcacagcaacagcacgaggctgagcttcttgcagctgctagtcagccccttcctgacgatgatgatgnatctttgagtagagggcctgagtgtttgtggactgtctcctgagtgttggtanttgtatgctaccgtatgtgc

SEQ ID NO: 288507 - DNA, 280 bp, Glycine max
  unsure (1)..(280): unsure at all n locations
gaacttccntcagcggcaaangganactggtcanaaccatacatcaggancttntatcagtggcagtgcaccggctgctaaggcacaggntgttggttngcctcctataagatcatttaggaaaaactcattggccaccacttcaaagaataatgatgaagtagatggaaaaccgggtgcagcagcactctttgtgaaggtcagcatgganggtgctccctatctgaggaaggtagatctaaganttatacaatgtaccaggnatgtcttctgcccttga

SEQ ID NO: 288508 - DNA, 287 bp, Glycine max
  unsure (1)..(287): unsure at all n locations
cccanaacaagtnttatgaagncctctcnaataanctgaaacttggtattccatgangattctcagnacaagctaaagctagctgaattgctcangtntcactccagtacgantggtgntgagatgaccancctcaaggactatgttaccaggatnangganggacagcntgacatctactacattactggtgaaagcaagannagctgtngagaattcccccttccttgaanagcttaagaagaagggatacgaggttctctacatggntgatgctattgatgagt

SEQ ID NO: 288509 - DNA, 289 bp, Glycine max
  unsure (1)..(289): unsure at all n locations
ccattatcaaaggagtttcgaatcactcacatggaaatgataaaaggaatcaaggggcatggctattatgatgaacttgttgttccccataattgagnatacggcctacgagtatcagctcacggaatcttttngctaaagctattgaagactacccaaaagcaacagcagtgcttgttcgcaaccatggggtntttgtctggggagactcatggatcagtgctaaaacacagtctgagtgttaccattacctctttgatgctgctctcaaacttcatcaaatgggatt

SEQ ID NO: 288510 - DNA, 282 bp, Glycine max
  unsure (1)..(282): unsure at all n locations
ctggcaaganggagaccctcattgaccttacaattatagaaatcttgtcaaggcacacatctgatgagttctaccttggggagagagatggtggtgactattggacttctgatnctggtccactagaggccttcaagaggtttggaaagaagcttcaagagattgaacaaaagcttatacagaagaacaaggacgagacgttgagaaaccgcagtgggccggctaaaatgccttacactttgctctatcctctagtgaggagggattgacttcagaggattc

SEQ ID NO: 288511 - DNA, 301 bp, Glycine max
  unsure (1)..(301): unsure at all n locations
tcangnncgagngnatacttctggggatggtntgaagctaactcttgaaccggctgcnggtggtgatcaaactacncttgaagcagatgttgtccttgtatctggctggtaggactcnattcactgctggacttggattggacaagataggtgttgaaactgacaagattggacggattttggtaaacgaacgatttgccanaaatgtctctggngtttatgcaatggagatgtnattccaggcccaatgttngcacacaaggcagaagangacggtgttgctngtgttgagtacatagct

SEQ ID NO: 288512 - DNA, 267 bp, Glycine max
  unsure (1)..(267): unsure at all n locations
gccacatagagacacaatacagagtgagttgttnctncttcgccacaactctcncgccaacatgggnctctccagagncttctatgcacaagaggcgtgccactggtggcaagaagaaggcctggagganaaagagaaagtangagcttggtcgccagcctgctaacactaagctgtcaagcaacaagacagtcaggaggatccgtgttagaggtggaaatgtgaatgganggcattgagattggntatggaattatcctggggaag

SEQ ID NO: 288513 - DNA, 282 bp, Glycine max
  unsure (1)..(282): unsure at all n locations
ctataacaagttttatgaagccttctctaagaacctgnaacttggtattcatgaggattctcagaacaagacaaagctngctgaattgctcaggtatcactccactaagagtggtgatgagatgaccagcctcaaggactatgttaccaggatgaaggaaggacagaatgacatctactacattactggtgaaagcaaganagctgtcgagaattcccccttcctgaaaagcttaagaagaagggatacgaggttctctacatggttgatgctattgatgag

SEQ ID NO: 288514 - DNA, 280 bp, Glycine max
  unsure (1)..(280): unsure at all n locations
gacgtatatcacaatttgaagtctgtgattaagaagaaatatggtcaagatgcagtaaatgttggtgacgaaggtggctttgcccctaacatccaggaaaacaaggnaggtttggaattgctcaaaactgccattgccaaagctggttacacaggcaaagttgtcattggaatggatgttgcagcttctgaattctacaaggaagataaaacatacgatttgaacttcaaggaagataacaatgatggctcacagaagatctctggagatgctttgaaag

SEQ ID NO: 288515 - DNA, 279 bp, Glycine max
  unsure (1)..(279): unsure at all n locations
gtccgccgtgtcttcatcatggacaactgtgaggagttgatgcctgaatatcttagcttngttaagggtattgtggattctnaggatcttcctctcaacatttctagagaaatgctgcagcagatcaagatcctgaaagtcatcaggaagaacttggtcaagaagtgcattgagatgttctttgaaattgctgaaaacaaggnagactataacaagttttatgaagcctctctaagaacctgaaacttggtattcatgaggattctcagaacaagacaa

SEQ ID NO: 288516 - DNA, 277 bp, Glycine max
  unsure (1)..(277): unsure at all n locations
ctcaggtgcgtcctgcaacaactctgttggctgatgggtgcccatatttgtatgctatggtgcatgatagttcagtgtctacaataccaggtgattttgtcattggtgtcaagttgacaaccataaacaatatgtgtgcatatgggctcaatcctggtatttcaggttctcgtcttttgggcaccattcctcagtccatttcacagcaaactgtttggnatcaaatggcaacagtgagaacaccattgaattttgattctagcaagcagagcttttg

SEQ ID NO: 288517 - DNA, 278 bp, Glycine max
  unsure (1)..(278): unsure at all n locations
cttcaaagtggtgaatctgaacgaaatggttaagagggtattnncctgttttctcccaactgagttctctgttgccgttcatgtgnatggtgcaagcaagttgtttgatcagacgtgttttctggatgttaagggatactgtcgcgaagagaggagccacgaagggcttggaatgggtggttctcttgtctaccaaaaatttgccaagacttgtgactgtggttcacctagatcaactctgaagtgctggaaagaggaagatgaagaagagtagtttt

SEQ ID NO: 288518 - DNA, 255 bp, Glycine max
  unsure (1)..(255): unsure at all n locations
gcacttcctgaggaaaggntacgcgctgtagaaactgggggttgcccacatgctgctattcgngaggacatcagtattaatcttggaccgctggaggngctttctaaccnnttcaaagcagatntacttctttgtgaatctgggggagataanctggctgccaatttcagcagggaattggctgactatattatttacntaatagacgtgtctggcggtgataaaattcctcggaaaggtggtcctggaatcacg

SEQ ID NO: 288519 - DNA, 258 bp, Glycine max
  unsure (1)..(258): unsure at all n locations
cctaaaacctactcattctccatacctcaacgaagaggttanagcgacggcaannctttgctgtccgncttgaccganccagagcttcgtcttggcccttcgattttgccctaaagtactctcngtcacaacnganacnnnnnnnnnnnnnnnnnnnnnnaatggcaccgaagcagaccnaggctgagaagaagatcgcttacgatgcgaantgtagcgacctaatggaggagtacggccagatcctcgttgtggaat

SEQ ID NO: 288520 - DNA, 251 bp, Glycine max
  unsure (1)..(251): unsure at all n locations
ataactaganacagtgtgatganaatgaaggtccttgttttcttcgtngctagaattttngtngcatggcaatgccatgcgtacgatatgttccctctccgaatgaacactggctatggtgcccgtnctccgnaggtgaaatgcgcaagttggnggcttgctgtggaagcacaccacatctttggctttgagaccattcctgaagagtgcgttgaagcaacaaaggaatacatccatggcgaacaatatag

SEQ ID NO: 288521 - DNA, 250 bp, Glycine max
  unsure (1)..(250): unsure at all n locations
gnggaagangagagggagattctttgtntgctaccttctctcggaaaantggttacgttcaggtttcaccagtaccaggtggttgngngggctcttcccacggaagcagatcagcaccccaagatctaccgaatgangctctgggccaccaacgaggttcgcgccaagtccaagttctggtattttctgaggnaactgaaaaaggtgaagaagagcaatggccaagtgcttgccatcaacgagattttgc

SEQ ID NO: 288522 - DNA, 251 bp, Glycine max
  unsure (1)..(251): unsure at all n locations
gntttaacacctatggctcctaaagctgatagtttaaagaaggncgatccaaaggcacaagccttgaaaactgctaaggctgttaagtcaggtgctactttaaagaaaaagaccaagnagatccgaacatctgttaccttccatcgaccaaagaccttgaaaaaggataggaaccctaaatacccacgcattagtgctccacccaggaacaagcttgatcactatcagatattgaagtatcctctcacaac

SEQ ID NO: 288523 - DNA, 253 bp, Glycine max
  unsure (1)..(253): unsure at all n locations
ggttaagatgattcnaancaagcccatggtggttgaaactttctctgatgtatcntcnncttggtcgttttgctgtgagggacatgcgtcaaactgtggctgtcggagtcatcaagagtgttgagaagaaagaccccancggagccaaggtcaccaaggcngctgccaagaagaagtgattgcatttgggcaattttgctagcacatgtgatcatcatcgtggttactcctttatagtagttttatccttgca

SEQ ID NO: 288524 - DNA, 252 bp, Glycine max
  unsure (1)..(252): unsure at all n locations
gntcgagataactngnaacagtgtgatgaaaatgaaggtccttgttttcttcgttgctnacaattttngtngcatggcaatgccatgcgtacgatatgttccctctccgantgaacactggctatggtgcccgtactccggaggtgaaatgcgcaagttggaggcttgctgtggaagcacacaacntctttggctttgagaccattcctgaagcgtgcgttgaagcaacaaaggaatacatccatggcgaac

SEQ ID NO: 288525 - DNA, 253 bp, Glycine max
  unsure (1)..(253): unsure at all n locations
cnaaacacnncataacacaannccacaaagcaaagctcatccttgagttaaaanatggcagcngcttcttccatggctctctcatccccatccttggctggcnaggccgtgaagctgggcccatcagccccagaagtgggangggtgagcatgaggangaccgtcaccaagcaggtctcctcaggaagcccntggtacggcccagaccgagtcaagtacttgggcccattctctggcgagcccccgtcctacc

SEQ ID NO: 288526 - DNA, 248 bp, Glycine max
  unsure (1)..(248): unsure at all n locations
ggatnactggctgccctnntggttgtgctagaccntncatggctgancttggnctngttggtgatggtccaaatngctntcagatttggcttggnggnnaccatnaacaaacntcnttngctcgaagtttcatggacagggtgaagattctagaccttgaaanagttttggngcctttgttttattattggaagcaaaagcgtcaatctaaagaatcatttggtgacttcacaaaccgaatgggattt

SEQ ID NO: 288527 - DNA, 245 bp, Glycine max
  unsure (1)..(245): unsure at all n locations
gangaatccgaaattcacaagcctgccacttccaagtcttttttagacaattttcttctcaagtctcngcaatacaatanaacantgggttttcgtctacctggtatcngangggcatcatttgctgaaaaccaagcntcttcnaaagctgtggcggtgccaaagggctatcttgcngtctatgttggagagagnatgaagcggtttgtgatcccgntctcatacttgacccaatcttcattcca

SEQ ID NO: 288528 - DNA, 246 bp, Glycine max
  unsure (1)..(246): unsure at all n locations
cntctttgctcagggtgctaagcttgtcgaccttgctctngcctctggaaaantttttgaaggagnaggtttcnagtacatnnaggantgttttgnnaatggnacattgcatctcattgggctactgagtgatggtggcgttcactccagacttgntcagttgcagttgttgcttaaaggagttagtgagcgnggtgttaaaagagtccgtgtccatattcttaacagatggccccgatgttttgg

SEQ ID NO: 288529 - DNA, 248 bp, Glycine max
  unsure (1)..(248): unsure at all n locations
cttcttctcaanatgcttgtncctccannannaccacccangaacacntgaaaanaacanttcttactgcnccatccacattgccatttcncttatctcatcagcctgttcagatacccttcatggagtcagntgttaatggagtagattccttatnagaggttnngaattcagtttctggggtanatcatgatcttcttncatctgggactccccgtccttcacggcctcccttgagagcatctaga

SEQ ID NO: 288530 - DNA, 276 bp, Glycine max
  unsure (1)..(276): unsure at all n locations
gttcannctttcttggaactttgttactctcacacatgtctcgctccgtgcctttggtttcaaccatttttntcttgcttctgcttctggtggccactgagatgatggggccaacaatggtggcagaagcaagaacttgtgagtctcagagccaccgtttcaaggggccatgtttgagtgacaccaactgtggctctgtttgccgaaccgaacgtttcactggaggacactgccgtggcttccgtcgcagatgcttctgcaccaaacattnttaat

SEQ ID NO: 288531 - DNA, 282 bp, Glycine max
  unsure (1)..(282): unsure at all n locations
atcaaacttcgtttgcaattatggcttcttcaatcaatggccgtaatgcaagtgagatctttcaantggaaactctcttgtacaaacacttgtatgccttcatagactctatgtgtctcaaatgcatagttgagcttggaatacnagacataatccacaaccatggccaacccattactcttcctgagttggtgtcaattctacaaattccaccagctaaagttagnccaagtgcaaagtctcatgcgctacctggaacacaatggattctttgaaagagta

SEQ ID NO: 288532 - DNA, 275 bp, Glycine max
  unsure (1)..(275): unsure at all n locations
tcccaaacccagtgttgggggtgctcagaaaaacccaacttgcnctgtttctctgagctttttgaatgagaaacttggaagcagaaaccttagggtttgtnccncaacggtgcctctcactggggngatttttgaaccgtttgaggaggttaagaagagcgagcttgctgttccaactgctccccaagtctcgttngctcgtcagaactacgctgatnagtgtgaatctgcgattaacgagcagataaatgtggaatacaatgcttcctacgtgt

SEQ ID NO: 288533 - DNA, 257 bp, Glycine max
  unsure (1)..(257): unsure at all n locations
ggagcgatctcctcggaggccacancaggcgaaagcaggacctttaagcttcctantcccctgtactacattcagtagttccttcacctctcaacaatctagcttgctcctatctatctatatgtaataagatgcgttcaaataggggcactagcttcactttatgttgtttcagctgtgtgtcaacaagtcatgtaagagacttcactatgntgttttctctttcgtggctttaataaattatgcgcccttgttcc

SEQ ID NO: 288534 - DNA, 279 bp, Glycine max
agaaggttgaattggagctttcaaacatctgtaatgatgttatgacagtgattgatgagcaccttatcctcatcggctgcagctggtgaatccactgtgttttactataagatgaaaggagattattatcgttatcttgccgaatttaaggcaggcaatgagaagaaggaagctgctgatcagtctatgaaagcatatgagtctgctaccactgcagcagaggctgatttacctccaacacatcccatccgattgggtctagctttaaatttctcagtt

SEQ ID NO: 288535 - DNA, 279 bp, Glycine max
  unsure (1)..(279): unsure at all n locations
gggaggtgattcacagcagatgggcaatgcttgngngcccttggctgcaccttcccagagatccttgagaagaatggtgtcaaattcggcgaggccgtgtggttcaaggccggtgcacagatcttctcaganggaggccttgactacttgggcaacccaaacctgatccatgctcagagcatccttgctatctgggctgttcaggttgtgctcatggggtttgttgaaggttacagagttggtggaggaccacttgntgaaggacttnacccaatctac

SEQ ID NO: 288536 - DNA, 277 bp, Glycine max
  unsure (1)..(277): unsure at all n locations
ggagattggtgctggtgaccaaggtcatgggttcggctatgccactgacgagactcccgagctcatgcccttgagccatgtccttgccacgaagctcggtgccaagctcaccgaggttcggaagaacgggacatgcccttggctgagacctgatggcaagacccaagtcactgttgagtactacaatgacaagggtgccatggttccaatccgcgtccacactgtgctcatctncacacaacatacgaccngagtgtggncgcggattggnacatgg

SEQ ID NO: 288537 - DNA, 289 bp, Glycine max
  unsure (1)..(289): unsure at all n locations
gncgtttnacttngnagtttcaaattcttctggcaaatgctgggatnattgaagattagcttgagaggagcaaaggcaacaaggaattgaatggacaagaagaggttagctactactggagcaaactttgcaaagagcatanaccgtagggaattcggtagttgcaagttccctgagaacttcactggttgccaagatcttganaaacaaaagaaagtgccattccttagtgangacttggagcttgaatgtgaaggaaaggacaaatacaagtgnggttctaatgttt

SEQ ID NO: 288538 - DNA, 279 bp, Glycine max
  unsure (1)..(279): unsure at all n locations
tccaaatgtcatcaagattattgnggagttcncactaagtagcaagcnanatactcaagcctatggtgatcatacctgtataataacaaaagagcatttggaacctaacttaggtggtctcactgttgagcaggntatccaaaacaagaagttgttcatcttagatcaccatgactatctcattccatatttnaggnaaatnaatgcaaataccacaaagacttatgctncaagaaccanntttttcttgaaaaatgatggaactttgacgccattggc

SEQ ID NO: 288539 - DNA, 285 bp, Glycine max
  unsure (1)..(285): unsure at all n locations
ccantatantccattctctctgtgtatttccctacctctncccttcaagatgcagatcttcgtcaagaccctcaccggcaagaccatcacccttgaggtggnaagctctgacaccatcgacaangtcaangncaagatccaggacaaggaaggaatccccncggaccancaacgtntcatttncgccggnaagcnanttgagganggncgtacnctngntgactanaacatncagnaggngtgtactcttcacctngtcctccgtctcngtngtggcatncagat

SEQ ID NO: 288540 - DNA, 276 bp, Glycine max
  unsure (1)..(276): unsure at all n locations
gcaactgccaacgatatcccaagtgaaacctttgatgtccaaggttatccaaccgtgtacttcaggtcagcaagtggaaagttatcacaatacgaagggggtaggaccaaggaagacatcatagaattcatcgaaaagaaccgggacaaacctgctcagcaagaacaaggacaagataaacctgctcagcaagaacaaggacaagatgancaagaaaaaggaaaagatgagctttgaaagggagctgttcctcacatgggatatagacacaaagtt

SEQ ID NO: 288541 - DNA, 276 bp, Glycine max
  unsure (1)..(276): unsure at all n locations
gatcgagataactagaaacagtgtgatgaaaatgaaggtccttgttttcttcgttngctacaattttngtagcatggcaatgccatgcgtacgatatgttccctctccgaatgaacactggctatggtgcccgtactccggaggtgaaatgcgcaagttggaggcttgctgtggaagcacacaacatctttggctttgagaccattcctgaagagtgcgttgaagcaacaaaggaatacatccatggcgaacaatatagatcagactccaaaacag

SEQ ID NO: 288542 - DNA, 275 bp, Glycine max
  unsure (1)..(275): unsure at all n locations
aagcctaataatactgttgctgtctttggcttaggagctgttggtcttgctgcctgtgaaggggcaagggtttctggtgcatctagaatcatcggggttgatttacttcccaatcgatttgaacaagccaaaaaattnggggtcactgatttnactaaacccgaaagatcacaacaaaccagtccaagaggtcattgctgaaatgactaatggaggagtagatcgtgctattgaatgcactggaagcatccaagcttcaatctcagcattngaat

SEQ ID NO: 288543 - DNA, 220 bp, Glycine max
  unsure (1)..(220): unsure at all n locations
cccctaggtaagaagaaaagatgccggctggncatggtttganatcccgcaccagagattccttctctcgtcctttcaggangaagggaaccatcgccctcaccacatacctgagaacctaccacgtcggcgactatgttgacgtcaaggttaacggtgccgttcacaagggaatgccccacaaattctaccatggccgcaccggacgcgtctggaatgt

SEQ ID NO: 288544 - DNA, 274 bp, Glycine max
  unsure (1)..(274): unsure at all n locations
attgangccaatggtatcttgaatgtctctgccgaagataaaaccactggccagaaaaataagatcactatcaccaatgacaagggtagattgtcaaaggaagatattgagaagatggttcaagaggctgagaagtacaagtnctgaggatgaagagcacaagaagaaggttgaggccaaaaacgctttggaaaactatgcatacaacatgaggnacaccgtgaaggatgacaagattggtgagaaacttgacccggctgacaagaagaagatt

SEQ ID NO: 288545 - DNA, 273 bp, Glycine max
  unsure (1)..(273): unsure at all n locations
cattcncccaactggcttgancgccatcttcaagccagttgggggaacgtcacagactggnttgaagatggcttcaacattcattggtaactctacctccattcaggaactgttccgtagagtgagtgagcaattcactgctatgtttaggangcaggctttcttgcattggtataccggggaaggcatggacgagatggagttcacagaggctgagagcaacatgaacgatctcgtgtcggagtatcagcagtaccaggatgccactgctga

SEQ ID NO: 288546 - DNA, 275 bp, Glycine max
  unsure (1)..(275): unsure at all n locations
gttctgagtattctgatcgctccctgagagagctcgtcgcggcggttgcagaagaagantgcaagatgaagttcaacatcgcgaatcccaccactggangccagaagaagctcgagatcgacgacgatctgaaactgcgagcattttgggacaagaggatctcacaggaggtcatcggagatgcactcggtgaggaatttaagggctntgtcttcaaaattaccggaggttgtgacaaacaaggatttccaatgaagcagggagtgctgactccc

SEQ ID NO: 288547 - DNA, 281 bp, Glycine max
  unsure (1)..(281): unsure at all n locations
gcaaagaatgctattctcatgaacatgnnaaatgctgtnctttnnatgtggagatatttngttggagatctcgtctttgaagtntctaagatgacttctccctacattaaatgtacagtctctttcttcatagcatttngaaatttggntgatgacaccatcaattttgaggcctttccccacaagntggtgctnaanggagaaattnaggaaaaagttgtantgaaattttnacaagaggaatttcttacagcttggtcaactcaggtgcgtctgcaaca

SEQ ID NO: 288548 - DNA, 258 bp, Glycine max
  unsure (1)..(258): unsure at all n locations
ctcaggacttcaagactgatctgcgtttccagagccacgccgtgcttgcattgcaagaagctgctgaggcatacctngttgggctctttgaggacactaacctgtgtgccattcacgcaagccgtgtaaccattatgccaaggtattcagctggcaagaaggttcgtggtgacgtgttgagttngtgtggaagatgagatgattggtgntgggttggtgttttnntttcagattcttttttattccaataatgggtgt

SEQ ID NO: 288549 - DNA, 271 bp, Glycine max
aagggtttctctttctctttctctgtctgcttcttcactttctctcgtttcaatcgaaaaaaatcatgggcagaaaattcttcgtcggtggcaactggaaatgcaatgggaccactgaggaggtgaagaagattgttactactttaaatgaagctaaagtccctggagaagatgttgtagaagttgttgtgagccctccttttgtgttccttccttttgtaaaaagtttgctgcgccctgatttccatgtctcggcccaaaattgttgggt

SEQ ID NO: 288550 - DNA, 276 bp, Glycine max
  unsure (1)..(276): unsure at all n locations
ttccccctttctctgcactctgcaactncctccaaatttagtntgagccttagaggattgttctttggttggatagatctctgatctgaagatgagtgcgtcgaggttcattaagtgcgtcaccgtcggcgacggcgctgtcggcggaacctgcttgttgatttcctacaccagcaacacttttcncacggantacgtgcccacggtttttgacaatttcagtgctaatgttgtggtggatggaagcacgtaaacttgggcattgtgggatactgc

SEQ ID NO: 288551 - DNA, 231 bp, Glycine max
  unsure (1)..(231): unsure at all n locations
gagcaaccagatcctgattcagattatcaganagcccaagaccgcccgacgattcatgatttatgttcataccaagatgatgatagttgatgacgaatacataatcgttggatctgccaatatcaaccaaaggtcaatggatggtgctagggactctgagattgccatgggtgcttatcagccctatcatttggctaccaggcagccagcacgtggtcagattcacggttt

SEQ ID NO: 288552 - DNA, 258 bp, Glycine max
  unsure (1)..(258): unsure at all n locations
caagggttgtgaaagcagagaagtgagatacactaagttatcctcataaatacactctaattaggtggcaagataagtgtctaaccttagtaacattgccacatattgtgttcattttggaattgtgccactaaaattctattcaattcatctatggctgcctcttcttatgctatgcaatcaatcctggcaaaccctttgatccgcatttccnnagggtctagggtgaaccatttggcgttcctgctttgcacatga

SEQ ID NO: 288553 - DNA, 256 bp, Glycine max
  unsure (1)..(256): unsure at all n locations
attctccatacctcaacgaagaggttaaagagacggcaacactttgctgtccgccttgaccgagcagagcttccgtcttgggccctcgattttgccctaaagtactctcagtcacaacagacacnnnnnnnnnnnnnnnnnnnnnnaatggcaccgaagcagaccaaggctgagaagaagatcgcttacgatgcgaantgtgcgacctaatggaggagtacggccagatcctcgttgtgaatccgataacgtggga

SEQ ID NO: 288554 - DNA, 260 bp, Glycine max
  unsure (1)..(260): unsure at all n locations
cttcccttctccaacatgccncaacgnncagcgttctnagtcttttcntcttcgttaccctcttcacatgcnttctctctgctaattccccacgatgaccatattttcctaccgagtcaactccatgacgatgactcagtgagttgcacngctaccgacccaaaccttaactacaagccggtgatcggaatcctgacccaccccggcgacggtgcctctggccggctcagcaacgccaccggggtttcttacatcgccgc

SEQ ID NO: 288555 - DNA, 259 bp, Glycine max
  unsure (1)..(259): unsure at all n locations
aaaacaaagannaaaaaaaccctagccaacacaaccatcatggccacctctgctattnagcaatncagcattcactggtccaaactgctctgaagcagntcaatgagttcgtccgcaagaccggtggcgccggcaaaggtcgnactaacatgcgccgcaccgtccaagagtgctcctcagagcatttggtatggccctgaccgtcccaagtacttgggnccattctcggagcagattccatcatacctgaccggagaat

SEQ ID NO: 288556 - DNA, 255 bp, Glycine max
  unsure (1)..(255): unsure at all n locations
tgccgcttcatgagatggaaggaggaagaacttactatctgggaatgnttttgggtggggcttacgaggaggcgctcggtggagtccacaacttgttcggcggccccagcgtggtcagggtgtcgcagagcgatggccctcacagctttgcggtcacgcgtggccgtgccggggccatcctgtggagatgttcttcnagtgatgcagcaccagcccgagctcatgttcgagacactcaagcaccgcgcgcaggag

SEQ ID NO: 288557 - DNA, 256 bp, Glycine max
  unsure (1)..(256): unsure at all n locations
gaaggttcatccaatccccgaagcccttcaccgcattgcaaccatgtcgaggagaaaggtcagagagccaaaggaaganaacgtgactctgggcccagctgttagagatggtgaacatgtctttggcgtcgctcgcatctttgcctccttcaatgataccttcattcatgtcactgatttgtctgggagggaaacgcttgtccgcatcactggtggaatgaaggttaaggctgacagagatgaatcatctccttat

SEQ ID NO: 288558 - DNA, 259 bp, Glycine max
  unsure (1)..(259): unsure at all n locations
gttaacagagttccaccccgancattgaanncgttctttacagntnagtggagaatgaagaacacatatgtgtattgaaggaccgcaaacaagncgatcatcttcaccatggcaagacttgaccgtgtgaagaacatcacgggacttgtggagtggtatggcaagaatgcgcgcctccgcgagttggtaaacctcgtggtggtggccggagacaggaggaaggagtccaaggacttggaagagaaggccgagatgaaga

SEQ ID NO: 288559 - DNA, 258 bp, Glycine max
  unsure (1)..(258): unsure at all n locations
gaagctgnactaactcgtttaggaaagcctgtagcagctgatgctggggganagttgtatgcaatcatggaaatatgccgctcatttgatcanatatttaaagaccatcttgatggcgtgcgnccctggaggtgataaaatttataatgtctttgacaatcagctccccgctgctttaaaaaggttgcagtttgataagcagctttcaatggaaaatataaggaaanttattactgangctgatgggtatcagcctcc

SEQ ID NO: 288560 - DNA, 249 bp, Glycine max
  unsure (1)..(249): unsure at all n locations
ttcaagtatgcctgggtgctggacaaacttaaggctgagcgtgaaagaggaatcaccattgatattgctttgtggaagtttganacaacaaagtattattgcacagttattgatgcgcctggacatagggatttcannaagaatatgattactgggacatcccaagctgactgtgctgnacttatcttgttcgaccatggtggttttgaagctggtattccaaggatggacagctcgtgaactgtctgt

SEQ ID NO: 288561 - DNA, 227 bp, Glycine max
  unsure (1)..(227): unsure at all n locations
aacagaagaacaaccaccaccacacacaatgggtcgcgtgagaacaaaaacggtgaagaaatcctcccgccaggtgattgagcgttactantcgcgcatgaccctcgacttccacacaaacaanaagnaactcgaagaagtggccatcatcccttccaagaggctgcggaacaagatcgcgggtttctccacgcatctcatgaagcgcatccagaagggtccgtttc

SEQ ID NO: 288562 - DNA, 258 bp, Glycine max
aaacactcataacacaaagcacaaagcaaagctcatccttgagttaaaaaatggcagcagcttcttccatgggctctctcattccccatccttggctggcaaggccgtgaagctgggcccatcagccccagaagtgggaagggtgagcatgaggaagaccgtcaccaagcaggtctcctcaggaagcccatggtacggcccagaccgagtcaagtacttgggcccattctctggcgagcccccgtcctacctaaccgg

SEQ ID NO: 288563 - DNA, 256 bp, Glycine max
  unsure (1)..(256): unsure at all n locations
atttgtacctccagactttgttgctgtngttctctaggagaaaagtgccagatagagccttcaacataatggggatcctagtgttttggatttggttccctctattgatctcatccctgccaaattggggagaaagggtnatgttngtnttggccagttttgctgtttgctaccatccaacacctttcaattttgtttgaaccatttcgnagcagatgtgtatganggccaccaaatggcaatgactggtttgana

SEQ ID NO: 288564 - DNA, 254 bp, Glycine max
  unsure (1)..(254): unsure at all n locations
tcanaacantcttctttcttnccaggttcttnatcagtgtcaaaaccaanagggtggttgcanattgcaatggctaagcacgatgttgagggnggttccttcgctgcanaggactaccatgntcntcntccagcaccattgattgatgctgaggaactcacacagtggtccttctacagggctttgattgctgagttcattgccacaatgctcttcctttacatcacngtgctcantgtgattggttacaagag

SEQ ID NO: 288565 - DNA, 257 bp, Glycine max
  unsure (1)..(257): unsure at all n locations
tcttagatcaccatgactatctcattccatatttgaggancatanatgcaaataccacaaagacttattcctcacaagaaccatcattnttcttgaaaaatgatggaactttgacgccattggccattgagttaagtaagccgcatcctgcagggtgaagaatatggtcctgttagcgaagtctacgtgccttcgagtgaaggagttgaagcttacatttggttactggcaaaggctatgttgttgtgaagatgcag

SEQ ID NO: 288566 - DNA, 257 bp, Glycine max
gccccgaactattgtcccgcaacggggtcaagtttggagaagctgtgtggttcaaggccgggtcccagatcttcagcgagggtgggctggactacttgggcaacccaagccttgtccacgcccagagcatcctcgccatctgggccacccaagttatcctaatgggtgctgttgagggttatcgtattgctggtgggcccctcggtgaggtcactgacccaatctaccctggtggcagctttgacccattgggcctt

SEQ ID NO: 288567 - DNA, 261 bp, Glycine max
  unsure (1)..(261): unsure at all n locations
ccttcaacaagttcaacccagtccaaccaaacattatgctccaaaaagatgctagtatttcatcctctngggtgttacaactcaccaaagttggcagcaacgggcgtgcccacctcgggatctctcggtcgtgccctttacgctgccccaatccagatttgggacagcgaaaccggcaaggtagccagctgggctacatcctttaaattcaacattttcgcacccaacaaatcaaactcagctgacgggcttgccttcttc

SEQ ID NO: 288568 - DNA, 253 bp, Glycine max
  unsure (1)..(253): unsure at all n locations
ggagaagctcttgacgtatggtaacatgcntgtccaagaacaagagaatgtcaagagagtccaattggctgacaagtacttgaacgaggctgcacttggaaatgctaacgaggatgctattaacaggggnactttcttccaatcttgaattggaggcaaagcaaacttggcaagtaaatatttctgttcctgaaggttgtgctgatccaagtgctagaagttgtgatgggacttgcgtgtaacattcttagaa

SEQ ID NO: 288569 - DNA, 254 bp, Glycine max
ggaagaaaggctgtttaatggtcaagattgtgatgtctgggaatgcagcagtcaaaaggagtgattgggcctcattggtacaagtgtttttaacaaacagcaacagtacagagcattttgatgcatgtaagtggacaaaatcagaaccacattcctgggaattgatcttcccaatagaggtatgtggtcccaataatggttttgaaatgtggagttctgagtgggcaaatcaaacttcatggcatttgagtttc

SEQ ID NO: 288570 - DNA, 253 bp, Glycine max
  unsure (1)..(253): unsure at all n locations
gatcgagataactagaancagtgtgatgaaaatgaaggtccttgttttcttcgttgctacaatnttngtagactggcaatgccatgcgtacnatatgttccctctccgaatgaacactggctatggtgcccgtactccggaggtgaaatgcncaagttggaggcttgctgtggaagcacacaacatctttggctttgagaccattcctgaagagtgcgttgaagcaacaaaggaatacatccatggcgaacaa

SEQ ID NO: 288571 - DNA, 257 bp, Glycine max
  unsure (1)..(257): unsure at all n locations
ctctaacctacctctttntcttctctctcaacaacttcaccttcttcctcctncgatcatgtctccacttcaagggcaagtaccatgatgagcttatcgccaatgctgcgtacattggcactcctggaaagggtattcttgctgctgatgagtcaacagggacaattggcaagcgtttggccagcatcagtgtagagaacattgaatccaacaggcgagctcttagggagctgcttttcactgctcctggtgttctt

SEQ ID NO: 288572 - DNA, 250 bp, Glycine max
  unsure (1)..(250): unsure at all n locations
tgnngctgnagtgtttggccgcattgatcacaagtttgatctcatgtatnccaagcntgcttttgtccactggtacgtgggtgacggtatggaaganggtgaattttctgaagcccgtgaggaccttgcagcccttgagaaggattatnaagaagtgggtgctgagtctggtgagggccaggaagaggatgaagatactagaatctacttcagattctgttctgtggnctgttttctgttgtgtttgatg

SEQ ID NO: 288573 - DNA, 255 bp, Glycine max
  unsure (1)..(255): unsure at all n locations
gttctctgtcactgctgcgtctctcgtaaccatgnctaagcaaatccacgagattanggatttccttctcactgctagtnggnaggacgcaaggtcggtgaagatcaagaggagcagagatgtggttaagttcaaggtccagatgctcgaagtacctctacacactttgtgtgtttgacccagagaaagctgataaattgaagcaatctcttcctccaggtttgagtgttcaagacctgtaaaggtacagggcga

SEQ ID NO: 288574 - DNA, 257 bp, Glycine max
  unsure (1)..(257): unsure at all n locations
ttcctgaaaaanagaattttgaacctgcctctgttaaagtttgcattttttcttnggtgggttgatagtactgtgncaagctttggaanttcttcacaagctgctacttcaatggccactgaagangttaacaaacctcaatcgcttccttccatnaccctggagatgatagtgaaagcacttgaagccttgaatgaggctgatggatcgnntnaatcagcgntatcaangtacataganaccacctacngtgagtt

SEQ ID NO: 288575 - DNA, 256 bp, Glycine max
  unsure (1)..(256): unsure at all n locations
gaacgnctccgatgctttggacaagattcgatttgagagtttgacagntaagagcaanctncgatgatcagccagngtctnttnantcatattattcnaganaanantaacaaacccantgaccantgttgacagtggnantggcatgaccanagctgatttggtgaacaacttgggtnnaattgctagntntggtnnnaaggaattcatggaagccntggctgntggtggtgatgtgagtntgnttggacagttt

SEQ ID NO: 288576 - DNA, 255 bp, Glycine max
cagaaaccttcgccagaaaccgtgagctcgaagtgatccactccaggtgggccatgctcggggccccgggctgcgtcttccccgaactattgtcccgcaacggggtcaagtttggagaagtgtgtggttcaaggccgggtcccagatcttcagcgagggtgggctggactacttgggcaacccaagccttgtccacgcccagagcatcctcgccatctgggccacccaagttatcctaatgggtgctgttgaggg

SEQ ID NO: 288577 - DNA, 249 bp, Glycine max
  unsure (1)..(249): unsure at all n locations
gaggaacttcaaaaagaccccgagctccaagcttggtgganagaacttgtagaggtgggtcatggggatttcaaggatnagccatggtggcaaaanatncnaactcgtgaagagttggttgangcttccgntaccctcatatcgatgctcagctcttcatgctgctgttaactttggacagtatccanatggaggtttaatccngaatangccaatcattgagcaggagatcatgcctgagaaaggtcc

SEQ ID NO: 288578 - DNA, 231 bp, Glycine max
  unsure (1)..(231): unsure at all n locations
tcttaactcaacttctgctacccacacctcttcttccaagtcanaccacgcttttctctacannccatgggcaaggtcaagatcggaatcaacggatttggaagaattggccgtttggttgccagagtcgctctgcaaagagacgatgtggagctcgttgccgttaacgaccctttcattaccaccgattacatgacatacatgtttaaatacgacagtgtccacggacat

SEQ ID NO: 288579 - DNA, 249 bp, Glycine max
tgaaatctaacaacatcttgttggatggggacttcggtgcaagagtggcagattttggagtagctaaggtagtcgatgccaccgggaaaggaactaaatccatgtccgtcatagctgggtcttgtgggtacattgcaccagaatatgcatacacgcttagagtgaatgagaagagtgacatatatagttttggtgttgtcatacttgagttggttactggaaggaggcccatagaccctgaatttgggg

SEQ ID NO: 288580 - DNA, 252 bp, Glycine max
  unsure (1)..(252): unsure at all n locations
cctcaccaaaggaactaagaatttcattgaggctagagaaantggtgatcaatatgtccaaagaatccaaaagttttctttgatattctaattggaaagatgaaagctggacgagtagtgatggagttgtttcccgatgcaaccccaaaaacagctgaaaacttcagggctctctgcactgggganaaggggatttcacgatctgggaaacctttacactacaaaggttctgtatttcatcgtattattcca

SEQ ID NO: 288581 - DNA, 259 bp, Glycine max
  unsure (1)..(259): unsure at all n locations
aaaaaaancctctctttctctctcttccaaaacctaattttcantttttctcttcaaacaaatttnccaaaatgcgtganatccttcacatccagggtggccaatgcggcaaccagatcggcgccaagttctgggaggtggtttgcgcggagcacgggatcgaccccactggaaggtacggtggggactcagagcttcagctcgagaggatcaatgtctactacaacgaagccagctgcggccggttcgtgccgcgcnc

SEQ ID NO: 288582 - DNA, 289 bp, Glycine max
  unsure (1)..(289): unsure at all n locations
gttgatcgagataactagaaacagtgtgatgaaaatgaaggtccttgttttcttcgttgctacanttttggtngcatggcaatgccatgcgtacgatatgttccctctccgaatgaacactggctatggtgcccgtactccggaggtgaaatgcgcaagttggaggcttgctgtggaagcacacaacatctttggctttgagaccattcctgaagagtgcgttgaagcaacaaaggaatacatccatgggcgaacaatatagatcagactccaaaacttaancaacaag

SEQ ID NO: 288583 - DNA, 276 bp, Glycine max
gagtatgtacaacataaaatgatggagaaggcttcagaaatttggagcatgatatctcaaggagcttacatttatgtgtgtggtgatgccaagggcatggccagggatgtacaccgtgccctgcacacaattttgcaagagcagggttctctcgatagttccaaggctgagagcatggtaaagaatctacaaactactggcagatatttgcgcgatgtatggtgatgatatctgaatgcaagcctcggggtgacgaagatattcaaaaacctagag

SEQ ID NO: 288584 - DNA, 275 bp, Glycine max
ggagatttcagagcgtgacgaaggtgctcttaagtatctcaaagatatcaagtggagcaggatagaaaaccctaaaggattcaagcttgactttttctttgataccaacccttattttaccaattctgtctgacaaaaacatatcatatgattgatgaggatgaaccaatattggagaaagcaattgggactgaaattcaatggcacccaggaaaatgtctgacacagaagattctaagaaaaaacctaagaagggttcgaagatctaaaccatt

SEQ ID NO: 288585 - DNA, 287 bp, Glycine max
  unsure (1)..(287): unsure at all n locations
gaattttggacaantacccttatggaggtttgatcctaaaccgtccaactttaaccagaagatttctccctgaaccaggaagcaaagaatatgaggagctttcaaccaattntcaaaaggcntacctgacaacaatnacaagaaagattgaggcccttgtggacctttcagtgacagagatattgtcaagacatgcttctgatgagatctaccttgggaagagggacagtgacgatggactgatgaccaaaggcaattccaagccttgaaaagttggaacccancnc

SEQ ID NO: 288586 - DNA, 275 bp, Glycine max
  unsure (1)..(275): unsure at all n locations
gtgctaagtgcctaacacctgcagtgnacaatggtctctgcatcagcatctcttctcaagtcttcacttgttcttgacaagtctgagtgggtgaagggacaaacacttcgccaaccttctgctgcatccgttgtgagatgcaaccccaccaccccatcnngcctcacaatcagagctggttcctatgctgatgagctcgttaagaccgcgaaaacagtggcttcaccagggaggggtattttggccatggacgagtccaatgctcctgtgggaag

SEQ ID NO: 288587 - DNA, 272 bp, Glycine max
  unsure (1)..(272): unsure at all n locations
acctacctctttntcttctctctcaacaacttcancttcttcctcctcgatcatgtctcacttcaagggcaagtaccatgatgagcttatcgncaatgctgcgtacattggcactcctggaaagggtattcttgctgctgatgagtcaacagggacaattggcaagcgtttggccagcatcagtgtagagaacattgaatccaacaggcgagctcttagggagctgctttncactgctcctggtgntcttcaatatctcaggtgtcatcctc

SEQ ID NO: 288588 - DNA, 275 bp, Glycine max
  unsure (1)..(275): unsure at all n locations
tagaaacagtgtgatgaaaatgaaggtccttgttttcttcgttgctncaattttngtagcatggcaatgccatgcgtaacgatatgttccctctccgaatgaacactggctatggtgcccgtactccggaggtgaaatgcgcaagttggaggcttgctgtggaagcacacaacatctttggcttgagaccattcctgaagagtgcgttgaagcaacaaaggaatacatccatggcgaacaatatagatcagactccaaaacagtaaccaacaagc

SEQ ID NO: 288589 - DNA, 282 bp, Glycine max
  unsure (1)..(282): unsure at all n locations
caaagcacnaagcaaagctcatccttgagttaaaaaatngnagcagcttcttccatggctctctcatccccatccttggctggcaaggccgtgaagctgggnccatcagtcncagaagtgggaagggtgagttgangaagaccgtcatnaagcaggtgctcctcangnagccnatggtanggaccngtaccgnntnangtacttgngcccattctnnggnganagccngtcctnctaatggtgagttcccaggngactacggntggganangtgggcttccg

SEQ ID NO: 288590 - DNA, 278 bp, Glycine max
  unsure (1)..(278): unsure at all n locations
atcgagataactagaaacagtgtgatgaaaatnaaggtccttgttttcttcgttgctacaattttngtagcatggcaatgccatgcgtacgatatgttccctctccgaatgaacactggctatggtgcccgtactccggaggtgaaatgcgcaagttggaggcttgctgtggaagcacacancatctttggctttgagaccattcctgangagtgcgttgaagcaacaaaggaatacatccatggcgaacaatatagatcagactcaaaacagttaac

SEQ ID NO: 288591 - DNA, 143 bp, Glycine max
tgatgatgacactgatacattagggtgtagtttaagctagctttgctatggttacgttctttgagatgagagtcttgatgaacagtaccattctgatgtattgctttccttgaaagttaatgcatgctcttatcttctgtcta

SEQ ID NO: 288592 - DNA, 278 bp, Glycine max
ctgctggatggcaaacagccatgtctcaaattggaccccaattcatatggtggctagctgctacaaagtgtattctatcatctatacaatcaagtgtcatacatgtctctggatcagatctctcctttgacgtttagcattggaaacaccatgaaacgtatatctgtcattgtgtcttccattattatcttccacacaccagttcaacccatcaatgctcttggtgccgccatgctatccttggaaccttcttgtattcacaggcgactatagagttg

SEQ ID NO: 288593 - DNA, 276 bp, Glycine max
  unsure (1)..(276): unsure at all n locations
caagggttgtgaaagcagagaagtgagatacactaagttatcctcataaatacactctaattaggtggcaagataagtgtctaaccttagtaacattgccacatattgtgttcattttggaattgtgccactaaaattctattcaattcatctatggctgcctcttcttatgctatgcaatcaatcctggcaaaccctttgatccgcatttccagcgggtctagggtgaaccaatttggcgttcctgctttgcacatgagaaggngttggcctgag

SEQ ID NO: 288594 - DNA, 272 bp, Glycine max
  unsure (1)..(272): unsure at all n locations
gataactagaaacagtgtgatgaaaatgaaggtccttgttttcttngttgctacaattttngtagcatggcaatgccatgcgtacgatatgttccctctccgaatgaacatcggctatggtgcccgtactccggaggtgaaatgcgcaagttggaggcttgctgtggaagcacacaacatctttggctttgagaccattcctgaagagtgcgttgaagcaacaaaggaatacatccatggcgaacaatatagatcagactcaaaacagttaa

SEQ ID NO: 288595 - DNA, 256 bp, Glycine max
  unsure (1)..(256): unsure at all n locations
cttccnntntccaacatgccaaaactnagcgttctnagtcntttacttcttcgttacnctnactcacatgccttctctctgctaattncccacgatgancatattttcctancgagtcaactccatgangatgactcagtgagttgcactgntancgacccaaaccttaactacaagccggtgatcggaatcctgacccaccccggngacggtgcctctggncggctcancaacgccaccggggttcttacatcgc

SEQ ID NO: 288596 - DNA, 273 bp, Glycine max
ccaaactctgcatcggaagaaaccctagccactctcccggcgtcacgatgcagatcttcgtgaaaaccctaacgggtaaaacgatcacgttggaggtggagtcttcggacaccatcgacaacgtgaaggccaagatccaggacaaggaaggcatccctccggaccagcagcgcctcatcttcgccgggaagcagctggaggacggccgcaccctacgccgactacaacatccagaaggagtccacgcttcacctcgtcctcacctccgtggcg

SEQ ID NO: 288597 - DNA, 268 bp, Glycine max
  unsure (1)..(268): unsure at all n locations
attctctcttctattctattctanactcgaaacaatcttagagaaagaagcagaaganaatgccgatttctagaattgccattggaaattcttcggagttgaaccaatctgatgcacttaaggctgcactagctgagttcatctcaatgctcatcttgtttttgccggggaaggctctggaatggctataataagctgacaaacaatggttcagcaacaccagcagggttagtggcagcatcactgtcacatgccttgcactttttgt

SEQ ID NO: 288598 - DNA, 266 bp, Glycine max
  unsure (1)..(266): unsure at all n locations
gaaacggangccagtacagagagagtagtgggaacctatggatacatggctccagagtatgccttggacggattcttttcaatcaaatccgacgttttcagctttggagtagtccttctagagattcttagtggaaaaaggaacactggattctatcagtccaagcaaatttctagcctttgggtcatgcatggaagttatggacagagaataagctactggattaatggacccatctcttgtgaaacngcaacgaaatgattcnt

SEQ ID NO: 288599 - DNA, 269 bp, Glycine max
  unsure (1)..(269): unsure at all n locations
ctcagatacttcgcttgtnagtagtgttgttgaaagtctcaaaacatctggactgctaccgtgatgctggagttgcaacttctttgactgattcagggcaacagtgggactttccaaatgggtgggcgccgcttcaacacatgctagtggaaggactgctaaaatcaggattgaaagaagcaaggttattggctgaggaaattgccatcagatgggtcacaaccaattatattgtttataaganaacaggtgtaatgctganaatttga

SEQ ID NO: 288600 - DNA, 279 bp, Glycine max
  unsure (1)..(279): unsure at all n locations
gaatggctcccaagggnttaanctttctggctgtntncctatgcgnttcagcactgtcactgagtccttctgttgcgggggaagggcaaaataatggccttgtnatgaacttctacaaggaatcatgccctcangctgaaganatcatcacagnacaagtcaagcttctctacaagcgccacangancactgctttctcctggcncnggaanatntccatgactgtgcagcatnaganttgtgangcttcactgttgctggcctccacaaaggagttgt

SEQ ID NO: 288601 - DNA, 274 bp, Glycine max
  unsure (1)..(274): unsure at all n locations
gtgaaacangctaataaatgtgagtngttcaccgccgcaacttccaatgtgcgngcacttactcgtctcactgtccttgctatatttgggtgagaacacagaggatagtggagttcaacgagatggagcaaataaagcacagaacagttgaagtgaatggcataaaaatgcatgttgcagagaaaggagagggtccagtggtgttgttcctccacggcttccctgagctctggtactcatggcgccatcagattctctctctagctccctcggc

SEQ ID NO: 288602 - DNA, 270 bp, Glycine max
ttttccgatcagaaaatctgaatcatgttgtggcaagcgtacgtggatgatcacctgctgtgtgaaatcgaaggtaaccacctcactcacgccgctattatcggccacgacggcagcgtttgggctcagagcgccaacttccctcaggtaacgcttctagattcgccgatccctgagagtgttgattatatactgtgcaactatgtttgattttggtgtagttcaaagctgaggaaataactgctatcatgaatgacttaacgagcctgg

SEQ ID NO: 288603 - DNA, 269 bp, Glycine max
  unsure (1)..(269): unsure at all n locations
ggagagtagatacttgttcgaagccangacgattaaaaagatggagattttgatcctttccactcttggatggaagatgaaccctccaacctctctctcttttcttgattacttcacaagaagacttggattgaaggatcatctcttctgggagttcctcactaagtctgaaggcgttcttctctccctcattggagattcgaggttcatgagttatctaccttctgtgttggcaactgctacgatgatgcaagttcgaaaagcgtaga

SEQ ID NO: 288604 - DNA, 269 bp, Glycine max
gagagatccatcgatcaattaatttccaatggccgatcagctcaccgacgaacagatctctgagttcaaggaagcctttagcctcttcgacaaggacggcgatggttgtattaccaccaaggaacttgggactgtgatgcggtcgcttgggcagaacccaactgaggctgagctgcaggacatgataaatgaggttgatgctgatgggaatggtaccattgatttcccagaattcctcaatctcatggcgcgcaagagaaagacactga

SEQ ID NO: 288605 - DNA, 274 bp, Glycine max
  unsure (1)..(274): unsure at all n locations
cacacagcacaaccaanacctccacagcctctcctancctcccggngccatggccgccgccgacttcctccgccgctccatcgcaccagttgtcgcagagggagacggacatccagatgatgctcgccgccgacgttcacctcggcaccaaacactgcgactttcagatggaacgctacnccttcaagcgcagaaccgatggtatttacataattaaccttggcaagacatgggagaagctccagctcgctgctaggattattgtgccatgaga

SEQ ID NO: 288606 - DNA, 278 bp, Glycine max
  unsure (1)..(278): unsure at all n locations
gccaaaagtccctcgttccatttccccctttcctccgcccggcgagaaaatgagagaaatcctccacatccagggnggccaatgcggcaaccagatcggagccaagttctgggaagtaatctgcgacgagcacggcatcgaccacaccggaaagtacagcggcgactccgaactccaattggaacgcatcaatgtctactacaacgaggccagcggcggaaggtacgttcctcgcgccgtcctcatggatctggagcctggcacgaggactcggtcag

SEQ ID NO: 288607 - DNA, 266 bp, Glycine max
  unsure (1)..(266): unsure at all n locations
ctcaatggtgttgagggtttggactatatggaaagaattcctcttgccacatctgagggttttcctcatgtgctttcacgcaaaaatggtgacaaaggcaaaaggagatttgtttctggggatggtgaagagatgacattgatnccgggaaccagtgttgaagaggcctacaacaagctaatagtngaacttgagagaagtgttcctacantggttggcattgaatgtcccaaggatgagaaactcctcgtcgcaatttttgacaa

SEQ ID NO: 288608 - DNA, 275 bp, Glycine max
  unsure (1)..(275): unsure at all n locations
aananaacccnctctttctntctcttccaaaacctaantnncanntttnctcttcacacnaattttncaaaatgcgtganancccttcacatnccagggtggccaatgcggnaaccagatcggngccaagttctgggaagtggtttgcgcggagcangggatcgaccccactggaaggtncggtggggactcagagcttcagctcgagaggatcaatgtctactacaacgaagccagctgcggccggttcgtgcncgcgcgcggtctcatggact

SEQ ID NO: 288609 - DNA, 269 bp, Glycine max
  unsure (1)..(269): unsure at all n locations
ggaacactgaccattactgttggcaaagacnagaggacatgacaaccgaccgtcatgcctacaaggtccgatccgagcaatcccggttccgatctcgccggagaaaccgccgccgcaatggccgccgcatccatagttttcagacgctctaaccctgcctatgccggcgaacttctccgccatgcctaccagctatttgattttgctgacaaatacagaggcaaatatgacagcagcatcacggttgcccaaaagtatacagatccatc

SEQ ID NO: 288610 - DNA, 267 bp, Glycine max
  unsure (1)..(267): unsure at all n locations
caccatcaattttgaggcctttccccacaagctggtgcantttggagaaattcaggaaaaagttgtattgaaattttcacaagaggaatttcttacagcttggtcaactcaggtgcgtcctgcaacaactctgttggctgatgggtgcccatatttgtatgctatggtgcatgatagttcagtgtctacaataccaggtgattntgtcattggtgtcaagttgacaaccataaacaatatgtgtgcatatgggctaatcctggtatt

SEQ ID NO: 288611 - DNA, 285 bp, Glycine max
  unsure (1)..(285): unsure at all n locations
ctggtatttctaaggatggacagacccgtgagcatgctcttcttgctttcaccctaggtgtgaagcagatgatctgttgctgtaacaagatggatgccactacccccaagtactactaaggctaggtatgatgaaatcgtgaaggaagtctcttcttaacttgaagaaggttggttaacaacccagaacaagattgccctttgtttcccatctnctggttttgagggtggacaacatggattgnagcaggttccaccaaaccttggactgtaacaagggggaccc

SEQ ID NO: 288612 - DNA, 266 bp, Glycine max
  unsure (1)..(266): unsure at all n locations
cggatctagagtcttcagtttctcctcgttgttctncgctttcctgttttcaatttcgattcttntcgttaatttaataagatgtttgggagggcaccgaagaagagcgataatacgaggtactacgaaatcctcggcgtctccaagaacgcttcgcaggatgatctgaaganggcttacaagaaagccgccattaagaatcaccccgacaagggcggtgatcccgagaagtttaaagagctggcgcaacttatgaggttctgagt

SEQ ID NO: 288613 - DNA, 264 bp, Glycine max
  unsure (1)..(264): unsure at all n locations
ttccgcgctttaacaacagaaagaaatccacacatttccctttcaatggcacnnaccaagcaaacagcgcgcaagtccaccggcggcaaggctcctcggaagcagctcgccacaaaagccgctagaaagtccgctccggcaaccggcggagtaaaaaagccgcaccgttttaggcccggcacggtggcgctgagggagatccgaaagtaccagaagagcacggaacttctgatccggaagcttcccgttccagcggctggtgcg

SEQ ID NO: 288614 - DNA, 252 bp, Glycine max
  unsure (1)..(252): unsure at all n locations
gcccaactgcgcgctaacctagaccccacaaagggtgttggtcgattaagacagcaggacggtggtcatggaagtcgaaatccgctaaggagtgtgtaacaactcacctgccgaatcaactagccccgaaaatggatggcgctaaagcgcgcgacctatacccggccgtcggggcaaggaccaagccccgatgagtaggagggcgcggcggtcgctgcaaaacccaggcgcgaccggngcggacggtcgtcg

SEQ ID NO: 288615 - DNA, 263 bp, Glycine max
gggagaaatggggctgacattcacgaagcttttcagccggcttttcgcgaagaaggaaatgcgaattctgatggttggtctgatgctgctggtaagaccactatcctctacaagctcaagctcggagagatcgttactacaattcctaccattgggttcaatgttgagactgtggaatacaagaacattagcttcactgtttgggatgttggtggccaggacaagattcgtcccttgtggaggcatacttccagaacactcag

SEQ ID NO: 288616 - DNA, 269 bp, Glycine max
  unsure (1)..(269): unsure at all n locations
ttcgagtganagnatacctgtcgggacccgaaagatggtgaactatgcctncancggggcgaacagganggaaactctggtggangcccgcagcgatactgacgtgcaaatcgntcgtctgacttgggtataggggcgaaagactaatcgaaccgtctagtagctggttccctccgaagtttccctcaggataagctngancccgcgggcganttctatncgggtaaanccaatgattagaggcatcgggggcgcaacgcccttcaacc

SEQ ID NO: 288617 - DNA, 260 bp, Glycine max
  unsure (1)..(260): unsure at all n locations
gttgatcgagataactagaaacagtgtgatgaaaatgaaggtccttgttttcttcgttgctacaantttngtagcatggcaatgccatgcgtacgatatgttccctctccgaatgaacactggctatggtgcccgtactccggaggtgaaatgcgcaagttggaggcttgctgtggaagcacacaacatctttggctttgagaccattcctgaagagtgcgttgaagcaacaaaggaatacatccatggcgaacaatata

SEQ ID NO: 288618 - DNA, 259 bp, Glycine max
  unsure (1)..(259): unsure at all n locations
gttgatcgagataactagaaacagtgtgatgaaaatganggtccttgttttcttcgttgctacaantttngtagcatggcaatgccatgcgtacgatatgttccctctccgaatgaacactggctatggtgcccgtactccggaggtgaaatgcgcaagttggaggcttgctgtggaagcacacaacatctttggctttgagaccattcctgaagantgcgttgaagcaacaaaggaatacatccatggcgaacaatat

SEQ ID NO: 288619 - DNA, 267 bp, Glycine max
  unsure (1)..(267): unsure at all n locations
tcaaagctgatggtnnaaacatcaagccgattccgccgaagccactcacncatcttccgaccttnttgccggannccgatgcacggcttcgcagctgcgcgtggcgtaccaaggcgttcccggcgcgtactccgaagctgcggcggggaaagcgtatccgaacggagaggcgattccgtgcgaccagttcgaggctgcgtttcangcggtggagctctggatcgcggatcgcgcggttttgccggttgaaaactccctcggcggctt

SEQ ID NO: 288620 - DNA, 262 bp, Glycine max
  unsure (1)..(262): unsure at all n locations
cacactccttctctaccaaaagagaggatgaggaaagggagcaactcgcaaaggacatttcaaaggattggagttctgtcctttgaacgtagcattaacactctctttctcactgaaatggttcgaggactaatgctgactctgaaatacttctttgaaacaaaagttacaatcaattatccatttgagaaaggccctttganccctcgtttccgtggtgaacatgcactccggcgatatccaacaggggaggaacgttgta

SEQ ID NO: 288621 - DNA, 270 bp, Glycine max
  unsure (1)..(270): unsure at all n locations
caatccataacacaaggcagaaagcaagctcatcctagagttttaaaaatgggcagcagcctcctccatgggctctctcttccccatccttggctggcaaggccgtgaagctgggcccatcagcccccgaagtcgggagggtcagcatgaggaagaccgtcaccaagcaggcctnnnaccggaagcccatggtacggcccagaccgcgtcaagtnattgggcccatctctggcgagcccccgtccttattcatggcgagttcccaggtga

SEQ ID NO: 288622 - DNA, 257 bp, Glycine max
  unsure (1)..(257): unsure at all n locations
tgggcctnnggtggcatgatcttcatccttgtctactgcactgctgggatttcagggggtcacattaacccagcggtgacatttgggctgtttttggctcgcaaggtgtctttgatccgagccatcatgtacatggtggctcagtgcttaggtgctatctgtggagttggttnggttaaggctttccaaaagtcttacttcaacaagtatggtggtggggctaatccctcgctgctgggtacagcacaggtatggat

SEQ ID NO: 288623 - DNA, 261 bp, Glycine max
  unsure (1)..(261): unsure at all n locations
ggcaaaagggaaagatggtgtgcataaggaaggcgacggtgaaggaccttctggcgatgcaggcgtgcaacctgttctgcctccctgagaactaccagatgaagtactacctctatcacatcctctcctggccccagctcctctacgtcgccgaagactacaacggccgcatcgtcggctacgtcctcgccaagatggaggaagagaccactgactgccacggccacatcacctnccctcgcgtcctccgcacccaccgca

SEQ ID NO: 288624 - DNA, 262 bp, Glycine max
  unsure (1)..(262): unsure at all n locations
ctagaatggaatttcgatgctcagtcatctcttttaccattctcntctctcttgctcttgcaggagagagccatgtccatgcatcgctacctgaggaagattattgggaagctgtttggccaaacactcccattcccactgcactgcgagagcttctaaagcctctccctgcaggtgttgaaatcgatgaactccctaagcaaattgatgatacacagtacccaaaaacattcttctataaagaagaccttcatccaggcaa

SEQ ID NO: 288625 - DNA, 260 bp, Glycine max
  unsure (1)..(260): unsure at all n locations
cagatctgttcttccggaactaaatatggcngacttgttggaatggtcaaagcaagatcaagaancgaatgcttcatgtcgtctaccgtgttggtgaccttgatcgcaccatcaaattttacacagaatgtttaggaatgaagcttttgaggcaaagagatatcccagaggagaaatatgctaatgcttttcttggatttggccctgaagaatcccattttgttgttgaattaacatataattcatggggttacctcgta

SEQ ID NO: 288626 - DNA, 258 bp, Glycine max
  unsure (1)..(258): unsure at all n locations
gtcggttcttccntctcaaatattcttgagatccccattttctccgaagcaaagccatggctaagggtcctggtctctacnctgacatcggcaagaaagctagggatctgctgttcaaggactaccacagtgaccagaagttcaccatcancacctactcaccgactggagtggctattacagcatcaggaaccaggaaaagtgaactgtttctggctgatgtcaacacccagttgaagaacaaaaacatcactactg

SEQ ID NO: 288627 - DNA, 255 bp, Glycine max
  unsure (1)..(255): unsure at all n locations
cttgatcnganaagcttggaggtattgacaagcgtgtgattgagaggttcgagaaggaggctgccganatgaanaancaggtcattnaagtatgcctgggtgcnncgacaagctcaaagctgancgtgaaagaggaattaccattgatattgntttgtggaagnttgaaaccangaagtantantgcanggtcanngatgtcctggacatcgtgacttatcaagaantgatanggtatntnnnaggccgatgtga

SEQ ID NO: 288628 - DNA, 261 bp, Glycine max
  unsure (1)..(261): unsure at all n locations
ctgcgctgaagaaatcagtgacagcntcgaccggctcagccggtcgctngaaggaactcaaattgtgtaaggtgaagggtgaggacttcacgtggcacatcagcaacgttgagacgtgggtgagttcggctntgaccgatgagagcacttgcggcgatgggttcgccgggaaggcgctgaatgggaagattaaggaggcgattagggctagaatggtcaatgttgctcaggttactagcaatgctctnctncgcttattaa

SEQ ID NO: 288629 - DNA, 264 bp, Glycine max
cgtggctacgcaaacttctgcttcaagacctttggagacagagtcaaatattgggtcactttgaatgaacccttatcatttagtcctcaatggctacaatggtggcacctttgcaccaggtagatgttctaaatacgttgccaattgtagtgctggcgattcatccactgaaccctatatcgttggacactacttattacttgactcatgaatctgctggccacattatacaagacaaaatatcaggctcgtcaaaaaggacaa

SEQ ID NO: 288630 - DNA, 265 bp, Glycine max
  unsure (1)..(265): unsure at all n locations
ccannaanncttcttggtcatgttctgacacttagccttcaaatgtatggttgccgtgtncatccagaaggccattgaagttgttgatctggatcagaagatagagatggttccagagcttgatggtaatgtcatgcgctgtgtacgcgatcagaatggtaatcatgtcattcagaagtgtattgaatgtgtccctgaagatgctatccactttattgtctcaacattctttgatcnagttgtgaccctatcaacacatccatat

SEQ ID NO: 288631 - DNA, 254 bp, Glycine max
  unsure (1)..(254): unsure at all n locations
ggcagaaatgataaacagtctttgtggtggtgatgaaaaattgatgcgtganaggacacacctgctgttggcttgttgttcaaggatggcaatttgtaaganagatgtttggagagttgaatgtggaatcccttctggatttccgctcacagttatttgcaatagcatttttnatgagatgctcattagatatagctatgaaaaattactgcgccaggctaaagctccaagtatgtntttacaatcctcaaaaa

SEQ ID NO: 288632 - DNA, 256 bp, Glycine max
  unsure (1)..(256): unsure at all n locations
gatcgagataactagaaacagtgtgatgaaaatgaaggtccttgttttcttcgttgctacaatnttngtagcatggcaatgccatgcgtacgatatgttccctctccgaatgaacactggctatggtgcccgtactccggaggtgaaatgcgcaagttggaggcttgctgtggaagcacacaacatcnttggcttgagaccattcctgaagagtgcgttgaagcaacaaaggaatacatccatggcgaacaatata

SEQ ID NO: 288633 - DNA, 258 bp, Glycine max
  unsure (1)..(258): unsure at all n locations
ggcgggtnaggtttcgacgtgcttcttcttcgtgtttgctctttctctcnttcttnccttttcagatctccgctgaggaatcatcggagaaagagttcgtactcacattggatcactctaactttcatcgacantgtcagcangcacgatttcatcgttgtcgagttctacgctccatggtgtgnnccactgtaagaagnttgcncccgagtatgagaaagctgcttctatcttgagtagtcatgatcctccggttgt

SEQ ID NO: 288634 - DNA, 257 bp, Glycine max
  unsure (1)..(257): unsure at all n locations
ccaaggacaagctatcttatacagatgcatgtttgccttcctagattccatgtgtctcaaatcgattattgagcttggcataccagacataatccacaagcatggccaacccattactctttctgagttggtgtcaattctgaatgttccaccagctagagttgtcnacgtgcaaagtctcatgcgctaccttgcacaccatggattctttgaaagactaagaatccatcttgaaaaagaatcttatgctctcactg

SEQ ID NO: 288635 - DNA, 254 bp, Glycine max
  unsure (1)..(254): unsure at all n locations
gatcgagataactagaaacagtgtgatgaaaatgaaggtccttgtnttcttcgttgctacaattttngtagcatggcaatgccatgcgtacgatatgttccctctccgaatgaacactggctatggtgcccgtactccggaggtgaaatgcgcaagttggaggcttgctgtggaagcacacaacatctntggctttgagaccattcctgaagagtgcgttgaagcaacaaaggaatacatccatggcgaacaat

SEQ ID NO: 288636 - DNA, 232 bp, Glycine max
  unsure (1)..(232): unsure at all n locations
atgacattcctatagtgacagatgtgcatgagaccatccagtgtgaagcagttggcaganttgcagatatcattcagattccagcattcttgtgtcgccaaacagatcttctagttgcagcngccaaaactgggaaaattatcaacattaagaagggccagttctgtgntccttcttaatgttgataattttcccagttttggctgctgcaactagctagttctagatcgcg

SEQ ID NO: 288637 - DNA, 260 bp, Glycine max
gccactctaaagaaaatggcggtgcctctactctcgaagaagatcgtgaagaagagggtgaagaagttcaagaggcctcagagtgacaggaaaatttctgtcaagacaaactggcgcagaccaaagggtatcgattcccgtgttaggagaaagttcaagggatgcactttgatgccaaacattggttatggttcagacaagaagacccgccactatctccctaatggttttaagaaatttgttgttcacaatgtgaagga

SEQ ID NO: 288638 - DNA, 282 bp, Glycine max
aaagaatttgacatgcatgtcatcatcgagacaaaccgcacaactgctaggattttcccagctgttcttgatgttgaaaacccagagttcaagcggaagttggaccggatggtggagataaacgagaagattattgctgttggggagagtgatgacatagcggtggtgaagaacttgaagaggaacccactggttgctgcattggtgtctgaactcttggcaacatatctaatgcctccaattgagtcagggtctgtagatttggcagagtttgaaccacaa

SEQ ID NO: 288639 - DNA, 284 bp, Glycine max
  unsure (1)..(284): unsure at all n locations
gtgaacaagtcctcaagtntccaccacctcatgtcatnccaagttagtaagtctgcatggatgactgatgaagaatttggaagagagatgcttgctggtgttaatccatgcctaattgagtgccttcaagtgttccctccaaagagcaagctagatcccacagtgtatggtgatcaaactagtacaataaccaaagaacacttagagatcaaccttggtggactctctgtggaacaggcatgagtggtaacagattgttcatattagatcaccatgatgcattc

SEQ ID NO: 288640 - DNA, 287 bp, Glycine max
  unsure (1)..(287): unsure at all n locations
agacgctacacgacgccgtaatgcggtggccgagtaccgcaagaaacttcttcaacacaaggaattggngcnccagagtacgatccgtcagagaaaatttgcgtgcctcgaagaaagagttcaacaaaactgaagatgatttgaagtctcttcaaagcgttggacagatcattggcgaagttcttaggcctctcgacaatgaacgcttgattgttaaggcaagcagcggacctaggtatgtggttggctgccgcagtaaagtagataaggaaaaactgaccgctggt

SEQ ID NO: 288641 - DNA, 299 bp, Glycine max
  unsure (1)..(299): unsure at all n locations
aacgaagcagaaagagctcatagaagttctcgtcctcttctctctatcttgaatcttcttctcttatcagaaacgcgcgttgctcggataaggttgtgctgcgccgactcactggtactttgcttaatatggcggctgagaagtcaaacattgcaaaanatgtgactganttaattggcaaaactccattggtatatctcaaccacatcgtggatggttgtgttgccaaagttgctgccaagcttganatgatggaaccttgctccagtgtcanagacaggataggatatagcatgatt

SEQ ID NO: 288642 - DNA, 283 bp, Glycine max
  unsure (1)..(283): unsure at all n locations
cgcagatcctttattcctataatccttccttcgctctctccaaatttcgactctttcgatcagatccgcgacacccaccccaccaaaaccttgcgcaacccatccatgacgcttggctcaggaggatccagtgtcgttgttcctaggaacttcagattgctggaggagcttgancgtggtgaaaaaggaattggagatggcacagttagctatggaatggatgatggtgatgacatttacatgcgctcttggatggcacgattattggcccccataatactgt

SEQ ID NO: 288643 - DNA, 282 bp, Glycine max
tctaaatcatgctcatgcagttgattccctacagaattctgagaaaggaggagctgctttacttggtgtttgtcgaggaaaggtttctgaaggaattgatttctccgatgataatgccagagtagttattattgttggtattccatttcccaatataaatgatattcaagttgcactgaagaagaaatataatgacacctacaaatcatccaaaaatcttttgagtggaagtgagtggtactgccaccaagcattccgagttttaaatcaagcagcagggcg

SEQ ID NO: 288644 - DNA, 284 bp, Glycine max
  unsure (1)..(284): unsure at all n locations
aataagatgaaaatgaaagtgcttgtnttgtttgttgcnacagttttngtagcatatgaatgccanggctcagactaccagaagttccctctccaaatgaaaactgggtttggtgggcaatacagcaatgaggtggcatgtgccagttggaggcttggcgtggaagcaaacaacgtagtcaagtggcaaactgttcctggcagcttgcggagagtacatagctgactacgttctaggagaccaatatagatcagattccaaaacagttaaccaacaagcttatt

SEQ ID NO: 288645 - DNA, 285 bp, Glycine max
gtcaagcttctctacaagcgccacaagaacactgctttctcctggctcagaaacatcttccatgactgtgctgttcagagttgtgatgcttcactgttgctggactccacaagaaggagcttgtctgagaaggaaacagatagaagctttgggttgagaaatttcaggtacattgagaccatcaaagaagctttggaaagggaatgcccaggagttgtttcctgtgctgatatcctcgttctctctgccagagatggcattgtttcgctaggaggtccccatatc

SEQ ID NO: 288646 - DNA, 285 bp, Glycine max
  unsure (1)..(285): unsure at all n locations
ctgggacatcccaagctgactgtgctgttcttatcattgattcgaccactggtggttttgaagctggtatttccaagganggacagactcgtgaacatgctctgctttcattcacccttggtgtgaaacagatgatttgctgctgtaacaaaatggatgctactacacccaagtattccaaggccaggtatgatgaaattgtgaaggaagtctcttcctacttgaagaaagtaggatacaaccctgacaagattccttttgttcctatctctggttttgaggncc

SEQ ID NO: 288647 - DNA, 299 bp, Glycine max
  unsure (1)..(299): unsure at all n locations
tatttgtcgttgtagcgccgcagccagcggttgaatttggaaaaagatgtctcaccggaagttcgagcacccgagacatggttccttggctttctcccaaggaagcgagcttctcgtcatcgcggaaaggtgaaggctttcccaaaagacaatcctagtcaaccatgcgggttgactgcttttgtgggctacaaggctggaatgacccacattgttagagaggttgagaaacctggatcaaagcttcataaganagagacatgtgaagctgtcatatcatcgaaatcctccattggttg

SEQ ID NO: 288648 - DNA, 279 bp, Glycine max
  unsure (1)..(279): unsure at all n locations
cgccaggttcctcaaggccggaaagtacgccgagcncgtcggcgccggagcccccgtctacctcgccgccgttctcgaatatctcgctgctgaggttttggaattggctggaaacgctgcgagagataacnagaagactcgaattgttccacgccacatccaattggcggtgaggaacgacgaagagttgagcaagcttctaggagatgttaccattgctaacggcggtgttatgcctaacattcacaaccttcttcttcccaagaaggctgggggctc

SEQ ID NO: 288649 - DNA, 257 bp, Glycine max
  unsure (1)..(257): unsure at all n locations
gttaaaccaagtggcgtatgacgngtcaaccatgccagcncctgtgtgctcttgtactggtgtcctgaggcagtgttacaaatggggtaatgggggttggcagtctgcctgttgcacaactactctgtcaatgtatccacttcctgcagtgcccaacaagagacatgcccgggtaggtggtcggaagatgagtgggagtgctttcaacaagctgcttagtcgccttgcagcagaaggtcatgatctgtcaaaccctg

SEQ ID NO: 288650 - DNA, 294 bp, Glycine max
  unsure (1)..(294): unsure at all n locations
gactggggttgtgaagcctggtatggtggtgacttttggtcccactgggctgacaactgaggttaagtctgttgagatgcaccatgaggctctcacagaggctcttccaggtgacaatgttggatttaatgtgaagaatgttgcagtcaaggatctcaagcgtggttttgttgcatccaactccaaggacgaccctgcnaaggaagntgcaancttaaantccnaagtnattatcatganccacctgggccagattgggaatggntnagcaccagttcttgantgncanacctc

SEQ ID NO: 288651 - DNA, 281 bp, Glycine max
ctcaaggtcaagtcattacctgcaaagctgcggtggcctgggaacccaacaagcccttaactgtccaagacgttcaggtggctccgcctcaggccggcgaggtccgtgtccaaatcctcttcaccgctctctgccacaccgatgcttacactggggcggcaaggatcccgaaggtctcttcccctgtattcttggccatgaagctgcagggattgtggagagtgttggagaaggtgttactaatgttcagcctggggatcatgtcattccctgttatcagg

SEQ ID NO: 288652 - DNA, 279 bp, Glycine max
  unsure (1)..(279): unsure at all n locations
gnaatttgcnagttccgtcantncacccaaatcctgcgnngaaacttctgaggctgtgacaatggcggatttacatcatctntggcagcttgtggaggagaaagatggaggtctcccttggattcagatgatggatcgttctacccccaccatgagttacaaagcatggcgtagagaaccaaaggatggtcctccccaatatcgaagcagcactatttttnaagatgctacccctgagatggtgagggattgttttgggatgatgagttccggaccgac

SEQ ID NO: 288653 - DNA, 281 bp, Glycine max
cttgaaccttgtctacatctgtgagtgtaatggcctgccagaggtggctgagtactggaaacaagtgatcaagatcaatgattatcagaagagccggttcgtgaaccgtgttgtttcgtcgatgttcaacacagttgcaaccaaaaagatagccattctggggtttgcattcaagaaggacactggggacacaagggagacaccagcaattgatgtgtgcaagggactactcggtgacaaggcacgcctaagcatatatgatccacaagtcactgaggacc

SEQ ID NO: 288654 - DNA, 286 bp, Glycine max
  unsure (1)..(286): unsure at all n locations
gttgctccttcgccacaactctctgccaacatgggtatctccagagattctatgcacaagaggcgtgccactggtggcaagaagaaggcctggaggaaaaagagaaagtatgagcttggtcgccagcctgctaacactaagctgtcaagcaacaagacagtcaggaggatccgtgttagaggtggaaatgtgaaatggngggcattgagattggatactggaaattacttctggggaagtgaagctgtaactcgcaagactcgtgtactagatgtggtttacaatg

SEQ ID NO: 288655 - DNA, 210 bp, Glycine max
  unsure (1)..(210): unsure at all n locations
catcaccgttgattgaagaanatgccgatcagaaacatcgccatcggaaggcctgaagaggctactcaccccgacacgttgaaggcggggttggctgagttcatctccaccttgatcttcgtgttcgccggttcaggttccggcatcgcctacaacaagctcaccgacaacggcgccgccactcccgccggcctcatctccgcttccatc

SEQ ID NO: 288656 - DNA, 278 bp, Glycine max
  unsure (1)..(278): unsure at all n locations
caaacacactcttttttgttctttgctcacttcccttgttcgtttcactctcacaatggactccctctctctcttctgcaccggagcccttctcgccggcggcctctactggttcgtctgtgttctgggccccgccgagcagaagggcaaacgcgccaccgatctatccggcggctccntcctccgccgagaaagtccaagacaactacaagcagtactggtccttcttccgccgccccaaggagatcgagaccgccgacaaagttcccgacttcgtc

SEQ ID NO: 288657 - DNA, 280 bp, Glycine max
  unsure (1)..(280): unsure at all n locations
tagatctaacaaccacttatncccctttctccttctaacgagtgaggaaaaatggcgcgtaagangatcagagagtntgactcaaagaggttgttgaaggagcactttaagagactctctggcaaggagttgccgatcaagtctgcacaaattaccgcatccaactgatttcactgagctacaagagncaggaaccctggctttcatcttctaaattggttgttaaacctgacatgttatttggaaagcgtggcaaaagtggtttggttnccttgaatnc

SEQ ID NO: 288658 - DNA, 276 bp, Glycine max
tttggtagcatggcaatgccatgcgtacgatatgttccctctccgaatgaacactggctatggtgcccgtactccggaggtgaaatgcgcaagttggaggcttgctgtggaagcacacaacatctttggctttgagaccattcctgaagagtgcgttgaagcaacaaaggaatacatccatggcgaacaatatagatcagactccaaaacagttaaccaacaagcttacttttatgccagagacctcgaagtccatcccaaggacacatttgtgtt

SEQ ID NO: 288659 - DNA, 277 bp, Glycine max
  unsure (1)..(277): unsure at all n locations
cttcttccatnttccttctcaatccaccactctaaccctcgcacgcttcgttcaattacaaaaatggacagatcaactggccgtggtggtggtggaagtgtggacatgtntctccgaaattataagttgggaaaaacactcggcattnggtcctttggcaaggtgaaaattgctgagcatgtacggactggtcataaagttgctataaagatccttaaccgccacaagattaanaacatggaaatggaagannaagttagaagaganatcaaaattt

SEQ ID NO: 288660 - DNA, 278 bp, Glycine max
  unsure (1)..(278): unsure at all n locations
attttcagaacctatcaaagctaacttcagctcttctgcattgaggttnaagagggaattcgaacaaaaagctctgtgctgtgagggccgaaacagtggctacagcctctccagcagttaccaagtctacaccagaagggaagaanacattgaggaagggcagtgttgtgataactggggcttcatctggactaggcctggccactgctaaggctttggctgagacgggaaaatggcatgtaataatggcctgcagggattacctcaaagctgcaaga

SEQ ID NO: 288661 - DNA, 291 bp, Glycine max
  unsure (1)..(291): unsure at all n locations
gcatggcacgcggctgatgctttgagtttgtttgaagggatgaagagggcgggagannaggccggacggtgttacttttgttgggattttgtcggcctgcacacatatggggttggtgagaaacgggtttttgcatttccaatcaatggttgatgattacttgattgtgcctcagattgagcattatggatgcatggtggatttgttgggaagagctggtcttataaaccaggctgtggatatcgtgaggnagatgcctatggagccagatgtggttatttgggcagcact

SEQ ID NO: 288662 - DNA, 279 bp, Glycine max
  unsure (1)..(279): unsure at all n locations
cacaaggcagaaagcaagctcatcctagagttttaaaaatggcagcagcctcctccatggctctctcttccccatccttggctggcaaggccgtgaagctgggcccatcagcccccgaagtcgggagggtcagcatgaggaagaccgtcaccaagcaggcctcctccggaagcccatggtacggcccagaccgcgtcaagtacttgggcccatttctggcgagccccgtctacctcatggcgagtcccagtgataggtgggaatgtggttnggcgacca

SEQ ID NO: 288663 - DNA, 283 bp, Glycine max
cgcaacacaacaaaaaaagacaacccagagagcgcgtcttaataaacgctcttctctgaaaacccccatttcttttcttctttcttcttctctttcgcttcttcgatcttcgatcttcgtcgctgaaaatgagagagtgcatttcaatccacatcggccaggccgggattcaggttggaaacgcctgctgggagctttactgcctcgaacacggcattcagcctgatgggcagatgccaagtgacaagaccgttggtggaggtgatgatgctttcaacacctt

SEQ ID NO: 288664 - DNA, 272 bp, Glycine max
  unsure (1)..(272): unsure at all n locations
gctgttctttcaatgtggagatattttgttggagatctcgtctttgaagtttctaagatgacttctccctacattaaatgtacagtctctttcttcatagcatttggaaatttggctgatgacaccatcaattttgaggcctttccccacaagctggtgcngccttggagaaattcaggaaaaagttgtattgaaattttcacaagaggaatttcttacagcttggtcaactcaggtgcgtcctgcaacaactctgttggctgatgggtgcc

SEQ ID NO: 288665 - DNA, 272 bp, Glycine max
  unsure (1)..(272): unsure at all n locations
gcttgaacgattgagatttctcatggaaagacatgacatcataggaaatgtaaggggaaggggcctaatggtaggcatagagttggtcactgaccgagacaacaagacacccgcaaaggctgaaactgctgtcgtgtttganaaactcagagagcttggtgtgctagttgggaaaggaggacttcatggcaatgttttcaggatcaagccaccaatgtgtttctccaaagatgatgcagattttcttgtggatgccttggattattctctat

SEQ ID NO: 288666 - DNA, 290 bp, Glycine max
  unsure (1)..(290): unsure at all n locations
ccaaactgaaccaaatcatcacacacacatactaagangcaacaattcttctacaatggatctcctccttctggnaaagacccttcatangtctcttcctcgctgcggtggtcgccatcgccgtctccaccctccgcggccggaaattcaagctcccaccgggcccactccccgtcccaatcttcggcaactggctccaantcggcgacgacctcaaccaccgcaacctcaccgatttngccaaaaaattcggtgacatcttcctcctccgcatggggcagcgcaacctc

SEQ ID NO: 288667 - DNA, 281 bp, Glycine max
cgtgcggggatgatcttttaccggaagggccccaagccgccgaagaaggggcagccggagaacgcggtttatgatttcgaggacaagattaacttcgcggtgttcccttcgctgcagggtgggccccacaaccaccagatcggtgctctcgccgtggcgctgaagcaggccgcgtcgcccgggtttaaggcctacgcgaacaggttaaggcgaacgccgttgcgcttggaaaatacttgatggggaaagggtacagccttgtcactggcggaacggagaac

SEQ ID NO: 288668 - DNA, 279 bp, Glycine max
  unsure (1)..(279): unsure at all n locations
cnggtggagaaatccgtcaacaccattcggtttttggccattgatgcagttgagaaggccaactctggtcaccctggtctccccatggggtgtgctccaatgggtcacattctctacgatgagataatgaggtacaatcctaagaaccccgcttggttcaaccgtgaccgtttcgttctctctgctggacatggctgcatgctccaatatgctctccttcaccttgctggctatgacactgttcaggaacaagaccttaaggaattccgacaatgggga

SEQ ID NO: 288669 - DNA, 286 bp, Glycine max
ttagggttcatgcacttaatctcttcccttgttggagtgcccagaaccttgatgatttggtatcaagactactacaatactcccctaacttgcggtgcacagcttttgatgccttgacgcatcctttcttcgacgagcttcgtgatccaaatactcgcttgccaaatggccgattccttccaccactatttaatttcaaatcccatgaactgaaaggagtcccatctgagattttggtgaaattggttccagagcatgcaaggaagcaatgcccgtttctaggctc

SEQ ID NO: 288670 - DNA, 284 bp, Glycine max
cacgagccaaccataggcgaagaacggaagaagccaccatagtcgtcgtcgtgagcgaagatccataacaatacagttacaaattgcaacaacacactcctcgttcgatcgtagccagaagaatgggaagtttgggagcgattctgaagaatccagatgacttttaccctctgctgaagctgaaaatggcggcgagaaacgccgagaagcagatcccgccggagccacattgggcgttctgctacacaatgctccacaaggtttctcgaagtttcgccctcgtc

SEQ ID NO: 288671 - DNA, 282 bp, Glycine max
cttgatcagaaattcggtatcatcaagggcaccatgaccaccactcactcctacaccggcgaccaaaggcttctcgacgcgagccaccgtgacctgaggcgcgccagggcggcagctctcaacattgtccccacttcaacaggagcagcaaaggcagtggcccttgtcctcccaaccctcaagggcaaactcaatggcattgcactccgtgtgccaacaccaaacgtctcagtggtggacctcgttgttcaggtctcaaagaagacctttgcagaagaagtg

SEQ ID NO: 288672 - DNA, 276 bp, Glycine max
ggtggtggaggtctttcctttgtggtggatcaactggcttgttcatctacggctattgcttgtattactactatgcacgatcagatatgtctggttttatgcaaacttcgttcttctttggttacatggcctgtatctgctatggcttcttcctcatgctcggtagcgtaggattccgtgcctccctgctctttgttcgtcacatataccggtccatcaagtgtgagtagctggggtttgaaggtgttggtaaagttcatattattctgttaggag

SEQ ID NO: 288673 - DNA, 274 bp, Glycine max
  unsure (1)..(274): unsure at all n locations
cggctcctttaggttttccttccgtgcgtttactcggaactactcttccactcttcgtttaanatgtctgacgtggaagagtatcgttgtttcattggtggccttgcgtggtcaacatctgataganagtnaaaggatacgtttganaagtttggcaagcttattgaggcaaaggtggttgnngacaagttctctgggcgttctcgtggttttggatttgtcacatttgatgacaagaaagcaatggacgaggctattgatgctatgaatggga

SEQ ID NO: 288674 - DNA, 274 bp, Glycine max
  unsure (1)..(274): unsure at all n locations
cttctgctcttccaactcctacaacgcttttctctgcactcatggncaaggtcaagatcggaatcaacggatttggaagaattggccgtttggttgccagantcgctctgcaaagagacgatgttgaactcgttgccgttaacgaccctttcattaccaccgattacatgacatacatgtttaaatacgacagtgttcacggacactggaagcatcacgatgtcaccgttaaggacgagaagacccttctcttcggtgacaaggcagtcactgt

SEQ ID NO: 288675 - DNA, 286 bp, Glycine max
gaacactggctatggtgcccgtactccggaggtgaaatgcgcaagttggaggcttgctgtggaagcacacaacatctttggctttgagaccattcctgaagagtgcgttgaagcaacaaaggaatacatccatggcgaacaatatagatcagactccaaaacagttaaccaacaagcttacttttatgccagagacctcgaagtccatcccaaggacacatttgtgttcagtatagatggcaccgtactctctaatattccatactacaaaaaacatggatatggg

SEQ ID NO: 288676 - DNA, 273 bp, Glycine max
gtagatctggatgggaaccccataaagcccatcaccatttgcatgattggcgccggtggcttcattgggtcccacctctgcgagaagctcatgtcggagacccctcacagtgtcctcgccttggatgtctacaatgacaagatcaaacacctcttggaaccccacacgctcccttgggcctctcgcatccagttccatcgcctcaacatcaagcacgattcccgtctcgaaggcctcatcaaaatgtcagatctgactattaatctggctgcc

SEQ ID NO: 288677 - DNA, 265 bp, Glycine max
  unsure (1)..(265): unsure at all n locations
atcctatggaaaatgcnggtgcagctcttattagagaggttgctagtaagactcaacgactctggccggtgatgggacgaccacggcttcggttcttgctcgcgagataattaagctggggcttcttagtgtgacttctggggctaatcctgtgtctcttaagagagggatacntaaaactgtgcagggtttggtggaggagttggagaagaaggccaggcctgtgaaaggtggagatgatatcnaagctgttgcttccattcng

SEQ ID NO: 288678 - DNA, 277 bp, Glycine max
ggaacctgacaaactgcaagttgaggaacacgcttgctggacacaatggttatgtgaacactgttgctgtttcccctgatggctctctgtgtgccagtggtggcaaagatggggttattcttctgtgggatttggctgagggtaagcgtctttactccctcgatgctggttctatcatacatgcgctctgcttcagccccaacaggtactggctttgcgccgccactgaacagagcatcaagatctgggatttggagagcaagagtatcgttgaaga

SEQ ID NO: 288679 - DNA, 275 bp, Glycine max
aaaacactcataacacaaagcacaaagcaaagctcatccttgagttaaaaaatggcagcagcttcttccatggctctctcatccccatccttggctggcaaggccgtgaagctgggcccatcagccccagaagtgggaagggtgagcatgaggaagaccgtcaccaagcaggtctcctcaggaagcccatggtacggcccagaccgagtcaagtacttgggcccattctctggcgagcccccgtcctacctaaccggtgagttcccaggcgacta

SEQ ID NO: 288680 - DNA, 274 bp, Glycine max
  unsure (1)..(274): unsure at all n locations
cttaagcttgctactgagtttccacactgcataccttangtcttcanaattcgaagttaatttgcaagatggctaaggaaaaggctcagatcaacattgtggtggttggtcatgtggaccctgaggaggcaaccaccattaacgagctgaagaagcctgttgtggagaaagaagctccagggcatgccatatgagggcatgcacgtacggcctcggaggggaaccagaaaattatgttaacaaaataatctggaaccctaatgtatcagtgtca

SEQ ID NO: 288681 - DNA, 270 bp, Glycine max
gaagactgttgatgggccatcagccaaagactgggtggcagtgatggaatgaacagtggtcatcaaaccctcaacaatgccacccagaagactgttgatgggccatcagccaaagactggagaggtggaagagctgcttcatttaacatcattcctagcagcactggagctgccaaggctgtcggaaaagtccttcctgctttgaacggaaaattgactggtatggcattccgtgttcccaccgtggatgtctctgttgttgacctcaca

SEQ ID NO: 288682 - DNA, 266 bp, Glycine max
gcaaattcaatgccgttatactcaagagattgttcatgagcaaggttaacaagcccccattgtctttgtcaaggttgattaagtataccaaggggaaggaagataagattgctgtggtggtgggcaatataaccgatgatattcgtgtttatgaagttccagccttaaaggtcacagcactcaggtttacagagactgctcgggcaagaattgagaaggcaggtggtgaatgcttgacgtttgatcagttggctctcagggctcct

SEQ ID NO: 288683 - DNA, 274 bp, Glycine max
ggaacctgacaaactgcaagttgaggaacacgcttgctggacacaatggttatgtgaacactgttgctgtttcccctgatggctctctgtgtgccagtggtggcaaagatggggttattcttctgtgggatttggctgagggtaagcgtctttactccctcgatgctggttctatcatacatgcgctctgcttcagccccaacaggtactggctttgcgccgccactgaacagagcatcaagatctgggatttggagagcaagagtatcgttga

SEQ ID NO: 288684 - DNA, 276 bp, Glycine max
  unsure (1)..(276): unsure at all n locations
agagtttgttgtgagctataagctagtttatcgtgaggagaatatgaagttgtttgttttctttgttgctgcagtagttttggtagcatggccatgccatggcgcaggctaccaaaggttccctctgccgaatgaaaactggctatggtgagcgttcttgcggaggtaaaatgcgcaagttttaggcttgctgtggaagcacacaacatccgagcctttaaaaccattccngaagagtgcgttgaaccaacaaaggactacattaatggcgaacaa

SEQ ID NO: 288685 - DNA, 274 bp, Glycine max
  unsure (1)..(274): unsure at all n locations
aaagaacaaatgacaattagaaagaaagcttttgcaataatagaagangtttttnanaggcatggtgccactgccttagatactcctgtntttgaattgcgaganactctcatgggaaaatatggagaagattcaaagttgatttatgatcttgctgaccagggtggggagcttctttctttgaggtatgacttgacagttccatttgctaggtttgtngctatgaatggtctggtatctttcaaaaggtaccaaatagccaaggtttacagaa

SEQ ID NO: 288686 - DNA, 271 bp, Glycine max
  unsure (1)..(271): unsure at all n locations
cctcactatcgtgacaccatgnacattaattcacttgcccgcaaatccttggtcaatgcagacggtattatagagaaaacattcttgtggggtangtactctttggaaatgtctgctgttatttacaaggattgggttttcaccgatcaagcattgcctaatgatcttgtcaagagaggagttgctgttaaggatccatctgctccccatggagttcgacttttgatcgaggactatccttatgcttctgatgggctagagatatgggatg

SEQ ID NO: 288687 - DNA, 268 bp, Glycine max
gaagatttctcttgcagaggcattaactggttacacagtgcacctcactaccctagatggtagaaacctaaccataccaatcaacaatgttattcatcccaattatgaagaggttgttccaagagaaggaatgccacttccaaaagatccatcaaagaaggggaacttgaggataaagtttaacatcaagttcccaactaggctcactgatgagcaaaaagcaggaatcaggaaactcttcaacaatgcctaagcttgagatagtata

SEQ ID NO: 288688 - DNA, 273 bp, Glycine max
  unsure (1)..(273): unsure at all n locations
aagtaatggcgaacatagacatcgaagggatcttgaagcagcagcagccttatgatgggcgcgttccgaagacgaagatagtgtgtactttgggccctgcttctcgatccgtagaaatgaccganaagcttctgagggcagggatgaacgttgctngttcnanttcccccnntggcaaccacgactantaccaggaaaccctcaacaatctcaagantnncatgcncgaacactggggtactctgtgtncgtgcangccttacactaagggnc

SEQ ID NO: 288689 - DNA, 272 bp, Glycine max
  unsure (1)..(272): unsure at all n locations
gngngctttgccagttagcagggccctcagggaaccacaatgcaatttccttgttagcactttcaactggcaaagctcccaacactcttggatctatgagtaaatcatatgcctcaagttgatcttgaaattgccttaggttgatccagattatctacatgttttctgtttctgtccgttgttggacttttttgtttaagagtttggtaccttggcttgcatttcaggctctatttatgtcacagtttgataaattaaatcccagaccagtt

SEQ ID NO: 288690 - DNA, 285 bp, Glycine max
gaccatcttccaccttaacccttctggccgttttgtcattggtggccctcatggtgatgctggtctcactggaagaaagatcatcattgatacctatggtggctggggtgctcatggtggaggtgccttttcagggaaggaccctaccaaggttgacagaagtggtgcctatattgtaaggcaggctgcaaagagtgtcgtggcaaatggccttgctagaaggtgcattgtgcaagtttcctatgccattggtgtccctgagcccttgtcagtgtttgtggacac

SEQ ID NO: 288691 - DNA, 283 bp, Glycine max
caatgctagaacttgccaaggtggttcaagaaacaatcgaccctgatgctaggatagagtacaggccgaacacagaggatgatccgcacaagagaaagcctgatataagtagggctaaggatcaacttggctgggaacccaaggttgatctgcgcaagggcctcccactaatggtttctgacttccggcaacgcatttttggtgaccagaaggaaaaggcaaccgtagcctaattcttgcgtgtcatgtatcttagagtgagaaagggatataagataataat

SEQ ID NO: 288692 - DNA, 280 bp, Glycine max
cattaagaatatgattactgggacatcccaagctgactgtgctgttcttatcattgattcgaccactggtggttttgaagctggcatttccaaggatggacagactcgtgaacatgctctgctttcattcacccttggtgtgaaacagatgatttgctgctgtaacaaaatggatgctactacacccaagtattccaaggccaggtatgatgaaattgtgaaggaagtctcttcctacttgaagaaagtaggatacaaccctgacaagattccttttgtt

SEQ ID NO: 288693 - DNA, 278 bp, Glycine max
  unsure (1)..(278): unsure at all n locations
gcagaaagcaagctcatcctagagttttaanaatggcagcagcctcctccatggctctctcttccccatccttggctggcaaggccgtgaagctgggcccatcagcccccgaagtcgggagggtcagcatgaggaagaccgtcaccaagcaggcctcctccggaagcccatggtacggcccagaccgcgtcaagtacttgggcccattctctggcgagcccccgtcctacctcactggcgagttcccaggtgactacggctgggacactgctgggctt

SEQ ID NO: 288694 - DNA, 280 bp, Glycine max
  unsure (1)..(280): unsure at all n locations
ctgtgatgttcctcatgtgaatcgtactgattaccagctcatncgatattgctgaggatggatttttgagtctgcttactgaaaatgggaacaccaaggatgacctcaagcttcccactgatgagagtctgctcactcagataaaggatggatttgctgagggcaaggatcttgttgtgtctgtcatgtctgctatgggtgaggaacagatttgcgccctgaaggatattgggccaaagaactagcttttggtgctggcagcctgttgtttctatttaag

SEQ ID NO: 288695 - DNA, 290 bp, Glycine max
  unsure (1)..(290): unsure at all n locations
cntaaaatggccactctttcctcctacgaccacttcntcttcactgccttagctttcttcatatctggcctaattttcttcctcaaacagaaatccaggatccaaaaagttcaacctccctccaggaccccccgggtggcctattgttgggaacctcttccaagttgctcgttctgggaaacctttctttgagtatgtgaacgatgtgagactcaaatatggctcaatcttcaccctcaagatgggaacaaggaccatgatcatctcaccgacgnaaaantggtcnangg

SEQ ID NO: 288696 - DNA, 286 bp, Glycine max
  unsure (1)..(286): unsure at all n locations
gtaggggattganaatgantatgtacggtagggatccgtggggagggccgttgganctccacgccacagactccgccaccgacgacgagcgcagccggaatctccaggagctggaccgaggcgctttagacgagacacaacagagctggctcttgggcgccggagaacagaaaaagaagaagaaaaggtacgtagatcttggctgcatcatcgtcagccgcaagctcttcatctggacactcggcactctcgccgtctgcgccttcctcgccggcttcatcaccct

SEQ ID NO: 288697 - DNA, 269 bp, Glycine max
  unsure (1)..(269): unsure at all n locations
catatcatttgcaaatcctaaagcacctgtgtatccgcgccttgctctaggaaaatcttgggatgaaatgacagtnacatggacaagtggatntgacataaatgaagctgtgccttttgttgagtggggaccaaagggaggaaagaaaacacgatctcatgctggaacattgacatttaaccgaaacagcatgtgtggtgaacctgcacgaactgttggttggcgtgaccctggttttatacacacaagtttcttaaaagaactgtggc

SEQ ID NO: 288698 - DNA, 277 bp, Glycine max
  unsure (1)..(277): unsure at all n locations
catgaaaaanatggttcatcttggcttcttccttctggggtgtctctccatgatctcatatgctaatggttatgtcagcaatgggggttggaccaatgcccatgctacattctatggtggaagtgatgcttctgggacaatgggtggggcttgtggttatggaaacttgtatagtcaaggatatgggactaacacagcagcacttagcactgccttgttcaacaatggcttgagttgtggctcatgctaccaaatcaaatgtgcaaatgacccacaa

SEQ ID NO: 288699 - DNA, 279 bp, Glycine max
  unsure (1)..(279): unsure at all n locations
gngtgatgacgctcctagggccgtgttccccagtattattgggcgaccacgccataccggtgtaatggttgggatgggtcagaaggatgcttacgtgggtgatgaagctcaatcaaaaaggggtatactcaccttgaagttctcctatagagcatggcatagtcagcaactgggatgatatggagaagatttggcatcacacattttacaatgagcttcgtgttgcccctgaagaacaccctgtacttcttaccgaggcacccctcaatcccaaggcca

SEQ ID NO: 288700 - DNA, 280 bp, Glycine max
  unsure (1)..(280): unsure at all n locations
ccaagccccactcaaccaccacaccactctctctgctcttcttctacctttcaagtttttaaagtattaagatggcagagacattcctatttacctcagagtcagtgaacgagggacaccctgacaagctctgcgaccaaatctccgatgctgtcctcgacgcttgccttgaacaggacccagacagcaaggttgcctgcgaaacatgcaccaagaccaacttggtcatgntctcggagagatcaccaccaaggccaacgttgactacgagaagatcgtg

SEQ ID NO: 288701 - DNA, 174 bp, Glycine max
  unsure (1)..(174): unsure at all n locations
cttgcccatcaacttctttaatgtgcaccggttactcatcaccagcgttatggtggctgcaaaattcatggatgacttgtactacaacaatgcttactatgcaaaagttggaggaattaccacaatagagatgaactttcttgaggtggacttttnatttggtttgggttncct

SEQ ID NO: 288702 - DNA, 286 bp, Glycine max
  unsure (1)..(286): unsure at all n locations
aacgattnacatggcagcacaagctgaaattgancatcctaggaaagcattcggatgggcagcnagggattcttccggtcttctctcccctttcaatttctgcagaagggaacccngtgagaaagatgtggcattcagagtgttgtactgtgggatatgccactcggacctccacagcataaagaacgaatgggntacttccatctatccaatggttcctgggcatgaggtagctggtgtagtaacagaggtgggaagcaaagtagagaagttcanagttggggac

SEQ ID NO: 288703 - DNA, 283 bp, Glycine max
tgatcgtcagacaaggattgaaggtgctgaaatcaacaagagccttttggctttgaaggagtgcattcgtgctttggacaatgaccagatccatattccttttcgtggaagcaagcttacagaagtgctccgggactcctttgttggaaattcaaaaactgttatgatctcttgtatatccccaaatgctgggtcatgtgaacacacacttaataccttgagatatgcagaccgagttaaaagtctatccaagagtggaaatcctagaaaggaccaggcccca

SEQ ID NO: 288704 - DNA, 213 bp, Glycine max
tgtggtggtgcgggatatctacatccttcgtcttgggttggggctgctgcaaaagattgccaagagaaagagtgaccctcgcctgtatgctgatgaactagggaaaggttttgttggtgaattggattacactttagaggctgcaaatgcttcaaagtttctggaagttcactcttcctttactttcatgaatgtgccaaaagtatttccaca

SEQ ID NO: 288705 - DNA, 274 bp, Glycine max
ggaagaagctgctgccatggctctctcatccccatccttggctggcaaggccgtgaagctgggcccatcagccccagaagtgggaagggtgagcatgaggaagaccgtcaccaagcaggtctcctcaggaagcccatggtacggcccagaccgagtcaagtacttgggcccattctctggcgagcccccgtcctacctaaccggtgagttcccaggcgactacggctgggacatgctgggctttccgcagacccagaaaccttcgccaagaacc

SEQ ID NO: 288706 - DNA, 276 bp, Glycine max
ccggagcttgtttcctacatctaccaaagtgaaatgtttgagtgacgccgggtttttcctagatgcagttgatgtatctgggggtcacacactgaggaatctgtttggaggtgtagttaagttacaggaggtgcaaaaaaatctgccaaatagttgtctcaaccaactggacccaacttcgtgtttttttcctcagaatttgatcaactatgttgagactccactgtttctgctcaatgcagcttatgatgcatggcaggtccaagaaagtttggt

SEQ ID NO: 288707 - DNA, 283 bp, Glycine max
  unsure (1)..(283): unsure at all n locations
catcaacccagtatcctgatgttaatcatgcaactgttgcaacctcagctggggagaagcccgtccgtgagcttatagctgatncatgcctggttgaatggggaatnntcctactactgttcaacaacgtggcgctgcaattatcaaagctagaaagctttcaagtgcactatcagctgctagtgctgcttgtgaccatattagagactgggttcttggaactcctcagggcacttgggtatcaatgggagtatattctgatggttcntacaatgttccagct

SEQ ID NO: 288708 - DNA, 285 bp, Glycine max
  unsure (1)..(285): unsure at all n locations
caacttctgttctggaaactggccatgatatcctctttttctgggttgcccgaatggtgatgcaaggnttgaagttgggtggtgatgtgccttttacgaagatttatttgcatcctatggttcgtgatgcacatggacgcaagatgtccaagtccttagggaatgttattgatcccattgaagtgataaatgggatatcacttgaaggtctacataagaggttagaggctggtaacctggaccccagagaactagccactgctttagagggtcagaagaaggact

SEQ ID NO: 288709 - DNA, 280 bp, Glycine max
gagccaatgtacaaattgttggtgatgatctcttggttaccaaccccaagagggttcagaaggcaattgatactaaagcatgcaatgctcttctcctcaaggtcaaccaaattggttctgtgactgagagtattgaacgctgtcaggatgtccaaaaaagctggatggggtgtcatggccagtcacagaagtggagagactgaggataccttcattgctgacctttctgttggtttggctacgggtcaaattaagactggagctccatgcaggtctgagc

SEQ ID NO: 288710 - DNA, 279 bp, Glycine max
  unsure (1)..(279): unsure at all n locations
ctcgcattcncggcgggactctgcctccgccgcggaggtgctggcgacggcgaacgctcgtgacatgatcggcnagatcgagaaccgttcgactcacttcttggcgataaaaacagatgtagaaacacaaggagactttatnagatacctgatcaaagaggtggagagtgcagcattcacggacattgaagntgtggtaccttttgtcaaatggcttgacgacgaactctcttatttggtggatgaaagggcagtactgaaacacttcgattggccaga

SEQ ID NO: 288711 - DNA, 275 bp, Glycine max
gtggtgccacagctgagataatgtctgaccttctagcttttgaggctgatagaagggctgtgaatattaccataaatagcattggtactgagcttaccagagatgaccgtagaaaattgtactctaattttggtttgctatacccatatggtcatgaggaacttgctgtctgcgaggacattgatcaggttcgtgctgttatggaaaaatatcccccctatcaatctatttttgctaagctatcatatggagagagccagatgcttgacaaggca

SEQ ID NO: 288712 - DNA, 172 bp, Glycine max
  unsure (1)..(172): unsure at all n locations
cttaagcttgctactgagtttccacactgcataccttaggtcttccgaattcgaagttaatttgcaagatggctaaggaaaaggctcagatcaacattgtggtggttggtcatgtggaccctgaggaggcaaccaccattaacgagctgaagaagcctgtttgganaaanat

SEQ ID NO: 288713 - DNA, 274 bp, Glycine max
  unsure (1)..(274): unsure at all n locations
aattgcaagantggcacttcgttgcttggtgatgtccctttctgttctcttcactacttggtcttgcgagagaaagccatgccagagacgaagatttttggcatgctgtttggccaaacactcccattccaagttcattgcgagatcttctaaagcctggccctgcaagtgttgaaatcgatgatcaccctatgcaaattgaagaaacacagtacccgaaaaccttcttctataaagaagaccttcatccaggcaaaacaatgaaagtacaatt

SEQ ID NO: 288714 - DNA, 277 bp, Glycine max
  unsure (1)..(277): unsure at all n locations
gaagaagcccatacttgtgggagatagatggcacgcttgtcactgctcattttcgcgttctgcgccgtcgccgtacgccgtcgccgtcgcgggctcctccttcgatgatgccaaccctatccgtttagcgtcggacttggagtcgcaggtgctggacgtgatcggacagagccgccacgctctctccttcgcccgcttcgctcgncgccacggnaagcgctaccgttccgtcgacgagatccgcaaccgcttccggatcttctctgataatcttaaa

SEQ ID NO: 288715 - DNA, 277 bp, Glycine max
ctaatagttgaacttgagagaagtgttcctacattggttggcattgaatgtcccaaggatgagaaacttcctcgtcgcaaaatttttgacaaacctaagacgcgctgcttcactattctccctatggagtttaatcttgtggttcgtcagaagtttttaaattttgtgaggttcattatgaagaaaagggacaagcttagttgtcaagttggaatcaacccatactccatggaatggactggtttggccaatagattactgagtaagggcaacgata

SEQ ID NO: 288716 - DNA, 277 bp, Glycine max
tttgctgtgaaatggactgaggaatggtgagaacaccattgaattttgattctagcaagcagagcttttgtcaattttctattgaccttctcggtggaggaattttagtggacaaaactggagattggatcacacttatacaaaattctccaattagtaacttgttgagagttgctgcttggaagaaaggctgtttaatggtcaagattgtgatgtctgggaatgcagcagtcaaaaggagtgattgggcctcattggtacaagtgtttttaacaaa

SEQ ID NO: 288717 - DNA, 277 bp, Glycine max
  unsure (1)..(277): unsure at all n locations
gtccaattgtaatatttggaacaaaacggccatccattacaattngacctcttgtggttgatgcattgcgccctgtgacanctcttcctttggatgtacacctgatgattgtacagcctgaacaaagggtaccagattttattaaggcaggagctgatatagtcagtgttcattgtgaacaatcttccaccatccatttgcatcgtactgttaatcaagtgaaaagtctgggagctaaagctggagttgtctaaaccctgctacccccttaagtgca

SEQ ID NO: 288718 - DNA, 274 bp, Glycine max
aatctcttcaaatccgttttctcagatgacccggaccctccaagacccgaatccggatccaacaatgcaccgcgagacaaatcccgggatcccgattccccgccccgatccagcgccatcgattccgccgccgccggagtaggcggcgacggttggaacttcggcggcctcatcaagaccctgacaacgaaatcggaatccataatcgagacctaccgtcgcgatctgcaggaattcggcaccggtttgaagaaagagatcgaggtagcgcagg

SEQ ID NO: 288719 - DNA, 284 bp, Glycine max
  unsure (1)..(284): unsure at all n locations
tcaaatcatatttagttcgcaatgttgttcatgacggcaaacctggtgaaggattctatagggtatttgtgcaacgcaaatcagaagaactatggtacgagatgcaggatttgcacgtctctgaaacacttcctcatttggttgcactttcagaaacttatatgcagatttatgaacagcagcagtaaaaggccgagtttgaatccttctctgtgcatcgtaacctgaagcacgtagtatgcagaaaggttgagantatgagaggttccatgcgtcatatccca

SEQ ID NO: 288720 - DNA, 278 bp, Glycine max
  unsure (1)..(278): unsure at all n locations
gtgagtgatcggtgttcacttgatctcatcataatcgtcagcgtcaattgaagaagatgccgatcagaaacanccgccgtcggaaggcctgaagaggcgactcaccccgacacgttgaaggcggctttggctgagttcatctcaaccttcatcttcgtgttcgccggctcaggctccggcatcgcctacaacaagctcaccgacaacggcgctgccacccctgccggcctcatctccgcctccatcgcccatgcattcgccctcttcgtcgccgtctc

SEQ ID NO: 288721 - DNA, 278 bp, Glycine max
  unsure (1)..(278): unsure at all n locations
cttgaccaaatcaatgagcccaagangccctccgacaagcctctnaggcttccattgcaggatgtctacaagattggtggtattggtactgtgccagtgggacgtgtagagactggggttgtgaagcctggtatggtggtgacttttggtcccactgggctgacaactgaggttaagtctgttgagatgcaccatgaggctctcacagaggctcttccaggtgacaatgttggatttaatgtgaagaatgttgcagtcaaggatctcaagcgtggttt

SEQ ID NO: 288722 - DNA, 274 bp, Glycine max
cgacaatgtcgactcctgctaggaagaggctgatgagagacttcaagaggctgcaacaagacccgcctgcagggatcagtggtgccccccaggataacaacataatgctgtggaatgctgtcatatttggtcctgatgatactccatgggatggaggcacgttcaagttgacactccaatttactgaggactatccaaataaaccaccgactgtacgatttgtgtctcgcatgtttcatccaaatatttatgctgatggaagtatttgtttgga

SEQ ID NO: 288723 - DNA, 286 bp, Glycine max
  unsure (1)..(286): unsure at all n locations
gaattgagcaccaatccccaacttgcaccacggctgcggtttatggttcgtgatgttctagatttgcgttctaataactggattccaagacgtgaagaggtgaaagccaaaaccatcactgaaattcattcagaggcagaaaaaatcttggattgcgtccaggtgccatgcaagtatgagaacttaaccgtgtagtttccaggcgctctaggaantaccagtccaggaggattcccaattgctccgacctggtacaggtggtttgatgccagggatgcnagggacc

SEQ ID NO: 288724 - DNA, 281 bp, Glycine max
  unsure (1)..(281): unsure at all n locations
gttggatcttaaaatttctcaatctaaaattgcacttcccaagaacacagttggnggaaccattctgcgtagtgatctattggcaaattttttgacagagggcaattttagagcaagtgttgntttgcagcgcactcatcgtattanaggaatgattaanatggtggctnacagttggtattcctgagatacagtatancattgggctgtnctatggaatagttcttttagggggcgcggccagttctganatttacaccactgctctccaagactgtgaa

SEQ ID NO: 288725 - DNA, 282 bp, Glycine max
  unsure (1)..(282): unsure at all n locations
attcgggactgtaactagccgcagcacgaggagcagcctcaggaggagaaggatgtctcacaggaagttcgagcacccaaggcacggttcactgggatttcttcccaggaancgtgctgctcgtcacaggggnaaagtgaaggcattccccaaggatgacccatccaaggcacccaagcttcactgcattcttgggttacaaggccggtatgactcacattgttagagaggtcgagaagccaggatccaaagcttcacaagaaggaaattgtgagcctgtta

SEQ ID NO: 288726 - DNA, 280 bp, Glycine max
ggctcccaagggtttaatctttttggctgtgttatgcttctcagcactgtcactgagtcgttgtcttgcggaggataatggacttgttatgaacttctacaaggaatcatgccctcaggctgaagacatcatcaaagaacaagtcaagcttctctacaagcgccacaagaacactgctttctcctgggctcagaaacatcttccatgactgtgctgttcagagttgtgatgcttcactgttgctggactcccacaagaaggagcttgtctgagaagggaa

SEQ ID NO: 288727 - DNA, 274 bp, Glycine max
gcagatcttcgtgaagacgctcaccgggaaaactattactctggaggtggagagttctgatacgatcgataacgtgaaggcgaagattcaggataaggaagggattccaccggatcagcagcgccttatcttcgctgggaagcagctcgaagacggacgcactctcgccgattacaatattcagaaggaatccacgcttcaccttgttcttaggctccgtggtggcgattctagtttcagttgaatcttgctattgagattttctcttccttgg

SEQ ID NO: 288728 - DNA, 245 bp, Glycine max
gatggcgttgttggttgagaaaacaagcagtggaagggagtacaaggtgaaggacatgacgcaagccgatttcggaagattggaaatcgagctggcggaggttgaaatgcccggcctcatgtcctcccgcaccgagttcggcccctctcaacccttcaagggcgctaggatcaccggctccctccacatgaccatccaaaccgccgtcctcatcgagaccctcaccgccctcggcgccgaggtcc

SEQ ID NO: 288729 - DNA, 286 bp, Glycine max
  unsure (1)..(286): unsure at all n locations
gcttatcatcaaacgcttggcagaagaatttggaccggattgggcaatgcagcacattattccccaggttttggacatggttactgatccacattatctgtatcggatgacaatcttacaagcaatttctctactagctcctgtctgggctcggagattacttcttcaaaactgctccctctggtcattaaatgcatccaagggataggggtaccnattatccaaattccaagtagttaangtgttgcngtctctccatcccattgttgnncagcnggtggtggng

SEQ ID NO: 288730 - DNA, 275 bp, Glycine max
  unsure (1)..(275): unsure at all n locations
acaagtagttgagaactaagaaggagaagcaaatggcttcctcaatgatctcttccccagctgttaccactgtcaaccgtgccggtgccggcatggttgctccattcactggcctcaagtccatggctggcttccccacaggaagaccaacaatgacattacctccattgctagcaacggtggaagagtgcaatgcatgcnggtgtggccaccagttggcaagaagaactttgagactctttcctacctgccagaccttgatgatgcacaattgg

SEQ ID NO: 288731 - DNA, 273 bp, Glycine max
  unsure (1)..(273): unsure at all n locations
ctagaaacagtgtgatgaaaatgaaggtccttgttttcttcgttgctacaattttngtngcatggcaatgccatgcgtacgatatgttccctctccgaatgaacactggctatggtgcccgtactccggaggtgaaatggcaagttggaggcttgctgtggacgcacacaacatctttggctttgagaccantcctgaagagtgcgttgaagcaacaaaggaatacatccatggcgaacaatatagatcagactccaaaacagttaaccaaca

SEQ ID NO: 288732 - DNA, 276 bp, Glycine max
  unsure (1)..(276): unsure at all n locations
ggtaagcngcngtatnngcagaggaagcacaagcagtgatgtgagtgatgagagtacttgtagtagctttagtagcaccataaacaaacctccacaaggcaaatgacttgagatgnggaagctatccaagcagttcgaagtaagatggggtgtngggtttaggtcactttagattactgaagaggctgggttgtggggatattggcagtgtttacctctctgagttgagtggaactaaatgttactttgcaatgaaggtaatggacaaagggtctc

SEQ ID NO: 288733 - DNA, 274 bp, Glycine max
cagaagggttcgtggagagaacaaaaggaaggggctttttggttaagtcatgggctccgcagccacaggttctggcccatcaatcaacgggaggattcttgagccattgcggctggaactctatactggagagcgtggtaacggcgtgcctttaatagcctggcctctgttcgcggagcagaggaccaacgcgtttatgctcatgcatgaagtcaaggtggcgctgaggcccaaagttgccgaggacactggacttgtccagagccaggaaata

SEQ ID NO: 288734 - DNA, 270 bp, Glycine max
  unsure (1)..(270): unsure at all n locations
tacctccattgctagcaacggtggaagagtacaatgcatgcaggtgtggcnaccaattggcaagaagaagttcgagactctttcctacttgccagacctcgatgatgcccaattggcaaaggaagtcgaataccttcaaggaaaggatggattccttgcttggaattcgagttggagcacggtttcgtgtaccgtgagcacaacaggtcacctggatactatgatggacgctactggaccatgtggaagctgcctatgtttggctgcatg

SEQ ID NO: 288735 - DNA, 277 bp, Glycine max
  unsure (1)..(277): unsure at all n locations
ctggtatttccaaggatggacagactcgtgaacatgctctgctttcattcacccttggtgtgaaacagatgatttgctgctgtaacaaaatggatgctactacacccaagtattccaaggccaggtatgatgnaattgtgaggaagtctcttcctacttgaagaaagtaggatacaaccctgacaagattccctttgttcctaatctctggtttgangggagacaactgntgagnagntcaacaaacctggantggtacaaggntccatcctgntga

SEQ ID NO: 288736 - DNA, 279 bp, Glycine max
  unsure (1)..(279): unsure at all n locations
ctgcgactgcgcttcacgatgggtgcttacaagtatgtttcggagctatggcgcaagangcagtctgatgttatgagattcttgcagcgggtgaggtgctgggagtaccgccagcaaccttctattgtccgtttgacaagtctactcgcccagacaaggctcgccgcttgggtttcaaggctaagcnnggttatgtgcatttacgtgttcgtgtagaanggggtngnccggaagagaccagttccaaaagnattgtttatggnaacccccaccaaccag

SEQ ID NO: 288737 - DNA, 278 bp, Glycine max
  unsure (1)..(278): unsure at all n locations
ccccatcaaagcatgctacatatgttcctcacactgctggtaggtactcagtgaagaggttcaggaaagcgcagtgccccattgttgagaggctcaccaactctctgatgatgcacgggaggaacaatggaaagaagctctggctgtcaggattatcaagcatgccatggagatcatccacttgctcactgacctgaaacccattcaggtcatggttgatgcggtcatccaaanttggtccccgtgaagntccactaagaatnggttctgttgggtgg

SEQ ID NO: 288738 - DNA, 274 bp, Glycine max
  unsure (1)..(274): unsure at all n locations
ggtgaagaaggcgatcgagaaaggcaacatggacggcgctcgaatctacgcggagaacgcgatccgtaagcgcacggagcagatgaactacctccgcctggcctcgcgcctcgacgccgtggtcgcccgcctcgacacgaggcgaagatgacgacgatcagcaagtcgatgggcaacattcgtgaaatcgctggagtctcgctggccaggggaacttccagaagatgtcggagaccatggantcgttcgagaagcattctgaacatggaagtcc

SEQ ID NO: 288739 - DNA, 271 bp, Glycine max
ggcaatcaagacactctctatgctcactcactgcgccagttttacaagtcatgccgcattgagggcagcgtggacttcatctttggaaacgctgcagcagttttccaagactgccaaatcctagttcgtcccaggcagtgaagccagagaagggtgagaacaatgccatcacagcacacggcagaacagaccctgcagaacccacaggctttgttttccaaaactgtttgattaatggcatgaggaatatatagcattgtacctcagcaag

SEQ ID NO: 288740 - DNA, 272 bp, Glycine max
  unsure (1)..(272): unsure at all n locations
gagataactagaaacagtgtgatgaaaatgaaggtccttgttttcttcgttgctacaattttngtagcatggcaatgccatgcgtacgatatgttccctctccgaatgaacactggctatggtgcccgtactccggagtgaaatgcgcaagttggaggcttgctgtggaagcacacaacatctttggctttgagaccattcctgaagagtgcgttgaagcaacaaaggaatacatccatggcgaacaatatagatcagactccaaaacagtt

SEQ ID NO: 288741 - DNA, 275 bp, Glycine max
  unsure (1)..(275): unsure at all n locations
cttaagcttgctactgagtttccacactgcataccttangtcttccgaattcgaagttaatttgcaagatggctaaggaaaaggctcagatcaacattgtggtggttggtcatgtggaccctgaggaggcaaccaccataacgagctgaagaagcctgttgtggagaaagaagctccagggcatgccatatgagggcatgcacgtacggcctcggaggggaaccagaaaattatgttaacaaaataatctggaaccctaatgtatcagtgtcatc

SEQ ID NO: 288742 - DNA, 279 bp, Glycine max
  unsure (1)..(279): unsure at all n locations
ganaatcctcacccantttcttcgtagccaaacactctacaaattcncagttatgtcgtggcaagcgtatgtggatgatcacctactgtgtgaaatcgaaggtaaccacctncantncacgccgctatcatcggccaagacggaagcgtttgggctcagagcaccaacttccctcagttcaaacctgaggaaataactgccatcaatgatggatttaatggagcctggatcattgctccaactgggattgtatnatngtggnnaccaaatacatggncc

SEQ ID NO: 288743 - DNA, 271 bp, Glycine max
  unsure (1)..(271): unsure at all n locations
tgaagggtgtcgtcactgacgtcatccacgattggccgtggcgccctctcgctaaggtcgccttccgccacccgttccgctacaagaagcagancgagctcttcatcgccgccgagggtctctacaacggccagttcatctactgcggcaagaaggccaccctcgttgtcggcaatgtgttgcctcttcgatccattcctgaaggagctgtcatctgcaacgtcgagcaccatgtcggcgaccgcggcgtcttcgctagggcgtctggaga

SEQ ID NO: 288744 - DNA, 277 bp, Glycine max
  unsure (1)..(277): unsure at all n locations
aaatggatgctactacacccaagtattccaaggccaggtatgatgaaattgtgaaggaagtctcttcctacttgaagaaagtaggatacaaccctgacaagattccttttgttcctatctctggttttgagggagacaacatgattgagaggtccacaaaccttgactggtacaagggtccaactctgcttgatgcacttgaccnagatttagtgagccccagaggccttctgacaagcccttccaggtttccccttcnagngtgtacaaattgagg

SEQ ID NO: 288745 - DNA, 257 bp, Glycine max
  unsure (1)..(257): unsure at all n locations
gcaagctcatcctagagttttaaaaatggcagcagcctcctccatggctctctcttccccatccttggctggcnaggccgtgaagctgggcccatcagcccccgaagtcgggagggtcagcatgaggagaccgncaccaagcaggcctcctccggaagcccatggtacggcccagaccgcgtcaagtattgggcccattctctggcgagcccccgtcctaactcatggcgattcccaggtgatacggtgggacatgt

SEQ ID NO: 288746 - DNA, 269 bp, Glycine max
  unsure (1)..(269): unsure at all n locations
gttgctccttcgccacaactctctgccaacatgggtatctccagagattctatgcacaagaggcgtgccactggtggcaagaagaaggcctggaggaaaaagagaaagtatgagcttggtcgccagcctgctaaactaagctgtcaagcaacaagacagtcaggaggatccgtgttagaggtggaaatgtgaaatggngggcattgagattggatactggaaattactcctggggaagtgaagctgtaactcgcaagactcgtgtacta

SEQ ID NO: 288747 - DNA, 268 bp, Glycine max
gaaatccttctccggagccatggcagatctcaagtccacattcttgaacgtctattctgttctcaaatctgaactcctccacgaccctgcttttgagttctccgatgatgctcgtaattgggtcgaccggatgcggactacaatgtgccgggaggaaagttgaaccggggactgtcagtaattgatagctacagattgttaaaagaaggacaggcattaaatgatgacgaaatttttcatgccagtgctcttggttggtgtattgaat

SEQ ID NO: 288748 - DNA, 268 bp, Glycine max
gtggcaggggaaattaattgtgcgttacccaatgaatttgtgaaagagaccaaagatagaggcatgttggcaagttggtgtccccaagaggaggttttggctcacccagcggttgggggattcttgacacattgtgttggaattcaacgttggagagtgtgtgtgaaggggttccaatgttgtgttggcctttctttgcggacaacaaaccaattgtcgattttgttgcaaggagtgggggattgggttggagatagaggatgttaag

SEQ ID NO: 288749 - DNA, 227 bp, Glycine max
tagtgcctccttgccagaagttaaaatggcccaagaaactttcctattcacatctgaatcagtgaacgaggggcaccctgacaagctcgtgaccagatctccgatgctgtgctcgatgcatgcttggagcaggaccctgacagcaaggttgcctgtgaaacctgcaccaagaccaacatggtgatggttttcggagagatcacaaccaaggccaacgtggactatga

SEQ ID NO: 288750 - DNA, 282 bp, Glycine max
  unsure (1)..(282): unsure at all n locations
aatctcttcgttccttcgattcgttccatttcttccaaaatggcccaaagacncagttcgcgttctcgtcactggagctgcagggcaaattgggtatgctcttgtccctatgattgctaggggagtgangttgggtcctgaccagccgtgatcctccacatgcttgacattcctccggcagcagagtctctgaatggggttaaaatggaattggtggatgctgcattccctcttcttaaaggtgttgttgccacaactgatgtggttgaggcatgcactggg

SEQ ID NO: 288751 - DNA, 281 bp, Glycine max
  unsure (1)..(281): unsure at all n locations
tgccttcgagcgagggagttgaagcttacatttggttactggcaaaggcttatgttgttgtgaatnattcgtgctaccatcaactcgtcagccactggctaaacactcatgcggttgttgagccattcgtcatagcaacaaacaggatctgagcgtggttcaccctatttacaaacttttgtttcctcactatcgtgacaccatgaacattaattcacttgcccgcaaatccttggtcaatgcagacggtattatagagaaaacattcttgtggggtaggt

SEQ ID NO: 288752 - DNA, 279 bp, Glycine max
  unsure (1)..(279): unsure at all n locations
ctcatcactacctctgcatttttctctcgctctctgccttccatcaccctcgccatttccccttcccaagatagtagaagatggcagacgctgaggatattcaacctcttgtttgtgacaatggaacaggaatggttaaggctggtttgctggagatgatgccccacgtgctgtgtttcccagcattgtaggtcgtcctcgtcacactggtgtgatggttggcatgggccaaanagatgcatatgttggtgatgaggcacagtctaagaggggtatttt

SEQ ID NO: 288753 - DNA, 286 bp, Glycine max
  unsure (1)..(286): unsure at all n locations
cggcgcgtttcatttgatcagatcataacaatggtgtccgaaggcactctcctgggcatgggtaaccctctcctcnacatctccgccgtcgtcgatgaagacttcttaaaaaaatatgatatcacctcgaacaatgcgattcttgcggagacaagcacaagcctatgtatcaagaattggctgagaaatataatgtggagtacattgctggaggtgccactcagaattcaatcaaggttgctcaatggatgctccaagttcctggtgcaacaagttacatgggtgg

SEQ ID NO: 288754 - DNA, 292 bp, Glycine max
  unsure (1)..(292): unsure at all n locations
caacaaagggactacattaatggcgaacaatttagatcagactctaaaacagttaaccaacaagcttnccttttatgctagtgaacgcgaagtccatcacaacgacatatttatattcggcatagataacaccgtactctctaatatcccatacatgaaaaactggatatggggtggaggaatttaatgaaaccttatatgatgaatgggttaacaagggcgacgcaccggcattgccagagactcttaaaaattacaacaagctgttgtctcttggcttcaagattgtatt

SEQ ID NO: 288755 - DNA, 282 bp, Glycine max
gaacaagtcaagcttctctacaagcgccacaagaacactgctttctcctggctcagaaacatcttccatgactgtgctgttcagagttgtgatgcttcactgttgctggactccacaagaaggagcttgtctgagaaggaaacagatgaagctttgggttgagaaatttcaggtacattgagaccatcaaagaagctttggaaagggaatgcccaggagttgtttcctgtgctgatatcctcgttctctctgccagagatggcattgtttcgctaggaggtc

SEQ ID NO: 288756 - DNA, 281 bp, Glycine max
caacaacaacgaacctcactcgctaccattcgattacaacgtcttctggttctttgaagaagaacccttctctttgcgcgtgtcccgttctcttctccaatcctcctccatccccactgtgtgatctgatcctaaaccctatagcctgactaccatggaggttaagctatggaatgacaagcgcgagagagaaatgtatgacaactttggggagctttatgccattatcaaagccgctgagaggcttgagaaggcctatgttagagatataatctcacccc

SEQ ID NO: 288757 - DNA, 282 bp, Glycine max
ccaccacacaatttcatttcatttttccttttcacttcactttcccccaattttctttctcaacaatggccgcagcaacacaacttccacttaccccctggattccgattccaccccaccgatgaagaactcgtcgttcactatctcgccgcaaatgcgcttcgcaagaaatcgcagttccaataatcgccgaaatcgatctctacaagtacgacccatgggaccttccaggaatggctttgtacggagagaaagagtggtattttttcacgccgagggacc

SEQ ID NO: 288758 - DNA, 278 bp, Glycine max
agattaaagattcaacaatggcctctgcttctgctactcttctcaagtcatctcctgttcttgacaagtgcgagtgggtcaaaggccagacccttcgccaacctctcgtgagatgtaacccttcctcagcatcagctctcaccacaaagctgcttcctatgctgacgagctcgtcaaaaccgccaaaacagtggcctcaccggggcgtggtattttggcgatggatgagtcaaatgcaacctgcgggaagcgtttggcatctattgggttagagaaca

SEQ ID NO: 288759 - DNA, 281 bp, Glycine max
  unsure (1)..(281): unsure at all n locations
cttgattgggncagggatttcagcttatcatggcagtccccttgtctcaccatggttcttccattgttaatgtgggaattggatttatcatgttcatctacntcattgtacctgtgtgttactggaagttcaacacttttgatgccccaagtntcctatattctctaaccagttgttcacggccagtggacataaatatgacaccaccaagatcttaaccccagagtatgaccttaatgttgatgcatacaacaaatacagcaagttatacctcagccctc

SEQ ID NO: 288760 - DNA, 286 bp, Glycine max
  unsure (1)..(286): unsure at all n locations
ggacaagatccgtcctctgtggaggcattatttccagaacactcagggtctcatttttgtggttnatagcaatgatagggatcgagtggttgaggcaagggatgagttgcacaggatgttgaatgaggatgaacttagagatgctgtttgcttgtttncgccaacaagcaagatcttcctaatgcaatgaatgctgcagaaacaactgacaagcttggacttcattcactccgtcaacgccactggtatatccaaagcattgtgcaacttctggagagggtctcta

SEQ ID NO: 288761 - DNA, 291 bp, Glycine max
  unsure (1)..(291): unsure at all n locations
gcgaaggggaagaagaagggagcgagcttcgtgatcgattgcgcgaagccggtggaggataagattatggacattgcttctctggagaagttccttcaggagaggattaaggtcggcggcaaggccggtgcactcggcgattccattacctcaccagggacaagagcaagatcaccgtcacctccgacagcaacttctctaaacggtatctganatatttgaccaagaagtacttgaaaaagcacaatgtgagggattggcttcgcgtgattgcatccaacaaggagcgga

SEQ ID NO: 288762 - DNA, 285 bp, Glycine max
  unsure (1)..(285): unsure at all n locations
tcctgaagagtgcgttgaagcaacaaaggaatacatccatggcgaacaatatagatcagactccaaaacagttaaccaacaagcttacttttatgccaganacctcgaagtccatcccaaggacacatttgtgttcagtatagatggaccgtactctctaatattccatactacaaaaaacatggatatggggtggagaaatttaactcgaccttgtatgatgaatgggttaacaagggcaatgcaccggcactgcccgagactctaagaattacaacaagctgg

SEQ ID NO: 288763 - DNA, 279 bp, Glycine max
  unsure (1)..(279): unsure at all n locations
cccaattcactgatgaagagttgaggagtcaaggccgttgccctatgacaccggaagaggttggattgttgctagcagctatgggatttgacaatagcactcgtttatatcttgcctctcacaaggtctatggtggagaggcaagntttcaactttgagggaattattncctcanagttgaaatccttgccgtgaaccctcacctaacaatcaaccctaccattccaaagctcgaaggtgaacagtgagtgagtgagttattcagaacccaggatttgg

SEQ ID NO: 288764 - DNA, 278 bp, Glycine max
  unsure (1)..(278): unsure at all n locations
accaaacagcatccgcggcagcgacggtaaccctccaacaacancacttccgctgcgaaaaatgtctctggnggcgaacgaggatttccagcacattctgcgtgtgctgaacaccaacgtggatgggaagcagaagataatgttgcaatgacctccatcaagggtattggaaggagattcgccaacatcgcttgcaagaaggctgatgttgacatgaaccaaagggctggtgagttgactgctgctgagttggatagtgtgatgactgtggtggcgaa

SEQ ID NO: 288765 - DNA, 281 bp, Glycine max
  unsure (1)..(281): unsure at all n locations
ctagtnctanatcgcgagcngccgctcggatctaggaaacagtgtgcaaaagagcgttcgtagtcgcaaccctacntcagaagaagcgcagttcaaggcgagtgaccagccacnagccatgggtcgnatgcacagccgcggtaagggatatcctcttctgctttgccctacaaaaggacacctcctagctggctcaagatctcttcgcaagatgtcgaagaaaatatctgcaagtttgcgaagaaaggtttgaccccgtctcagattggtgtcatctcaga

SEQ ID NO: 288766 - DNA, 276 bp, Glycine max
cgatcatttccaatcacaatgggcagatcaactcaccgatgaacagatctcggagttcaaggaagccttcagtttgttcgataaggatggcgatggttgcatcacaacaaaggagcttgggactgttatgcgttcgttgggtcgaatccaacagaggctgagctccaagacatgatcaatgaagtagatgctgatgggaatggcaccattgacttccctgagttcttgaacctcatggctagaaagatgaaggacactgattctgaggaggagctg

SEQ ID NO: 288767 - DNA, 288 bp, Glycine max
  unsure (1)..(288): unsure at all n locations
tgnanncgttatgttggaccgtatattgcgcctcttggcttgctacaatatcctctcttttncctcttcgcactctccctcatggcaaggttgagaggncctatggtctcgcccctgttgctaagtacttggntcaggaacgaagatggttctccatncntgcttctcaacctcatgaaccaggacaaaatcctcatggaaagctggtactatttgaaagatgcagtccttgaagggggtattccatttaacaaagcatatngaatgacagccttgaataccatggaa

SEQ ID NO: 288768 - DNA, 285 bp, Glycine max
  unsure (1)..(285): unsure at all n locations
gtttgttgtgagctataagctagtttatcgtgaggagaatatgaagttgtttgtnttctttgttgctgcagtagttttggtagcatggccatgccatggcgcaggctaccaaaggttccctctccgaatgaaaactggctatggtgacgttcttcggaggtaaaatgcgcaagttttaggcttgctgtggaagcacacaacatccgagctcttaaaaccattcctgaagagtgcgttgaaccaccaaaggactacattatggcgaacatttagatcagactctaa

SEQ ID NO: 288769 - DNA, 278 bp, Glycine max
  unsure (1)..(278): unsure at all n locations
ctagaaacagtgtgatgaaaatgaaggtccttgttttcttcgttgctacaattttngtagcatggcaatgccatgcgtacgatatgttccctctccgaatgaacactggctatggtgcccgtactccggaggtgaaatgcgcagttggaggcttgctgtggangcacacaacatctttggctttgagaccattcctgaagagtgcgttgaagcaacaaaggaatacatccatggcgaacaatatagatcagactccaaaacagttaaccaacaagctt

SEQ ID NO: 288770 - DNA, 246 bp, Glycine max
  unsure (1)..(246): unsure at all n locations
ccgcttgcaggcaattgtgggcttcaagagctgnctcttacctgaggatctctgtgtntcacagaggcttttctaatgttgttaaagatttgaagtatgctgattctcatgatgggtgaaagttgatgaaaattctgcaancgtcggcataactgatcatgcccaagatcatttaggtgatgttgtatatgttgaattnccanaagtgggagcagctgtnacacaaggaggtagttttggtgcagt

SEQ ID NO: 288771 - DNA, 277 bp, Glycine max
  unsure (1)..(277): unsure at all n locations
gcaganatgataaacagtctttgtggtggtgatgaaaaattgatgcgtgaaaggacacacctgctgttggcttgttgttcaangatggcaatttgtaaganagatgtttggagagttgaatgtggaatcccttctggatttcgctcacagttatttgcaatagcattttncaatgagatgctcattagatatagctatgaaaaattactgcgccaggctaaagctccaagtatgtttttacaatccntcaaaaattttgtttccttgtgtgtgtatg

SEQ ID NO: 288772 - DNA, 276 bp, Glycine max
  unsure (1)..(276): unsure at all n locations
cgagataactagaaacagtgtgatgaaaatgaaggnccttgttttcttcgttgctacaattttggtagcatggcaatgccatgcgtacgatatgttccctctccgaatgaacactggctatggtgcccgtactccggaggtgaaatgcgcaagttggaggcttgctgtggaagcacacaacatctttggctttgagaccattcctgaagagtgcgttgaagcaacaaaggaatacatccatggcgaacaatatagatcagactccaaaacagttaa

SEQ ID NO: 288773 - DNA, 276 bp, Glycine max
  unsure (1)..(276): unsure at all n locations
cgcaacancaaagaaagantcccaggcgaggagaaagatggaggggaaggagcaggatgtgtccgttgggagcgaacaagttccccgagagacagccgattgggacggcggcgcagagccaagacgacggcaaggactaccagagccggcgccggcnccgctggttgacccgacggagtttacgtcatggtcgttttacagagcagggatagcagagtttgtggccattttctgtttctctacatcaccgtcttaaccgttatgggagtcgccggg

SEQ ID NO: 288774 - DNA, 275 bp, Glycine max
  unsure (1)..(275): unsure at all n locations
gtgattcccagaccttatttnttctgtcatttgcttcaaatttcaggagattaattatggctcaacccanaacaagaataggccttnctggattggctgttatgggccaaaatctggcactcaatattgctgagaaaggcttncccatttctgtttacaaccgaaccacttccaaggttgatgagacagtagaacgagcaaaacaagaaggaaatcttccagtttatggctaccatgaccctgaagcttttgttcattccattcaanagcctagg

SEQ ID NO: 288775 - DNA, 281 bp, Glycine max
  unsure (1)..(281): unsure at all n locations
cttaagcttgctactgagtttccacactgcataccttancgtcttccgaattcgaagttaatttgcaagatngctaaggaaaaggctcagatcaacattgtggtggttggtcatgtggaccctgaggaggcaaccaccattaacggctgaagaagcctgttgtggagaaagaagctccagggcatgccatatgagggcatgcacgtacggcctcggaggggaaccagaaaattctgttaacaaaataatctggaacctaatgtatcagtgtcatcatcagt

SEQ ID NO: 288776 - DNA, 284 bp, Glycine max
  unsure (1)..(284): unsure at all n locations
ttaagcttgctactgagtttccacactgcataccttaacgtcttccgaattcgaagttaatttgcaagatggntaaggaaaaggctcagatcaacattgtggtggntggtcatgtggaccctgaggaggcaaccancattaacgagctnaagaagctgtngtggagaaagaagctccagggcatgccatatgagggcatgcacgtancgnctcggaggggaaccagaaattatgttaacaaaatnatctggaaccctangtatcagtgtcatcatcatgtgtag

SEQ ID NO: 288777 - DNA, 279 bp, Glycine max
  unsure (1)..(279): unsure at all n locations
ctagatcctgcactactacggcctgggcggttggaccgtaaagtngaattcggccttcctgacttagagagtaggactcagntattcaagatacacacaagaaccatgaactgcgaaagngatatccgatttgaacttctggtcggctttgcccaaattccactggagctgatntaaggagtgtatgcacagaagccggtatgtatgctatccgtgcccggaggaagactgtaacagagaaagacttccttgatgcagtaaataaagtcatcaaaggta

SEQ ID NO: 288778 - DNA, 275 bp, Glycine max
ggtttctggaagagagtgcaaaaaggttggcacaaaggcatagagttttcacttcggggttggccaaagttggcataaagtgcttgcaaagcaatgctggtctctttgtgtggatggatttaaggcaacttctcaagaagcaacgcttgactctgaaatggagctttggagagtgatcattcatgaggttaagatcaatgtttcacctggctcttctttccattgcactgagccagggtggtttagggtgtgctatgccaacatggatgatatgg

SEQ ID NO: 288779 - DNA, 279 bp, Glycine max
  unsure (1)..(279): unsure at all n locations
cacaaggcagaaagcaagctcatcctagagttttaaaaatgggcagcagccttcctccatgggctctctcttccccatccttggctggcaaggccgtgaagctgggcccatcagcccccgaagtcgggagggtcngcatgaggagaccgtcaccaagcaggcctcctccggaagcccatggtacggcccagaccgcgtcaagtacttgggcccattctctggcgagcccccgtcctaccttcactggcgagttcccaggtgactacggctgggacacng

SEQ ID NO: 288780 - DNA, 274 bp, Glycine max
  unsure (1)..(274): unsure at all n locations
ccgctgcgactctctttccttccctctttttccgaatctgaatcgaaatggcttcggagactgagacgtttgcttttcaggccgagatcaaccagctcctcagtctaatcatcaacaccttctacagcaacaaggagntccttcttcgtgagcncatcagcaatgcctctgatgctttggacaagattcgatttgagagtcttacagacaagagcaagcttgatgctcagccagagttgttcattcacattattcctgacaagaccaacaacac

SEQ ID NO: 288781 - DNA, 274 bp, Glycine max
  unsure (1)..(274): unsure at all n locations
ctagtcccaaagagctaacaagagattcaagaccggcatggctaatgaagaggaacagaaaaaccacctcttcggcatcaaagatctcggtcacaagactctccttcagagtgatgcactctatcagtatatacttgaaacagtgtctatccaagagagcacgagtgcttgaaagagatacgcangatgactgcaaaacacccactgaacatcatggcaacaccagcagacgaaggacaacttctgagctgcttgttaagctcacgattcaaag

SEQ ID NO: 288782 - DNA, 270 bp, Glycine max
  unsure (1)..(270): unsure at all n locations
gttgcctgctttgcagcagctgctgtatcgacttgttggttgtcggccagaaggagcagctgttagcaattatgtgatacaatatgctcttgccctggtactgaaggagagctttaagatttattgtgctattaatgaggcactatcaatcttgttgataagttttttgagatgcccagacatgaagctattaaagcccttgatgcctataaacgtgcgggtcagcaggcagcaagtctatctgattctatgatgtttgcnaaggattgg

SEQ ID NO: 288783 - DNA, 267 bp, Glycine max
  unsure (1)..(267): unsure at all n locations
cttcccttctccaacatgccaaacgacagcgttctgagtcttttctncttcgttacctcttcacatgccttctctctgctaattcccacgatgaccatattttcctaccgagtcaactccatgacgatgactcagtgattgcactgctaccgacccaaaccttaaactacaagccggtgatcggaatcctgacccacccggcgaggtgcctctggcgggctcagcaacgccaccggggttcttacatcgcggcctctacgttaattc

SEQ ID NO: 288784 - DNA, 161 bp, Glycine max
  unsure (1)..(161): unsure at all n locations
accgtagtaattctagagctaatacgtgcaacaaaccccgactntctggaagggatgcatttattagataaaaggtcancacaggctcctgcctgttgcttttgatgnttcatgataacgcgtnggntcgcacggcctttgtgccggcgacgcatcattca

SEQ ID NO: 288785 - DNA, 281 bp, Glycine max
  unsure (1)..(281): unsure at all n locations
gnnggcnagtttgccctatncggctnctggnacngcganctccgcntctgggaccttactgctggcacctncgcttcgncttttgtgggccanancaaggacgtgntctgcntggcctgttccattgnccaancgtcagancgtgtctggctctcgtgacngcangntcaagactgtggancancctgggagagtgtaagtacacaatccaagacggcgatgcgcattctgattgggtaanctgcgtccgtttcagccctagcagccttcagcnnantatt

SEQ ID NO: 288786 - DNA, 277 bp, Glycine max
  unsure (1)..(277): unsure at all n locations
gaccaggctcaaggttatcaggaaatgttcaataatttgggtgaactgttgtgcaccatcactgggtttgactccttctccttgcaaccaaatgctggtgctgctggagaatatgccggacttatggttattcgtgcatatcatttggcaaggggagaccaccaccgcaatgtttgcattatacctgtctcagcacatggtacaaatcctgctagtgctgctatgtgtggantgaaaattgtctctgttggaactgacgccaagggtaacattaata

SEQ ID NO: 288787 - DNA, 282 bp, Glycine max
  unsure (1)..(282): unsure at all n locations
gacggccagtntgccctatccggctcctggnacggngagntccgcctctgggaccttnctgctggcacctnccgcncgccgctttgtgggccanaccaaggacgtgctctccgtggccttntccattgacaaccgtcagatcntgtctgcctctcgtgaccgcacgatcaagctgtggaacaccctgggagagtgtaagtacacaatccaagacggcgatgcgcattctgattgggtaagcngcgtccgtttcagccctaagcacccttcagcccactattt

SEQ ID NO: 288788 - DNA, 284 bp, Glycine max
  unsure (1)..(284): unsure at all n locations
gttctagatcgcgagcngccgctccggatctagaactagcgggantcgagcgagataactagaaacagtgngatngaaaatgaaggtccttgttaccttcgttgnctacaattttggtagcatggcaatgccatgncgtacgatatgttccctctccgaatgaacactggctatggtgcccgtactccggaggtgaaatgcgcaagtnggaggcttgctgtggaagcacacaacatctttggctttgagaccattcctgaagagtgcgttgaagcaacaaagga

SEQ ID NO: 288789 - DNA, 278 bp, Glycine max
cgcaaatttctatattgttggtcgtgatccggctggtatgggccacccaactgagaaaagggatttgtatgaccctgatcatggaaagaaggtgcttagcatggctcccggtctggagaagcttaacattttgccattcagggtggcagcttatgacactaaggtaaacaagatggcatttttcgacccaacccgtgctaaagatttcctctttatatctggaaccaagatgcgggcttttgcaaaaagtggggagaatccgccagaaggtttcatgt

SEQ ID NO: 288790 - DNA, 278 bp, Glycine max
  unsure (1)..(278): unsure at all n locations
gttattaagagcttttgcttttctttctggcgcgcttttcccaattaagtagttcttccttttctcanagcaaaaaaaatgttcatcgagagtttcaaggttgagagtcctaacgtgaagtacacancagactgagattcagtccgtgnacaactatgaaaccactgaacttgttcacgagaacaataatggcacttatcagtgggttgtcaagcccaaaactgtcaaatatgaatttaaaaccaacacccatgtccctaaactaggggtaatgcttg

SEQ ID NO: 288791 - DNA, 281 bp, Glycine max
  unsure (1)..(281): unsure at all n locations
cgccagcaccaacagcatcgggcggcgacagtcactctccgacaacaacacttccgcggcgaaaaatgtctctggtggcgaacgaggatttccagcacattctgcgtgtgctgaacaccaacgtggatgggnaagcagaagataatgttcgctatgacctccatcaagggtattggaaggagattcgccaacatcgcttgcaagaaggccgatgttgacatgaacaaaagggctggtgagttgagtcctgcagagttggatagtgtgatgactgtggtggc

SEQ ID NO: 288792 - DNA, 269 bp, Glycine max
  unsure (1)..(269): unsure at all n locations
caagtagttgagaactaagaagaaggaaatggcttcctcaatgatctnccnccccagctgttaccaccgtcaaccgtgccggtgccggcatggttgctccattcaccgggcctcaaatccatggctggcttccccacgaggaagaccaacaatgacattacctccattgctagcaacggtggaagagtacaatgcatgcaggtgcggccaccaattggcaanangacgttcgagactcttcctattgccagactcgatgatgcncattg

SEQ ID NO: 288793 - DNA, 276 bp, Glycine max
  unsure (1)..(276): unsure at all n locations
acgcgctgcttcactattctccctatggagtttaatcttgtggttcgtcagangtttttaaattttgtgaggttcattatgaagaaaagggacaagcttagttgtcaagttggnatcaacccatactccatggaatggacctggtttggccaatagattactgagtaagggcaacgatattctgtgttgcgattatgctagtnttgatggtttgattaccaagcaagtnatgagcaagatggcaganatgataaacagtctttgtggtggtgatga

SEQ ID NO: 288794 - DNA, 275 bp, Glycine max
  unsure (1)..(275): unsure at all n locations
ggaaaatggctcttcttggatttcttcngggactttttttaatggtcactcatgtcaaggggtatggttttggaggttggaccaatgcacatgccaccttctatggaggtggtgatgcttctgggacaatgggtggggcttgtggttatggaaatctgtatagccaaggttatggaactgatacaacagcactgagcactgctctgttcaacaatggcttgagctgtggtgcatgctatcaaattaaatgtgtgaatgatccacagtggtgcctt

SEQ ID NO: 288795 - DNA, 279 bp, Glycine max
  unsure (1)..(279): unsure at all n locations
acacgcgccaccacctcctccctcaacgaccccaaccctaactggtccaaccgtcccccgaaagaaaccatcttgctncgacggctgcgacttcgaacactggctcgtcgtcatggagaagcccgagggcgaccctacccgcgatgacatcatcgatagctacattaaaaccttggccaaggtcatcggaagtgaagaggaggcgaggatgaagatatattcggtttcgactaggcactactttgcgtttggggctcttgtgtctgaagagctttctat

SEQ ID NO: 288796 - DNA, 259 bp, Glycine max
  unsure (1)..(259): unsure at all n locations
cngcagtcaaaangagtgattncggnctcattggtacaactgtttttaacaaacagcaaccagtacagagcattttgatgcatgtaagtggacaaaatcagaaccacattcctgggaattgatcttcccaatagaggtatgtggtcccaataatggttttgaaatgtggagttctgagtgggcaaatcaaacttcatggcatttgagtttccttattgacaatcccaaacaatctacagtttttgatatnctcttggga

SEQ ID NO: 288797 - DNA, 276 bp, Glycine max
  unsure (1)..(276): unsure at all n locations
ccctcttcctccttcaccgagagacgatgccatacaactttacgctncctttcaaaggatttggatgcgatactagcgttgtgatcaatatacttgctcatcgagatgctacccagcgtgcctacatccaacaagaatacaaagcaatgtattctggggatcttctcaaacgcttatcttcagagctttctggcaagttggagactgcactactgctttggatgcacgaccctgccggacgtgatgcaatcatccttaggcagtctctaaccctgc

SEQ ID NO: 288798 - DNA, 280 bp, Glycine max
  unsure (1)..(280): unsure at all n locations
ctagggtttttctttttctcttctcactgcatcgcttcaggttcttctgaaaagatgtctcgcgtgtatgtnggtaacttggattcacgagtcaccgagagagatctcgaagacgaattccgcgttttcggagttattcggagtgtttgggttgcacgtagaccacctggtnatgncttttattgactttgatgaccgcagagacgcacaggatgctatccgtgaattggatggcaagaatggttggngggttgagctttctcacaactctagaggtgga

SEQ ID NO: 288799 - DNA, 274 bp, Glycine max
  unsure (1)..(274): unsure at all n locations
agaatggctcccaagggtttaacctttctggctgtgttaatatgcgtttcagcactggcactgagtccttctgttgcgggggaagggcaaaataanggcnctgttatgaacttcnnacaaggaatcangncctcangctgaagacatcatcacagaacaagttcaagcttctctacaagcgccacaagaacactgctttctcctggctcaggaacatcttccatgactgtnctgttcagagttgtgatgcttcactgttgctggactccacaag

SEQ ID NO: 288800 - DNA, 274 bp, Glycine max
tcgagaatcatcgaataaaactagggtttccgatcgtcgtcgaggagaatgccgaagaacaagggaaagggaggaaagaaccggaagcgcgggaagaacgaggcggacgacgagaagcgggagttgtgttcaaggaggacggccaggagtacgcgcaggtgctccggatgctggggaacggccgctgcgaggcgatgtgcatcgacggcaccaagcgcctctgccacatccgcggcaagatgcacaagaaggtctggatcgccgccggcgacat

SEQ ID NO: 288801 - DNA, 271 bp, Glycine max
  unsure (1)..(271): unsure at all n locations
attgaagcggggattcctcatctcaagtggttttgagtagagggagactacaatgtcatggcaattgatcttcttggaccaagtctggaagatttgttcaattatngtaaccggaagtnaacattgaagacagtgttaatgcttgctgatcaattaattaacagagttgaatatatgcattctagaggtttccttcaccgtgacattaagccanacaattttttaatgggcctaggacgtaaagcaaaccaggtgtacatcattgactatg

SEQ ID NO: 288802 - DNA, 274 bp, Glycine max
  unsure (1)..(274): unsure at all n locations
gcatctcaaggtatttgagagcacggaantggaatgttaagaaggcagccaaaatgttgaagctgaccttgaaatggagagaagaatacaaaccagaagagattcgctgggaagatattgctcatgaagcagagacaggaaaaacctatagaacaanttacattgacaagcatgggagnacagtcctagtaatgagacctagtcgccagaactcaaagtcaacanaaggccaaattaaatatttggtatactgcatggagaatgctatnttana

SEQ ID NO: 288803 - DNA, 271 bp, Glycine max
  unsure (1)..(271): unsure at all n locations
gagcgaggatgagttggagataatgaagatgtttggnattcccaccggatttgactccaccaaggggaaaccggttcccggtgctgacgtcagcggcgtcaganccgtcaccaagcgccagccgcgccagtacatganccgccgcggcggatttaatcgcccattgcctgctgagaggaatcgctagggttttctttttttcagacgagtaatttcctttggtggtagacggtggtnnatcatgtggaatgttggatccagaaacccttgg

SEQ ID NO: 288804 - DNA, 269 bp, Glycine max
  unsure (1)..(269): unsure at all n locations
ggtaacactatgtggaaccaactacaagttcctgctgagaccctgtactcatgggancccaagtcaacatatattcatgaacctccatacttcaagggcatgactatggatcctcctggagctcatggtgtgaaagatgcctattgtctgctgaattttggtgacagtataacgaccgatcacatttctcctgctggaaacattaacaaggatagtcctgctgcaaagtacttctggatcgnagtgtggacaanaggattcaactctta

SEQ ID NO: 288805 - DNA, 232 bp, Glycine max
  unsure (1)..(232): unsure at all n locations
agtgaggcttcttctacccagatttgtttcattttaaccaaagaagaatctctnacaaatggcgtcaagagcaattgtncaacaacaacaagccagnggtgaagcagtagtagggggaggaaaacagcagaagaagaacggtgttgcggatggaaggaaccgcaaggcattgggtgacattgggaatttggccatataagangtgccgttgaagtcaagcccaatcgcctat

SEQ ID NO: 288806 - DNA, 270 bp, Glycine max
  unsure (1)..(270): unsure at all n locations
aanagtttcctctacaaaagcacaatttgttagtgganaaaccttcaaatatgatataattggtgctggttcacattcttcagaagattttcctgaaaaggnagatcaagaaaaacccaaaaagattgatgccagattgagacaaagaatagatcctcaatacaatgaggttcaggctcagntggnaacanatttgtttaaattgtctcttgatgatgttgaaactcctaaaggttccatgttggatctaaaatttctcaatctaaaatt

SEQ ID NO: 288807 - DNA, 255 bp, Glycine max
  unsure (1)..(255): unsure at all n locations
taatttcgttaggggaaagagattgtttgtntgtnagtcnagtatngctggaaaaggcgaggntcctgctatcggaatcgatttgggaacgacgtactcttgcntcggcgtgtggcaacacgatcgtgttgaaatcatagccaacgatcagggtaacagaactaccccatcctacgtggctttcaccgacacagaacggttgatcggcgatgcggcgaagaaccaggtcgctatgnacccaaccaacaccgtttt

SEQ ID NO: 288808 - DNA, 270 bp, Glycine max
  unsure (1)..(270): unsure at all n locations
gcganngantccctctctctatctctcacananactttctntcnctntctctctcacccagatcttgtagcaatcgcgagcgctcccactccacgcgaagagttcgtntacatggcgaantggcggagaggccgagcgctacgaggagatggtggagttcatggagaaggtctccgnctccgccgagagngaggagctgaccgtggaggagcgtaacctcctctccgtcgcctacaagaacgtgatcggcgctcgcgcgcctcntggcgc

SEQ ID NO: 288809 - DNA, 269 bp, Glycine max
caaacttggtcacagatccaactccacaatatcctggtggatgtactgctgctgatcttgcctatatgaagggatgtgatggcttagctgctttcctttctgagaagtctctggttgagcagttcaatgaaatgagtttggctggaaatatcagtggctcactggaaactagctcaactgatccagtaaatgctgagaaccttactgaggaccaactgtacgttaaggagactttggcagcttaccgtatatctgccgaggctgcagca

SEQ ID NO: 288810 - DNA, 268 bp, Glycine max
  unsure (1)..(268): unsure at all n locations
ccttgtgccgtttgtgttgttttcgggacgaagaagaagatggtgtcaggttctggaatctgcgcaaagcgggtngtggtggacgcgcgccaccacatgctgggtcggtctagcctccatcgtggcgaaggagttctgaacngccagaaagtggtggtcgttcgctgtgaagagatttgcatctcgggcgggctggtgaggcagaagatgaaatacttgaggttcctttgcaaacgcatgancaccaaaccctcccatggccccatcc

SEQ ID NO: 288811 - DNA, 269 bp, Glycine max
agggtttaacctttctggctgtgttaatatgcgtttcagcactgtcactgagtccttctgttgcgggggaagggcaaaataatggccttgttatgaacttctacaaggaatcatgccctcaggctgaagacatcatcacagaacaagtcaagcttctctacaagcgccacaagaacactgctttctcctggctcaggaacatcttccatgactgtgctgttcagagttgtgatgcttcactgttgctggactccacaagaaggagcttg

SEQ ID NO: 288812 - DNA, 272 bp, Glycine max
  unsure (1)..(272): unsure at all n locations
atttatcttcctcagtagtgtcntttacgcttctcttctctgnagnaactatgnctaaccctaaggtcttcttcgacatgncnatcggcggtcaatctgctggccgcatcgtgatngagctctacggngacgtcactccccgcaccgncgagaacttccgcgcgttttgcaccggcnagaagggcgtagggcggagcngcaagcccctccaacnacaagggctcgtccttccaaccgcgtgatccccgagtttcatgtttcanggtgggatt

SEQ ID NO: 288813 - DNA, 268 bp, Glycine max
atctgttgagatctttttcagtaggcattgtcccatatggtatggttatggtggtggcttgaaatcgctggaacgattctcttacataaactcagtagtttatcctctgacttcaattcccttaatcgcctactgcgcattgccagcggtctgtctgctcactgggaagttcattgtccccgagataagtaactatgccagtatcattttcatggccctcttcatctctatagctgcaactggcatcctggaaatgcagtggggaggt

SEQ ID NO: 288814 - DNA, 250 bp, Glycine max
  unsure (1)..(250): unsure at all n locations
tgcaatggctgccattgttttcatccacattgcatcattggtctctctttttgttgcaacaagtgcaagantccctggagtttacaccggtggcccctggcagagtgctcatgccaccttctacggtggcagtgatgcttctggaacantgggtggtgctgtgggtacggaaacctgtacagccagggctacggagttaacaccgcggcgctgagcactgctctgttcaacaacggtttaagctgcggcg

SEQ ID NO: 288815 - DNA, 275 bp, Glycine max
  unsure (1)..(275): unsure at all n locations
actacananagccanccggtcggcgcctctcttcgaaccgggagagttgtcatcgtggtctttctataggggctggcatagcangagtttgtggccactttcttgttncctctacatcanagtgctgactgtgntnggtgtgttcaaatctaagagcaagtgttccactgtgggtatccaaggcattgcttgggcttttgggggaatgatctttgctcttgtntattcccactgtggaatctcagggggtcanattaaacccagcagtgacgttt

SEQ ID NO: 288816 - DNA, 267 bp, Glycine max
  unsure (1)..(267): unsure at all n locations
gtcaacagagctccactgagcttgancagctctgaagctggagattcggttcccagttcagccttctttggcacaagcttgaagaaggttactgcctcaagggtccctaacgtcaagatttcttctggaagtttcaaaatcgttgcggcggagaaagagattgatgagcaacaacagacaaacaaggacagatggaaaggtcttgcctatgatatttcagatgaccagcaagacatcacaagaggaaagggtatggttgattccctc

SEQ ID NO: 288817 - DNA, 269 bp, Glycine max
  unsure (1)..(269): unsure at all n locations
gagggacgcagacggtaaatcaaggtgttttggctttgtcaattttgaaaacccagatgatgctgccaaagctgtngaaggacttaatgggaagaaagttgatgataaggagtggtatgttgggaaagcccaganaaaatctgagcgtggaacaagaactgaaaggacggtttnagcagagtataaaggaatctgctgacaaatatcaaggtgtgaacctgtatctcaagaacttggatgatactatcagtgatgaaaaacttaaggna

SEQ ID NO: 288818 - DNA, 268 bp, Glycine max
cataatcaaatcaaccatggctacccttattgctcccatcaccttttcacctggtttagatgcagaagctcttagaaaagctttccaaggatgggggaccgatgagaaaaccgttattgcaatactgggtcatagaaatgttcatcagaggcaacaaatcagaaaggtttatgaggaaatttaccaagaggacctcattaaacgcctggagtctgagctctctggtgactttgagagagctgtgtaccgttggatgctggaacctgca

SEQ ID NO: 288819 - DNA, 265 bp, Glycine max
  unsure (1)..(265): unsure at all n locations
tcgagtttcccggttgcntctgtgcatcgtatagggattttggacattaggattcttaacnccgataggcatgctgggaacttgttggttaggaaacttgatggcattgggagttttggtcaggtggagttgattcccattgatcatgggctctgcctgcctgaaactttggaggatccatattttgaatggattcattggccacaggcttccattccgttctcagaggatgagcttgcctacattgaagatctgaccttatcgg

SEQ ID NO: 288820 - DNA, 312 bp, Glycine max
  unsure (1)..(312): unsure at all n locations
cagccaagggactggagaggtggaagagctgcttcatttaacatcattcctagcagcactggagctgccaaggctgttgggaaagtcctccctgctttgaatggaaaattgactggtatggcattccgtgttcccaccgtggatgtctctgttgttgacctcacagtgaggctggagaaanaagcttcctacgatgaaattaaaaatgctatcaaggaggaatcagagggcaagttgaagggaattcttggttacatgaagatgatgtggtctccatgactttatcggcgatanagatcaagtattttgatg

SEQ ID NO: 288821 - DNA, 292 bp, Glycine max
ggaaaaaaaaaaccctagccaaaccaaccatcatggccacctctgctattcagcaatcagcattcactggtcaaactgctctgaagcagctcaatgagttcgtccgcaagaccggtggcgccggcaaaggtcgcactaacatgcgccgcaccgtcaagagtgctcctcagagcatttggtatggccctgaccgtcccaagtacttgggtccattctcggagcagattccatcatacctgaccggagaattccctggtgactacggatgggacatgctggattatcagctgac

SEQ ID NO: 288822 - DNA, 309 bp, Glycine max
  unsure (1)..(309): unsure at all n locations
ttgatcgagataactagaaacagtgtgatgaaaatgaaggtccttgtnttcttcgttgctacnattttngtagcatggcaatgccatgcgtacgatatgttccctctccgaatgaacactggctatggtgcccgtactccggaggtgaaatgcgcaagttggaggcttgctgtggaagcacacnacatctttggctttgagaccattcctgaagagtgcgttgaagcaacaaaggaatacatccatggcgaacaatatagatcagactccaaaacagttaaccaacaagcttattttatgccagagact

SEQ ID NO: 288823 - DNA, 309 bp, Glycine max
  unsure (1)..(309): unsure at all n locations
gaagaaacttaatcgatcatcacttcacttcactaatacatcatggcagacgagacccagaacaagtatgagagctctgaggttgaggtccaggatcgtggtgtttttgactttctcggtaagaaaaaggatgaagaagacaagcctcatcctcaggaggaggtcatcgccaccgagtttcaaaaagtcactgtctcagaccaaggngagaacaagcacagcctcttagaaaagcttcaccgatctgacagcagctctagctcttcaagtgaggaggaaggagaagatggagagaaangaagaagaaga

SEQ ID NO: 288824 - DNA, 308 bp, Glycine max
aaccaattcctcatcccccagaacgcggcacgtgcggtgctgaggctgcggccattggtgtgggactccaaattagcacactacgcgcaatggtatgccaaccagaggcgcaacgattgtgccctagagcactccaacggaccttacggtgagaacattttctggggcagtggcacggggtggaagccagcacaagctgttagtgcatgggttgaagagcgccaatggtacaattattggcacaattcttgtgccaatggacagatgtgtggacattacactcagattgtgtggagcaccaccagaaa

SEQ ID NO: 288825 - DNA, 309 bp, Glycine max
tgaagctgaactaactcgtttaggaaagcctgtagcagctgatgctgggggaaagttgtatgcaatcatggaaatatgccgctcatttgatcaaatatttaaagaccatcttgatggcgtgcggcctggaggtgataaaatttataatgtctttgacaatcagctccccgctgctttaaaaaggttgcagtttgataagcagctttcaatggaaaatataaggaaacttattactgaagctgatgggtatcagcctcatcttatagctccagaacaaggatatcgtcgtctaattgaatcttctctaat

SEQ ID NO: 288826 - DNA, 308 bp, Glycine max
gcctcgggctctcagtagctaaagtggcaggtggtggagagcctgtacggacaaccttaacgggggtgcaagttggggtagacgttacaggatccgagaaggtctggaggacgtttcaagctattggtgacattgccttcgcttatgcttattctaacgtgctcatcgagatacaggataccctgaaatcgagccctccagagaacaaggtcatgaaaagagcaagtttgattggcatcttgactacaaccttgttctatgtgctatgtggctgcctaggttatgcagcatttggaaacgatgcacca

SEQ ID NO: 288827 - DNA, 309 bp, Glycine max
acaagggtcacgttgtcaccaagaaggagttgcctccacgcccttcagatcgtaaggggaaaacaagcaagcgagtgcactttgtgaggaacctcattcgagaggttgccggctttgcaccttatgaaaagcgaataactgagttgctcaaggttggaaaagataagagggcactgaaagttgccaagagaaagcttggaacccataagcgcgcaaagaagaagagagaggagatgtccaatgttctccggaagatgagggctggtggagctggagacaagaagaaataagtcttgtttactttttcta

SEQ ID NO: 288828 - DNA, 307 bp, Glycine max
aatgctgttctttcaatgtggagatattttgttggagatctcgtctttgaagtttctaagatgacttctccctacattaaatgtacagtctctttcttcatagcatttggaaatttggctgatgacaccatcaattttgaggcctttccccacaagctggtgcactttggagaaattcaggaaaaagttgtattgaaattttcacaagaggaatttcttacagcttggtcaactcaggtgcgtcctgcaacaactctgttggctgatgggtgcccatatttgtatgctatggtgcatgatagttcag

SEQ ID NO: 288829 - DNA, 307 bp, Glycine max
  unsure (1)..(307): unsure at all n locations
cgccgacagcttcattcaccatgggctgagcaaaccgagaaggcttttttgaaacaaccaaaagtgtttctcagctcgaagaaaactgggaagggaaagagacccggaaagggtgggaaccgcttttggaaatccattgggcttggatttaagactcccagggaagccatcgaaggaacctacattgacaagaagtgccccttcactggcaatgtttccatccgtggccgtatcttggctggaacatgtcncagtgctaagatgaacaggatattattgttaggaggattatctccattttatcaag

SEQ ID NO: 288830 - DNA, 305 bp, Glycine max
  unsure (1)..(305): unsure at all n locations
catacagatacttggtgttgggtgaagcatgctgccacctaggcctaatggaggatgcaatggttcttcttcaaacggggaaacgcattgcaagcgccgcattccggcgcgagagtgtgtgctggtcggaagacagcttttgtgttaccaatatacccttctccggcgattccacaaacgcgccaaccnaaactccgccgcgaacccttctcgcagactccgagagcgtggcccaactcctcggccacataaagttcctcctccgccgccgcgccgctgcatcgccgccctcgacgctggactct

SEQ ID NO: 288831 - DNA, 305 bp, Glycine max
tcaccactctgcaaaaccctaatcccacctagatataaaaactaaacaaaacggtgccgccattcctcactctgcagcagcacctttaaacgccgaagttcatccaatctccgaaggccttcaccggattgcaaccatgtcgaggagaaaggttagagagccaaaggaggaaaacgtgactctgggcccagctgttagagatggtgaacatgtttttggagtcgctcgcatctttgcctccttcaatgacaccttcattcatgtcactgatctgtctgggagggaaacacttgtccgcatcactg

SEQ ID NO: 288832 - DNA, 303 bp, Glycine max
  unsure (1)..(303): unsure at all n locations
gctaaccagtgcccaaccattgaaggtggagtggactcattcgccttcaagccagggaaatanaacgcccagaagttgtgcctggaancaacttccttcacggtgaaggcagagggcgtggccacnaacggnccacccgaattccagaacaccaagctcatgactcgtctcacctacaccctggacgagattgagggtcccttcgaggttacatccgatggaaccgtgaaattcgaggagagagacggaattgatatgctgctgtcactgttcagcttcccgggggagagcgtgtgccattct

SEQ ID NO: 288833 - DNA, 302 bp, Glycine max
  unsure (1)..(302): unsure at all n locations
caccatcaattttgaggcctttccccacaagctggtgcantttggagaaattcaggaaaaagttgtattgaaattttcacaagaggaatttcttacagcttggtcaactcaggtgcgtcctgcaacaactctgttggctgatgggtgcccatatttgtatgctatggtgcatgatagttcagtgtctacaataccaggtgattttgtcattggngtcaagttgacaaccataaacaatatgtgtgcatatgggctcaatcctggtatttcaggttctcgtcttttgggcaccattcctcagt

SEQ ID NO: 288834 - DNA, 299 bp, Glycine max
  unsure (1)..(299): unsure at all n locations
acaggagtcgcctcgtgtttccgtttccgtttcaatttcctctcacaggctttaancttancagctcnagataaganatggancggatnaaaggcccatngagtcnggaggaggacgaggctctgcagaagctngtggagaaagcgggcccagganctggtctctgatcagcaagtccatcccgggccggtccggcaagtcctgcaggctccggtggtgcaaccagctgtccccccaggtggagcacngggccttcacggcgaagaggacgacaccataatccgggcccatgcncgttc

SEQ ID NO: 288835 - DNA, 305 bp, Glycine max
  unsure (1)..(305): unsure at all n locations
cnnagaccctcacatctctgaatnggcgtcactgcatatgggtttgatttggtccgtggaacccatactcttgatttgatcaagggtggatttcccagtggaaaatacctctttgctggagtggttgatggaaggnacatctgggccaatgaccttgctgcttctctcactacattgcagggtcttgagggcattgtgggcaaagataagcttgttgtgtccacctcctcctcccttcttcacactgctgttgatcttgttaacgagaccaagttggatgacgagatcaagtcatggctagcatt

SEQ ID NO: 288836 - DNA, 279 bp, Glycine max
  unsure (1)..(279): unsure at all n locations
tttttatttatcagtcaccgaaacaactatggatacaatcaagtccttcaagggctacgagcaaagttgacgagttggagcagcaagccnatcngaagaagacncgtaagcgcctcatantaatnacagnctcttnaatcgtnctaattgcggtgatcatcgccgctatcgcangggttgtcntacacaagcggaacacctcatcatctccctcatccgactcgcccccgcaaactgattaaccccgggnggtcactcaaagnggttgcgacgtgatca

SEQ ID NO: 288837 - DNA, 301 bp, Glycine max
  unsure (1)..(301): unsure at all n locations
cctcaagccaccgtaccgtgttgcctctctgcaatctacagccaaaatgcctttcaagaggtacgttgagatcgggagggttgcccaaatcaactacggcaaggaatatggcaggctcgtcgtcattgtcgacgtcattgatcagaacagagctcttgncgatgcccctgatatggtgaggtcccaagtcaatttcaaaaggctttccctaaccgatattaagattgacattaagagggtccctaagaagaaagatcttgtcaaagccatggaggatgctgatgttaagaccaagtgggag

SEQ ID NO: 288838 - DNA, 299 bp, Glycine max
cattcattcatctatggctacccttattgctcccagcaaccactctccccaagaagacgctgaggctctcagaaaggcttttgaaggatgggggactgatgagaaaactgtcatagtaatattgggtcatagaactgtttatcagaggcagcaaatcagaagagtctatgaggaaattttccaggaggatcttgtgaaacgcctagagtctgagatcaaaggagactttgagaaagccgtgtaccgatggatactagaacctgcagatcgtgatgctgttttggccatgttgccatcaa

SEQ ID NO: 288839 - DNA, 297 bp, Glycine max
gaaaagtgaaaatggacttggaagcagtgaagaggtacttagagaaaggaggagaaacagcatcggcggtggatgggttgcctccgaggtttctggaaccgttaataatgaacgctcttaaggtcgatctcatcgaaactggtcgcgttgtctgctccatgaagatacctccgcgtttactcaatgctgggaattcgttacacggtggcgccatcgctgctctggtcgacgtggtggggtccgctgcgattcccaccgttggatattcggctcccaatactggggtttctgttgaga

SEQ ID NO: 288840 - DNA, 298 bp, Glycine max
  unsure (1)..(298): unsure at all n locations
gcagtttcaatgggcagcttcagcttcacttgaagaaaactttgtccaatgtctcagcttctattcagacaaagcagctccattttatgcatcaatttacactccacaaaatgcatcattcaacaagatccttgaatcctctgcacagaacctaaggtatttggtgccctcagcgcataaacccgagcncatattcacaccctcgaccgattcacatgtccaagtggcagtgacttgctcaaagaaacttggaattcatctgagaattcgtagcggtggccatgatatgaaggatctc

SEQ ID NO: 288841 - DNA, 293 bp, Glycine max
gtgagtaatggtgctatgaatgggaacttgtgtatcacgggaacgttgtctcctgagaaagttgctgggaagatcgtgttgtgtgaccgtgggttgaccgctagggttcagaaaggctcggtggtgaaatccgccggagcgttggggatggtgctgtccaacaccgccgctaacggcgaggagctagtggcggatgctcatttattaccggccaccgcagttgggcagaaagccggtgacgctattaagaagtatttggtttccgatgcgaaaccgacggtgaagattttttt

SEQ ID NO: 288842 - DNA, 296 bp, Glycine max
gtcgaagatgaagaaggatgtggttgtcggggttaaggatactagagaggttgacaatgatttcttcttggtcgtcgtcaaaatcgctgatcatcagggtcctctttcatcatcatttcccattgagaaccggaacactcaagtgactatgaaggctttgaagaatcatctggaacggtcaaaaaatcttccatttgtgaagcgaatttctgattttcatcttcttctcgtattagcaagggttttagacctgaatgctgatgttcctgcattgacggaatgtgtgcagacacaga

SEQ ID NO: 288843 - DNA, 297 bp, Glycine max
  unsure (1)..(297): unsure at all n locations
cactgactctgtctctctcgaacacaatgtccaactccaccaccggcaccaccgcggccttaccaccgaagcccacctgggtcctcccataccgaaccgagaatctccgcgaggtctacaccctaagccgaaagctcgnccagggccaattcggcacaaccttcctctgcacgcacaacgccacgggacgcaccttcgcctgcaagtcaatcccgaagcggaagtgctctgcaaggaggactacgacgacgtatggagggagattcagataatgcaccacctctccgagcaccccaa

SEQ ID NO: 288844 - DNA, 295 bp, Glycine max
ggctgaggaagaaggcattgaacttccctactcgtgcagggctggttcttgcgtttcatgtgttgggaaaattgtgaaaggtgacgtggaccagtcagatggtagcttccttgatgatgaacaaatagaaagtggatgggttctcacctgtgttgctctacctaggtcagacgttgtcattgagacacacaaggatggagagatcgaatgatcgatatatatcataatgtaatcttgtccattgctcttctaatgccatctatctatgtcgtgttttgatttgttagagtgatgg

SEQ ID NO: 288845 - DNA, 299 bp, Glycine max
  unsure (1)..(299): unsure at all n locations
attgatgncagattgaganaaagaatagatccncantacaatgaggttcaggcgcagatggagancnaatttgttncaaattgtcncttgatgatgnngaaactcctaaaggttccatgttggatcttaanatttcncaatctancaattgcacttcccaagaacacagttggaggaaccantctgcgncagtgaggnattggcaaattttttgacagagggcaattttagagcaagtgttgatttgcagcgcatcatcgtantaaaggaatgattaaaatggtggctacagttggtat

SEQ ID NO: 288846 - DNA, 293 bp, Glycine max
  unsure (1)..(293): unsure at all n locations
agccttactttggttctaaattgaaaagctttctagctggtcataatatcaccattactgatggtattgacaaaactagtgcaactttgcaatttagaaagttagcagattgtgattttctcaagagaaactttaagcagatgtctaatgttttgtgggtggctcctgaggacaaggcnngtttgtggtcacaacttcattatgtttcgtgtaataatctggaaatgcaagaagcttatcttgtcaatctcgtaaatgtgttacgagaattgtatttgcacagtccagaggaa

SEQ ID NO: 288847 - DNA, 293 bp, Glycine max
cttcctactccaaccgcacttctgctccgcaattatcatgggcaaggtcaagatcggaatcaacggatttggaagaattggccgtttggtagccagagtggctctgcagagagacgatgttgaactcgttgccgttaacgaccctttcatcaccaccgattacatgacatacatgtttaaatacgacagtgttcatggacactggaagcatcacgatgtcaccgttaaggacgagaagacccttctcttcggtgacaagccagtcatatttttggacacagaaaccctgaaga

SEQ ID NO: 288848 - DNA, 293 bp, Glycine max
  unsure (1)..(293): unsure at all n locations
tccccgaagaaccaattctccaatttgcatctgcattgacaattgaaatcaaccgnggatttgctgccttgcgtgctattggttctggaagagatttgaagacatttctcattgttattgttgggacgtggattatatcaattgtggggagctggtgcaatttcttgaccttgttctacattgcttttgttttgttgcatacggttcctgtcttgtatgacaagtatgaggataagatagaccctctagcagagaaggcactcgttgagttcaagaagcagtatgctgtgttt

SEQ ID NO: 288849 - DNA, 281 bp, Glycine max
ggagaattgaggggcgtaaaggctctattacacaaattccaattctaaccatgcccaatgatgatattacgcacccaactcctgatctaacaggatatatcactgaggggcagatatacatcgacaggcagctgtataatagacagatatacccaccaatcaacgtcctcccatcactatctcggttgatgaagagtgctattggtgagggaatgactagaagggatcattctgatgtgtccaaccagctctatgcaaattatgctattggaaaggatgtc

SEQ ID NO: 288850 - DNA, 279 bp, Glycine max
  unsure (1)..(279): unsure at all n locations
gaggagctggtgcaaagaatgctattctcatgaacatgccaaatgctgttctttcaatgtggagatattttgttggagatctcgtctttgaagtttctaagatgacttctccctacattaaatgtacagtctcttncttcatagcatttggaaatttggctgatgacaccatcaattttgaggcctttccccacaagctggtgcatcnttggagaaattcaggaaaaagttgtattgaaattttcacaagaggaatttcttacagcttggtcaactcag

SEQ ID NO: 288851 - DNA, 276 bp, Glycine max
  unsure (1)..(276): unsure at all n locations
ctttttttcttcttcttgaaatggctctccaggctgcttctcctgttcctgcttctttctcggttcttaaagagggaaagagtggtgtgtctctcaaggactccaccttgttcggtctttcattttcagaacctatcaaagctaacttcagctcttctgcattgaggtgcaagagggaattcgancaaaagctctgtgctgtgagggccgaaacagtggctacagcctctccagcagttaccaagtctacaccagaagggaagnaaacattgagga

SEQ ID NO: 288852 - DNA, 270 bp, Glycine max
  unsure (1)..(270): unsure at all n locations
gttgtaactcgttcttcttcttttgttgttctgtgtttgtgtttgttttttctctcacctgaaaatgtcttgctgcggtggtaactgtggttgcggaagctcctgcaagtgcggcaacggctgcgccggctgcaagatgtacccngacttgagctacactgagtcaaccaccaccgagaccttggtcatgggagtggcacctgttaaggctcaatttgagggtgctgaaatgggtgtgcccgctgagaacgatggctgcaaatgtggacc

SEQ ID NO: 288853 - DNA, 281 bp, Glycine max
  unsure (1)..(281): unsure at all n locations
atttgggagttaggttctgcacgctctgcttccagcgagtgttctttcttcgtttcaacaccttaatttgcacacgctgctttcttcngcttgagaaatggnacaagnnacctttctattcacatctgaatctgtaaacgagggtcaccccgacaanctgtgcgaccagatctctgatgcagtgctcgatgcgtgccttgaacaggacnctgacagcaaggttgcctgtgagacatgcaccaagaccaacatggtcatggtctttgganagatcacaacca

SEQ ID NO: 288854 - DNA, 278 bp, Glycine max
gacgagatctccaacaaaatatctccacattgaaagaacagtctctttcttcatagcatttggaaatttggctgatgacaccatcaattttgaggcctttccccacaagctggtgcactttggagaaattcaggaaaaagttgtattgaaattttcacaagaggaatttcttacagcttggtcaactcaggtgcgtcctgcaacaactctgttggctgatgggtgcccatatttgtatgctatggtgcatgatagttcagtgtctacaataccaggtg

SEQ ID NO: 288855 - DNA, 275 bp, Glycine max
  unsure (1)..(275): unsure at all n locations
gcaaattttttgacagagggcaattttagagcaagtgttgatttgcagcgcactcatcgtattaaaggaatgattaanatggtggctacagttggtattcctgagaatacaggtatagcattggcctgtgctatgaatagttcttttagggggcgcgccagttctgatatttacaccatctgctctcaagactgtgaattatggaatcctgcttgcacaaaagcaatggctatgtcatttaatccaaacccgtgttctgatgcatggagtttgga

SEQ ID NO: 288856 - DNA, 255 bp, Glycine max
  unsure (1)..(255): unsure at all n locations
cagcagtcaaaaggagtgattacggcctcattggtacangtgtttttaacaaacagcnacagtacagagcattttgatgcatgtaagtggacaaaatcagaaccacnctcctgggaattgatcttcccaatagaggtatgtggtcccaataatggttttgaaatgtggagttctgagtgggcaaatcaaacttcatggcatttgagtttccttattgacaatcccaaacaatctacagtttttgatattctcttg

SEQ ID NO: 288857 - DNA, 274 bp, Glycine max
  unsure (1)..(274): unsure at all n locations
gtgagctataagctagtttatcgtgaggagaatatgaagttgtttgtnttctttgttgctgcagtagttttggtagcatggccatgccatggcgcaggctaccaaaggttccctctccgaatganaactggctatggtgagcgttcttcggaggtaaaatgcgcaagttttaggcttgctgtggaagcacacaacatccgagcntttaaaaccattcctgnagagtgcgttgaaccaacaaaggactacattaatggcgaacaatttagatcag

SEQ ID NO: 288858 - DNA, 274 bp, Glycine max
atttgataaaaacagtcaggaggaccagactatgagattcctttgggaaggagagacgggctaacctttgccacaagacaagtgacattggacaaccttccaccaccttcaagcaacgcctcaaccatcctaagctccctcgccaccaaaaacctcgacccaaccgatgtcgtagccctctcaggtggccacaccataggcatcagccactgcggttccttcaccaacaggctctaccccacccaagaccccgtcatggacaagaccttcggca

SEQ ID NO: 288859 - DNA, 277 bp, Glycine max
  unsure (1)..(277): unsure at all n locations
caagaacacagttggaggaaccattctgcgtagtgatctattggcaaattttttgacagagggcaattttagagcaagtgttgatttgcagcgcactcatcgtattaaaggaatgattaanatggtggctacagttggtattcctgagaatacaggtatagcattggcctgtgctatgaatagttcttttagggggcgcgccagttctgatatttacaccatctgctctcaagactgtgaattatggaatcctgcttgcacaaaagcaatggctatg

SEQ ID NO: 288860 - DNA, 275 bp, Glycine max
  unsure (1)..(275): unsure at all n locations
ctttcactctcttcttctcactgatccgcattgccgttcaaagnggtcttatttgaaaaacacttgggcgttggtgcaaatgtttgcttcgttaattttctctggagacaacaggctcactgagaaaacaatttttacttgcagagatttggacatcttggttgtttattatacaatagcaactcaactttagaaaatttctaccgcattacattaggtggcatctgtataccttgttgatctacattctcccatcttttctcactgctgaaatt

SEQ ID NO: 288861 - DNA, 272 bp, Glycine max
  unsure (1)..(272): unsure at all n locations
ggaaaggatatgatcaagtgtatctctttgaataattctatcccanccgttccaccaaaagtaggtttgtaattgtagatgagattatctcgcactttttgagcatcaggtgtgtttgtggatttcccagcttcacttacaaacctacttttggtggaacggctgggaaaggatatgatcaagtgtatctctttgaataattctatctgtaggaggngtccttgaatttgattttatgcacaataaattatgaactggggatgtagtttgnc

SEQ ID NO: 288862 - DNA, 200 bp, Glycine max
  unsure (1)..(200): unsure at all n locations
tgattgaagaagatgccgatcagaaacatcgccatcggaaggcctgaagaggctactcaccccgacacgttgaaggcggggttggctgagttcatctccaccttgatcttcgtgttcgccggttcaggttccggcatcncctacaacaagctcaccgacaacggcgccgcnantcccgccggcctcatctccgcttccat

SEQ ID NO: 288863 - DNA, 272 bp, Glycine max
  unsure (1)..(272): unsure at all n locations
tgcaaaggattctacccgccgctccgatgggaattgcgcttcaaggcgtctcgtagggctaatccgcctncacgagggtcaccaacggcacgtgcctttggggggccgaggccccctactgctggtcggcaaacggacggcgggcgcacgcgtcgcttctagcccggattctgacttagaggcgttcagtcataatccaacgcacggtagcttcgcgccactggcntttcaaccaagcgcgatgaccaattgtgcgaatcaacggttcctct

SEQ ID NO: 288864 - DNA, 272 bp, Glycine max
  unsure (1)..(272): unsure at all n locations
ggaggaacttcaaaaagaccccgagctccaagcttggtggaaagaacttgtagaggtgggtcatggggatttgaaggataagccatggtggcaaaagatgcaaactcgtgaagagttggttgangcttccgctaccctcatatggattgcttcagctcttcatgctgctgttaactttggacagtatccatatggaggtttaatcctgaataggccaactattagcaggagattcatgcctgagaaagggtctcctgaatatgatgcgttgg

SEQ ID NO: 288865 - DNA, 276 bp, Glycine max
gcttggtgtggaagcacacaacgtcattgactggagaaccattcctcaagattgcgagggatatataggaaactacatgcttggccaccaatatagatcagactccaaaacagtttgccgtgaagcttatttttatgctaaaaccatcaacatcactgccaaaaccacatgggtgtttgatgtagatgagactacgctctctaatctcccttactttgctgatcatggatttggggtggagctatataatgcaacagcgtttaatgaatgggttga

SEQ ID NO: 288866 - DNA, 208 bp, Glycine max
ccttcttcagaatcatcaacaggcttctccgaaaccatttgtgtgaccggcgctggtggcttcatcgcctcttggatggtcaaactcctcttggagaaaggctacactgtccgaggaaccctcagaaacccagatgatcccaagaacgggcacttaaaagagtttgaaggagcttcccagagactaactctgcataaggttgacctcc

SEQ ID NO: 288867 - DNA, 274 bp, Glycine max
gggccgtgaagctgggcccatcagccccagaagtgggaagggtgagcatgaggaagaccgtcaccaagcaggtctcctcaggaagcccatggtacggcccagaccgagtcaagtacttgggcccattctctggcgagcccccgtcctacctaaccggtgagttcccaggcgactacggctgggacactgctgggcaacccgcagacccagaaaccttcgccaagaaccgtgaactcgaagtgatccactccaggtgggccatgctcggagcctt

SEQ ID NO: 288868 - DNA, 272 bp, Glycine max
  unsure (1)..(272): unsure at all n locations
acccttttgatttgtgaaaggnaagcaaacatgcttgatcaggtccaacaccctacaatcatggacaaggttgctggccagctccatctccgttctggtgtttctggtattaggagttatgaaggagcctactgccaccccacaatgtaccaaagaccctcttttgggaattactcgaatgctgcattgcagtatcctgtgatgccctcatgcaaagctactatggatttgtctgctgctgcaacaactgcctcccccgtctttgttgctgc

SEQ ID NO: 288869 - DNA, 270 bp, Glycine max
atttaagggctatgtcttcaaaattactggaggttgtgacaaacaaggattcccgatgaaacagggagtgcttactcctggtcgtgttcgacttttgcttcacaggggaactccttgcttccgtggatatggaaggcgtaatggagaacgtaggagaaagtctgttcgtgggtgcattgtcagcccagacctctctgttttgaacttggtaattgtgaagaagggtgagaatgatttaccaggattgactgatgctgagaagccaaggat

SEQ ID NO: 288870 - DNA, 272 bp, Glycine max
  unsure (1)..(272): unsure at all n locations
ggagattacagcattggcaccaagtagcatgaaaattaaggttgtagcaccaccagagaggaagtacagtgtctggattggaggctccatcttggcttccctcagcaccttccaacagatgtggantgcgaaggcagagtatgatgaatctggaccatcaatcgtacacaggaaatgcttctaagttataatcatggagtgtgaaagctggaccagggaaattactattnanngggctactacaaaaataccatctagtggttgaggaactt

SEQ ID NO: 288871 - DNA, 269 bp, Glycine max
aaccggcatcagatccgatccgaaatgtacggattcgaagctctcaccttcaacatccacggcggcttcctagaggccatcgtccgcggccaccgcgccggcctcctcaccaccgccgattacaacaacctctgccaatgcgaaaccctcgacgacatcaagatgcacctctccgccaccgagtacggtccttacctccaaaacgagccttctccattgcataccacaacgattgtggagaagtgtactcttaagctggttgatgatta

SEQ ID NO: 288872 - DNA, 269 bp, Glycine max
  unsure (1)..(269): unsure at all n locations
ccaaactctgcatcggaagaaaccctagccactctcccggcgtcacgatgcagatcttcgtgaaanccctaacgggtaaaacgatcacgttggaggtggagtcttcggacaccatcgacaacgtgaaggccaagatccaggacaaggaaggcatccctccggaccagcagcgcctcatcttcgccgggaagcagctggaggacggccgcaccctcgccgactacaacatccagaaggagtccacgcttcacctcgtcctccgcctccgt

SEQ ID NO: 288873 - DNA, 267 bp, Glycine max
  unsure (1)..(267): unsure at all n locations
gttgaaggtcgtgggaagagccggcgtggggattgacaacgtggatctgcaagctgccactgaatttggttgcctggtcgtcaatgctcccactgccaacactattgctgctgccgagcatcggatcgctctccttgctncccatggcccgcaacgttgcccaggctgacgcctccaccaaagctggaaaatggcagagaagcaagtatgtgggagtttccatggttggaaagacattggcggtgatgggttttggaaaagttggat

SEQ ID NO: 288874 - DNA, 270 bp, Glycine max
  unsure (1)..(270): unsure at all n locations
aaacgcattgtgtttctctctttccgcggcgtagatctnancagtttgggaaaccctaactgctctgcaccacactctttgcttttnttcctctccgatcaacgaacctctttcgtcgccctaagtcatggcaggacttgcacccgagggatcacagnttgatgctcgtcaatatgataccaagatgaatgagttgcttacatctgatggacaggattttttcacatcttatgatgaggtttatgacagttttgatgctatgggcttgca

SEQ ID NO: 288875 - DNA, 272 bp, Glycine max
ggtaagtagttcttaagaaattaacaatcactttccattaagtgctgtttggtttgagggatgattaattgcgatggagtttttggattggtgatcgaaggtgttccttggacggaggaagagcataggttgttcctgttagggttacacaaagtcggaaaaggagattggagaggaatttctcgaaacttcgtgaaaactcgcacgcctactcaggtcgctagtcacgctcagaagtacttcctccgccgccacaaccagaaccgccgtcg

SEQ ID NO: 288876 - DNA, 268 bp, Glycine max
  unsure (1)..(268): unsure at all n locations
gaaaatggctcttcttggatttcttccgggacttttctacatgatctcacatgtcaaggggtatggttttggaggttggaccaatgcacatgccaccttctatggagggggtgatgcttcccggacaatgggtggggcttgtggttatggaaatctgtatagccaaggttatggaactgatacaacagcactgagcactgcactgttcaacaatggcttgagctgtggtgcatnctttcaaattaaatgtgcgaatgacccacaatgg

SEQ ID NO: 288877 - DNA, 272 bp, Glycine max
  unsure (1)..(272): unsure at all n locations
actatatggaaagaattcctcttgccacatctgagggttttcctcatgtgctttcacgcaaaaatggtgaaaaaggcaaaaggagatttgtttctggggatggtgaagagatgacattgattaccgggaaccagtgttgaagaggcctacaacaagctaatagttgaacttgagagangtgttcctacattggttggcattgaatgtcccaaggatgagaaacttcctcgtcgcaaaatttttgacaaacctaagacgcgctgcttcactat

SEQ ID NO: 288878 - DNA, 279 bp, Glycine max
  unsure (1)..(279): unsure at all n locations
cactacgtacacgcacattctcctcaaagacaacaatggcaccaacagccaagacncctgacttacctggcccaggagaaaaccctagaatcgagcttcgttcgggacgaggaggagcgtcccaaggttgcctacaacgaattcagcgacgagatcccagtgatttctcttgccggaatcgacgaggtggatggacgcagangagagatttntganaagatctggaggcttgcgagantnggggtatattccaggttgttgatcacggtgtggatccac

SEQ ID NO: 288879 - DNA, 279 bp, Glycine max
  unsure (1)..(279): unsure at all n locations
gtctctgtgtttgcggctgaggattccgaacgagcgaccttcttcgtttctcgcaaagtttaagtcatcatgggtaaggaaaagactcacatcaacattgtcgtcattggacatgtcgactctgggaagtcaactaccactggtcattgatctacaagcttggaggtattgacnngcgtgtgattgagaggttcgagaaggaggctgctgagatgaacaagaggtcattcaagtatgcctgggtgcttgacaagctcaaggctgagcgcgaaagangaa

SEQ ID NO: 288880 - DNA, 272 bp, Glycine max
caagcagttaacgttgttattaattttgattttcccaagaacgcagagacttatttgcacagggttggtcgttcagggaggtttgggcacctgggtttagcagtgaacttgattacctatgaggatcgctttaatttatataggattgaacaagaacttggaactgaaataaagcagattcccccacaaattgatcaggcaatttattgccggtgattggctgtaaataccatggttgtgtttaccattgtggctaatagcagtggttagtg

SEQ ID NO: 288881 - DNA, 250 bp, Glycine max
  unsure (1)..(250): unsure at all n locations
cagcagtcaaaaggagtgattgangcctcattggtacaantgtttttaacaaacagcaacagtacagagcattttgatgcatgtaagtggacaaaatcagaaccacantcctgggaattgatctncccaatagaggtatgtggtcccaataatggttttgaaatgtggagttctgagtgggcaaatcaaacttcatggcatttgagtntccttattgacaatcccaaacaatctacagtttttgatattc

SEQ ID NO: 288882 - DNA, 270 bp, Glycine max
  unsure (1)..(270): unsure at all n locations
atggctactgaacatgaagacgatttcaaggatgagaagaatccccgccccctcgacgaggatgacatcgcccttctcaaaacctatggtttggggccttattccacaagcataaaaaaactcgagaangaaatcaaagactggcaaaaaaggtcaatgatttatgtggtatcaaggagtctgatactggtttagctgcaccaagccagtgggatcttgtntctgataaacaaatgatgcaggaggagcagcctcttcaggtagcaaggt

SEQ ID NO: 288883 - DNA, 274 bp, Glycine max
ggaattcatatgtctggaaccttgaaggatcagaatgggtgcctactcttgttatccttagactaaaccgtgctgctctttgtgttcaatggagtccaaaagaaaacaaatttgcagtgggaagtggagccaaaactgtttgtatatgctactatgagcaggaaaacaactggtgggtcagcaaacttatcaggaaaagacatgattcttccgtgacaagtgtttcttggcatcccgataatattcttcttgctacaacatccacagatgggaa

SEQ ID NO: 288884 - DNA, 268 bp, Glycine max
  unsure (1)..(268): unsure at all n locations
tcgagataactagaaacagtgtgatgaaaatgaaggtccttgttttcttcgttgctacaattttngtagcatggcaatgccatgcgtacgatatgttccctctccgaatgaacactggctatggtgcccgtactccggagtgaaatgcgcaagttggaggcttgctgtggaagcacacaacatctttggctttgagaccattcccgaagagtgcgttgaagcaacaaaggaatacatccatggcgaacaatatagatcagactccaaa

SEQ ID NO: 288885 - DNA, 269 bp, Glycine max
  unsure (1)..(269): unsure at all n locations
ggccgtgaagctgggcccatcagccccagaantgggaagggtgagcatgaggnagaccgtcaccangcaggtctcctgcaggnagcccatggtacggcccagaccgagtcaagtacttgggcncattctctggcgagccccgtcctacctanccggtgagttcccaggcgactacggctnggacactggtgggcttccgcagaccncagaaaccttcgccaagaaccgtgnaactcnaatgatccactccacgtngggnnatgctcgga

SEQ ID NO: 288886 - DNA, 268 bp, Glycine max
cggcgcggcacccacacacacagttcgtcggaatgggaagggtgattcgcgctcagcgtaagggtgctgggtcggtgttcaagtctcacactcaccaccgcaagggtccggcgaggttccgcagcctcgacttcggcgagcgcaacggctacctcaagggcgtcgtcaccgacatcatccacgaccccggtcgcggcgcccctctcgccaaggtggcattccgccaccccttccgctacaagaagcaaacggagctcttcgtcgccgc

SEQ ID NO: 288887 - DNA, 266 bp, Glycine max
  unsure (1)..(266): unsure at all n locations
ctgcgcttcatatcagaacccgaaaataaccacaagaatgagggnnatattgcacgtgcaaggtgggcaatgcgggaaccaaatcggttccaagttctgggaagtgatatgcgacgaacacggcatcgaccccaccggacagtacaccggcgacgaggcctccgatctccaactggagaggatcaacgtctactacaatgaggcctccggcggaaggtacgttccccgggccgtctcatggatctggagcccggcaccatggacag

SEQ ID NO: 288888 - DNA, 266 bp, Glycine max
  unsure (1)..(266): unsure at all n locations
tgcagatcncaatccatggctaccattgttagcancaaggcccgccagatctttganagttcgtggcaattccaaccgtcgangtggattngacatgctccgatggtncntttgctagagctgctgttctanntggtgntccactgggatttatgaggcccttgaattgagagatagaggatctgactaccttgnaaagggtgtatcaaaggctgttgacaatgtgaacaccattattggcccctgctttngttggcaaggancca

SEQ ID NO: 288889 - DNA, 266 bp, Glycine max
  unsure (1)..(266): unsure at all n locations
gctttatcgcttccttgttcggagaactggcagcaacttcaatgctgtnatacttaagagattgttcatgagcaaggttaacaaacccccattgtctttgtcaaggttgattaagtatacgaaggggaaggaagatnagattgcagtggtggtggggtctataaccgatgatattcgtgtttatgaagttccaccattgaaagttacagcactcaggtttacagagactgcccgtgcaagaattgagaaggcaggcggtgaatgct

SEQ ID NO: 288890 - DNA, 269 bp, Glycine max
  unsure (1)..(269): unsure at all n locations
gggccgngaagctgggcccatcagccccagaagtgggaagggtgagcatgaggaagaccgtcaccaagcaggtctcctcaggaagcccatggtacggcccagaccgagtcaagtacttgggcccantctctngcgagccccgtcctacctaaccggtgagttcccaggcgactacggctgggacactgctgggctttccgcagacccagaaaccttcgccaagaaccgtgaactcgaagtgatccactccaggtgggccatgctcggag

SEQ ID NO: 288891 - DNA, 273 bp, Glycine max
  unsure (1)..(273): unsure at all n locations
ttgatcgagataactagaaacagtgtgatgaaaatgaaggtccttgtnttcttcgttgctacaattttngtagcatggcaatgccatgcgtacgatatgttccctctccgaatgaacactggctatggtgcccgtactccggaggtgaaatgcgcaagttggaggcttgctgtggaagcacacaacntctttggctttgagaccattcctgaanagtgcgttgaagcaacaaaggatacatccatggngaacaatatagatcagactccaaaa

SEQ ID NO: 288892 - DNA, 266 bp, Glycine max
aaccatctcaaaatggaagttcagtacatgctcctcaaaatggggtacataatagacctcagacagttgttaatcaaactatgtctatcttacctatatctaccacaagtgctcctggagcagttcctggtcccacaactaatttaaatataggaatggattattggggcacaccaacttcgtccaccattcctgcattgcatggaaaggttccttctactgcagttgctggagggatgattgctgctggatcacgagatggtgtt

SEQ ID NO: 288893 - DNA, 266 bp, Glycine max
  unsure (1)..(266): unsure at all n locations
agctagtttatcgtgaggagaatatgaagttgtntgttttctttgttgctgcagtagttttggtagcatggccatgccatggcgcaggctaccaaaggttccctctccgaatgaaaactggctagccgtgagcgttcttcggaggtaaaatgcgcaagttttaggcttgctgtggaagcncacaacatccgagcctttaaaaccattccngaagagtgcgttgaaccaacaaaggactacattaatggcgaacaattagatcagat

SEQ ID NO: 288894 - DNA, 265 bp, Glycine max
ctaaaatatttgaacctagagcttggtatgatcttgacaaatgtcccaaattcaatggagagttcttacatgatataactcgtcagatattgaaagaaacacgactgaataaaacattgacgaacgtggtaataccaactttcgacgagaggaaaaccaagccagttatattctcaaactataagctcaagacggaaacttacttaaatgccaaactctcagatatatgcatcgggacttcggctgcaccgacttatctaccgcc

SEQ ID NO: 288895 - DNA, 263 bp, Glycine max
caggcaagccccactcaaccaccacacctctcctcgttcacgctacccctttctgctcttcttctacctttcaagttttaaaagtataaagatggcagagacattcctatttacctcagagtcggtgaacgagggacaccctgacaagctctgcgaccaaatctccgatgctgtcctcgacgcttgcctcgagcaggacccagacagcaaagttgcctgcgaaacatgcaccaaaaccaattggtcatggtcttcggagaaat

SEQ ID NO: 288896 - DNA, 235 bp, Glycine max
acctttagacgagaaggagacgagcgcggtgttcgagaagctgttcaaattcgtcggaaacaacctgaagaacatcgtggagaacccctcacacgaaggtcctgattcgaaccctggccgctactgcttccgcctccacaagaacaagatcttctacgccagcgagtccctcgtcaaacgcgccaccaacgtcgcgcgccccaacctcgtctccctcggcacctgcatcggcaaa

SEQ ID NO: 288897 - DNA, 273 bp, Glycine max
  unsure (1)..(273): unsure at all n locations
ggaaatttggctgatgacaccatcaattttgaggcctttccccacaagctggtgcagtttggagaaattcaggaaaaagttgtattgaaattttcacaagaggaatttcttacagcttggtcaactcaggtgcgtcctgcaacaactctgttggctgatgggtgcccatanttgtatgctatggtgcatgatagttcagtgtctacaataccaggtgattttgtcattggtgtcaagttgacaaccataaacaatatgtgtgcatatgggctc

SEQ ID NO: 288898 - DNA, 268 bp, Glycine max
  unsure (1)..(268): unsure at all n locations
gatgaatcggttggggcaggttaggcacccgaatttngcgccactgttggggtactgtgttgtggaggaggagaagctgttggtctacaagcacatgtcgaatgggacgctgtattcgttgttgcataggaacggtggtgatgcgttggattggttgatgaggtttaggattgggttgggtgcggcgagggggcttgcgtggctgcaccatggctgccaccctccgatcatacagcagaacatttgctccagtgtgattcttgttgac

SEQ ID NO: 288899 - DNA, 261 bp, Glycine max
  unsure (1)..(261): unsure at all n locations
accagatatattagctcctggttcattgatttgggctgcttggtctctaaatggaaccgatgagccaaattatgttggagaggggtttgcaatgatatctgggactagtatggctgcacnacatatagctggaatgctgctctgataaagcagaaacatccacattggagccctgctgccattaaatcagccttgatgacaacatcgaccactctagacagagcaggaaatcctattctagcacagctatattctgaaaca

SEQ ID NO: 288900 - DNA, 264 bp, Glycine max
  unsure (1)..(264): unsure at all n locations
agctacaaaaacatggaagccctgatatagtgatggcactggtcggtaataaagctgatcttcttgagaagcgggaagttgctgtccaggatggcactgactatgcagagaagaatggtatgtttttcatagagactctgcaaagacagcagataatataaatgaactgtttgaggaaattgccaaaagacngcctcgcccatcagttagttgatgtagccagatagcagttcagtaagggaagggatctgcattagctttgga

SEQ ID NO: 288901 - DNA, 263 bp, Glycine max
aaagactttctctttacaaattttgtaactttcaagactcagctaataaacatcaaaagatgtctctgattccaagtatttttggtggccgaaggagcaacgtgttcgatcctttctcccttgacgtgtgggacccttcaaggattttcattttcccacttctctttctgctgaaaattctgcatctgtgaacactcgtgtggattggaaagaaaccccagaagcacacgtgttcaaggctgatattccagggctgaagaagg

SEQ ID NO: 288902 - DNA, 262 bp, Glycine max
  unsure (1)..(262): unsure at all n locations
gagatatcaatatattatgataatggagggatacaatnagaaggttatgantgtggggatggtgntgggcatggccatgattgggatggccaatggccaatactcgttttgtcgcatgcccagcgatgggttggcgcatgcaagccgagtgtgagtggggactatcctgctgatccctccactgcttgttgcgcagccattgccaaggctgatcttaaatgcttctgccgcttcaaggattcgggccttctctctatgtatg

SEQ ID NO: 288903 - DNA, 269 bp, Glycine max
  unsure (1)..(269): unsure at all n locations
cacatagtagctattatactctcacgagtaattgcggaanctgctagaattttctaatactggcgaaagacgttgagcaggtcacagagcaaggtgaatactccgcgaaggactaccatgaccctcctccggcaccgttgatcgacccagatgagctcacaaagtggtccttgtacagagccgccatagctgagttcatagcaacactcctttttctttacatcaccgtgttgaccattattggctacaagagacagagtgacaccaaa

SEQ ID NO: 288904 - DNA, 288 bp, Glycine max
acacagcagcacttagcactgccttgttcaacaatggcttgagttgtggctcatgctaacaaatccaatgtggcaaatgacccacaatggtgcctccgtggcaccattgtagtcactgccactaatttctgcccccctggtggatggtgtgaccctcccaatcaccattttgatctttctcaacctgtgtttcagcaaattgcccaatacagagctggtattgtgcctgtagtttacagaagggtacggtgcatgagaagaggtggaatcaggttcaccatcaatggt

SEQ ID NO: 288905 - DNA, 286 bp, Glycine max
  unsure (1)..(286): unsure at all n locations
cttcccaagaacacagttggnggnaccattctgcgtagtgatctantggcaaattttttgacagagggcaattttagagcaagtgttgatttgcagcgcactcatcgtattaaaggaatgattaaaatggtggccacagttggtattcctgagaatacaggtatagcattggcctgtgctatgaatagttcttttagggggcgcgccagttctgatatttacaccatctgctctcaagactgtgaattatggaatcctgcttgcacaaaagcaatgactatgtcat

SEQ ID NO: 288906 - DNA, 281 bp, Glycine max
gtttttgtctggtggacagtctgaggttgaagctaccctcaatttgaatgccatgaaccaatctccaaaacccgtggcacgtgtcattctcgtatgccagagccctccaaaacactgccttgaagacatggggaggccgcccagagaacgtgaaggcagcacaagatgcactcgcattccgtgccaagtccaactcactcgctcagcttgggaagtacactggtgagggtgaatccgaggaagccaagaaggagttgttcgtcaaaagctactcctactaa

SEQ ID NO: 288907 - DNA, 279 bp, Glycine max
  unsure (1)..(279): unsure at all n locations
ggagangtaatcgagcttcagcaatggtgtacgtcaaggctcagaaatcaaaagcctacttcaagagatatcccgtcaagttcaagagaagaagagagggaaaaaccgattaccgtgccaggattcggttgattaatcaggacaagaacaaatataacactccgaaataccgatttgtggttcgctttagcaacaaggacattgttgcacaaataatatctgctagcattgccggcgatttagttcttgctacagcatattcacatgagctgccacgat

SEQ ID NO: 288908 - DNA, 259 bp, Glycine max
  unsure (1)..(259): unsure at all n locations
gngaatggctcccaagggtttaccctttctggctgtgtncatatgcgtttcagcactgaccactgagtccttctgttgcgggggaagggcaaaataatggccttgttatgaacttctacaaggaatcatgccctcaggctgaagacatcatcacagaacaagtcaagcttctctacaagcgccacaagaacactgctttctcctggctcaggaacatcttccatgactgtgctgttcagagttgtgatgcttcactgtt

SEQ ID NO: 288909 - DNA, 289 bp, Glycine max
  unsure (1)..(289): unsure at all n locations
agaaaccaaaaagcggagaataaaccaaacacaaacacaaaaacctcccaggaaaaacgacaactatgtccaantccgaacactccgattcggattgtcccacgttgccaaccgccaccaccccgacaacctcggagccgaagaaaagagggagaaaaccgattctcggacgcgagactccggtaaaccacgtggaggcagagagacaacgtagggagaagctcaatcatcgattctatgcgcttcgtgctgttgttccgaatgtttcgaggatggacaaggcttcgct

SEQ ID NO: 288910 - DNA, 288 bp, Glycine max
  unsure (1)..(288): unsure at all n locations
gngaagggccaggtggcaaatgtgtctttgcagggaaaaggcctctctgggaagctctcaccagntaatggcctggantcaaacacttgacaggactctacttgcactacaactctttgtntggagagattccgagggaagttnctaacttgactgagcttagtgacttgtacttgaatgtgaatcacttgtctggtgaaatcccacctgagattggcaagntggagaatctgcaagtnttgcagctttgctataatcagttaaccggaagcatacctacacagcttg

SEQ ID NO: 288911 - DNA, 286 bp, Glycine max
  unsure (1)..(286): unsure at all n locations
gcagattgaacncganatgaattcancggtttcagcntttgagtaccactaccaatggtgatttggttcnaaggnaaaaganctcgcganggttaaagntaatgtagcatgtgctgctgttggcttgacatcaagttacactccaactccattgttggaatctggtttgcaaaaagacagagggttaattgtgnagtattttggaaggatgtcttacgttgctcataacgttaatcagccccaagagaaagatttgttagagggaaatttttcctttgatattaaa

SEQ ID NO: 288912 - DNA, 285 bp, Glycine max
  unsure (1)..(285): unsure at all n locations
ccccaatgagccgtatcgtgttattctcggtgatgtaagggacaaattnnataatacacgtgaangngctngngcagttgttagccaatggaagctctgaaatccctgaggagactaccttcacaaatgttgaacagttcctggagcctcttgaattatgttatagatcgctgtgtgcatgtggtgaccaaccaatagctgatggaagccttcttgatttcttgcgccaagtttccacatttgggctttcgctgtaagacttgatatccgtcaagaatcagatcg

SEQ ID NO: 288913 - DNA, 286 bp, Glycine max
  unsure (1)..(286): unsure at all n locations
cgagataactagaaacagtgtgatgaaaatgaaggtccttgttttcttcgttgctacaattttggtagcntgggnatgcccatgcgtacgatatgttccctctccgaatgaacactggctatggtgcccgtactccggaggtgaaatgcgcaagttggaggcttgctgtggaagcacacaacatctttggctttgagaccattcctnaagagtgcgttgaagcaacaaaggaatacatccatggcgaacaatatagatcagactccaaaacagttaaccaacaagc

SEQ ID NO: 288914 - DNA, 281 bp, Glycine max
  unsure (1)..(281): unsure at all n locations
atagcccaagccctatacaaccaaaccctaacacacacccatttgattcagtttccatggctagccttcanggttgcatttttngctgcagtgctctgcatggttgtggtgagtgcacccatggcacatgcagctatcacgtgcgggcaggtgacgaatagcctgatcaattgcatcggttacctccagaacggaggaacgccgccgtcgggatgctgcaacggagtgaagagcctcaatgccgccgccaagaccaccgccgaccgccagacggcgtgcaa

SEQ ID NO: 288915 - DNA, 273 bp, Glycine max
cggaaaatggcttcattgaaactgccagaggttgttccttctcccacacaagacagtgaacgacttcagaaagggctttccaaggatttgggacagatgagaaagcggtgatattggtattgggacacaggaatgctcaacaaaggaagaaaattggagaaacttatcagcagctttacaatgaatcgcttgtcgatcgtcttcattctgaattgtctggtgattttagaaatgctgtaattctctggacctacgatcctccagaaaggcatg

SEQ ID NO: 288916 - DNA, 282 bp, Glycine max
  unsure (1)..(282): unsure at all n locations
ctcgagcatccaaaagggttgtctttntnttttataagangaagaggagagggaagatgatnntgangacaatggaggggttnatgnncaagggggtgttggatgatgtgataagaaggcttctggaagggaaaggagggaaacaggtgcaactctctgagtcgganatccgtcaactctgcgtcaacgccagacaaatcttcctctctcagccaattcttctcgacctccgtgctcccatccgnatctgcggtgatatacatggtcagtaccaggncttgt

SEQ ID NO: 288917 - DNA, 282 bp, Glycine max
  unsure (1)..(282): unsure at all n locations
cgtntcttcgattctctctttctctttcttcagaaaaattaaacccattcaaagaaaganagaaagagcgatcatttccaatcacaatggcagatcaactcaccgatgaacagatctcggagttcaaggaagccttcagtntgttcganaaggatggcgatggttgcatcacaacaaaggagcttgggactgttatgcgttcgttgggtcagaatccaacagaggctgagctccaagacatgatcaatgaagtagatgctgatgggaatggcaccattgact

SEQ ID NO: 288918 - DNA, 261 bp, Glycine max
  unsure (1)..(261): unsure at all n locations
ggcgctcagcatttgagtnaggnaacnaaacgtaggttctaacngaactggtgncaagtccaacaagaaggccttcaccaagtactctaagcagtatganactgaggagggaaagaaaaacattgaggcgcagtggagaaactgaagaagtatgctactgtggttcgtgttttggctcacactcagatcaggaaaatgaaagggttgaagcagaagaaagcccatatcatggaaattcaggttaatggtggtagtattgca

SEQ ID NO: 288919 - DNA, 261 bp, Glycine max
  unsure (1)..(261): unsure at all n locations
ctctggatctcgtctcgatcgatcgatctcgaacatgagcactggggagcttcttcancatcgaacctctcgaactcaagttcccctttgagctgaagaagcagatctcatgttctcttcaattgtccaataagaccgatagctatgtggccttcaaggtgaaaacaaccaatccgaagaagtattgtgttcgtccgaacactggtattgtcacgccacgatctncgtgtgatgttatcgttaccatgcaagcgcaaaaag

SEQ ID NO: 288920 - DNA, 269 bp, Glycine max
  unsure (1)..(269): unsure at all n locations
cgacaagggacaagcttagttgtcaagttggaatcaacccatactccatggnatggactggtttggccaatagattactgagtaagggcaacgntatnctgtgttgcgattatgctagtnttgatggtttgattaccaagcaagtnatgagcaagatggcaganatgataaacagtctttgtggtggtgatgaaaaattgatgcgtganaggacacacctgctgttggcttgttgttcaaggatggcaatttgtaaganagatgtttgg

SEQ ID NO: 288921 - DNA, 204 bp, Glycine max
tagtggcctccttgccagaagttaaaatggcccaagaaactttcctattcacatctgaatcagtgaacgaggggcaccctgacaagctctgtgaccagatctccgatgctgtgctcgatgcatgcttggagcaggaccctgacagcaaggttgcctgtgaaacctgcaccaagaccaacatggtgatggttttcggagagatca

SEQ ID NO: 288922 - DNA, 281 bp, Glycine max
  unsure (1)..(281): unsure at all n locations
cacaaggcagaaagcaagctcatcctagagttttaaaaatggcagcagcctcctccatggctctctcttccccnatccttgggctggcaaggccgtgaagctgggcccatcagcccccgaagtcgggagggtcagcatgaggaagaccgtcaccaagcaggcctcctccggaagcccatggtacggcccagaccgcgtcaagtacttgggcccattctctggcgagcccccgtcctacctcactggcgagttcccaggtgactacggctgggacactgctg

SEQ ID NO: 288923 - DNA, 256 bp, Glycine max
  unsure (1)..(256): unsure at all n locations
cagtggtgccttatcgctgtggacatcatcttncttcttcacctttcttagatctcttctttctctacggccgcacgccgaaaccatggccggaaaaggagagggtcctgctatcggaatcgatctcggaaccacctactcttgcgtcggtgtgtggcaacatgaccgcgttgaaatcatcgccaacgaccaagggaacagaaccacgccgtcttacgtcggattcactgacaccgagcgtctcatcggtgatgcg

SEQ ID NO: 288924 - DNA, 280 bp, Glycine max
  unsure (1)..(280): unsure at all n locations
gttgagaactaagaaggagaagcaaatggcttcctcaatgatctcttccccagctgttaccactgtcnaacgtgnccggtggccggcatggttgctccattcactggcctcaagtccatggctggcttccccaccagaaagaccaacaatgacattacctccattgctagcaacggtggaagagtgcaatgcatgcaggtgtggccaccagttggcaagcagaagtttgagactctttcctacctgccagaccttgatgatgcacaattggcaaaggaag

SEQ ID NO: 288925 - DNA, 269 bp, Glycine max
  unsure (1)..(269): unsure at all n locations
agtgatcggtgttcacttgatctcatcataatcgtcagcgtcaattgaagaagatgccgatcagaaacatcgccgtcggaaggcctgaagaggcgactcaccccgacacgttgaaggcggctttggctgagntcatctcaaccttcatcttcgtgttcgccggctcaggctccggcatcgcctacaacaagctcaccgacaacggcgctgccacccctgccggcctcatctccgcctccatcgcccatgcattcgccctcttcgtcgcc

SEQ ID NO: 288926 - DNA, 267 bp, Glycine max
  unsure (1)..(267): unsure at all n locations
gagaaaaattaagatggaggggaaggagcaggatgtgtcgctgggagcgnacaagttcccggagagacagccgattgggacggcggcgcagagccaagacgacggcaaggactaccaggagccggcgccggcgccactggttgacccgacggagtttacgtcatggtccttttacagagcagggatagcagagtttgtggccacttttctgtttctatacatcactgtcttaaccgtcatgggagtcgccggggctaagtctaagtg

SEQ ID NO: 288927 - DNA, 265 bp, Glycine max
ttctgagtgggcaaatcaaacttcatggcatttgagtttccttattgacaatcccaaacaatctacagtttttgatattctcttgggaatctctcaagattttgaaattgctggtaatactcttatgccagctttttctgttccacaggctactgccagatcttctgaaaatgcggaatcctctgcatgatctggaatttgtgttttctttcgcttgttcgtttgtttaattcaataaaggaaattaggcatgaccctcttgttg

SEQ ID NO: 288928 - DNA, 268 bp, Glycine max
  unsure (1)..(268): unsure at all n locations
tttttttctcccttgtgtgttgctgtgtcattatatgtttttntttttaagtattttgagttttgattgnatanngggaagatcgcatgcagagagggcttttccgctatgacgttacancctgtgaaaccaaggtgattcctggggagtatggtttcattgctcagctgaatgagggtcgtcacctcaagangagaccaactgagtttcgtgtngataaggtcctccagccctttganganancnagtttaacttcactaaagttgg

SEQ ID NO: 288929 - DNA, 278 bp, Glycine max
  unsure (1)..(278): unsure at all n locations
cgattttnataacaggatggtgaaccactttgttcaagagttcaagaganagaacaagaaggacattagtggaaaccccagagcacttagaaggttgaggactgcttgtgagagggccaagagaacactttcatcgactgctcagaccaccattgaaattgattctctatacgagggaattgatttctactccactgttactcgtgccagatttgaggagctcaacatggatctcttcaggaaatgtatggagccggtggagaaatgtttgagggatg

SEQ ID NO: 288930 - DNA, 275 bp, Glycine max
  unsure (1)..(275): unsure at all n locations
cgagataactagaaacagtgtgatgaaaatgaaggtccttgttttcttcgttgctacaattttngtagcatggcaatgccatgcgtacgatatgttccctctccgaatgaacactggctatggtgcccgtactccggaggtgaaatgcgcaagttggaggcttgctgtggaagcacacaacatctttggctttgagaccattcctgaagagtgcgttgaagcaacaaaggaatacatccatggcgaacaatatagatcagactccaaaacagtta

SEQ ID NO: 288931 - DNA, 266 bp, Glycine max
cactccagagccaaggtaggttaaacaatcttcttcatcgtcgtcgccgcaatgggacgtgtgatccgtgcgcaggtaagggagcaggctcggtcttcaagtcccacacgcaccaccgcaagggccctgcccgcttccggagcctggatttcggagagcgcaacggctactgaagggtgtcgtcactgacgtcatccacgatcctggccgtggcgcgcctctcgctaaggtcgccttccgccacccgttccgctacaagaagcaga

SEQ ID NO: 288932 - DNA, 265 bp, Glycine max
  unsure (1)..(265): unsure at all n locations
gttcacattcttcagaagattttccngaanaggaagatcaagaaaaacccaaaaagattgatgccagattgagacaaagaatagatcctcaatacaatgaggntcaggctcagatggaaacaaatttgtttaaattgtctcttgatgatgttgaaactcctaaaggttccatgttggatcttaaantttctcaatctaaaattgcacttcccaagaacacagttggaggaaccattctgcgtagtgntctattggcaaatttttt

SEQ ID NO: 288933 - DNA, 267 bp, Glycine max
  unsure (1)..(267): unsure at all n locations
ccaagccccactcaaccaccacaccactctctctgctcttcttctacctttcangtttttaaagtattaagatggcagagacattcctatttacctcagagtcagtgaacgagggacaccctgacaagctctgcgaccaaatctccgatgctgtcctcgacgcttgccttgaacaggacccagacagcaaggttgcctgcgaaacatgcaccaagaccaacttggtcatggtcttcggagagatcaccaccaaggccaacgttgact

SEQ ID NO: 288934 - DNA, 285 bp, Glycine max
  unsure (1)..(285): unsure at all n locations
anaatccataaaacacacaaaaactcagggtagggcaganagananagagaaatgggaggttgggctatcgcggtgcatggtggcgctggtgtggaccctaatcttccactcgagcgtcaagaagaagcgaaacaacttctcacgcactgtctcaatcttggaatctctgctctaaattctaatcttcncgccatagatgtcgttgaacttgtggtgagggaattggaaacggatccgctgttcaattcgggccgtggatctgccctgacagaaaaaggaacggt

SEQ ID NO: 288935 - DNA, 285 bp, Glycine max
  unsure (1)..(285): unsure at all n locations
agcacacaacatctttggctttgagaccattcctgaagagtgcgttgaagcaacaaaggaatacatccatggcgaacaatatagatcagactccaaaacagttaaccaacaagcttacttttatgccaganacctcgaagtccatcccaaggacacatttgtgttcagtatagatggcaccgtactctctaatattccatactacaaaaaacatcggatatggggtggagaaatttaactcgaccttgtatgatgaatgggttaacaagggcaatgcaccggcac

SEQ ID NO: 288936 - DNA, 283 bp, Glycine max
caaaaagaaagaatcccaggcgaggagaaagatggaggggaaggagcaggatgtgtcgttgggagcgaacaagttccccgagagacagccgattgggacggcggcgcagagccaagacgacggcaaggactaccaggagccggcgccggcgccgctggttgacccgacggagtttacgtcatggtcgttttacagagcagggatagcagagtttgtggccacttttctgtttctctacatcaccgtcttaaccgttatgggagtcgccggggctaagtctaat

SEQ ID NO: 288937 - DNA, 267 bp, Glycine max
  unsure (1)..(267): unsure at all n locations
tgggcgtttctcgttctcaaaagcctcatgttgtttgtntgccattcccagcacaaggccacgtgaacccttttatgcaactaagcaaactccttctttgcaccggtttccacataacctttgtnntccaccgagttcaaccacaagcgtttggtgaagtctcttggacaagaatttntcaagggacaacctcattttcgatttgagaccataccagatgggttgcctccatctgacaaagatgcaacacaaagcattgcagcattt

SEQ ID NO: 288938 - DNA, 286 bp, Glycine max
  unsure (1)..(286): unsure at all n locations
aaattgcacttcccaagaacacagttggaggaaccattctgcgtagtgatctattggcaaattttttgacagagggcaattttagagcaagtgttgatttgcagcgcactcatcgtattaaaggaatgattaaaatggtggcnacagtcggtattcctgagaatacaggtatagcattggcctgtgctatgaatagttcttttagggggcgcgccagttctgatatttacaccatctgctctcaagactgtgaattatggaatcctgcttgcacaaaagcaatggc

SEQ ID NO: 288939 - DNA, 288 bp, Glycine max
  unsure (1)..(288): unsure at all n locations
gaaaccttcgccagaaaccgtgagctcgaagtgatccactccaggtgggccatgctcggggccttgggctgcgtcttccccgaactattgtcccgcaacggggtcaagtttggagaagctgtgtggttcaaggccgggtcccagatcttcagcgagggtgggctggactacttgggcaacccaagccttgtccacgcccagagcatcctcgccatctggggcacccaagttatcctaatgggtgctgttgagggttatcgtattgctggtgggnccctcgtgaggtca

SEQ ID NO: 288940 - DNA, 277 bp, Glycine max
  unsure (1)..(277): unsure at all n locations
atgagcaagatggcaganatgataaacagtctttgtggtggtgatgaaaaattgatgcgtgaaaggacacacctgctgttggcttgttgttcaaggatggcaatttgtaagaaagatgtttggagagttgaatgtggaatcccttctggatttccgctcacagttatttgcaatagcatttttaatgagatgctcattagatatagctatgaaaaattactgcgccaggctaaagctccaagtatgtttttacaatccttcaaaaattttgtttctt

SEQ ID NO: 288941 - DNA, 287 bp, Glycine max
  unsure (1)..(287): unsure at all n locations
gcagtccatccagtgacacaaatgattggtttatttcctctcaggaatgtgttcccagaacctattgtgttttaaatccacaaaatccttttgtgttaaataggtggatgggaaaactgactttcccccagggcacttcccgaagtgttaagagaatgcctctttctatagggggaggagctggtgcaaagnatgctattctcatgaacatgcccantggtgtnctttcaacgtggagatatttgttggagatctccgncttggaagtttctaagatgacttctccc

SEQ ID NO: 288942 - DNA, 295 bp, Glycine max
  unsure (1)..(295): unsure at all n locations
caaagagaagagatctgcctccttttttttatcaaatctatctcttcttcaagaatagttgaaaatggggctgtctttcaccaagttgttcagccgactgtttgccaagaaagagatgcgtatactgatggtgggtctcgatgctgcgggtaagaccaccattctgtacaagctcaagcttggagagattgtcaccancattccccaccnatggggttaatgtggaaactgtgggatattaggaccacnanntcaangtcnggggatgttggaagtcaagnccagatccgtnctt

SEQ ID NO: 288943 - DNA, 282 bp, Glycine max
  unsure (1)..(282): unsure at all n locations
cgcaactganggtagcccacaacacttggagaatgcaatttgtgtgtttgaacaatacggtggtatcagttggcgtcacactgaaacaggccttgatgagatatttacagaagtcagaacagatgtgagtctaattgtnagatcaattgttaccgtcggcaactacgacaatatagtagattcggagttcaagacaagtggttcaatcaagccctcgatatcactatcaggcattttggaagttaagccagtggacattactcacacagaccantaaaggat

SEQ ID NO: 288944 - DNA, 277 bp, Glycine max
  unsure (1)..(277): unsure at all n locations
tcattctcaacaacaaacccatntctatattttgcttagacaatgaggnggagcttgtggcaacttgggcaatcgatcactcgccgtcttgcccatggagataagaaggctgttgctcgccgatgttttgcctcagaagctgagctgaaaaagacagtgtttcatgacttccatgttgctcatggtgggaagatggttccatttgctggatggagcatgccaatccaatacaaggactcaatcatggactctaccatcaactgtaggcagaatggtt

SEQ ID NO: 288945 - DNA, 278 bp, Glycine max
  unsure (1)..(278): unsure at all n locations
cttcaaactagggttttacagaatataagctctctctatctttggncctcgtcattcaaatccaatccaatatcanatatgagtcgtcatcccgaggttaagtgggctcagagacttgacaaggtctatatcacggtgcaattggctgattcaaaaaatgccaaggtggatcttacaccagatggtatttttaccttctctggtagtgctggtgctgaagaccatcagtatgagctaaaactggagctctttgacaaggttaatgtagaggagagcaa

SEQ ID NO: 288946 - DNA, 276 bp, Glycine max
aaattggtgtctacactgggtattcacttcttgccaccgctctcgctcttcctgaagatggaaagatcttggccatggacattaacagggagaattatgaattgggtttgcctgtaattaaaaaagctggtgttgaccacaaaattgaattcagagaaggtcctgctctaccagttcttgatgaaatgattaaagatgagaagaaccatggaagctatgacttcatctttgttgatgcggacaaggacaactacctcaactaccacaagaggttga

SEQ ID NO: 288947 - DNA, 281 bp, Glycine max
  unsure (1)..(281): unsure at all n locations
tcataattaccagtgtagatcttcagacacgttctgagctagaagagaaccagatgaaacagtacaagtgggagcaggagcagatngcctcaatgaaggaatacattgcccggtttggccatggttctgcaaaactagctcgccaggcacagagtaaggagaaaacgctggcaaaaatggaacgtggtggacttgcagagaaggtggtcagagacaaagttttggtattccgttttaccgatgttgggaaacttccccctccagttctccagtttgttgag

SEQ ID NO: 288948 - DNA, 290 bp, Glycine max
  unsure (1)..(290): unsure at all n locations
ctctattatcatatggacagcttcggctctccatgcagctgttaattttgggcaatacccttatggaggttatatcgtgaaccgtccaactctagccagaaggtttatcccagaagaaggaaccaaagaatatgatgagatggtgaaggatcctcaaaaggcatatctgagaacaatcacacccaagtttcgagacccttattgacntttcagtgtagagtattgtccaggcatgcntctgattgggtctactttggccaaaggntaatccnaatttgnctacggnttcc

SEQ ID NO: 288949 - DNA, 280 bp, Glycine max
  unsure (1)..(280): unsure at all n locations
ctcctcttcacacattttctgtgcgctctaacaaacattctcgttcacactttcagattgtgtgaagatgggggcgggtggccgaactgatgttcctcctgccaacaggaagtcagaggttgaccctttgaagcgggngccatttgaaaaacctccatttagtctcanccaaatcaagaaggtcattccacctcactgtttccagcgttctgtttccggtcattctctatgttgttacgactnnacatagcttctncccnaatatgttgcaaccatantt

SEQ ID NO: 288950 - DNA, 277 bp, Glycine max
aacttatacaatcaattctgtggatgatccaagaaccttgaacaaaattctctacattagaccaccagctaataccttgtcgtttaatgagcttgttactctctgggagggaaagattggtaaaactcttgaaagaatctatgttccagaagaacaactcctgaagcaaattgaagagtccgcaccacccgtgaatgtgatcctgtcaattaaccactcttcttatgtaaagggggatcatactaactttgaaattgagtcttcttttggagtggaa

SEQ ID NO: 288951 - DNA, 275 bp, Glycine max
attctgttaaggattacactaatgatacaacatattttggagcaactgttggccgggttgctaacagaattggaggagctcagtttactctaaatggaatccattacaaattagttgctaatgaaggaaacaatacacttcatggtggagccagaggatttagtgatgttctttggaaagtgaaaaggtatcaaaaagaaggtccaagtcccagcattaccttcagttaccacagtattgatggtgaacaaggattccctggtgatctcctagta

SEQ ID NO: 288952 - DNA, 273 bp, Glycine max
  unsure (1)..(273): unsure at all n locations
gacaaaactagtgcaactttggcaatttagaaagttagcagattgtgattttctcaagagaaactttaagcagatgtctaatgttttgtgggtggctcctgaggacaaggcnagtttgtggtcacaacttcattatgtttcgtgtaataatctggaaatgcaagaagcttatcttgtcaatctcgtaaatgtgttacgagaattgtatttgcacagtccagaggaagctcgccaattgagaaggaaagctctttctcgtattgaatggctgca

SEQ ID NO: 288953 - DNA, 274 bp, Glycine max
  unsure (1)..(274): unsure at all n locations
ccacgtagcaagcnagatacacaagcctacggtgatcatacctgtataataacaaaacaacatttggaacctaacttgggtgggctcactgttgagcaggctatccagagcaagaagctgttcatcttagatcaccatgactatctcattccatatttgaggaaaataaatgcaactaccacaaagacttatgctaccagaaccatatttttcttgaaaagtgatggaactttgacgccattggtcattgagttaagtaagccgcatcctcaag

SEQ ID NO: 288954 - DNA, 273 bp, Glycine max
  unsure (1)..(273): unsure at all n locations
aggattctacccgccgctcgatgggaattgcgcttcaaggcgtctcgtagggctaatccgcctcacgagggtcaccaacggcacgtnccctttggggggccgaggccccctactgctggtcggcaaacggacggcgggcgcacgcgtcgcttntagcccggattctgacttagaggcgttcagtcataatccaacgcacggtagcttcgcgccactggcttttcaaacaagcgcgatgaccaattgtgcgaatcaacggttcctctcgtacta

SEQ ID NO: 288955 - DNA, 271 bp, Glycine max
ctgcttaatcgaactattcagattctaaaaaatgagttggtggtgggctggagcaatcggtgctgccaagaagaaattcgaggaagaggaaccgccgcgaacttccagagcgtgggcctggtgatcggcgtgacgggcatcgtgggcaacagcctcgccgagatcctccctctcgccgacacccccgccggtccatggaaggtctacggcgtcgcacgccgcccccgtccgccgtggaacgccgaccaccctgtcgagtacatccagtgcg

SEQ ID NO: 288956 - DNA, 270 bp, Glycine max
  unsure (1)..(270): unsure at all n locations
gtatctttgggcacttctggaggatttggttttactaagcagaacgagctctttgtgggtcgtgttgctatgcttggttttgcagcatcattgttgggtgaaggaataactgggaaaggaatcctagcacaattaaacctggaaactggaattcccatttatgaagcggagcctctntcttctgtttttcatcctcttcaccctgctaggagccattggaggtttaggtgaccgtggaaaatttgtcgatgacgaacctactactggagg

SEQ ID NO: 288957 - DNA, 273 bp, Glycine max
  unsure (1)..(273): unsure at all n locations
cagcctccaattattgagggggagttttataagtctgtcaagcctgatgattgcnattggagtatagaggatcagaatgcaatttctattcttttgaccaagcatgatcaaatggaatggtggaaatgtctagtgaaaggtgatcctgagattgatacccaaaaggttgaacctgaaaacagcaaacttggtgacctggatcctgagactcgacagactgttgaaaaaatgatgtttgaccagaggcagaagtctatgggctcctaccagtga

SEQ ID NO: 288958 - DNA, 279 bp, Glycine max
  unsure (1)..(279): unsure at all n locations
ctcacaaacgcacactgaattcaaaaacatcgaaaganagaggcatggccgagcaaaccttcatcatgatcaagccagatggcgttcaaagaggccttattggcgagattattagcagatttgagaggaagggtttttacttgaaagggttgaaactcgttactgtggaccgtccttttgctgagaagcactatgctgatttgtctgcaaagcctttctttagtggtttggtggattacattggtctctggcctgttgttgccatgatctggggagggt

SEQ ID NO: 288959 - DNA, 254 bp, Glycine max
  unsure (1)..(254): unsure at all n locations
ctcttcatcaagctccgctccaacaacngggaaaatgagggacatccttcacgtgcagggagncgcaatgcgggaaccagatcggttccaagttctgggaagtggtgtgcgacgagcacggcatagatccgacggggaagtacgtcggaaactcagatctgcaactcgagcgcgtgaacgtctactacaatgaagcctcgtgcgggcgcttcgtgccacgcgcggtgctgatggactggagcccggaaccatgg

SEQ ID NO: 288960 - DNA, 269 bp, Glycine max
  unsure (1)..(269): unsure at all n locations
caacaaaggagttgtaaattaagagcatggctgcacaagctcttgtatcatcatcatctcttaccttctcagccgaggctacaagacaaagtcttggaccaagatcactccaatctccatttggcttctccagaaaagcctcctttcttgttaaggcagctgctactccccctgtcaagcaaggatcagacagacctttgtggtttgcatcaaagcaaagtctttcctacttggatggcagccttccgggtgactatggatttgaccnc

SEQ ID NO: 288961 - DNA, 260 bp, Glycine max
  unsure (1)..(260): unsure at all n locations
ttttaaaaaanaaataattnctttcttttccccccgaagattcccaatccagcancacaaaggaccatggaaacgcaagaaaatcaagaaccccaactacaaaggaaagtggaagattccatggattgataacccagaatttgaggatgatcctgatctttatgttctcaaaccaataaagtatgtgggcattgaagtgtggcaggtgaaggcaggttcagtttacgacaatatcttaatttgtgatgacccacagtatg

SEQ ID NO: 288962 - DNA, 268 bp, Glycine max
  unsure (1)..(268): unsure at all n locations
gaatcattggagaccaatggagcgatctgcttggagaccacagaggcgaaagcaggacctttaagcttcctaatcccatgtactacattgagtagtaccttcacctctctcaacaatctagctagagtttgctcctatctatatgtnataaggtatgctgatatgcactattcaaataggagcattagctatgtttgttaatgtcactttatgtnatgtgggtaagtcacctaagacactccacgtacctacttgttgtctcttacgc

SEQ ID NO: 288963 - DNA, 281 bp, Glycine max
  unsure (1)..(281): unsure at all n locations
tctccctacattaaatgtacagtctctttcttcatagcatttggaaatttggctgatgacaccatcaattttgaggcctttccccacaagctggtgcagtttggagaaattcaggaaaaagttgtattgaaattttcacaagaggaatttcttacagcttggtcaactcaggtgcgtcctgcaacaactctgttgggctgatgggtgcccatatttgtatgcnatggtgcatgatagtcagtgtctacnataccangtggatttgtcatggtgtcaagttt

SEQ ID NO: 288964 - DNA, 291 bp, Glycine max
gtctcttggtttggagactgccggtggtgtgatgactgtcctgatccctaggaacactacaattccaacaaagaaggaacaagttttctcaacatactctgacaaccagcctggtgtgcttatccaggtctttgagggtgaaagagcaaggaccagagataacaatttgttgggcaaatttgagccatctggcattcctcctgcacccaggggtgttcctcagattacagtgtgctttgacattgatgccaatggtatcttgaatgtctctgccgaagataaaaccactgg

SEQ ID NO: 288965 - DNA, 287 bp, Glycine max
  unsure (1)..(287): unsure at all n locations
acaaggncaccttcaacgtcgctgatctcacttccgctctcaacgaggacnatagagcagaccttgtcaatgctctcaagagcaagatacagagtttggctggncagcattctganattctagagtctctgtcgcccaatgtcaggaagcgtgtggaggttcttagagagatccagggtcaacatgatgaattagaggcaaaatnttttgaggagagagcagctcttgaggccaaataccaaaaattgtatcaaccactttncacaaagcggtatgaaatagtaaat

SEQ ID NO: 288966 - DNA, 287 bp, Glycine max
  unsure (1)..(287): unsure at all n locations
cgttcgcacactccgtcttcancaccaagatccgtgttcttcacccacgtctctcnccccgcttcagatcgtaaacgtctcgctgttccaagatgnnccgtggctnagaacattcccgatatggaggagggtaccttggagattggaatggaatacagaactgtatctggagttgctggaccattggtcattcttgacaaagttaagggacccaaatttcaagagattgttaatattcgtttaggagatggaactactcggcgtggacaagttctagaggtngatgg

SEQ ID NO: 288967 - DNA, 285 bp, Glycine max
  unsure (1)..(285): unsure at all n locations
gggcaagcgcttctcctctttgtgttctggctatgcntcttggcaagagttagatcggacgaggattgcgtgtacacggtgtacgttcggacgggttcgatcatcaagggaggcaccgattcagtaattggtctgaagctatacgacaagtccggctacggcatatacatcaccaacctcgaggcatggggcgggttaatggatccgggtcacaactactacgagcggggcaacctcgacatattcagtggnagaggcccttgcttggaagcacccgtttgcgag

SEQ ID NO: 288968 - DNA, 288 bp, Glycine max
  unsure (1)..(288): unsure at all n locations
cttaaaagttaaaanggccaaggtcctgaatctcacagagacagagagaatgagtacggtgggagaagggaaggtgagtagtaatggtcatggatgttgcnaatcagggccaggctatgcttccccactggaagccatttctggtcccagagagtctctcatttatgtaacctctgtctacacagggaccggaatagagaagccagactatttggcgacagtggatgtggatccaaactctccaacttattccanggtcatccatagggctccgtgttncttatggng

SEQ ID NO: 288969 - DNA, 286 bp, Glycine max
  unsure (1)..(286): unsure at all n locations
gcnaagagcatggctcccaagggtttaatctttttggctgtgttatgcttcncagcactgtcactgagtcgttgtcttgcggaggataatggacttgttatgaacttctacaaggnatcatgccctcaggctgangacatcatcaaagaacaagtcaagcttctctacaagcgccanaagaacacngctttctcctggctcagaaacatcttccatgactgtgctgttcagagttgngangcttcactgttgctggnctccacaagaaggagcttgtctgaagaag

SEQ ID NO: 288970 - DNA, 284 bp, Glycine max
  unsure (1)..(284): unsure at all n locations
gcctaccaaaatgggtattcagtgctccagactcatcccgtgctgtgtggattcacaagttaaggcctctgttattgaaactccngatgctgaaattgaggatagtngtgaggtcagtaactggcctacatttcgtgaatatacacttgagcaactcaagaatgctacatctggttttgctgttgagaacattgtatctgaacatggagagaaggctccaaatgttgtttataaaggaaagctggagaatcnnatgnggattgctgtnaagcggtttaatagga

SEQ ID NO: 288971 - DNA, 283 bp, Glycine max
gccatggccacccacgcggctctagcttctacaaggatccccactaacaccaagttcccatccaaggcttcacactctttcccaacccaatgcgcctcaaagagacttgaggtgacagaattctctgggctaagatccacttcatgtgtgacatatgctaacgatgctagagaatcttccttttttgatcttgtagcttcccaactcactcccaagaccaatggatcatcaactcctgtgaggggagagacagtggccaagttgaaggtggcaatcaatggtt

SEQ ID NO: 288972 - DNA, 282 bp, Glycine max
  unsure (1)..(282): unsure at all n locations
ganaatctggtgcnttggccctgagacccttggacccaacatggtggttgatatgtgtaagggantccagtatttgaatgaaatcaaggatnctntggttnctggattccagtgggcatcaaaagaaggtgctttggccgaagaaaacatgagagccatttgctttgaagtatgtgatgttgttctgnacgctgatgctatccacagaggaggtggtcaaatcatccctactggccaggagagtcttctatgctncccagatnacngccaaacccagctttt

SEQ ID NO: 288973 - DNA, 282 bp, Glycine max
  unsure (1)..(282): unsure at all n locations
ttatgcnagtnttgatggtttgnttaccaagcnagttatgagcaagatggcaganatgataaacagtctttgtggtggtgatganaaattgatgcgtganaggacacacctgctgttggcttgttgttcaaggatggcaatttgtaagaaagatgtttggngagttgaatgtggaatcccttctggatttccgctcacngttatttgcnatagcatttttnatgagatgctcattagatatagctatgaaaaattactgcgccaggctaaagctccaagtat

SEQ ID NO: 288974 - DNA, 283 bp, Glycine max
  unsure (1)..(283): unsure at all n locations
tctctgtctctatatctgtatttctgaattttgggaatagaaaaaccctaagcaaagcaaagcggtaaggatggggaacacggagaagctgatgaaccagatcatggaattgaaattcacttcgaaatcgctgcagcgtcaatcgcgtaagtgcgaganggaggagaaatcggagaagctgaaggtgaagaaggcgatcgagaaaggcaacatggacggcgctcgaatctacgcggagaacgcgatccgtaagcgcacggagcagatgaactacctccgcctg

SEQ ID NO: 288975 - DNA, 279 bp, Glycine max
ctcgccctcatcgacgcctaccgcgacaagtggtactccctcggccgcggcaacctcaaggccacccactggcaggaggtcgccgacgctgtctctagccgctgccccaacgcctcccctcccaaaactcctgtccagtgccgccacaaaatggagaagctgcgcaagcgctaccgcaccgagatccaacgcgctcgctccctccccgtttcccgattcaactcctcctgggcccacttcaagctcatggactcatggaaaaaggcccctcccctgtta

SEQ ID NO: 288976 - DNA, 282 bp, Glycine max
  unsure (1)..(282): unsure at all n locations
anctgccacggcagatggncccaaacatattgagacnnncatcacaagggctaaatttgaggaattgtgttcagatcttcttnacaggctcaggacacgagttgaaaattcattgagggatgcgaaactctcgtttaaggatcttgacgaagtcatcccttgttggtggatcaacacgtatcccagctgtncaggagcttntaaagaagttgactggcaaggacccaaatgtcactgtcaatccagangaagtggttgcccttggagctgcagttcaggctg

SEQ ID NO: 288977 - DNA, 276 bp, Glycine max
  unsure (1)..(276): unsure at all n locations
cccatntctctcttctgctcattcctttgactcctcattatcagggaaatggctctcactgggttactcttgtnggcctttctcacgatgttctcctctgctcatgcctatggtgganggtggactaatgctcatgccacattctatggagggagtgatgcatctgggacaatgggtggggcatgtgggtatgggaacctctacagacaagggtatggaacaaacantgntgctctgagcagngcactcttcaacaatggctgnngtgtggctctt

SEQ ID NO: 288978 - DNA, 281 bp, Glycine max
  unsure (1)..(281): unsure at all n locations
anaganaganggtttttttagtatagttaacagcatggagagggaggaagatgttaaggttggagcacagaaattctcggagaggcaagcactgggtacaggagctaagagtgacaaggactacaaggaggcaccaccagcacccttgtttgagccaggggagttaaagtcatggtctttttacagagctgggatcgcagagtttgtggccacattcttgttcctctacatcactgtcttgactgtcatgggtgtcaacagggcacccaacaagtgctctt

SEQ ID NO: 288979 - DNA, 279 bp, Glycine max
  unsure (1)..(279): unsure at all n locations
cggctcgnngtgagtntgttgancgngataactagnaacagtgtnatgaanatgaaggtcctnntttnctncgtngctacaatttnggnagcatggcaatgccatgcggtacgatntgttccctctccgnatgaacactggctatggtgctcgtactccggaggtgaaatgcgcaagtnggangcttgctgtggaagcacacaacatctttngctttnagnccattcctgaagagtgcgntgaagcnacnaangnatacatccatggcgaacaatatag

SEQ ID NO: 288980 - DNA, 278 bp, Glycine max
  unsure (1)..(278): unsure at all n locations
gattcagcaagtgcgttttggaagcagagaccgaaatacttcgagatggcccgtacaaagcaaactgctcgtaagtcaactggaggaaaagctcccaggaagcagcttgcaaccaaggctgcacgtaagtctgcaccaacaactggtggtgtgaagaagcctcatcgttatcgccctggaactgttgctcttcgtgagattaggaaataccagaagagcactgagctcctaatcaggaagcnaccctttccagaggttggttcgtgaaattgcccagg

SEQ ID NO: 288981 - DNA, 274 bp, Glycine max
  unsure (1)..(274): unsure at all n locations
gtgtagatttgtgatacacataaaagccggggcatacttcgagaatgtggaggtaatcaggaagaagaccaatctgatgttcgtcggagatgggattggaaagactgttgtgaaggccagtangaatgttgtggatggctggaccactttccaatcagccactgttgctgtggttggagacggattcatagcaaagggtataacctttgaaaattctgctgggccaagcaaacaccaagccgtggccctaaggagtggttctgatttctcagct

SEQ ID NO: 288982 - DNA, 273 bp, Glycine max
  unsure (1)..(273): unsure at all n locations
ggactctaagacccttctctttggtgagaagcccgtcaccgtttttggaatcaggaaccctgaggaaattccatggggtgaggttggtgctgattatgttgttgagtcaactggtgtatncactgacaaaggacaaggctgctgctcacttgaagggtggtgccaaganggttgtcatctctgccccaagcaaagatgcacccatgtttgttgttggtgttaacgagaaggagtacaagccagagcttgacattgttccaatgctagtgcact

SEQ ID NO: 288983 - DNA, 274 bp, Glycine max
  unsure (1)..(274): unsure at all n locations
tgctggntcanantcntcagaagatnttcctgaaaaggaagatcaagaaaaacccaaaaagattgatgccagattgagacnaagaatagatcctcaatacaatgaggttcaggctcagatggaaacaaattngtttaaattgtcncgtgangatgntgaaactcctaaaggttccatgtnggatcttaaaanttcncaatctaaaattgcattccccangaacacagttggagggaaccatncggngagtgtctattggccaatnttntgacag

SEQ ID NO: 288984 - DNA, 276 bp, Glycine max
  unsure (1)..(276): unsure at all n locations
ctttattctcccaattcaaaactctcactccgttagaagcaccaaatcctgatggcaccaaaggcagagaagaagccagcggagaagaagcccgcagaggagaagaagtccacggtgggagacaaggctccggcggagaagaagccaaaggccggaaagaagcttccgaaggagggaggcgccggcggcgaaggnnnnnnnnnnnnnnnnnnnnnnnnnagcgtggagacatacaagatctacntcttcaaggttctgaagcaggttcaccctgac

SEQ ID NO: 288985 - DNA, 273 bp, Glycine max
  unsure (1)..(273): unsure at all n locations
cncgangttgttgatgcaagcnagcnactganagatttattgctgcaactgcttgaacggcaaaggttaaaccatggtgaagtgcaagcttttggcaccccacgtagattagtggttgctgttgaaaatctttgcaccaaacaggcagaaaaggaggttgaagttagaggtcctcctgtttcaaaagcatttgatcatgaggganatccaacaaaggccattgagggntttctcgtagatactctgttcccattgatctggtatacagaaagg

SEQ ID NO: 288986 - DNA, 255 bp, Glycine max
  unsure (1)..(255): unsure at all n locations
gaaagangttggtctctgctaccaaggnaggcctaaaacttgatnngagcgaacacgagaagaaaaaganggaagaactaaaggntaaatttgagggtctttgccatgtgatcaaggatgtgttgggtgacaaggtggagaaagttgtggtgtctgatcgtgttgtggattctccttgctgtctggtgacaggtgaatatgggtggacagccaacatggnaaggattatgaaagcncaggcattgaggggcagcc

SEQ ID NO: 288987 - DNA, 272 bp, Glycine max
  unsure (1)..(272): unsure at all n locations
anataggtggatgggaaaactgactttcccccagggcacttcccgaagtgttaagagaatgcctctttctatagggggaggagctggtgcaaagaatgctattctcatgaacatgccaaatgctgttctttcaatgtggagatattttgttggagatctcgtctttgaagtttctaagatgacttctccctacattaaatgtacagtctctttcttcatagcattggaaatttggctgatgacaccatcaatttgaggcctttccccacaag

SEQ ID NO: 288988 - DNA, 279 bp, Glycine max
  unsure (1)..(279): unsure at all n locations
aaagcacaaagcaaagctcatccttgagttaaaaaatggcagcancttcttccatggctctctcatccccatccttggctgggcaagggcgtgaagctgggcccatcagccccagaagtgggaagggtgagcatgaggaagacgtcaccaagcaggtcttcctcaggaagccatggtaacgggccagaccgagtcaagtatttggggccccattctctgggcgnagcccccgtcctacctaaaccggtgagtttcccaggcgactacgggttgganact

SEQ ID NO: 288989 - DNA, 267 bp, Glycine max
  unsure (1)..(267): unsure at all n locations
gtttgatgaccgtgtcacggggnagctcgaggcttttgcnagccgggctaagatagttcacnttgatattgattcggcngagattggaangaacaagcagccgcatgtttcggtttgcgctgatttgaagctggcgttgaangggattaatcacatgttggagagcagaggggttgggggnagcttgatttagaggnttgagggaagancgaatgagcagaagcgaaggttcctttgagctataagacttttgaggatgagatttct

SEQ ID NO: 288990 - DNA, 273 bp, Glycine max
  unsure (1)..(273): unsure at all n locations
cgaggngacacaccttcagcagcagcagccntggttctcaaaaccgaactatgccgattcagcggtgccaagatctacccagggaaaggcatcagatttgttcgtggtgattctcaggttttcctgtttgctaactcgaaatgtaagaggtatttccacaacaggttgaagccatcaaagctcacctggatgcaatgtacagaaagcaacacaagaaggacattgtcaagaagntgtggcaggaaaagaagacgtgttgccaaaaagccttnt

SEQ ID NO: 288991 - DNA, 271 bp, Glycine max
  unsure (1)..(271): unsure at all n locations
catcatcatggccacctctgctattcagcaatcagcattcgcaggtcaaactgctctgaagcagctcaatgagttggtccgcaagaccggtggcgccggcaaaggtcgcaccaacatgcgccgtaccgtcaagagtgctcctcagagcatttggtatggccctgatcgtcccaagtacctgggtccattctcagagcagattccgtcatacctgaccggagaattccccggtgactacggatgggacactgctggatatcagtnacccggg

SEQ ID NO: 288992 - DNA, 273 bp, Glycine max
  unsure (1)..(273): unsure at all n locations
tacttatttgccttgtcctaagctcctccttgttcgaggtgtcaatggccacttctgctttctgctcctccaagtgcgcgaagaggtgttctagggtgggatgaaggacaggtgcacgaggttctgcgggatttgctgcagcaagtgtangtgtgtgccatctgggacttatgggaacaagcacgagtgcccttgctacagagacatgaagaatccaagggcaagcccaaatgcccttgattgttaatttcaccatgcatcanttcaatctcc

SEQ ID NO: 288993 - DNA, 284 bp, Glycine max
  unsure (1)..(284): unsure at all n locations
tgggtagtgccttttttctttctctctatcgattctcgaaacaaaccctacccttttttagtcttcgaatttttcataatcgtaatgggttccgaaggatccagcgttgtcgttcntangaatttcagnttattgcaagagnttgagagaggtgagaagggaattggggatgganctgttagctatggaatggatgacgctgacgacatatacatggcaatcttggnctgggactatcattgggccccctggtantgttcatgaagggcgtatccaccagttga

SEQ ID NO: 288994 - DNA, 274 bp, Glycine max
ggcctaattatgttcgtgcttgggcaaatatgggtatcagttatgcaaaccagggtatgtatgacgagtccattcgatattatgttcgagcacttgccatgaatccaaaagcagagaatgcatggcaatatttgagaatttcattgagctgtgcttctaggaatgacatgttggaagcttgtgatagtcgtaatttggacttctccagaaggagtttccatacagtaagggtgcgtttgagtgaacagcttaatcaagcgcttagtgaataagt

SEQ ID NO: 288995 - DNA, 275 bp, Glycine max
aaatatacaccagggtcccacttcccttacagaaggttaccatcacggcccagggaagaaaaagcccacaccagagcactggctttaccatccaagatagctatattctggccacccagcccacgtatttgggccggccctggaagcaatactctagaactgtttacatcaacacttacatgagtgggctagtccagcccagagggtggcttgagtggtttggaaattcgccttgaacatttgtggtacggtgagtacagaaattatgggcctgg

SEQ ID NO: 288996 - DNA, 215 bp, Glycine max
  unsure (1)..(215): unsure at all n locations
gcagtggcgaggaagaggatgacgattagagaatggactgatanttgcatttatgtaggttctgatgattttntcatctgtngtaggtggtctggtcatttcctgataaacatatttcttgcttccagaaaatatttccctgctccctccgtaattggttgtctttccaaaacgtgaatagtttaaagaagggagttctttattgtacttctnna

SEQ ID NO: 288997 - DNA, 285 bp, Glycine max
  unsure (1)..(285): unsure at all n locations
tcatggctgctgggactggnctctttgcagagattttggntggagatgtgtacaagtactatgctgatggagnatggaagaaatctgcttctgggnaaagtgttgccatccatcaaccncactaccagaaagactcaataccaagttcaagcttgttcacnagaggaggttaacaaggtcatggacttggcccnatctgccccaaaagttatggggcaagaccccactatggaaacgtgctgccacttcttcacaaggcagtnctntccttgaccganacgaanc

SEQ ID NO: 288998 - DNA, 272 bp, Glycine max
  unsure (1)..(272): unsure at all n locations
tttcaccgcacgaatatcttgttgtttggagcgatccgagaaaaactctgtaaacatgttggtttaccaggacctccttacaggtgatgagcttctctctgactccttccgttacaaggaaattgagaatggaatgctgtgggaagttgaggggaagtgggttgttcaaggngcagtngatgtagacattggtgcaaacccttctgctgagggtggaggagaagataanggagtngatgatgcagctgttaaggttgttgacttgttgaccc

SEQ ID NO: 288999 - DNA, 265 bp, Glycine max
  unsure (1)..(265): unsure at all n locations
caggatattcaaccncttgtttgtgacaatggaacaggaatggttaaggctgganttgctgganatgatgccccacgtgcngngnttcccagcntgtnggtcgtcctcgncacactggtgtgatgnttggcatgggccanaangntgcatatgttggtnangaggcacaatntcagaggggtantttgantctcanntaccccattgaacatngccttgtganccnttgggcnggatntggcaaaacattggncatcgtacttct

SEQ ID NO: 289000 - DNA, 270 bp, Glycine max
  unsure (1)..(270): unsure at all n locations
cttgacgccgggacccgagaaagttccactactccggcgcggcgtgcccggagtttccgcaagggaaactgcaagaaaggcgacacgtgcgagtncgcgcacggcgttttcnagtgctggctccacccggcgcgctatcggaannagccttgcaaggacggcacgagttgccggccgcgggtgtgcttcttcgcgcacacgccggagcagtgcgcgtcttgccgatgcagagtccggtagccggcgaattctctgagtcttacgatggtt

SEQ ID NO: 289001 - DNA, 265 bp, Glycine max
  unsure (1)..(265): unsure at all n locations
gcctttctctctcttctgctttnntctctctctgtctctctctacgctttctcgttcgacatcccttcaagggatncantaactgaaggagaaatggggttgacattcaccaagcttttcagccggcttttcgccaagaaggaaatgcgaattcngatggtgggtctcgatgcagctggtaagaccaccatcntgtacaagctcaaattggaganatcgttaccacaatcccaccattgggttcangnggagatgtggatacaac

SEQ ID NO: 289002 - DNA, 267 bp, Glycine max
  unsure (1)..(267): unsure at all n locations
aagggtttaacctttctgggctgtgttaatatgcgtttcagcactgtcactgagtccttctgttgcgggggcagggcaaaataatggccttgttatgaacttctacaaggaatcatgccctcaggctgaanacatcatcacagaacaagtcaagcttctctacaancgccacaagaacactgctttctcctggntcangaacatcttccatgactgtgctgttcagagttgtgatgcttcactgttgctggactccacaagaggagc

SEQ ID NO: 289003 - DNA, 269 bp, Glycine max
  unsure (1)..(269): unsure at all n locations
tcgactggtacgggaagaacgcacgcctccgcgagttggtgaacctggtggtggtggcnggagacaggangaaggagtcnaaggacttggaagagaaggccgagntgangaanntgtanggctcatcgagacctacaagttgaacggccaattcagatgnatatcntctgcagatgaaccgtgtgaggaacgganagctctaccgtgtccatctgtgacacaaggngtgctttgtgncagcctgcagtttatgaggcntngggttganc

SEQ ID NO: 289004 - DNA, 227 bp, Glycine max
  unsure (1)..(227): unsure at all n locations
ggtgcactgatgtgtcctcaaccgttgactcatcgttgaccatggtcatgggagatgacatggttaaggtgattgcttggtatgacaatgagtggggctantcccaaagggttgtgganttggctgacattgttgccaacaannggaagtgagagccatcaaattctgaattggtanttcaattnttatatgtatgtaccatgccattgtagttttgtntgcttata

SEQ ID NO: 289005 - DNA, 262 bp, Glycine max
  unsure (1)..(262): unsure at all n locations
gattgaaccagacatgaattcaaggtttcagcttttgagtantnctaccaatggtgattttnttcaaggaaaagatctcgctntggttaaagttantgtagcatgtgctgctgttggcttgacatcaagttacactccaactccattgttggaatctggtttgcaaaaagacagagggttaattgtggagtatttggaaggatgtcttacgttgctcataacgttaatcagccccaagaagaaactttgttagaggganttt

SEQ ID NO: 289006 - DNA, 270 bp, Glycine max
  unsure (1)..(270): unsure at all n locations
aggttttgcatttcatttgacgaagagtgagagagtcttatctgtcgnntctgatntntgatcgcatcttcattccgaaaatggcngtttcggctatcactggagcgaggctaagtntagggatgtctctttacctnttccacgcgatcacgaaccacacgcaatggccgtatctatcgacccnaagaccgctaacaaantcantctnaccaagttccgaggaagntttggnngcgggccaagggagtgatgcctggaggcgtgaactcc

SEQ ID NO: 289007 - DNA, 305 bp, Glycine max
  unsure (1)..(305): unsure at all n locations
gggcggctctcagaaaagccgtgttctttgtaatcgctcaatgcttcaccttttccgcatatgctgcaaggtttgaaatcacaaaccgatgcacatacactgtctgggctgcgtctgtgcctgttggcggtggcgtgcaattaaacccgggccagtcatggtccgtggacgtgcctgcaggaacgaaaggggcccgcgtttnnncccgaaccggctgcaacttcgacggttcgggccgcggtggatgccagaccggtgactgcgggggtgtcctcgatgcaaagcttacggtgcgcctcccaaca

SEQ ID NO: 289008 - DNA, 304 bp, Glycine max
  unsure (1)..(304): unsure at all n locations
aaaccggcaaggtagccagctggggctacatcctttaaattcaacattttcgcacccaacaaatcaaactcagctgacgggcttgccttcttcttggcacccgtcgggtctcanccccaatccgacgatggatttcttggtcttttcaacagtccctnaaggacaagtctctccaaaccgtggcgattgagttcgatactttctcgaacaaaaaatgggatcctgcaaaccggcacatcggcattgacgtgaatcgatcaagtccgtcanaacggcatcgtgggggttgtccaatggacaagtg

SEQ ID NO: 289009 - DNA, 315 bp, Glycine max
  unsure (1)..(315): unsure at all n locations
cgggacactgggaagcatcacgatgtcaccgttaaggacgagaagacccttctcttcggtgacaagccagttcactgtttttggacacaggaaccctgaagagatcccatgggggtcaactggagctgatatcattgttgagtccaccggagttttcaccgataaggacaaggccgccgcacnatttgangggtggtgcgaagaaggttattatttctgcccccagtaaggatgcccccatgtttgttgttggtgttaacgagcacgagtacaagccagagcttgatattatttccatgctagctgcacaaccaa

SEQ ID NO: 289010 - DNA, 300 bp, Glycine max
  unsure (1)..(300): unsure at all n locations
gcctagccattgatttggaaaagtccaacttcaaggatgagtaagcttcagagtgatgctctaagagaagctatctcaggaatcatggctgattccaaggntcnagaacaggaaatttgtggagaccattgaactccaaattgggttgaaaaattatgatccccagaaggacaagcgtttcagtggctctgttaagttgcctcatattcctcgccccaagatgaagatttgtatgcttggagatgcccagcacgttgaggaggctgagaagataggattggatacatggatgttgaggcc

SEQ ID NO: 289011 - DNA, 308 bp, Glycine max
  unsure (1)..(308): unsure at all n locations
agatgaacaacttcttgttttggatagcctgctcaacagtgagaccaccatgactatctcattccatatttgaggaaaataaatgcaaataccacaacagacttatgctaccaagaaagacattgacctngaaaaatgatgggactttgacgncnttggccattgagttaagtaagccgcatcctcagggtgnagaatatggtccngttagcgaagtctacgtgncttcgagtgaaggagttgaagcttacatttggttactggcaaaggcttatgttgttgtgaatgatgcatgctaccatcaaatc

SEQ ID NO: 289012 - DNA, 247 bp, Glycine max
  unsure (1)..(247): unsure at all n locations
cagttatgcttttcttagtaggatttngtctctctctctttttaccttttgattggtactatggttggtgccttgttggttggtgcaactaactggcaagggttgttcattgttttcttctattcctttccctcgttttccgattgttacaatgacaataatttaatggttattatcagtcttgaacaaagaaatgctgattgtgaagtataataataatatatgaaattgtcatgttcatggagta

SEQ ID NO: 289013 - DNA, 305 bp, Glycine max
  unsure (1)..(305): unsure at all n locations
ggaantccnccgtggcggtngtgggaggcggtccggctggcgggagccgccgcggagacgctggcgaatggcggcgtggagacgttcctgatcgagcgaaanatggacaactgcaagccgtgcggtggcgccatcccgctgtgcatggtgggggagttcgacctgccgctggacatcatcgaccggcgcgttacgaagatgaagatgatatcgccgtcgaacgtggcggtggacatcgggaggacgctgaagccgcacgagtacatcggcatggtgcggcgcgaggtgctggacgcttacctcag

SEQ ID NO: 289014 - DNA, 301 bp, Glycine max
  unsure (1)..(301): unsure at all n locations
caagattgttgacaccttccctgggccaatccattgatttctttggtgcactgagggccagagtatatgatgangaagtgaggaagtggatttctggtgttggtgttgacggcattgggaagaagcttgtgaactcaaaagatggacctccaacctttgagcagcccaagatgactctggagaagctcttgacgtatggtaacatgcttgtccaagaacaagagaatgtcaagagagtccaattggctgacaagtacttgaacgaggctgcacttggaaatgctaacgaggatgctattaa

SEQ ID NO: 289015 - DNA, 294 bp, Glycine max
  unsure (1)..(294): unsure at all n locations
tgatggagacgacggcgaangaaacgctgtcgttgcgccaatcgcggcgttgttgttggtggtgctactcgcggcgagtgtggtggtggaggctcaggagcaactcggacgtgaagacgctggtgaagcacatgcacgggaagaagtactgcgacaaaggatgggaatgtaagggctggtcaatttactgttgtaacctcactattactgattatttccagacctaccagttcgagaatctcttctccaagcggaatcgccggtggcgcacgccgtcggattttgggactaccc

SEQ ID NO: 289016 - DNA, 295 bp, Glycine max
  unsure (1)..(295): unsure at all n locations
ctctaaagaattgaaagagcatgtgatcaaacctgtcatcccagctaaataccttgatgataagaccatcttccacctcaacccctctcgtaggtttntgattggtggaccccatggagatgcaggactcactggaaggaagatcattatcgacacctatggtggttggggtgctcatggtggtggtgccttctccggcaaggacccaaccaaggttgataggagtggtgcatacattgttaggcaagcagccaagagcgtggtagcttcagggcttgcacgacgttgcattgtg

SEQ ID NO: 289017 - DNA, 285 bp, Glycine max
  unsure (1)..(285): unsure at all n locations
ctcagatacttaaaccggatttcattgctcccggtgtcaacatcctcgccgcctggacccaagctgtcggcccgaccggtttggactccgatancaggagaaccganttcaacatcttgtctggcattccatggcttgccctcacgtcagtngggccgcgggtttgtcaaatcngntcaccctgattggagncccgncggcctaaggtccgccatgatnaccaccgggcancgttctcgncaaacgnnaacagatnntngancnangaaaccancgggaacagtc

SEQ ID NO: 289018 - DNA, 306 bp, Glycine max
gcgatctgtttcgtgttgtagctagctcctcgaaaatgctggcacgcctcgccgcgagtcgcttcaacgagatccgtcagattttccgtcagccttctagggctttctcaaccgctctgaactaccaccttgacacaccggacaacaaccctaaacttccatgggaattcaccgaggccaatcaagcaaaggttaaggagattttgtctcactatccatccaactataagcaatctgctacaattcctcttttagatcttgcccagcagcagcatggaggttggctacctgtttctgcaatggatg

SEQ ID NO: 289019 - DNA, 288 bp, Glycine max
  unsure (1)..(288): unsure at all n locations
gttttnntgtctcttttgtagattgagtaacaagatggggttggangctgcagtggaggcagcggcagaattccttaacaaggcagtgaaaccagtgctggtgggtggtcctaaactgagggtggcaacggcatctgatgcctttgttgaactggctgatgcgtgtggttatgcgcttgctgtgatgccatcggctaaagggcaggttccagagcaccatccccatttcatcggaacttattggggtgctgtgagcactgccttctgtgctgagatgtggagtctgcg

SEQ ID NO: 289020 - DNA, 291 bp, Glycine max
  unsure (1)..(291): unsure at all n locations
ccctttttctcttctcactgcatcgcttcaggttcttctgaaaagatgtctcgcgtgtatgttggtaacttggattcacgagtcaccgagaganatctcgaagacgaattccgcgttttcggagttattcggagtgtttgggttgcacgtagaccacctggtcatgcttttattgactttgatgaccgcagagacgcacaggatgctatccgtgaattggatggcaagaatggttggagggttgagctttctcacaactctagaggtggaggtggtggtcgtggtggtcgc

SEQ ID NO: 289021 - DNA, 292 bp, Glycine max
atcctctttgaggaaaccctctaccagagcacagctgcaggcaagccctttgtgaatgtcttgaaggaagctggtgtgcttcctggcatcaaggttgacaagggcacagtcgagcttgctggaactaatggagaaaccaccactcagggtctagatggccttggtcagcgttgtgccaagtactacgaagctggtgcacgttttgccaaatggcgtgcagtgctgaagattggtcccaacgagccatctgagctgtctatcccatgagaacgctatggcttggctagatacc

SEQ ID NO: 289022 - DNA, 304 bp, Glycine max
  unsure (1)..(304): unsure at all n locations
tgcaatcaaattagttcattctctttgcgcagtnccctanntctcctttcaagatgcagatctttcgtcaagacccttcaccggaaagaccatcacccttgaggtggaaagctctgacaccatcgacaacgtcaaggccaagatccaggacaaggaaggaattcccccggatcagcaacgttccatctntcgccggaaagcagcttcgaggacggccgtaccctcgccgactacaacatccagaaggagtcaaccctcaccttgtccttcgtctccgtggtggcatgcagatcttcgtcaagat

SEQ ID NO: 289023 - DNA, 288 bp, Glycine max
ctgcgtacattggcactcctggaaagggtattcttgctgctgatgagtcaacagggacaattggcaagcgtttggccagcatcagtgtagagaacattgaatccaacaggcgagctcttagggagctgcttttcactgctcctggtgttcttcaatatctcagtggtgtcatcctctttgaggaaaccctctaccagagcacagctgcaggcaagccctttgtgaatgtcttgaaggaagctggtgtgcttcctggcatcaaggttgacaagggcacagtcgagcttg

SEQ ID NO: 289024 - DNA, 279 bp, Glycine max
  unsure (1)..(279): unsure at all n locations
gtgccgtttgtgttgttttcgggacgaagaagaagatggtgtcaggttctngaatctggcgcaaagcnggtggtggtggacgcgcgccaccacatgctgggtcgtctagcctccatcgtggcgaaggagcttctgaacggccagaaagtggtggtcgttcgctgtgaagagatttgcatctcgggcgggctggtgaggcagaagatgaaatacttgaggttccttcgcaaacgcatgaacaccaaaccctcccatggccccatccacttccgtgccccc

SEQ ID NO: 289025 - DNA, 290 bp, Glycine max
  unsure (1)..(290): unsure at all n locations
aaagaatgctattctcatgaacatgccaaatgctgttctttcaatgtggagatattttgttggagatctcgtctttgaagtttctaagatgacttctccctacattaaatgtacagncnnctttcttcatagcatttggaaatttggctgatgacaccatcaattttgaggcctttccccacaagctggtgcagtttggagaaattcaggaaaaagttgtattgaaattttcacaagaggaatttcttacagcttggtcaactcaggtgcgtcctgcaacaactctgttg

SEQ ID NO: 289026 - DNA, 299 bp, Glycine max
  unsure (1)..(299): unsure at all n locations
agtgatttcagtnagtgatcggtgttcacttgatctcatcataatcgtcagcgtcaattgaagaagatgccgatcagaaacatcgccgtcggaaggcctgaagaggcgactcaccccgacacgttgaaggcggctttggctgagttcatctcaaccttcatcttcgtgttcgccggcttcaggctccggcatcgcctacaacaagctcaccgacaacggcgctgccacccctgccggcctcatctccgcctccatcgcccatgcattcgccctcttcgtcggccgtctccgtcggcgcc

SEQ ID NO: 289027 - DNA, 262 bp, Glycine max
  unsure (1)..(262): unsure at all n locations
tgcactctttcatcaacgtccgcttccaaacacaccgggaaaatgagggagatacttcacgtgacanggagggcaatgcgggaaccagatcggttccaagttctgggaagtggtgtgcgacgagcacggcatagatgccgacngggaagtacgtcggaaactcagatctgcaaactcgagcgcgtgaangtctactacaatgaancctcgtgngggcgcttcgtgccacgcgcggtgctgatggacctggagcccggaaacc

SEQ ID NO: 289028 - DNA, 282 bp, Glycine max
  unsure (1)..(282): unsure at all n locations
atttataaacttctttatcctcactacaaggacacaataaatatcaatggccttgctaggcagtccctgattaacgcaggtggcattattgagcaaacatttttgcctggaaagtactccattgaaatgtcatcagttgtttacaagaattgggttttcactgaccaagcattaccagctgatcttgtcaagagaggattggcagttnaggatccctctgccccacatggtcttcgccttgtgatagaggactacccttatgctgttgatggacttgaaata

SEQ ID NO: 289029 - DNA, 280 bp, Glycine max
  unsure (1)..(280): unsure at all n locations
gagaaaagttagggttcacaacttttccttttcnctttgcttgcgaatctgaatcaaataatcaatcncccattcattattcatcatgtcntcggcgaagaaaatcacgctgaagagttcggacggcgaggctttcgaggtggaggaggcggtggcgctggagtcgcagacgatnaaagcacatgatcgaggacgactgcgccgacagcggcatccctctgccgaacgtgacgagcaagatcctggcgaagttatcgagtactgcaagaagcacgtcgag

SEQ ID NO: 289030 - DNA, 290 bp, Glycine max
aattaactatgaagcctaccctactattatccctttccttcctgcctctctttgctttcctgggctctttcagaagatgttgaacaagttgtggacataagtggcaaccccattttcccaggtggcacatattacattatgccatcaacttggggcgctgccggtggtggattgaaactaggccggacaggaaactcaaactgcccagttactgttttgcaagattactcagaaatcttccgtgggcacaccagtcaaattcagcatacctgggataagccctggaatca

SEQ ID NO: 289031 - DNA, 284 bp, Glycine max
  unsure (1)..(284): unsure at all n locations
gactcattctccatacctcaacgaagaggttaaagagacggcaacactttgctgtccgccttgaccgagcagagcttcgtcttggccctcgattttgccctaaagtactctcagtcacaacagacacnnnnnnnnnnnnnnnnnnnnnnaatggcaccgaagcagaccaaggctgagaagangatcgcttacgatgcgaagtgtgnggacctaatggaggagtaggccagatcctcgttgtgaaatccgtaaacgtgggatcgaacccagtncaggacantngt

SEQ ID NO: 289032 - DNA, 277 bp, Glycine max
  unsure (1)..(277): unsure at all n locations
gggcaagaccgacgccgacgccatcatcgtcatggacgccttcgccctcccagnccgaaggcaccgagactcgcgtcaatgcccaggccgatgcctacgagtacatggtcgattattcccagaccaacaaacaggctgggcggttggagaatgttgtggganggtatcantnctcatcctggttacggttgctggctgtcggggatcgatgtttcgacgcagatgctgaaancagcagtttcaagagncgtttctagcggttgtgattgacccatct

SEQ ID NO: 289033 - DNA, 288 bp, Glycine max
  unsure (1)..(288): unsure at all n locations
tttaggnagctgatgcctgganggcgtgaactccccagttcgtgncttcaaatccgtgggtggtcaaccaattgtgattgattcagtcaaagggtctcgtatgtgggatatcgatggcaatgagtacattgactacgttggttcctggggtcctgcaatcattggtcacgctgatgatcaggtgcttgcagctctgggtgaaaccatgaaganaggaaccagctttgggtgcaccctgtctgctggaaaacacttttggcagagctgggttatcgatgccgtncccca

SEQ ID NO: 289034 - DNA, 286 bp, Glycine max
  unsure (1)..(286): unsure at all n locations
gagagagtagcatctgagtcttgtgtttagcgtaggggattganaatgagtatgtacggtagggatccgtggggagggccgttggagatccacgccacagactccgccaccgacgacgagcgcagccggaatctccaggagctggaccgaggcgctttagacgagacacaacagagctggctcttgggncccggagaacagaanaagaagaaganaaggtacgtagntcttgggctgcatcatcgtcagccgcaagctcttcatctggacactcggcactctcgcc

SEQ ID NO: 289035 - DNA, 292 bp, Glycine max
  unsure (1)..(292): unsure at all n locations
cagaaacacaaccattcccaccaagaaggagcaggtattttcgacctattccgacaaccagcctggtgtgttgattcaggtctatgaaggtgaacgtacgaggactcgtgataacaatttgcttgggcaaatttgagtnatctggaattcctcctgctccgagaggtgttcctcagatcaccgtttgctttgacattgacgccaacggtatnttgaacgtgtctgcggaggacaaaaccatggacngaagaccaagattacaattacccaacngaccaagggagggctttct

SEQ ID NO: 289036 - DNA, 288 bp, Glycine max
  unsure (1)..(288): unsure at all n locations
ctcatcaagggttgtgaaagcagagaagtgagatacactaagttatcctcataaatacactctaattaggtggcaagataagtgtctaaccttagtaacattgccacatattgtgttcattttggaattgtgccactaaaattctattcaattcatctatggctgcctcttcttatgctatgcaatcaatcctggcaaaccctttgatccgcatttccagcgggtctagggtgaaccaattggcgttcctgtttgcacatggagaaggatgtgggcnnggagttaang

SEQ ID NO: 289037 - DNA, 295 bp, Glycine max
  unsure (1)..(295): unsure at all n locations
acctgctgttggcttgttgttcaaggatggcaatttgtaagaaagatgtttggagagttgaatgtggaatcccttctggatttccgctcacagttatttgcaatagcatttttaatgagatgctcattagatatagctatgaaaaattactgcgccaggctaaagctccaagtatgtttttacaatccttcaaaaattttgngtcnntgtgtgtgtatggtgatggatnaacntaattagtgtcaaggaatatgtcangcccttactttagtggtcctaattgganaagctttcc

SEQ ID NO: 289038 - DNA, 288 bp, Glycine max
  unsure (1)..(288): unsure at all n locations
gtntcgggggaagagatccagcagcaatggtgtacgtcaaggctcagaaatcaaaagcctacttcaagagatatcgagtcaagttcaagagaagaagagagggaaaaaccgattaccgtgccaggattcggttgantaatcaggacaagaacagatataacactccgaaataccgatttgtgggtcgnttagcaacgaggncattgttgcacaantnatatctgcntagcattggccggcgattaagtcttgctacagnatattcacatgagtgccacgatatggntt

SEQ ID NO: 289039 - DNA, 288 bp, Glycine max
  unsure (1)..(288): unsure at all n locations
tgttgatcgagataactagaaacagtgtgatgaaaatgaaggtccttgttttcttcgttgctacaattttggtagcatggcaatgccatgcgtacgatatgttccctctccgaatgaacactggctatggtgcccgtactccggaggtgaaatgcgcaagttggaggcttgctgtggaagcacacaacatctttggctttgagaccattcctgaagagtgcgttgaagcaacaaaaggaatacatcccatgggcgaacaatatagatcaggactcccaaaacagtnat

SEQ ID NO: 289040 - DNA, 279 bp, Glycine max
aagaataatcgagacacaaagatcatagtgatcattttttaatttctcagatttatccgacgtccttgcagatccaccaaccgttatggctgccttcagcggtgatgaaacggcaccgtttttcggcttccttggcgccgcagctgccctcgtcttctcctgtatgggagctgcctatggcacagcgaagagtggcgtgggcgtggctccatgggtgtaatgagacctgagctggtgatgaagtcgattgttcctgttgtcatggctggagtttgggta

SEQ ID NO: 289041 - DNA, 282 bp, Glycine max
  unsure (1)..(282): unsure at all n locations
ttcattccatcactgctacccagaagactgttgatgggccatcagccaaggactggagaggtggaagagctgcttcatttaacatcattcctagcagcactggagctgccaaggctgttgggaaagtccttcctgctttgaatggaaaattgactggtatggcattccgtgttcccaccgtggatgtctctgttgttgacctcacggtgaggctggagaaggaagcctcatatgatgaaattanaaatgctatcaaggaggaatcagagggcaagttgaagg

SEQ ID NO: 289042 - DNA, 284 bp, Glycine max
  unsure (1)..(284): unsure at all n locations
cggattcatctgggcaatcaaaaggctatggctttgttcaatttgataatgaggnatctgcccaaaaagctatagagaagctgtnatggtatgctgttgaatgataaacaagtgtacgtgggacccttccttcgcaagcaaganacagaaagtgctgctgacaaggcnnaattcaacaatgtttttgtgaagaatctatcagaatcaaccaccgatgatgagttgaagaacacttttngtgaatttggaactatnactagtgctggtagtaatgagggatggga

SEQ ID NO: 289043 - DNA, 279 bp, Glycine max
  unsure (1)..(279): unsure at all n locations
ttagtngtttgtaacgcctttgtttgcnttttttgcacagaagaattaacangtatatagcaagcatggcagtcacactctacgaccttagctctgcctntgggttgaagaagnttgatgagtaccttctcccacgcagctacatcaccgggtaccaagctacaaaggatgatcttactgtttatgcagctttgccaactgctccatcagatgaatatggaaatgtttccaggtngtanaagcacattgatgcttgttgagaatctctggtgtttctgg

SEQ ID NO: 289044 - DNA, 282 bp, Glycine max
  unsure (1)..(282): unsure at all n locations
ggcactgttcggagatggcgccgcagcgttgatcatcggatcagaccccgacccagcagtggagcggccgatattcgagatgatatcggccgcccagacaatcctgcccgactctgacggtgctatagatgggcaccttcgggaggtgggactcacgttccacctcttgaaagatgtgcccgggatcatctcgaagaacattgagaagactcttgttgaagcttttgagcncatcgggatcagcgactggaactctatcttctggatcgcaacatnccggtg

SEQ ID NO: 289045 - DNA, 285 bp, Glycine max
  unsure (1)..(285): unsure at all n locations
gtttgttgtgagctataagctagtttatcgtgaggagaatatgaagttgtttgtnttctttgttgctgcagtagttttggtagcatggccatgccatggcgcaggctaccagangttccctctccgaatnnaaactgggctatggtgagcgttcttcggaggtaaaatgcgcaagttttaggcttgctgtggaagcacncaacntccgngccttaaaancatncctgaagagtgcgttgaaccnacaaaggactacattaatggcgaacaatttagtcagactct

SEQ ID NO: 289046 - DNA, 289 bp, Glycine max
  unsure (1)..(289): unsure at all n locations
aattgtgagtnngganggcgcacggtgtgnggaaatcctgcagaagtagggagtgttgtaggaggggaagtgtttgatgtggtacttggacaacaatggcaaggatcttgagactgtgaggccggtgattnattggggccaagagttcaggtgtcaagcaatttcctgttcgtcagcagtgctggaatctacaaaccaacagatgnacctccacatgttgaaggcgatgttgttnaagcagtnctggtcatgttgaagtggagaaatacattgaanaaacctttggaag

SEQ ID NO: 289047 - DNA, 280 bp, Glycine max
  unsure (1)..(280): unsure at all n locations
acgttccaaatcatggaaccattctctttgcttgcaactcatgggtttacaacgcanaattgtacaananagatcgcattttctttgctantnaggcatatcttccanatgacactccanccccantagtaaagtanagnanagaaganttngangatctaagaggagatggaagaggggagcgcaaggnacttgataggatctatgattatgatgtntatnatggatttgggcaacccagncgagnatgacggtctcgctcgtctattcttggcggggc

SEQ ID NO: 289048 - DNA, 283 bp, Glycine max
  unsure (1)..(283): unsure at all n locations
cccaccacatgcgcagacacgtgatctaggatctctctctctaggatctgcttctttctcttatcaattctcattcgtaatcattcattcctccaatntacgacttncctgttgtttctccctcaacacaacacaacatgttcctctttgactggttntatggcattctcgcttccctcggtctctggcagagaggaagccannattctcttccttggtctcgataatgccggcaaaaccacnctnnttcacatgctcaaagacgagagattagttcagcacc

SEQ ID NO: 289049 - DNA, 280 bp, Glycine max
  unsure (1)..(280): unsure at all n locations
cgctcattatctgagcaatggaaggttcaagaatgctgatcaccaagcggtggtgaactcaaaccatagccgtttgtccatagccacttttcanaacccagcaccaaatgcaactgtttacnctctgaagataagagaaggagagaagcctgtcnatggaggaaccaatcacttttgctgaaatgtacaggaggaagatgagcaaggacttgagattgcaaggatgaagaagtggctaaggaaagctttgcaggacttgaggntggaaaagcatttgcag

SEQ ID NO: 289050 - DNA, 280 bp, Glycine max
  unsure (1)..(280): unsure at all n locations
tccctgatcccctccttcatctactcntcttcctccaaaangctccctntacacnacatggctcaantccgnctccgcngangtcccctncnagccgccggaaaacctccacgccggatcgcgcggcntcatgattccctctcccagcgagtcacgcaagatcgagatgtatcccctgcnttctacgncgctgcaccgncggtggaatcctcagtgtggcctcactcacatggngtantcctcntgacctatcaagtgtatatgagatgatctgctagta

SEQ ID NO: 289051 - DNA, 284 bp, Glycine max
  unsure (1)..(284): unsure at all n locations
cgctttgcaagagagggaggagtgagtgagatggaaggagtgatacacagaacagtggaagtgaatggcataaaaatgcacatagcagagaaaggagagggtccagtggtgttgttcctccacggcttccctgagctctggtactcatggcgccaccagattctctctctcagctccctcggctaccgcgccgtcgntcccgatctccgtggctacggtgacaccgaggcaccaccttcaatagacagctacattgcctttcacatagtgggtgatctccnttc

SEQ ID NO: 289052 - DNA, 279 bp, Glycine max
  unsure (1)..(279): unsure at all n locations
gaagttcgagccgtcngctccgccgggcncgcgtggggcggaaacagcggaagcagaaaggtccggacccggcggcgcggttnccgacagtgactccggtgacgaagtgcaaactgcggnttctgaagctggagcggatcaaggactaccttctgatggaggaggagntcgtgggcgaatcaggagcnactcaagccgcagaggagaaggccgangaagacagatcccaagttcgatgatctccgaggctctcccatgagcgtcggaaacctcgaagac

SEQ ID NO: 289053 - DNA, 285 bp, Glycine max
  unsure (1)..(285): unsure at all n locations
tcgagcngcgccgtcttcnanntggacagggtgagaccctccagganctactggtggtgcaccgngcgcgccctcgactggggccccggtggtggacccgacctcatcgtnnacgacggtggtgacgctacccttctcatccacgaaggcgtcaaggccgaggagctctntgagaagaccggcgaattcccgancccaantccaccgacaagccggantttcagatcgtgnttancatcatcagagatggttgaagaccgttccaaccaggttacngcagatgaa

SEQ ID NO: 289054 - DNA, 278 bp, Glycine max
  unsure (1)..(278): unsure at all n locations
ctcgtcggtgcaactacagcttctggggctgaactatgtgcagacttttactcatgcacctgcccaaacttgttgcctatagtgaagaanggagtggccaaagccattcagaaagaaccacgcatgggcgcttccttactccgattgcatttccatgactgctttgtaaacggttgtgatgcatctatactgttggatgatacaagcaactttcattggggagcaaacagcagcagctaacaaccaatcagctagagggttcaacgtgattatgatat

SEQ ID NO: 289055 - DNA, 278 bp, Glycine max
  unsure (1)..(278): unsure at all n locations
ccacactacaccgagattccccctaaacccgtttgcnttgttgtttgcgaagaaatggcgactaagaggagcgtgggaacgttgaaggagggtgatttgaaagggaagccggtgttcgtgagggtcgatctgaacgtgcctttggatgacaaccttaacatcaccgatgacactagagtccgtgctgctgttcccaccatcaagtacttaactggtcatggagccaangtgatcctttctagccacttggggacgtcctaaaggtgtaacacctaaat

SEQ ID NO: 289056 - DNA, 279 bp, Glycine max
  unsure (1)..(279): unsure at all n locations
gttacaaagcatttcattgttttacaatatacaacactacaatgggctgcttcaacaatggctctctcttcatcatcattggctggccaagctatcaagcttgccccctccacccctcagcttggtgttggaagggttagcatgagaaaaacagcctccaagactgttacctcaggaagcccatggtacggnccagatcgtgtcaagtacttggggcccattctctggtgagcccccatcctacctcactggtgattcccaggtgactatggttgggac

SEQ ID NO: 289057 - DNA, 272 bp, Glycine max
  unsure (1)..(272): unsure at all n locations
cttgttcctccgctcaacaactataataacatctttctctctccgaacagatccnactatggccacctgcaacgcgccaaatcagtccatgatttcaccgttaaagatgccaagggaaatgatattaatcttggtgactacaaaggaaaggtccttatcattgtcaatgttgcctcacaatgtggctgactaattcaaattacactgagctcagtcagttgtatgagaaatacaaacagaaaggtctggaaattctggcatttccagcnaac

SEQ ID NO: 289058 - DNA, 283 bp, Glycine max
  unsure (1)..(283): unsure at all n locations
cagacattccagagngttatngagaatgctaatnttatcatggctacatatgangatccactacttggtgatgttcaggtctacccanagacaggnacagttgcntttnctgctggtttgcatggctgggcttttaccctgactaactttgccaagatgtatgcatccaagtttggagtngatgnaggaaagatnatggaaagggctctngggtgaaaacttttttgttcccagccacaaagaaatggccagcaanatagtggttctggctactggcaagcng

SEQ ID NO: 289059 - DNA, 298 bp, Glycine max
  unsure (1)..(298): unsure at all n locations
cggagccgtagcagcagcggaagctcctagcttgggcagcgaatcacaatggcgagaggattgaagaagcatttgaagaggcttaatgccccaaagcattggatgcttgacaaactgggtggtgcatttgctcctaagccctcatctggaccacacaaatccagggaatgcctgccactcatactcattttgcgaaaccgggctgaagtatgctctgacataccgtgaagtcattggctattcctgatgcagcgacatggtccttggttgatggcaaagtcaggcagacnaggccatt

SEQ ID NO: 289060 - DNA, 288 bp, Glycine max
  unsure (1)..(288): unsure at all n locations
ccagattgagacaaagaatagatcctcaatacaatnaggttcaggctcagatggaaacaaatttgtttaaattgtctcttgatgatgttgaaactcctaaaggttccatgttggatcttaaaatttctcaatctaaaattgcacttcccaagaacacagttggaggaaccattctgcgtagtgatctattggcaaattttttnacagagggcaattttagagcaagtgttgatttgcagcgcactcatcgtattaaaggaatgattaanatggtggcacagttggtat

SEQ ID NO: 289061 - DNA, 286 bp, Glycine max
acacaatggtcattgcagcaacccctcttctcttctttcttcttaatttatgcctaagaggcacttatgctgactatggaggtggatggcaaggtggtcatgctacattttatggtgggggtgatgcatctggcacaatgggaggggcttgtggttatggaaatttgtacagccaaggctatggaaccaacactgcagcactcagcactgctctattcaacaatggcattagctgcgggtcttgctatgagatgaaatgtgacatgaccccaaatgtgcctccccg

SEQ ID NO: 289062 - DNA, 281 bp, Glycine max
  unsure (1)..(281): unsure at all n locations
ctgacaatgagttgcaaatattgattgatggggaacagaagaaganggtaaatttcttatctgctgatgattttnaaccccctcttatccctcccaagacaatcccagattctgatgataagaaacctgaggactgggatgagagagagaaaattccagaccctagtgcagtaaagccagatgactgggatgaggatgcacccttggaaattgttgatgaagaagcagagaaacctgaagganggttagacaatgaacccgaggagattgngatccagagg

SEQ ID NO: 289063 - DNA, 281 bp, Glycine max
  unsure (1)..(281): unsure at all n locations
gcattcatggtggcacgtggtgatcttggaatggagatcccagtagnaaagattttcctggcacagaagatgatgatatacaagtgtaatcttgttgggaagccagtggtgactgctacccaaatgcttgaatcaatgataaagtctcccaggccaacccgagctgaagcaactgatgtagctaatgcagttcttgatggaacagattgtgtgatgcttagtggtgaaagtgctgctggggcatacccanaacttgctgtgaaaatcatggtcgcatttgc

SEQ ID NO: 289064 - DNA, 284 bp, Glycine max
  unsure (1)..(284): unsure at all n locations
ctcatctgctccaagcacaaagctgtttattggaggtgtttcatattctactgacgagcaaagtttgagggaagctttttcaaaatatggtgaagttgttgatgctaggataattatggatcgtgaaactggtagatccagaggatttggctttattacatacacttcggttgangaggcatcaagtgccattcaggccttggatggtcaggacctacatggccgcccgattagggtgaattatgctatgaaagacctcgtggatatggtggcgtggctttggt

SEQ ID NO: 289065 - DNA, 283 bp, Glycine max
  unsure (1)..(283): unsure at all n locations
ttgatattaggaaggatctgtatggaaacatcgtgcttagtggagggtctactatgtttncgggaattgctgatcgcatgagcaaggaaattagtgctcttgcacccagtagcatgaaaatcaaggtggttgcacctcctgagaganagtncagtgtctggattggtggttctatcttggcatcacttagcaccttccaacagatgtggatctccaagggtgaatatgatgaatctgggccagccatcgttcatcggaagtgcttctaaagttggccagtcga

SEQ ID NO: 289066 - DNA, 284 bp, Glycine max
  unsure (1)..(284): unsure at all n locations
gctagaagcaataagatgaaaatgaaagtgcttgtnttgtttgttgctacagttttggtagcatatgaatgccatggctcagactaccagaagttccctctccaaatgaaaactgggtttggtgggcaatacagcaatgaggtggcatgtgccagttggaggcttggcgtggaagcaaacaacgtagtcaagtngcaaactgttcctgcagcttgcggagagtacatagctgactacgttctaggagaccaatatagatcagattccaaaacagtaaccaacna

SEQ ID NO: 289067 - DNA, 286 bp, Glycine max
  unsure (1)..(286): unsure at all n locations
cgacgaggtggatggacgcagaaganagatttttgagaagatcgtggaggcttgcnagaattggggtatattccangnngttgatcacggtgtggatcaacaactcgtggccgagatgacccgtctcgccaaagagttctttgctttgccaccggacgagaagcttcgttttgatatgtccggcgccaaaaagggtggattcattgtctccagccatctccaaggggaatcggcngcaggactggagancaatagtgacatacttttcgtacccaaaagagagagg

SEQ ID NO: 289068 - DNA, 280 bp, Glycine max
  unsure (1)..(280): unsure at all n locations
cgcatttccancgggtctagggtgaaccaatttggcgttcctgctttgcanatgagaaggaatgttggcctgagagttaggtccatggctaangaagaacaaccaagtgagcctgcaaccccagttacaccgccaccatcagtagaacccaagccacagccagtctctgctccttcaccaaaggtgagcactaagttttctgatgtgttggcattcagtgggccagcacctgagaggatcaatggaaggtggccatgattgggttgtggtgcaatggcag

SEQ ID NO: 289069 - DNA, 282 bp, Glycine max
  unsure (1)..(282): unsure at all n locations
ctcttcgcaacacaacaanaaaagacaacccagagagcgcgtcttaataaacgctcttctctgaaaacccccatttcttttcttctttcttcttctctttcgcttcttcgatcttcgatcttcgtcgctgaaaatgagagagtgcatttcaatccacatcggccaggccgggattcaggttggaaacgcctgctgggagctttactgcctcgaacacggcattcagcctgatgggcagatgccaagtgacaagaccgttggtggaggtgatgtgctttcaac

SEQ ID NO: 289070 - DNA, 293 bp, Glycine max
  unsure (1)..(293): unsure at all n locations
gtgttgtcaatagatcacaagcagatattaacaagaatgttgacatgattgcngctagacgtagagaacgtgaatatttttctaatacccctgaatataatcaccttgctaacagaatgggttctgagcatctagcaaagatgctttctaagcatttggaggcagtaatcaagtccaaaattcctggtattcaatctcttattagtaaaacaattgnngaacttgaagctgaactgagtcgtctgggaaagcctattgcagctgatgatgggggaaagctgnttcaatcatgg

SEQ ID NO: 289071 - DNA, 280 bp, Glycine max
cacaaggcagaaagcaagctcatcctagagttttaaaaatggcagcagcctcctccatggctctctcttccccatccttggctggcaaggccgtgaagctgggcccatcagcccccgaagtcgggagggtcagcatgaggaagaccgtcaccaagcaggcctcctccggaagcccatggtacggcccagaccgcgtcaagtacttgggcccattctctggcgagcccccgtcctacctcactggcgagttcccaggtgactacggctggacactgctggg

SEQ ID NO: 289072 - DNA, 276 bp, Glycine max
  unsure (1)..(276): unsure at all n locations
tcaaagnnggcgtcttcataaacgcctttattctccgtttccgtttccttcccggaattcgatttttcatctctgaaaatgagagagtgcatctcgntccacattggtcaggccggtatccaggtcggaaatgcttgctgggagctctactgtcttgagcacggcatcgggcccgatgggcaaatgccaagtgacaaaacagttggcggaggtgatgatgctttcaacactttcttcagtgagactggtgctggaaagcacgtgcacgtgccgtct

SEQ ID NO: 289073 - DNA, 281 bp, Glycine max
  unsure (1)..(281): unsure at all n locations
tgataacttaattagtgttcatgaatatgtcaagccttactttagtggttctaaattgaaaagctttctagctggtcataatatcaccattactgatgntattgacaaaactagtgcaactttgcaatttagaaagttagcagattgtgattttctcaagagacactttaagcagatgtctaatgttttgtgggtggctcctgaggacaaggcgagtttgtggtcacaacttcattatgtttcgtgtnctaatctgganatgcaagaagctacttgtcatc

SEQ ID NO: 289074 - DNA, 280 bp, Glycine max
  unsure (1)..(280): unsure at all n locations
gagaacattcacgataccgacgaggagatcgacgatttgtacaacgccagggacgtggtgatgaagaggatggtgaaggacgagtacttcaacatggatgataaaaagtgggatgacattgttgaggacgggatcaagcacgggcttcttaggganaccaaggagtgcgaggagattctcgaggatatgctcagctgggacaaactcctacctgatganataaaacagaaggtggaagtaaaatttaatgagctaggggacatgtgtgaaaaggtgaact

SEQ ID NO: 289075 - DNA, 279 bp, Glycine max
  unsure (1)..(279): unsure at all n locations
taatttctgccagcctcaaaaaagacttgctctgcctctgccactctctngagtaggactacactgccatggctgcctcagtctccactgttggagctgtcaacggagctccactgagcttgaacagctctggagctggagcttcagttcccagttcagcctctttggcaccagcttgaagaaggttattgcctcaagggtccctaacgtcaagatttcttctggaagtttcaaaatcgttgccgcggaaaaagagnttgatgagaaacacagacagac

SEQ ID NO: 289076 - DNA, 280 bp, Glycine max
  unsure (1)..(280): unsure at all n locations
ctgtgacctntcaggatctcanggnaggccttcaggntctgaccttngaggatgttngttctgaggctgatatcngtgtcaccanccancggtaacaaggacatcatcatggttgaccacatganganaatgaagaacaatgccattgtttgcaacattggtcatttgacaatgagatcgacatgcttgggctggagaactaccccggcgtgaagcgcatcaccatcaagccccaaactgacagatgggtcttccctgagaccaacaccggatcatgtct

SEQ ID NO: 289077 - DNA, 280 bp, Glycine max
cagctgtctgctgttagatctgtacccgcctagccattgatttggaaaagtccaacttcaaggatgagtaagcttcagagtgatgctctaagagaagctatctcaggaatcatggctgattccaaggaaaagaacaggaaatttgtggagaccattgaactccaaattgggttgaaaaattatgatccccagaaggacaagcgtttcagtggctctgttaagttgcctcatattcctcgccccaagatgaagatttgtatgcttggagagcccagcacgt

SEQ ID NO: 289078 - DNA, 270 bp, Glycine max
  unsure (1)..(270): unsure at all n locations
cttgcaaagtcaacaaagtttgtcctttgacttttaaggagccaacagaagtaattaatgcatgttggaatgtagctgcccccagcccttcctgttgtagttcattaaacacatatattactgggatacaaaagcaaatgttaattacgaataagcaagctataatatgtgcaacactttttggatctatgttacgtggaggtggagngatgacaaatatttatgagctttgtgacgttgatttgaaagatttcagcataaagcttatgg

SEQ ID NO: 289079 - DNA, 207 bp, Glycine max
atggctttgcccaatcagcaaaccgtggattaccctagtttcaaactcgtcatcgtcggtgacggcggtacaggaaagacaacgttcgtgaaaaggcatcttaccggtgaattcgagaaaaaatacgaaccgaccattggagtggaggttcacccattggatttcttcacaaactgcggaaagattcgcttctactgtgggatactg

SEQ ID NO: 289080 - DNA, 275 bp, Glycine max
  unsure (1)..(275): unsure at all n locations
ctctttctctagtcctgtnatttcncancgngtaaagcatggctttnttggtggagaaaaccacgagtngtcgcnagtacaatgtcaaggacctttcccaggccgacttcggncgcctngagatcganctggccgaggttganangcacggcctcatggcctgtcggaccgagttcngcccctcccancccttcaagggggcccgcatcaccggctccctccacatgaccatccagaccggcgttctcattgagaccctcaccgncttggcgccg

SEQ ID NO: 289081 - DNA, 273 bp, Glycine max
  unsure (1)..(273): unsure at all n locations
agtttgttgtgagctataagctagtttatcgtgaggagaatatgaagttgtttgtnttcnttgttgctgcagtagttttggtagcatggccatgccatggcgcaggctaccaaaggttccctctccgaatgaaaactggctatggtgagcgttcttcggaggtaaaatgcgcaagttttaggcttgctgtggaagcacacaacatccgagcctttaaaaccattcctgaagagtgcgttgaaccaacaanggactacattaatgcgaacattt

SEQ ID NO: 289082 - DNA, 273 bp, Glycine max
  unsure (1)..(273): unsure at all n locations
caagcgtgttattgagagatttnagaaggaagctgctgagatgaacaagaggtctttcaagtatgcctgggtgcttgataagcttaaggctgagcgtgaaagaggaatcacaattgatattgccttgtggaagtttgaaaccaccaagtactattgcacagtcattgatgcccctggacacagggatttcatcaagaacatgatcactgggacatcccaanctgactgtgctgttcttatcattgattccactactggtggtttgaagctgga

SEQ ID NO: 289083 - DNA, 272 bp, Glycine max
  unsure (1)..(272): unsure at all n locations
gagtttgttgtgagctataagctagtttatcgtgaggagaatatgaagttgtttgttttctttgttgctgcagtagttttggtagcatggccatgccatggcgcaggctaccaaaggttccctctccgaatgaaaactggctatggtgagcgttcttcggaggtaaaatgcgcaagttttaggcttgctgtggaagcacacaacatccgagccttaaaaccattcctgaagagtgcgttgaaccaacaaangatacattanggcgaacaatt

SEQ ID NO: 289084 - DNA, 271 bp, Glycine max
  unsure (1)..(271): unsure at all n locations
gcgattctcgctgaggataagcacaaacctatgtatgaagaattggctaacaatcctaatgtggagtacattgctggaggtgctactcagaattcaatcagggttgctcagtggatgcttcaagcaccaggtgccacaagttacataggttgcataggaaaggacaaatttggagaggagatgaagannnaatgtacacttgatggtgtaaaggttaactattatgaaatcgacaatacaccnactggaacttgtgctgttgtgtggttgg

SEQ ID NO: 289085 - DNA, 270 bp, Glycine max
  unsure (1)..(270): unsure at all n locations
ctgacttggtggttgtttcccctgatgttggtggtgtcgcaaganctcgtgcttttgcaaagaaattatctgatgcacccttagctattgtagacaaaaggcgccatggacacaatgttgctgaggtgatgaacctgattggtgatgtaaaaggaanagttgctgtaatggtggatgatatgattgacactgctgggaccattgctaagggtgcagcactattacatgaggagggagctagggaagtgtatgcatgctgcctcatgccgt

SEQ ID NO: 289086 - DNA, 266 bp, Glycine max
  unsure (1)..(266): unsure at all n locations
ctagaaacagtgtgatgaaaatgaaggtccttgttttcttcgttgcnacaattttngtagcatggcaatgccatgcgtacgatatgttccctctccgaatgaacactggctatggtgcccgtactccggaggtgaaatgcgcaagttggaggcttgctgtggaagcacacaacatctttggctttgagaccattccngaagagtgcgttgaagcaacaaaggaatacatccatggcgaacaatatagatcagactcaaaacagtta

SEQ ID NO: 289087 - DNA, 268 bp, Glycine max
  unsure (1)..(268): unsure at all n locations
gcgactgcgcttcacgatgggtgcttacaagtatgtttcggagctatggcgcaagaagcagtctgatgttatgagattcttgcagcgggtgaggtgctgggagtaccgccagcaaccttctattgtccgtttgacaaggtctactcgcccagacaaggctncgncgcttgggtttcaaggctaagcagggttatgtgatttaccgtgttcgtgtacgaaggggtggccggaagagaccagttccaaaaggtattgttatggtaagccc

SEQ ID NO: 289088 - DNA, 311 bp, Glycine max
  unsure (1)..(311): unsure at all n locations
gtaagaagagtgtgtngtgttgaagtatcaaagatgttgattggttctctcttaaacaggcgtcctaaagntcnagggggactntggtgttgatgancaagatntgttcgacgtcaacgacttcatggcgactactaggngcggaccagccgctgttgccggcggcatcttcggtgccgcccaggacattgttggtggaatagttgatggtgctacggccatcttcagccgtaacattgccatacagttgancagtgccaccaagtctgagaatncattggacatgggaaagttggaaactaacctatttg

SEQ ID NO: 289089 - DNA, 296 bp, Glycine max
  unsure (1)..(296): unsure at all n locations
ctttgctcttcctctacattactgtgctcacagtcatagggtacantcaccagactgacctcaaggaaaatggtgaaatctgtggtggggttggcattcttggcattgcatgggcctttggtggcatgatcttcatccttgtctactgcactgctgggatttcagggggtcacattaacccagcggtgacatttgggctgtttttggctcgcaaggtgtctttgatccgagccatcatgtacatggtggctcagtgcttaggtgctatctgtggagttggtttggttaaggctttc

SEQ ID NO: 289090 - DNA, 298 bp, Glycine max
  unsure (1)..(298): unsure at all n locations
tgcaaaatgagttctacctcaagtctctaattctcgaagacattccaaaccacggaaccatnccacttcgtatgcaactcctgggtttacaattcaaaaaactacaagactgatcgcattttctttgccaacaatacatatcttccaagcgagacaccagctccacttttgaagtacagagaagaagaattgaagaatgtaagaggggatggaactggagagcgcaaggnatgggataggatctatgattatgatgtctacaatgacttgggcaacccggatagcggtgataaatatg

SEQ ID NO: 289091 - DNA, 293 bp, Glycine max
  unsure (1)..(293): unsure at all n locations
gtctaagtgtagtaccgttgggattcaaggaatcgcttgggccttcggtggcatgatcttcgccctcgtttactgcaccgctggcatctcagggggacacataaacccggcggtgacatttgggctgtttttggcgaggaagttgtcgttgcccagggcgattttctacatcgtgatncaatgcttgggtgctatttgtggcgctggcgtggtgaagggtttcgaggggaaaacaaaatacggtgcgttgaatggtggtgccaactttgttgcccctggttacaccaagggtg

SEQ ID NO: 289092 - DNA, 289 bp, Glycine max
  unsure (1)..(289): unsure at all n locations
acttttcctattggtgatgaatattcccttcagatgctgggtatgcatggtactgtttatgctaactatgctgttgacaatagtgatttgttgcttgcctttggggtaaggtttgatgaccgtgttactgggaagcttgaggcttttgctagtagggctaagattgttcacattgatattgattctgccgagattgggaagaacaagcaggcnacgtgtcggtttgcgcggatttgaagttggccttgaagggaattaatatgattttggaggagaaaggagtggaggg

SEQ ID NO: 289093 - DNA, 300 bp, Glycine max
ctcactcgcaagcaaaaagaaagaatcccaggcgaggagaaagatggaggggaaggagcaggatgtgtcgttgggagcgaacaagttccccgagagacagccgattgggacggcggcgcagagccaagacgacggcaaggactaccaggagccggcgccggcgccgctggttgacccgacggagtttacgtcatggtcgttttacagagcagggatagcagagtttgtggccacttttctgtttctctacatcaccgtcttaaccgttatgggagtcgccggggtaagtctaagtgtagt

SEQ ID NO: 289094 - DNA, 296 bp, Glycine max
  unsure (1)..(296): unsure at all n locations
ataactagaaacagtgtgatgaaaatgaaggtccttgttttcttcgttgcnacaattttngtagcatggcaatgccatgcgtatcatatgttccctctccgaatgaacactggctatggtgcccgtactccggaggtgaaatgcgcaagttggaggcttgctgtggaagcacacaacatctttggctttgagaccattcctgaagagtgcgttgaagcaacaaaggaatacatccatggcgaacaatatagatcagactccaaaacagttaaccaacaagcttacttttatgccag

SEQ ID NO: 289095 - DNA, 291 bp, Glycine max
gggacccaaagactcccttatccaagtagatcattcgaacttgctcattgctctcgctgtagaatcgattggcttcagagagatggtatacttctgcttgagctggataggttactgaggccaggaggttatttcgcgtactcatctcctgaagcctatgcacaggatgaagaggataggaggatatggcgagaaatgagcactcttgtggagaggatgtgctggaaaatagcttctaagaaggatcagactgttatttgggtcaagcctctcactaatagctgctactta

SEQ ID NO: 289096 - DNA, 166 bp, Glycine max
  unsure (1)..(166): unsure at all n locations
ctccctctttctcgtcactagctctgtgcattcttctctcgctctctgccttccatcacactcggcattacntttcccaagatagtagaagatggcagacactgaggatattcaacctcttgtntgtnacaatggaacaggaatggttaangctggattnncngga

SEQ ID NO: 289097 - DNA, 292 bp, Glycine max
  unsure (1)..(292): unsure at all n locations
cttacatacaagtgaaaattnaggatggtgagaccaaggtgttcanccctgaggaaatcagtgccatgattctgactaagatgaaggacactgcggaagcattccttggaaagaaaattaatgatgccgtggtcactgtcccagcttacttcaatgatgctcagaggcaggccaccaaggatgctggtgtcattgctggtctcaatgttgctagaattttcaatgaacccactgctgctgccattgcctatggattggacaagaaaggtggcgagaagaacattctagtctt

SEQ ID NO: 289098 - DNA, 288 bp, Glycine max
  unsure (1)..(288): unsure at all n locations
acctgacagaggcagttaacgaacaaacagatgggttgggccatagcactacacggcggcgcggcgacatcccgctttcccttccaccggagcgccgccagcctcgcgaggnggccctccgccactgcctccaaatcggcgtggaagctctcaaggccaaactgcctcctctcgacgtggttgaacttgtcgttcgggagttggagaacattccgcagtttaacgcgggaaggggatctgtgctgacttgcagaggcaccgtggaaatggaagcttccataatggacg

SEQ ID NO: 289099 - DNA, 287 bp, Glycine max
ctcgtatgggatcgcttcagcccttcatgcagctgttaactttggacagtatccatatggaggtttaatcctaaacaggccaaccattagcaggagattcatgcctgagaaagggtctgctgagtatgcagctttggctaagaaccctgagaaggagtttttgaagactattactggcaagaaggagaccctcattgaccttacaattatagaaatcttgtcaaggcacacatctgatgagttctaccttggggagagagatggtggtgactattggacttctgatg

SEQ ID NO: 289100 - DNA, 289 bp, Glycine max
  unsure (1)..(289): unsure at all n locations
ccgattgctagaatggaatttcgatgctcagtcatctcttttaccattctcttctctcttgctcttgcaggagagagccatgtccatgcatcgctacctgaggaagattattgggaagctgtttggccaaacactcccattcccactgcactgcgagagcttctaaagcctctccctgcaggtgntgaaatcgatgaactccctaagcaaattgatgatacacagtacccaaaaacattcttctataaagaagaccttcatccaggcaaaacaatgaaagtacaantca

SEQ ID NO: 289101 - DNA, 296 bp, Glycine max
  unsure (1)..(296): unsure at all n locations
gttgaattggaaganagagtagatcgatcagagaaagaggggagatggatgttgaagggtcatcgaagaagatgatagcgactcaggaggagatggtggaggccagggttcctctggcctacagggaccagtgcgcccacttgctcatccctctcaacaagtgcaggcaggccgagttctacctcccatggaagtgccaggaccagcgtcactcctacgaaaagtgccagtacgagctcgtcatggagagaatgctccagatgcaaaagatccgcgagcaccaacaaaaccccaac

SEQ ID NO: 289102 - DNA, 293 bp, Glycine max
  unsure (1)..(293): unsure at all n locations
ctttggaaagagaatgccctgggagttgtttcatgtgctgatatcctccgttctctctgccagagatggcattgtttcgctaggaggtccccatatccctcttaagactggaagaagggatggtagaaggagcagagctgatgtggttgagcagttcctcccagaccacaatgagtccatttctgcagttcttgacaagtttggngccatgggaattgacacccctggcgtcgttgcactgcttggagcacacagtgttggtcgaacccattgtgtgaagttggtgcaccgtt

SEQ ID NO: 289103 - DNA, 288 bp, Glycine max
cgtaaatcaattcaaacaataggagaagaagggactagcggcgaactcaaacggcgtcgtatcgactcgttgttcatccatttgagaggcatctggtagcggaagatggataagggtaagatccaagaggtgatcgagaaccaagtcctgacggtggcgcaagcgttcgaggacaagatcgacgatgagatcgccgccctggaacgcctcgatgccgacgacatcgaagccctccgcgagcgccgcctccagcagatgaagaagatggcggagaagcgctcccgctgg

SEQ ID NO: 289104 - DNA, 281 bp, Glycine max
  unsure (1)..(281): unsure at all n locations
gattggcaaaatcccatatctttcagagtttttgaactccttatatgattgtcaatacaagtcttttttctcagcatttgctggcctgacagagcaaattaagttggaccgctatctgcatccacacttccgatattacatgagggaggtcagaaccgttgtttattcccaatttttggaatcttacaagagtgtgacaattgaagccatggcaaaagcctttggagtgacagaggatttcattgatgtggagctatcacgctttattgcagcngggnngc

SEQ ID NO: 289105 - DNA, 240 bp, Glycine max
  unsure (1)..(240): unsure at all n locations
gctggtggagcacatggtggtggatatggaggtggtgaagganctggtggtggatacggtgcaggaaatggtggangaggtggcggtggaagtngaggtgnaggtggaggagntgctggtggggcacatggaggtggatatggtngtggtgaaggtgctggacaaggagctggtggaggatatnntggtggagcagttggtggtgntggagncngcggcggcgnctctggtngtggaggt

SEQ ID NO: 289106 - DNA, 296 bp, Glycine max
  unsure (1)..(296): unsure at all n locations
tgaattcaaggtttcagcttttgagtaccactaccaatggtgattttnttcaaggaaaagatctcgcnatggttaaagttaatgtagcatgtgctgctgttggcttgacatcaagttacactccaactccattgttggaatctggtttgcaaaaagacagagggttaattgtggagtattttggaaggatgtcttacgttgctcataacgttaatcagccccaagagaaagatttgttagagggaaatttttcctttgatattaaatctcgctctagattggaaaaagtttcctct

SEQ ID NO: 289107 - DNA, 295 bp, Glycine max
  unsure (1)..(295): unsure at all n locations
cttttacatcaaaaattttatgcaatctgaatttttcctcgtgagtntcactcttgaagacattccaaatcatggaaccattcactttgtttgcaactcatgggtttacaatgcaaaaagttacaaaagggatcgcattttctttgctaataagacatatcttccaaatgaaactccaactccactagtgaagtacagccaagaagaattggaaaatctaagaggngatggaaaaggagagcgcaaggnatatgataggatctatgattatgatgtctataatgatttgggtaac

SEQ ID NO: 289108 - DNA, 287 bp, Glycine max
cattctccctttcctctccgaaccctcgatcactctcacgcgctcctatattcgctcctccaccgtcgctctctcgaacaaccacaacaccatcttcatcacatggcaaacgcagcatctggtatggcagtccatgatgactgcaagttgaggtttttggagctgaaggcaaaaaggacacaccgtttcatagtttttaagattgaggagcagcagaagcaggtcattgtggagaagcttggtgagcctgcccagggctatgaagatttcactgccagccttcctgc

SEQ ID NO: 289109 - DNA, 285 bp, Glycine max
aaagagacgtagagctgctatgggagattatgcatggtctgttggggatagagttgatgcatggatacaagaaagctggcaggaaggagtcataacagagaagaataaaaaagatgaaacaacatttactgttcactttcctgctagtggagaaacgttggttgttagagcttggcatctccgtccatcccttatctggaaggatggaaaatggattgaatcttacaaagtggggacaaatgacagttctacccatgagggtgatacaccaaatgaaaaacgacc

SEQ ID NO: 289110 - DNA, 284 bp, Glycine max
  unsure (1)..(284): unsure at all n locations
cagagagaagcgtcttaataaacgctcttctctgaaaaacctgatttcttctcttcttctcttctctttcgtntcgatcttcgatctctgaaaatgagagagtgcatttcaatccacatcggtcannanggnattcaagtcggaaacgcctgctgggagctctactgcctcgaacacggcattcagcctgatgggcagatgccaagtgataagactgttggtggaggtgatgatgctttcaacaccttcttcagtgnnactggggctggaaagcacgtgcctcg

SEQ ID NO: 289111 - DNA, 282 bp, Glycine max
  unsure (1)..(282): unsure at all n locations
tcgagataactagaaacagtgtgatgaaaatgaaggtccttgttttcttcgttgctacaattttngtagcatggcaatgccatgcgtacgatatgttccctctccgaatgaacactggctatggtgcccgtactccggaggtgaaatgcgcaagttggaggcttgctgtggaagcacacaanntctttggctttgagaccattcctgaagngtgcgttgaagcaacaaaggaatacatccatggcgaacaatatagatcagactccaaaacagttaaccaac

SEQ ID NO: 289112 - DNA, 282 bp, Glycine max
  unsure (1)..(282): unsure at all n locations
ctcattctgtgactctgtgcttagttaacgttaacagtgacttaagatggcggattctgcagatgtcacccnccgatgttgtgtccctcctctcttctcctcaaagggactttcttcttcgaaacaacggcgatcangttaaaattgacagcttgaagggtaagaaacttggtttgtatttttcggcatcctggtgtggtccatgtcaaacatttacgccaactttggtggatgtgtacaatgaggttgcaaaaaaaggtgacttccagatcgttttcatta

SEQ ID NO: 289113 - DNA, 283 bp, Glycine max
  unsure (1)..(283): unsure at all n locations
gtgggctctaatcatggatcccaggnacaggtttttcttcacaagtttatgagttatccccggccttcctgcacaaggactggattatggagcagtgggagaaaaattactatatcagttcaatagctggcgcagttaatggaagttccttggttgtcatgtccaaaggaactccttacacgcagcagtcctacaaagtgagtgaatcatttcctttcaaatggataaacaagangtggaaagaaggattccatgttacctcaatgactatgctggcagtcgc

SEQ ID NO: 289114 - DNA, 285 bp, Glycine max
gatcgagataactagaaacagtgtgatgaaaatgaaggtccttgttttcttcgttgctacaattttggtagcatggcaatgccatgcgtacgatatgttccctctccgaatgaacactggctatggtgcccgtactccggaggtgaaatgcgcaagttggaggcttgctgtggaagcacacaacatctttggctttgagaccattcctgaagagtgcgttgaagcaacaaaggaatacatccatggcgaacaatatagatcagactccaaaacagttaaccaaca

SEQ ID NO: 289115 - DNA, 266 bp, Glycine max
  unsure (1)..(266): unsure at all n locations
tctttcggagttcgtttgcgtgtgttgtgtgatcagtcacngatggcagcaccacctgcgagggcacgtgccgattacgattacctcatcaagcttcttcttattggcgatagggtgtcggaaagagttgtctgcttttgcgattttctgatggttccttcacaaccagttttatcaccaccattggcattgattttaagataagaaccattgaacttgatggcaaacgcattaagttacaaatctgggatactgctggtcaggng

SEQ ID NO: 289116 - DNA, 289 bp, Glycine max
ctaacctacctctttttcttctctctcaacaacttcaccttcttcctcctcgatcatgtctcacttcaagggcaagtaccatgatgagcttatcgccaatgctgcgtacattggcactcctggaaagggtattcttgctgctgatgagtcaacagggacaattggcaagcgtttggccagcatcagtgtagagaacattgaatccaacaggcgagctcttagggagctgcttttcactgctcctggtgttcttcaatatctcagtggtgtcatcctctttgaggaaacc

SEQ ID NO: 289117 - DNA, 286 bp, Glycine max
  unsure (1)..(286): unsure at all n locations
ggaagggcaaaataatggccttgttatgaacttctacaaggaatcatgccctcaggcngaagacatcatcacagaacaagtcaagcttctctacaagcgccacaagaacactgctttctcctggctcaggaacatcttccatgactgtgctgttcagagttgtgatgcttcactgttgctggactccacaagaaggagcttgtctgagaaggaaacagatagaagctttgggttgagaaatttcaggtacattgagaccatcaaagaagctttggaaagagaatgc

SEQ ID NO: 289118 - DNA, 284 bp, Glycine max
gcaattgcaaattcagaggatgtcgatcttcgagtacaacggaagcgccgtggtggctatggtcggcaagaactgcttcgccattgccagcgaccgaaggctcggcgttcagctccaaactatagccacggattttcaacgcatttccaagattcacgacaagctcttcatcgctctctctggcctcgccaccgatgctcaaacattgtatcagcgtcttgttttccggcacaaactgtaccagctgcgtgaagagagggatatgaaaccagagacctttgcca

SEQ ID NO: 289119 - DNA, 282 bp, Glycine max
  unsure (1)..(282): unsure at all n locations
gctgtaacccagagctccttcgcctcatcgatagtttcaagtctcgttttgacaatccgtgagggttagtgtgttgaatgatgctctgaagagcatgtacaacgccgagaagcgcgggaagcgccaggtcatgattaggccatcctccaaggtcatcataaaattcctattggtcatgcagaagcacgggtacattggtgagttcgagtatgttgatgaccacagggctgggaanatcgtggttgaattgaatgggcggctgaataagtgtggggttattag

SEQ ID NO: 289120 - DNA, 278 bp, Glycine max
  unsure (1)..(278): unsure at all n locations
gctcaggagtgtataatctgagcgatgtcanatcttgaggctcccttgcgccctaagaggaagaaggtttgggtggactatttcgttcagtttcgatggatccttgtnatttttgtggtccttcccatctccttcaccatttatttccntacatacctnggggntgtaagatctgagtggaagtcctataagacgcgtcagaaggaacatgatgagaatgtgaagaaggttatcaaacgtctcaaacagaggaatccatcanaagatggtcttgtctg

SEQ ID NO: 289121 - DNA, 278 bp, Glycine max
gatgaccactgttcattccatcactgccacccagaagactgttgatgggccatcagccaaagactggagaggtggaagagctgcttcatttaacatcattcctagcagcactggagctgccaaggctgttggaaaagtccttcctgctttgaacggaaaattgactggtatggcattccgtgttcccaccgtggatgtctctgttgttgacctcacagtgaggctggagaaggaagcctcctacgatgaaattaaaaatgctatcaaggaggaatcag

SEQ ID NO: 289122 - DNA, 268 bp, Glycine max
  unsure (1)..(268): unsure at all n locations
tttgattgtnactggcaccttgcatgagagagatgttcaagaattactagaaaaatgccatccactcggcatgtttgacagtattgctactctggctgttgctcagaatatgcgggagctttacaggctggttcttgttgacactcctctggctccatacttctctgagtgcattacatcagaggacttggatgatatgaacattgaaataatgaggaacactctttacaaggcataccttgaagacttctatagattttgtcagaaa

SEQ ID NO: 289123 - DNA, 280 bp, Glycine max
ccaccacccatttctcccggtgcgcgactcactttatttttattcatccttccttcctaacagatccgatccccgatggcggcggcgtcgcggcggctccgggacctgcagtcctcggcggggaacaagatctgcgtggactgctcccagaagaaccctcagtgggcctccgtctcctacggcgtcttcatgtgccttgagtgctccggcaagcaccgcggcctcggcgtccacatctccttcgtccgatccgtcaccatggactcctggtcagacatcc

SEQ ID NO: 289124 - DNA, 285 bp, Glycine max
  unsure (1)..(285): unsure at all n locations
aatcagaaccacattcctgggaattgatcttcccaatagaggtatgtggtcccaataatggttttgnaatgtngaagtnctgagtgggcaaatcaaacttcatggcatttgagtttccntattgacaatcccaaacaatctacagtttttgatattctcttgggaatctctcaagattttgaaattgctggtaatactcttatgccagctttttctgttccacaggctactgccagatcttctgaaaatgcggaatcctctgcatgatctggaatttgtgtnttc

SEQ ID NO: 289125 - DNA, 290 bp, Glycine max
  unsure (1)..(290): unsure at all n locations
ggaaaatgggcnggtacggtttcgacttgtttcttcttcgtgtttcttctttctctccttcttncttttnnaancntcngttnaggaatcctccggagaaggagttcgtactcacattggatcactctaactttcacgacactgtcagcaagcacgatttcatcgtcgtcgagncctacgccccagcgtgtggtcactgtaagaagcttgctccggagtatgagaaagctgcttctatcttgagtagtcatgatcctcctattgttttggctaaagtagatgccaatgag

SEQ ID NO: 289126 - DNA, 295 bp, Glycine max
  unsure (1)..(295): unsure at all n locations
aacacaatctctaatggcactcaggatgtgggcttcttccactgccaatgcactcaaanttctcttcngncntcanancttancncctngcttccttttccttcctcaagatgctaatcttccgtcttggatggantaagtacgctgattcacatgaatgggtcaagcacgaaggntcagtcgccaccattggnatcactgaccatgccnaggaccatcttggagaggtngtgnatgtggagntgcaagaacnaggtggnacantttccaagaantctggttcggagccgttgaa

SEQ ID NO: 289127 - DNA, 286 bp, Glycine max
  unsure (1)..(286): unsure at all n locations
cgcaagcnaaaagaaagantcccaggcgaggagaaagatggaagggaaagaacnagattttgtccgtngggagcnancaagttccccgagagacagccgattgggacggcggcgcagagccaagacgacggcaaggactaccaggagccggcgccggcgccgctggttgacccgacggagtttacgtcatggtcgttttacagagcagggatagcagagtttgtggccacttttcctgtttctctacatcaccgtcttaaccgttatgggagtcgccggggctaag

SEQ ID NO: 289128 - DNA, 283 bp, Glycine max
  unsure (1)..(283): unsure at all n locations
agcatttggnaatttggctgatgacaccatcaattttgaggcttttccccataagctggtgcagtttggagagattcnaggaaaaagtnatattgaaattttcacaagaggaatttcttacagcttggtcaactcaggtgcgtcctgcaacaactctgttggctgacgggtgtccatatttgtatgctatggtgcatgatagttcagtgtctacaataccaggtgattttgttattggtgttaagttgacaaccataaacaatatgtgtgcatatgggcttaa

SEQ ID NO: 289129 - DNA, 293 bp, Glycine max
  unsure (1)..(293): unsure at all n locations
gagaatggctcccaagggtttaatctttttgggctgtgttatgcttctcagcactgtcacttganttcnntgtcntncngaagntnanngnnntggtaannacntccnncaaggaatnatgccctaaggctgaagncatcatcaaggaccaagtcaagcttctctacaagcgcnacangancactgctttctcctggctcagaaacatcttcnatgactgtgcngttcagagttgtgatgcttcactgtngctggactccacaagaaggagttgtctgagaaggaaacagata

SEQ ID NO: 289130 - DNA, 293 bp, Glycine max
  unsure (1)..(293): unsure at all n locations
gcagatcttcgttaagaccctcaccggcaagactattaccctagaagtcnaaagctncgacaccancgncaacgnnaangntnagntttanggacanggagggattccccccagacnagnanagnntgnttnngccggganncagctcnaggacggaggcacccttgntgantacaantccagaaggagtcaactctccacttggtgttgcgncttcgtggtgntatgcagatttncgtgaaactcttacgggtaaganattaccttcgaggtggaganntctgacaccattc

SEQ ID NO: 289131 - DNA, 281 bp, Glycine max
  unsure (1)..(281): unsure at all n locations
ccagtttcaccgcacgaatatcttgttgtttggagcgatccgagaaaaacttctgtaaacntgttggtttaccnnggccntcctnacaggtgatgagcttctctctgactccttccgttacaaggaaattgagaatggaatgctgtgggaagttgaggggaantgggttgttaaaggagcagttccatgtagacattggtgcaaacccttcctgctgagggtggaggagaagatgagggagttgatgtgcaccgttaaggttgttgacattgtcgacacat

SEQ ID NO: 289132 - DNA, 285 bp, Glycine max
  unsure (1)..(285): unsure at all n locations
gtttctttgtgaaggttctgcagcttccatggagatggggaatgaaatatttctgggacacccctttnggngncnaatctngngnntgatgntcttggttggcagtacatatctggtngtctccctgatggtcgtgaaattgaccgaatagataatcccacagtttgagggatacaaattcgaccctantggagaatatgtgcgacgnctggcttccagancttgccaagattaccanccgagtggatacatcatccttggaatgcnccagangtcatgctaccc

SEQ ID NO: 289133 - DNA, 282 bp, Glycine max
  unsure (1)..(282): unsure at all n locations
ctcctactatctttaaatccttttgtaccctcaacttccctaagcactagcaccacacaatggtcnttgcnncaaaccccccttctcctcctttctccttaatttatgcctaanaggcacttatgctgactatggaggtggatggcaaggtggtcatgctacattttatggtgggggtgatgcatctggcacaatgggaggggcttgtggttatggaaatttgtacagccaaggctatggaaccaacactgcagcactcagcactgctctattcaacaatgg

SEQ ID NO: 289134 - DNA, 284 bp, Glycine max
  unsure (1)..(284): unsure at all n locations
gggaacagctagcagagaaacaaagttacaagtaaagtaaattaagaagatcattaatggcntcncntggnaaccttagnggcggttcaaccagctgcgctcaatggccttgctggaagttccctctctggaactaagctctctttcaagccctctcgccacactgtcaaatcccaagaacttcaggagtggtgccgtggtagcaaagtatggtgacaagagtgtgtactttgatttggaggatctgggcaacactacggggcagtgggacttgtatggctcag

SEQ ID NO: 289135 - DNA, 282 bp, Glycine max
  unsure (1)..(282): unsure at all n locations
gaagaggacaattttgctattgtatttgcagctatgggagttaacatggagactgcacagtttttcnaacgngacttnaaganganngnntcanngnnganantgantcttttccttaattnggcaaatgatcctacaattgancgtattatcactcctcgtattgcccttactactgcngaatatttggcttatgaatgtggcaagcatgtncttgtgatactccacagatatgagtcctnatgctgatgccctncgtgaggnatctgcngcccgagaaga

SEQ ID NO: 289136 - DNA, 290 bp, Glycine max
  unsure (1)..(290): unsure at all n locations
gngagttgttgctccttcgccacaactctctgccaacatgggtatctccagagattcnangnacnanangnntnncaatngnnggnangagganngcttgaaggaaaangagaaagtatgagcttggtcgccagcctgctaacactaagctgtcaagcaacaagacantcaggaggntccgtgttagagntggaaatgtgaaatggaggncattgagattggatactggaattactcccggggaatgaagctgtaactcgcaagnctcgtgnactagntgtggtttacaa

SEQ ID NO: 289137 - DNA, 280 bp, Glycine max
  unsure (1)..(280): unsure at all n locations
gtcttgcaattgaagttgaagtcttgcccttctctcttcaactccaaacacaanacatcatcatccatggctgctccgtctccactgtcggagctgtcaacagagctcttttgaacctgaatgggtctggacctggggtttcagctcccagttcatccttctttgggagcagcttgaagaaggttattggctcaagggtccccaacacaaagatttcctctggaagcttcaagattgttgctgtagaagagaagaaagagattgaagagacccagcagac

SEQ ID NO: 289138 - DNA, 277 bp, Glycine max
  unsure (1)..(277): unsure at all n locations
gctagagatatgggatgccatcaagtcctgggtgcaagaatatgtgtcattctactacaagtcagatgcagcaattcaacaagaccccgaactncaagcttggtggaaagaacttgtccaagtgggtcatggtgatttgaaagataagccatggtggcaaaagatgcaaacttgtgaagagttgattgaagcctcggccaccctcatatggatcgcttcagcccttcatgcagctgttaactttggacagtatccatatggaggtttaatctgaaca

SEQ ID NO: 289139 - DNA, 272 bp, Glycine max
  unsure (1)..(272): unsure at all n locations
tcttcctcaccgattgctagaatggaatttcgatgctcagtcatctcttttaccattctcttctctcttgctcttgcaggagagagccatgtccatgnntcgctacctgaggaagattattgggaagctgtttggccaaacactcccattcccactgcactgcgagagcttctaaagcctctccctgcaggtgttgaaatcgatgaactccctaagcaaattgatgatacacagtacccaaaaacattcttctataaagaagaccttcatcc

SEQ ID NO: 289140 - DNA, 262 bp, Glycine max
ctcagtcatgggcctgctatcttgttttaggtctaccgtcctgagaaaatgttccaaaggaagctctggcatgtcaagattcctgtatacgaacaattttcaacgaaacttgattttgtctggtggcaatgaatcgtattatgggtattttaacaggagatcatacacttcactttatatgggaactggaactgtgggtgggattacaagtgctagaatcagggtgccaaatgtaggatgtgaaggattcatgtgctcaagt

SEQ ID NO: 289141 - DNA, 271 bp, Glycine max
gccaattactttgggtcgctgacccaggcatcagctatcagagtggggtctttccaaggggaagaaatatatgctccattcaagagcctgcttccaatggtgaaccctgatgatgttgtgtttgggggatgggatatcagtaacttgaacctggctgatgccatggccagggccaaggtgtttgatatcgacctgcagaaacagttgaggccgtacatggaatccatggttccactccccggaatctatgacccggatttcattgctgcca

SEQ ID NO: 289142 - DNA, 269 bp, Glycine max
  unsure (1)..(269): unsure at all n locations
ggaagngttgagagnggtgtnttgaagngtggaatggtggtgantttgnaanaaatggangganaantgaagtnaagtntgtggagatgaanantgaangnnttanagaggtanatgatggtganaatgtgggattnaatgttaagaatgttgntgttaaggatttgaagngtggttatgttgagtaaaanttaaaggatgatantggaaaggatggtggtaanttnagagttaaagtgataatgatgaataanggtggtgagattgga

SEQ ID NO: 289143 - DNA, 220 bp, Glycine max
  unsure (1)..(220): unsure at all n locations
aattaccataaggtatangttcatctttttgtaaatgaaaagatatacgccgaanatgtttctcatcttgagaaaatcaanagggtagaggcttnattgggtttaggagcattactagaaaggatgacgggtttttaattacttctaaatgttttattctcgatgtttggatgtacgggtttnctaactatcttaaagttatatcagtgaatataaagtg

SEQ ID NO: 289144 - DNA, 277 bp, Glycine max
  unsure (1)..(277): unsure at all n locations
tcntgtttgcttggaaagttggaccagctcttgcatgtggaaatactgtcatccttaagantgctgaacaancaacctttaacanctctctatgtancaanactttttcatgaggctggtcttccaccaggtgttttgaatgtagtttctggctatggtccaactgctggtgcagctcnagcaagtcatatggatgttgacaagcnagcattcactggatctaccgagactggaaaanttgtgttgnattggctgcgcaaagcaatttgaagcctgt

SEQ ID NO: 289145 - DNA, 274 bp, Glycine max
agggctggccgtgatgggccaaaacctagccctgaacatcgcggaaaaggggtttcctatctccgtctacaaccgcacagcctcgaaagtggacgagaccgtagatcgggcccgcaacgagggctccctccctctcacgggccaatacacccctcgcgacttcgttctctccctccagcgccctagatccgtcatcatcctcgtcaaggccggcgcccccgtcgaccaaaccatcgccgccctctccgaccacctcgaccccggcgactgcatc

SEQ ID NO: 289146 - DNA, 270 bp, Glycine max
  unsure (1)..(270): unsure at all n locations
ggagattggatcacacttatacaaaattctccaattagtaacttgttgagagttgctgcttggaagaaaggctgtttaatggtcaagnttgcgangtctgggantgcagcagtcaaaaggagtgattgggcctcattggtacaagtgtntttancaaacngcaacantacagagcnttttgatgcatgtaagnggacaaaatcagaaccacattcctgggaattgatcttcccaatagnggtatgtggtcccaataatggttttgaaatg

SEQ ID NO: 289147 - DNA, 270 bp, Glycine max
  unsure (1)..(270): unsure at all n locations
catgaattcaaggtttcagcttttgagtaccactaccaatggtgattttnttcaaggaaaanatctcgcgatggttaaagttaatgtagcatgtgctgctgttggcttgacatcaagttacactccaactccattgttggaatctggtttgcaaaaagacagagggttaattgtggagtgttttggaaggatgtcttacgttgctcataacgttaatcagccccaagagaaagatttgttagagggaaattttccctttgatattaaatc

SEQ ID NO: 289148 - DNA, 277 bp, Glycine max
  unsure (1)..(277): unsure at all n locations
gtcgctggtggcaaacgaggatttccagcacatacttcgtgttttgaacacgaacgtagatgggaagcagaagataatgttcgctcttacctcaatcaaaggtattgggaggcgattttctaacatttgctgcaagaaggctgatgtngacatgaacaaaagagctggtgaactgagtgctgctgagttggatagtgtgatgactgtggttgccaacccccggcaattcaagattccggactggtttttgaacagaaagaaggactacaaggatggc

SEQ ID NO: 289149 - DNA, 180 bp, Glycine max
  unsure (1)..(180): unsure at all n locations
gttgatcgagataactanaaacagtgngatgaanatnaaggtccntgttnncttnggnnctacaatnttggnagcatnngcaatgccatgcgtacganatgttccctctccgaatgaacactggntatngtgcccgtactccggnggtgnaatgcgcaagttgnaggcttnctgtggaag

SEQ ID NO: 289150 - DNA, 279 bp, Glycine max
actcccttctggaacacaccgacgtgggctgttctcttggacaacgaagccatctacgacatctgtaggagatctctcgacatcgagaggcccacctacaccaacctcaacaggctcatttcccagatcatttcgtcgctaaccacttccttgaggtttgatggcgctatcaatgtggatatcactgagtttcagaccaaccttgtgccataccccaggatccacttcatgctttcttcttatgctccggttatctctgccgccaaggcctaccacgag

SEQ ID NO: 289151 - DNA, 274 bp, Glycine max
tctaaggccatggttaaatttcaacttaagaaagtgccctacacttgttactcaccaggaaactcttcagtcaaaggttaatgagtctaaggccatggttaaatttcaacttaagaaagtgctctgcatgggagtagctgtgggcaatgttagtatggaggaaaagcaaatcttccaaaatgttcaactgagtgttaacttccttgtctctttgttgaaaaagaactggcaaaatgttaggtgcttgtatctgaagagtacaatggggaaatgt

SEQ ID NO: 289152 - DNA, 272 bp, Glycine max
  unsure (1)..(272): unsure at all n locations
anacaacgcgcactctctcttttctctcttaacacaaaaaccctattcgttcttcgcggtttcgccgattctcgccatgccgaaagccaaatccgacgccaaagccgccgatancnggttgaagcgcaagggcgtggtgctggaaggaancaatcgaagaaagctgctaaggatcctaacaagccaaagagacntccaagcgctttcttcgttttcatgtccgagttcagagagcagtttaagaaggagcatcctaacaacaaatccgtccg

SEQ ID NO: 289153 - DNA, 268 bp, Glycine max
  unsure (1)..(268): unsure at all n locations
cctttttggtgcaatttctaataatgtgttgtatgttgccaacctcggcgactcgagagctgttcttggcaggagggatacggtgagaaagaacagtccagtggtggcacagcgtttgtcaacagatcataatgtagctgatgaagaggtgagaaaagaagttgaagctctccatcctgatgactcgcacattgtggtttataaccgtggagttncgaggattaagggcattatacaggtgtcaagatctatcggtgacgtgtatttg

SEQ ID NO: 289154 - DNA, 271 bp, Glycine max
  unsure (1)..(271): unsure at all n locations
atcnccttgcnncggttgctccaccacctaatcacttcccctgtaaatcacgtttanntngcacaangttttaaaaaatggccgatgctgaggacattcaacctcttgttgttgataatggaactggaatggtcaaggctggttttncaggtgatgacgntcctagggccgtgttccccagtattattgggcgaccacgccataccggtgtaatggttgggatgggtcagaaggatgcttacgtgggtnatgaagctcaatcaaaaagggg

SEQ ID NO: 289155 - DNA, 278 bp, Glycine max
  unsure (1)..(278): unsure at all n locations
gaatcattctacaccctacgcaagcctgtagcatctacaataaacacactagccggggcattgtaacaaanntttttgtggcatctcctgatccagctaganaggaaatgcgccaagcatgtttcgattacttgagccttggaggtgttttctcagatggnccaatagctctactctctggtctaaatcctcgtccattgagttnggttctccatttctncgncgtcgctatatatggtgttggccgcntgctcntacnatgtccttctcnaaaacgg

SEQ ID NO: 289156 - DNA, 265 bp, Glycine max
  unsure (1)..(265): unsure at all n locations
aagcttaactctcanattcttcaggagtctantgctaaananattaatnaaaatcccgangcaagatgggangctgctataaatcctcgnttctccaattatacagttnaacantttaagcgccttcttggagtcaaaccaatgcctaanaaggaacttagaagtacacctgctatntcnccacccaaagacgttgaaattgccaaagaattttgatgcgaggacagcttggtcgcagtgtagcacnattggaaganttctagnc

SEQ ID NO: 289157 - DNA, 263 bp, Glycine max
  unsure (1)..(263): unsure at all n locations
tcatgtttgcttggaaagttggaccagctcttgcatgtggaaatactgtcatccttaagactgctgaacaaacacctttaacagctctcnatgtagcaaaactttttcatgaggctggtcttccaccaggtgttttgaatgtagtttctggctatggtccaactgctggtgcagctctagcaagtcatatggatgttgacaagctagcattcactggatctaccgagactggaaaanttgtgcttggattggctgcgcaaagc

SEQ ID NO: 289158 - DNA, 267 bp, Glycine max
  unsure (1)..(267): unsure at all n locations
ccaattactttgggtcgctgacccaggcatcanctatcanagtggggtctttccaagggnaagaaatatatgctccattcaacancctgnttccaatggtgaaccctgatgatgttgtgtttngggnatgnnatancantaacttnaanctggangatgccatggncaggggcaaggtgtttgatatcnacctncagaaacagntcgaggncgtacatgnnatccatggttccactccccggaatctatgacccggntttnattgcc

SEQ ID NO: 289159 - DNA, 266 bp, Glycine max
  unsure (1)..(266): unsure at all n locations
tcttcctcaccgattgctagaatggaatttcgatgctcagtcatctccttttnncattntcttctctcttgctcttgcagganagagccatgtccatgcatcgctacntgaggaagattattgggaagctgtttggccaaacactcccattcccantgcactgcgagagcttctaaagcctctccctgcaggtgttgaaatcgatgaantccctaagcaaattgatgatacacagtacccaaaaacattcttctataaagnngacc

SEQ ID NO: 289160 - DNA, 265 bp, Glycine max
  unsure (1)..(265): unsure at all n locations
gcacngctngnnaatgcacaacaaggangttcgtcnaggccgccaccatcancgagancccgcncatggtcgcagtcgggtcgtcggctacgtcganaccccgcgcggcctccgctcgctcaccaccgtgtgggccgagcacctctcggacgaggtcaagcgtcgcttctacaagaactggtaccgctcgaagaagaaggcgttcaccaagtacgccaagaagcacgccgagttcgggttcggcctcgtcggtcgcccgcnagct

SEQ ID NO: 289161 - DNA, 268 bp, Glycine max
  unsure (1)..(268): unsure at all n locations
gtcttgcaattgaagttgaagtcttgcncttctctcttcaacttccaaacacaagacatcatcatccatggntgcctncgtctnccactgtcggagntgtcaacagagctcttttgaacctgaatgggtctggacctggggtttcagttcccagttcatccttntttgggagnagcttgaagaaggttattggctcaagggtcgccaacacaaagatttcctctggaagnttcaagnttgtngctgtagancanaagnaagagattnc

SEQ ID NO: 289162 - DNA, 285 bp, Glycine max
aggatgatatctacagaaatccaggtccacttcagtttgatggtcctggtgcgggtgcgaaggttataacttctttctgttgaagaccaggactacatgggccgcattaagaaacttcaggagtaccttgaacaggttcgaaccattgtgaagccaggatgcccccaggaggttttgaaagctgctctaagtgtcatggcgtcggttactgaagttctagctgcaatgtcaacatcttctactaacaccctgtcagccatgtgagagtaacaaatggatgttgta

SEQ ID NO: 289163 - DNA, 272 bp, Glycine max
  unsure (1)..(272): unsure at all n locations
atttgttcccttttnaatntctcncctgtattangatggaagcaactaatggacaccaaaacggttncattttgcttgtccactgccaanggaagtagtgatcccttgaactngggagcggnggcggaggcgatgaaggggagtcacctggacgaggtgaagcgcatggtggccgagtaccgcaagcncggtggtccggctcggnggagagantctcaccatcgctcaggtggccgnntggcggacangaccacggcgtggcggtggatnnc

SEQ ID NO: 289164 - DNA, 280 bp, Glycine max
gttcatcgtcccactttcttctccttttagggtttcctttttgtttctcctttccagatctgcatcttccattttttaggattaagcggtgagattcgtgaatctgagaaatgtcggattcttctcgggaggagaatgtttacatggcgaaattggcggagcaggccgagcgttacgaggagatggttgagttcatggagaaggtagcaaagactgtggaggttgaggagttgacggtggaggagagaaatcttctctctgtggcttacaagaacgtgat

SEQ ID NO: 289165 - DNA, 283 bp, Glycine max
ccgggtcgtgcctccggtgctgttactttgaagaaattagagtgctcaaagcaagcctacgctctgtatacattagcatgggataacaccacaggattctgatcctattgtgttggccttcgggatcggagtaatgattaacagggacagtcgggggcattcgtatttcatagtcagaggtgaaattcttggatttatgaaagacgaacaactgcgaaagcatttgccaaggatgttttcattaatcaagaacgaaagttgggggctcgaagacgatcagata

SEQ ID NO: 289166 - DNA, 286 bp, Glycine max
  unsure (1)..(286): unsure at all n locations
atgaggacctgccaaaggaagtgtgtgctttctcagtagcttcatcagggaagaggtgtttgttggagactgagaaggcagccgacggtggcgtcgagtaccaatgccggacatcggaagtggtggtggagaggatggcagactaacatagagacagaccaatgtgtggangcatgtggggttgataggaactctgttgggatttcatctgatgcctctttgagcctcaattcaccggcaagctttgctctcctgcatgttaccagaagtgccccaacattgttga

SEQ ID NO: 289167 - DNA, 286 bp, Glycine max
  unsure (1)..(286): unsure at all n locations
ccaatggctgnngcttgtntgtggatgcagaaatactacatggcttcctcaagggaactggttcgaattgttagcatccagaagtctccaattatacatctttttggtgaatctattgctggagcatccancatcaggggttttggacaagaaaaaaggttcatgaagcgaaacctctatcttcttgattgctttgcacgaccattcttctgcagtctttctgcaattgagtggctctgcctgcggatggagttatgtcaacctttgtatttgctttctgtatggt

SEQ ID NO: 289168 - DNA, 290 bp, Glycine max
  unsure (1)..(290): unsure at all n locations
aggnttgganggcattcaaggtcctgtttatgtgggtactggatgtgtctttaatagaanagctttgtatggctacgtcgnctcctattaaannccaagcataaaaagcctgggttgcttcttcacttctgtggtggtaaccgaaagaagagatcaaaatctagcaagaaaggctcagacaagaanaaatctagcaagaatgttganncaactgtgcccatctttagtcttgaggatatagaagagggggtggaaggtgctggatttgatgatgagaaatcactattatg

SEQ ID NO: 289169 - DNA, 290 bp, Glycine max
  unsure (1)..(290): unsure at all n locations
ccttgcctattgcacattcttcatcacttcattcaacatttctctctcccttagctagtttttaccaatggctgctgcggttagtgctgcagtctcttttccatccaccaagtctacctctctcccaagcaggacctccatcattaccccagagagagttgtattcaacnaggcttcattgcaatacagagatgtttgtagcagtggaagggtagtttccatcagagctcaagtcaccactgaggctccagccaaggttgaaaaagagtccaagaaacaggatgaaggtg

SEQ ID NO: 289170 - DNA, 293 bp, Glycine max
  unsure (1)..(293): unsure at all n locations
gatcgagataactagaaacagtgtgatgaaaatgaaggtccttgttttcttcgttgctacaattttcgtagcatggcaatgccatgcgtacgatatgttccctctccgaatgaacactggctatggtgcccgtactccggaggtgaaatgcgcaagttggaggcttgctgtggaagcacacaacntctttgngctttgagaccattcctgaagagtgcgttgaagcaacanaggaatacatccatggcgaacaatatagatcagactccaaaacagttaaccaacaagcttac

SEQ ID NO: 289171 - DNA, 295 bp, Glycine max
  unsure (1)..(295): unsure at all n locations
gatttatacagaggaaaggttggtctggatgttgctgaagctcagcatttgatggatggtcttgattggcaaggtgctgtgaaggatattgctgcttcggttaactggcttaaagcaaatggctcaaagaaggctggtgtaactggattttgtatgggaggtgctctctctattgccagttctgtcttggttcaagaggttgacgcttctgtagcattctatggagttccctgcttctcaacttgctgancccggcacaagccaaggctcctgttcaggctcattttggagagcc

SEQ ID NO: 289172 - DNA, 281 bp, Glycine max
agatttcattgtgatatcatttgtgtcactggatggactgccaccccaatgcaggatgttcaggttacaattgattggtttatttcctctcaggaatgtgttcccagaacctattgtgttttaaatccacaaaatcctttgtgttaaataggtggatgggaaaactgactttcccccagggcacttcccgaagtgttaagagaatgcctctttctatagggggaggagctggtgcaaagaatgctattctcatgaacatgccaaatgctgttctttcaatg

SEQ ID NO: 289173 - DNA, 280 bp, Glycine max
agaatggctcccaagggtttaacctttctggctgtgttaatatgcgtttcagcactgtcactgagtccttctgttgcgggggaagggcaaaataatggccttgttatgaacttctacaaggaatcatgccctcaggctgaagacatcatcacagaacaagtcaagcttctctacaagcgccacaagaacactgctttctcctggctcaggaacatcttccatgactgtgctgttcagagttgtgatgcttcactgttgctggactccacaagaaggagtt

SEQ ID NO: 289174 - DNA, 283 bp, Glycine max
  unsure (1)..(283): unsure at all n locations
agctagctagctaaaatggaattagttctacatttcctaaacaccacaacaattggagttgnatctctaatcttcctcttgtgtttgtttttgtatggtcccttaaaaaaagttcacggtagcagcaaagaggntcccacagttggtggtgcatggccaatatttggccatctcccattgttgattggttctaagtcanctcatanagccttgggtgctttggctgagaagcatgganccttgttcaccatcaagctcggtgccaagaagcttnggtagttag

SEQ ID NO: 289175 - DNA, 284 bp, Glycine max
  unsure (1)..(284): unsure at all n locations
gcgtcttcataaacgcctttcttctccgtttccgtttcctcgttcgaattcgctttttgatctgcgaaaatgagagagngcatctcgatccacattggtcaggctggtatccaggtcggaaatgcttgctgggagctctactgcctcgagcacggcatcgggcccgatgggcaaatgccaagtgacaagacagttggcggtggtgatgatgctttcaatactttcttcagcgagactggtgctggaaagcacgtgccacgtgcagtgtttgtagatctgagccc

SEQ ID NO: 289176 - DNA, 286 bp, Glycine max
  unsure (1)..(286): unsure at all n locations
cgcaaganaaaagaaagaatcccaggcgaggagaaagatggaggggaaggagcaggatgtgtcgttgggagcgaacaagttccccgagagacagccgattgggacggcggcgcagagccaagacgacggcaaggactaccaggagccggcgccggcgccgctggttgacccgacggagtttacgtcatggtcgttttacagagcagggatagcagagtttgtggccacttttctgtttctctacatccaccgtcttaaccgttatgggatncccggggnaanttaa

SEQ ID NO: 289177 - DNA, 286 bp, Glycine max
  unsure (1)..(286): unsure at all n locations
gatcgagataactagaaacagtgtgatgaaaatgaaggtccttgttttcttcgttgctacaattttcgtagnatggcaatgccatgcgtacgatatgttccctctccgaatgaacactggctatggtgcccgtactccggaggtgaaatgcgcaagttggaggcttgctgtggaagcacacaacatctttggcttgagaccattcctgaagantgcgttgaagcaacanaggaatacatccatggcgaacaatatagatcagactccaaaacagttaaccaacaag

SEQ ID NO: 289178 - DNA, 279 bp, Glycine max
ggttgtgaaagcagagaagtgagatacactaagttatcctcataaatacactctaattaggtggcaagataagtgtctaaccttagtaacattgccacatattgtgttcattttggaattgtgccactaaaattctattcaattcatctatggctgcctcttcttatgctatgcaatcaatcctggcaaaccctttgatccgcatttccagcgggtctagggtgaaccaatttggcgttcctgctttgcacatgagaaggaatgttggcctgagagtta

SEQ ID NO: 289179 - DNA, 277 bp, Glycine max
  unsure (1)..(277): unsure at all n locations
atttgattggngcggaagcaacccaatgcccccagagttttggatccttccatcttttcttcctatgcatccagctaagatgtggtgttactgtcgattggnatacatgcctatgtcttacttatatgggaagaggtttgtgggtccaatcacaccactcatcttacaattaagagaagagttgtttactcaaccttatgaaaaagttaattggnagaaagcgcgtcaccaatgtgcaaaggaagatcttactatccccatcctttgatacaagacc

SEQ ID NO: 289180 - DNA, 278 bp, Glycine max
aggtgatgtaattggtgatctcaactcaagaagaggacagatcaacagttttggtgacaaacctggtggccttaaggtggttgatgccctggtacctcttgctgagatgttccagtatgtcagcacactcagagggatgacaaagggccgtgcatcctacacaatgcaattagccatgtttgatgtggtgcctcagcacattcagaaccaacttgccacacaagagcaagaagttgccgcttaatgtatttgcttggtctcctaacaaggaacttctt

SEQ ID NO: 289181 - DNA, 277 bp, Glycine max
acgtttcggaagcagacacagatggctcgtacgaagcaaaccgctcgtaagtccacaggaggaaaggctcctaggaagcagcttgcaaccaaggctgcacgtaagtctgcaccaactactggtggtgtgaagaagccccaccgttatcgtccctggtaccgttgctcttcgtgagattaggaaataccagaagagtaccgagcttttgatccggaagctccccttccagaggctggttctgaaattgcttcggacttcaagactgatctgcgtttcc

SEQ ID NO: 289182 - DNA, 277 bp, Glycine max
ttggatggccataaaagcaaaggtttaacgtgaggctttggaaagcctttaccgactgttttaacttccttcctgtggcagcccttatagatgataaaatattgtgcatgcatggtggtctttcccctgaactcacaaacttggatgaaatcaggaatctacctcgtcctactgcgattcccgacaccggcttgctttgtgatttgcttggtctgatcctggtagggatgtgaagggttggggtatgaatgacagaggagtgtcctacacctttggc

SEQ ID NO: 289183 - DNA, 284 bp, Glycine max
  unsure (1)..(284): unsure at all n locations
ccagagccaaggtaggttaaacaatcttcttcatcgtcgtcgccgcaatgggacgtgtgatccgtgcgcangtaaggnagcaggctcggtcttcaagtcccacacgcaccaccgcaagggccctgcccgcttccggagcctggatttcggagagcgcaacggctacctgaagggtgtcgtcactgacgtcatccacgatcctggccgtggcgcgcctctcgctaaggtcgccttccgccacccgttccgctacaagaagcagancgagctcttcatcgccggcg

SEQ ID NO: 289184 - DNA, 288 bp, Glycine max
  unsure (1)..(288): unsure at all n locations
tcctcactctttctgggtagcaagtagcaacgcaaactcagatatggtttggtttcaatgcgaagattgcggagacaacctcaaaaagcccaagttgtctagtcacttccgaacttgctctgcctacnaattgtcgtgcattgactgtggggaaatatttgggcgtgataccgttcaggatcacacgcagttattcacagaagcggagaaatatggaccaaaaggccaaggaaaaacttttaacgttgcaactgccaagcctaatnaggatagcaagcaaaggctgac

SEQ ID NO: 289185 - DNA, 280 bp, Glycine max
  unsure (1)..(280): unsure at all n locations
attttcactacttgtctcttccctttttctttccagaacaacagaacaanagagcnttcgaagctccaccaatggcgggttacagagncgacgacgactacgactacctcttcaaggtggtcctcatcggcgactccggcgtgggcaagtccaacctcctctcgcgcttcaccaagaacgagttcaacctggagtccaagtcnaccattggcgtcgagttcgccacccgcaccttgaacgtcgattccaaagtcatcaaggccagatctgggatacgcag

SEQ ID NO: 289186 - DNA, 279 bp, Glycine max
taagctaaacaatttcatcaagcctgccatggcttcctcgtgtgcttcctctgccattgcagctgttgccatctccacaccaagttcccagaagaatggatcactcttgggaagcacaaaagcttcttttcttagtgggaggaaactgaaggtgaacagttttacagcaccagttggagcacgatccagcactacagtgtgtgcagttgctgagcctgataggcctctgtggttcccaggcagcacccctcctccatggctagatggcagtttgccagg

SEQ ID NO: 289187 - DNA, 284 bp, Glycine max
  unsure (1)..(284): unsure at all n locations
ggagaaccttcttttctctgtntttntgtngttattcttcttccagacctaaagacncaacagcaccgattctgatttcaagaattacatcatcatatcaagaaaaccttggaactacacaaaaatggtgtcggcgaacaaggagatggtcgtgcactgctttgacaccctcctcgctcactacaacagcacggaagcacctcctcctgccttcgatcaggctcaacatccattgtttgttacatggaagacagtggtgaatggtggagatcctcgcttcnggg

SEQ ID NO: 289188 - DNA, 285 bp, Glycine max
  unsure (1)..(285): unsure at all n locations
tcaaaagaagcatctcgtgtattgtctcttaaaaacaatggaattgatgtgccattgttcgagctttcttcttccgccggagaatcctanccacgacgtgttcgctttctctaaagtacgctctcgttgttctcaaccaaagcctaccgagattagctcctctgctctgggaccacgctcaagtacgagtttgcgctgatggaggtgccaatagggtgtatgatgaaatgcctcttttctccctcatcaacaaccttcccatgttcgcaccaggtacaagcctga

SEQ ID NO: 289189 - DNA, 278 bp, Glycine max
  unsure (1)..(278): unsure at all n locations
ccggtgagttcccaggcgactacgggctgggacactgctgggctttccgcagacccagaaaccttcgccaagaaccgtgaactcgaagtgatccactccaggngggccatgctcggagccttgggctgcgtcttcccggagttgctgtcccgcaacggggtgaagttcggagaagccgtgtggttcaaggccgggtcccagatcttcagcnagggtgggctcgactacttgggcaacccaagcctgatccacgcccagagcatcctcgccatctgggc

SEQ ID NO: 289190 - DNA, 255 bp, Glycine max
  unsure (1)..(255): unsure at all n locations
attgtcccagctcttaagaccacatncaaagaagctggggacagagtatgtggatctttatccgattcattggccagtgaggctgagacatgatcttgaaaatcctactgtttttaccaaggaagatgtgctgccctttgatatagaagggacatggaaagctatggaagagtgttacaagttgggaatagcaaagtccattggcatatgcaattatggtatcaaaaaactcactaaactcttggaaatagccac

SEQ ID NO: 289191 - DNA, 213 bp, Glycine max
tagtgcctccttgccagaagttaaaatggcccaagaaactttcctattcacatctgaatcagtgaacgaggggcaccctgacaagctctgtgaccagatctccgatgctgtgctcgatgcatgcttggagcaggaccctgacagcaaggttgcctgtgaaacctgcaccaagaccaacatggtgatggttttcggagagatcacaaccaaggc

SEQ ID NO: 289192 - DNA, 267 bp, Glycine max
  unsure (1)..(267): unsure at all n locations
ggttcattatgaagaaaagggacaagcttagttgtcaagttggaatcaacccatcactccatggaatggactggtttggccaatagattactgagtaagggcaacgatattctgtgttgcgattatgctagttttgatggtttgattaccaagcaagttatgagcaagatggcagaaatgataaacagtctttgnggtggtgatgaaaaattgatgccgtganaggacacacctgctgttggcttgttgttcaaggatggcattgtc

SEQ ID NO: 289193 - DNA, 278 bp, Glycine max
  unsure (1)..(278): unsure at all n locations
atgaaagagaatccgaggcgaagagaagagaaaaattaagatggaggggaaggagcaggatgtgtcgctgggagngaanaagttcccngagagacagccgattgggacggcggcgcagagccaagaacacggcaannantancaggagccggcgccggcgccactggttgacccgacggatttacgtcatggtcttttacagagcagggatagcagagtttgtggccattttctgtttctatanatcactgtcttaaccgtcatgggagtcgcggggc

SEQ ID NO: 289194 - DNA, 280 bp, Glycine max
  unsure (1)..(280): unsure at all n locations
aaacagtgtgatgaaaatgaaggtccttgttttcttcgttgctacaattttngtagcatggcaatgccatgcgtacgatatgttccctctccgaatgaacactggctatggtgcccgtactccggaggtgaaatgcgcaagttggaggcttgctgtggaancacacaacatctttggctttgagaccattcctgaagagtgcgttgaagcaacaaaggaatacatccatggcgaacaatatagatcagactccaaaacagttaaccaacaagcttacttt

SEQ ID NO: 289195 - DNA, 285 bp, Glycine max
  unsure (1)..(285): unsure at all n locations
aggctcgagtcagactccaaaacagttaaccaacaagcttacttttatgccagagacctcgaagtccatcccaaggacacatttgtgttcagtatagatggcaccgtactctctaatattccatactacaaaanacatggatatggggtggagaaatttaactcgaccttgtatgatgaatgggttaacaagggcaatgcaccggcactgcccgagactcttaagaattacaacaagctggtgtctcttggcttcaagattatattcttgtcaggaagaacactg

SEQ ID NO: 289196 - DNA, 284 bp, Glycine max
atctattacctcatgcagagacagatgcagttgatcctaagagcagacacaagggaaagcttgagacagagagtttgctgcaagcaaggggtgttaattggacttctataaggccagtctatatctatggacccttgaactacaaccctgttgaagagtggttcttccatagattgaaagccggacgcccaattcctatccccagctcaggactacagataacccaattggtcatgttaaggatttggcgacagttttatccaagttcttggtaatgagaaggc

SEQ ID NO: 289197 - DNA, 276 bp, Glycine max
tgagtacaagggcccatggaaggcaaagaaaatcaagaaccccaactataaaggaaaatggaaggcaccattgattgataacccagatttcaaggatgaccccgacctctatgttttccccaacttgaagtacgtggggattgaattgtggcaggtgaaatctggtactttgtttgacaatgtcttaattactgatgatcctgagtatgctaagcagctggttgaagaaacatggggcaaggcacaaggatgctgagaaggcagcatttgaggagg

SEQ ID NO: 289198 - DNA, 281 bp, Glycine max
  unsure (1)..(281): unsure at all n locations
agagctcttatgagtaccttagcactggacttaaacagtacaacttggataacaacatggacggtttttacattgctcctgcttttatggacaagcttgttgttcacatcagcaagaacttcatgaccctgcccaacatcaaggttctctcattcttggtatctggggaggcaaaggtcaaggaaaatccttccaatgcgagcttgtctttgccaagatgggaatcaaccctatcatgatgagtgctggagagttggaaagtgganatgcaggngagccag

SEQ ID NO: 289199 - DNA, 282 bp, Glycine max
  unsure (1)..(282): unsure at all n locations
tttgttgtgagctataagctagtttatcgtgaggagaatatgaagttgtttgttttctttgttgctgcagtagttttggtagcatggccatgccatggcgcaggctaccaaaggttccctctccgaatgaanaactggctatggtgagcgttcttcggaggtaaaatgcgcaagttttaggcttgctgtggaagcacacaacatccgagcctttaaaaccattcctgaagagtgcgttgaaccaacaaangactacattaatggcgaacaatttagatcaga

SEQ ID NO: 289200 - DNA, 283 bp, Glycine max
  unsure (1)..(283): unsure at all n locations
aaattagttcattctctttgcgcagttccctacctctcctttcaagatgcagatcttcgtcaagaccctcaccggaaagaccatcacccttgaggtggaaagctctgacaccatcgacaacgtcaaggccaagatccaggacaaggaaggaattcccccggatcagcaacgtctcatcttcgccggaaagcagctcgaggacggccgtaccctngccgactacaacatccagaaggagtcaacccttcaccttgtccttcgtctccgtggtggcatgcagatc

SEQ ID NO: 289201 - DNA, 276 bp, Glycine max
atcaacatcaaatcctccaacgttgtctcgtacaaaattcacttggacacggggttcccgaccttgacgctggaagaacaaagcttggccatatcgctgccgctaaagtacggtccctttgttgagtccattaacaagaggggtttgaacttgtcggaggtggtgtgctcctgcttcaccgtggggtggtacggggaagccaagagcactagggctttgaggttggagtgtttttccaagaatggaactgcgaatatctacgtgaggcccattagt

SEQ ID NO: 289202 - DNA, 290 bp, Glycine max
  unsure (1)..(290): unsure at all n locations
cnatcgtagccgtcgcantctgtgttttctgcgccgtctccgatctccgacaatggcgacccaaatgagcaagaagagaaagttcgtagctgatggagtgttcttcgctgaactgaacgaggttctgacaagagagttggccgaggacggttactccggcgtggaagttagggttacgccgatgcgcaccgaaatcataattagagccaccagaacccaagctgttctcggtgagaagggaaggagataagggaattacctctgtggttcagaagaggttcaagtttccc

SEQ ID NO: 289203 - DNA, 285 bp, Glycine max
  unsure (1)..(285): unsure at all n locations
ggacttcattcggaatcagtacagagacaggggctatcaagaggtcatatctcccaatgtatttaacatggnactgtgggtgcaatctggtcatgctgcaaattatagggaggatatgtntatcttagaggttgacaaacaagagtttgggntgaaaccaatgaattgcccagggcactgcctgatgtttaaacacagggttcgatcatatagagaacttcctcttcgtttcgctgattttggggttttgcatcggaatgaggctagtggcgccctgagtggatt

SEQ ID NO: 289204 - DNA, 281 bp, Glycine max
  unsure (1)..(281): unsure at all n locations
anaaattttntntctttgtgtgtgtatggtgatgataacttaattagtgttcatgaatatgtcaagccttactttagtggttctaaattgaaaagctttctagctggtcataatatcaccattactgatggtattgacaaaactagtgcaactttgcaatttagaaagttagcagattgtgattttctcaagagaaactttaagcagatgtctaatgttttgtgggtggctcctgaggacaaggcgagtttgtggtcacaacttcattatgtttcgtgtaa

SEQ ID NO: 289205 - DNA, 282 bp, Glycine max
tattgtcaatgaagttttcaacagtcctcgagctatgcggataccaccaacctgtccactggccaggatcagacctcttgtgggaagatatgtgccgcctgaagttgttgctgttcgggtgccacttctaaatttgtccaattttcaaatcaacgattggcccgatatgtcagcaaaaagctatgcaatcatggttctcatcctccctactgatagtgttagaaaatggcgagaccatgagttggaacttgttgatgtggttgcagatcaggtagcagttgc

SEQ ID NO: 289206 - DNA, 283 bp, Glycine max
  unsure (1)..(283): unsure at all n locations
ctttgttcactcttcttctcttgcggctagggttttagcgcanttcttctagatttaaggaagatgggtaaggacaacgttcacatcagtattgtggtcattggccatgtcgactctgggaaatccactaccactggtcacctgatttacaagcttggaggcattgacaagcgtgttattgagaggtttgagaaggaagctgctgagatgaacaagaggtctttcaagtatgcctgggtgctggacaaacttaaggctgagcgtgaaagaggaatcaccattg

SEQ ID NO: 289207 - DNA, 280 bp, Glycine max
  unsure (1)..(280): unsure at all n locations
tgactggtattcccgttgctagcactttaatgggccttggaacttatcctattggggatgaatattcccttcanatgtngggtatgcatggtactgtttatgctaactatgctgttgacaatagtgatttgttgcttgcctttggggtancctttgatgaccgtgttactgggaagcttgaggcttttgctagtagggctaagattgttcacattgatattgattctgctgagattggaaagaataagcaggcgcatgtgtcggtttgcgcggatttgaa

SEQ ID NO: 289208 - DNA, 282 bp, Glycine max
  unsure (1)..(282): unsure at all n locations
ggtggtgtcgtcgacctcaccggcctcatcctcaaactcaagtccttctgcctccgcatggacgcattcgggtnnttcgncttcgtcagcgccaagaagaaggagctcgacggcctacgcgccgagatgcctgtggctctggcggagtgcgttgatccggcgaaattcgtgctggaggcgatctccgaggtgtttccggtcgacaagagaggggacaaggccggccacgacttgggctgggcctgcgtccttgtcctggagtcgctgattccggtcgtggtc

SEQ ID NO: 289209 - DNA, 284 bp, Glycine max
  unsure (1)..(284): unsure at all n locations
agctatgaaaaattactgcgccaggctaaagctccaagtatgtnctnnacaatccttcaaaaattnngnnnctcgtgnntgtatggtgatgataactnaattagtgttcatgaatatgtcaagccttactttagtggttctaaattgaaaagctttctagctggtcataatatcaccattactgatggtattgacaaaactagtgcaactttgcaatttagaaagttagcagattgtgattttctcaagagaaactttaagcagatgtctaatgttntgtgggt

SEQ ID NO: 289210 - DNA, 285 bp, Glycine max
  unsure (1)..(285): unsure at all n locations
agtcccatagcagcgatgggaatcgatcttaaggctgggggtaagagcaaaaagaccanaagaacagcaccaaaatccaatgacatctacctcaaattacttgtcaagctttatcggttccttgttcgaaggactggcagcaatttcaatgctgttatactcaagcgcttgttcatgagcaaggttaacaagcctccaatttctttgtcaaggttaattaagtatacaaaggggaaggaggataaaattgctgtaatagtggggactgtaactgatgatatcana

SEQ ID NO: 289211 - DNA, 284 bp, Glycine max
agcacttcttcttttcacactgccgctgcaacaatggcttcagagaagaaactttcgaacccaatgagggagataaaagtgcagaagctcgttctcaatatctctgttggcgagagtggagatcgtctcaccagagccgccaaggtgttggaacaacttagtggccaaaccccagtgttttccaaagcaaggtacactgttcgttcctttgggattagaagaaatgagaagattgcatgctatgtcactgtcagaggtgacaaggcaatgcaacttttggagag

SEQ ID NO: 289212 - DNA, 281 bp, Glycine max
  unsure (1)..(281): unsure at all n locations
ggagattgggatcacacttatacaaaattctccaattagtaacttgttgagagttgctgcttggaagaaaggctgtttaatggtcaagattgtgatgtctgggaatgcagcagtcaaaaggagtgattgggcctcattggtacaagtgtntttaacaaacagcaacagtacagagcattttgatgcatgtaagtggacaaaatcagaaccacattcctgggaattgatcttcccaatagaggtatgtggtcccaataatggttnnnaaatgtggagttctg

SEQ ID NO: 289213 - DNA, 282 bp, Glycine max
  unsure (1)..(282): unsure at all n locations
cacttgtggctgatattcagaatgtgaagccaacacacatttttaatgcagcaggagtaactggcagacccaatgttgattggtgtgaatctcacaagacagaaaccattcgcaccaacgttgctgggactttaacattggctgatgtcagcagagagcatggaatcttgatgataaattatgctactgggtgcatatttgagtatgacaaagctcatccagagggttctggcattggctttaaggaggaagacaaacccaacttcattggttctttncatt

SEQ ID NO: 289214 - DNA, 280 bp, Glycine max
  unsure (1)..(280): unsure at all n locations
tgactggtattcccgttgctagcactttaatgggccttggaacttatcctattggggatgaatattcccttcanatgttgggtatgcatggnactgtttatgctaactatgctgttgacaatagtgatttgttgcttgcctttggggtaaggtttgatgaccgtgttactgggaagcttgaggcttttgctagtagggctaagattgttcacattgatattgattctgctgagattggaaanaataagcaggcgcatgtgtcggtttgcgcggatttgaa

SEQ ID NO: 289215 - DNA, 284 bp, Glycine max
  unsure (1)..(284): unsure at all n locations
tccggttatggcgtccgccttgggcacttcttcaattgcngttctgccttcgcgctacttctcttcttcttcctcccagccttccattcacactctctctnnaacttcagggcagaactatgggcggaagttttatggaggaattggaatccatggcataaagggaagggctcagctctcggttaccaatgttgccactgaagttaactctgnagaacaggctcagagtattgcttctaaaganagccagaggccagtatacccattttctgccatanttggnc

SEQ ID NO: 289216 - DNA, 286 bp, Glycine max
  unsure (1)..(286): unsure at all n locations
gcttcttaaggccttagattactgtcattctcaaggcataatgcatagagatgtcaagcctcataatgttatgatagatcctgaattacggaaacttcgcttgatagattggggtcttgctgaattttatcatcctggaaaggaatacaatgttcgtgtggcttcaagatactttaagggccctgaacttctagttgatttacaagactatgactactcattagacatgtggagtcttggctgcatgtttgctggantgatatttcgcaaggaaccttttttttat

SEQ ID NO: 289217 - DNA, 227 bp, Glycine max
atcacgcatgtaatttttgatttgataggaaataatttgcaaagtcaagtcatgacatatctatggttcggaattaggatgaaacacttacctgtgcgagattgaaacactttcctctaaatggtcatttagaaacgaaatgctaacatccaaaatctcatttatggttatgggggatttcatcaacatactctccttccccggtaaacgcattgttcttttcactc

SEQ ID NO: 289218 - DNA, 282 bp, Glycine max
  unsure (1)..(282): unsure at all n locations
ctgctgccgtccctaatctgaaggctcccgccatctgcgatcggatttcatggctccaaagaaggacaagggctcccccaccttcatccaagcctgccaagtctggcggtggcnnnnnnnnnnnnnnnnnnnnnnnnnnnggtaagcaaaaggaaaaggtgaataacatggtgctcttcgatcagggtacctatgacaagctcctctctgaggcacccaaatacaagctcattactccttccattctctctgaccgtttgaggattaatggatcacttgcaa

SEQ ID NO: 289219 - DNA, 283 bp, Glycine max
  unsure (1)..(283): unsure at all n locations
anttctttcactcaaacacaccctnnaatacacccttaattatatcgcattctctttctcttaccgttagaattagattgcaacttattcctctctctccctctttttctggatcttcaacttctccctgantttgctgatttgggggattgagttggaaggggaaacatggctgcttcttctgcatctctttctggtgcttctgcttcggatcttctgaggagttcaaccagcggtttcaatggtgttcctttgagaaccttggggaagggaaagttggttt

SEQ ID NO: 289220 - DNA, 286 bp, Glycine max
  unsure (1)..(286): unsure at all n locations
cgttaggggcactcaacattttacactcttttcttcttctcnttgttgcttcggtgttgaatcatggatcagaaagtcgatntcaagtgttccgcattncatgggaaccactatcatcggcgttacttacaacggcggtgtcgttctcggagccgactctcgaaccagactggagtgtatgttgccaaccgagcatcggacaaaatcacacagctcactgataatgtttacgtgtgtcgctctggatcggctgctgattctcagattgtctctgactatgtgcgct

SEQ ID NO: 289221 - DNA, 280 bp, Glycine max
ttcccctgtaaatcacgtttagttcgcacaaggttttaaaaaatggctgatgctgaggacattcaacctcttgttgttgataatggaactggaatggtcaaggctggttttgcaggtgatgacgctcctagggccgtgttccccagtattattgggcgaccacgccataccggtgtaatggttgggatgggtcagaaggatgcttacgtgggtgatgaagctcaatcaaaaaggggtatactcaccttgaagtatcctatagagcatggcatagtcagcc

SEQ ID NO: 289222 - DNA, 280 bp, Glycine max
  unsure (1)..(280): unsure at all n locations
atccccttncaatttctgcagaagggaacccngtgagaaagatgtggcattcagagtgttgtactgtgggatatgccaactccggacctccacagcataaagaactnntggggtacttccatctatccaatggttcctgggcatgaggtagctggtgtagtaacagaggtgggaagcaaagtagagaagttcaaagttggggacaaggttggtgtgggatgcctggttgattcctgccgcacctgccaaaactgttgtgacaatcttgagaattattgtc

SEQ ID NO: 289223 - DNA, 275 bp, Glycine max
  unsure (1)..(275): unsure at all n locations
ggaaaatggctcttcttggatttcttcngggacttttctacatgatctcacatgtcaaggggtatggttttcgangntggaccaatgcacatgccaccttctatggagggggtgatgctctgggacaatgggtggggcttgtggttatggaaatctgtatagccaaggttatggaactgatacaacagcactgagcactgcactgttcaacaatggcttgagctgtggtgcatgctttcaaattaaatgtgcgaatgacccacaatggtgcctcc

SEQ ID NO: 289224 - DNA, 282 bp, Glycine max
  unsure (1)..(282): unsure at all n locations
gtattttcgaggtgaaggccactgctggtgatactcacttgggaggtgaagattttgataacagaatggtgaaccatntgttcangaattcaagaggaagaacaagaaggatattagtggaaatgccaganctctgaggaggttgagaacagcatgtgagcgggcaaagaggactctctcttccactgctcaaaccaccatagagattgattccttgtacgagggtattgacttctacacaaccattacccnangnncgttttgaagagctaaacatggatt

SEQ ID NO: 289225 - DNA, 212 bp, Glycine max
tcatttccaatcacaatggcagatcaactcaccgatgaacagatctcggagttcaaggaagccttcagtttgttcgataaggatggcgatggttgcatcacaacaaaggagcttgggactgttatgcgttcgttgggtcagaatccaacagaggctgagctccaagacatgatcaatgaagtagatgctgatgggaatggcaccattgactt

SEQ ID NO: 289226 - DNA, 275 bp, Glycine max
  unsure (1)..(275): unsure at all n locations
tgaggccttcaacaaatatggagcaaactgtggtccagaagctgtttggttcaagactggagctctgctttcttgatgggggtacgctgaactactttgggaaacccatccccatcaatcttattgtggctgtcattgctgagattgttcttgtgggaggtgcagagtactacagaattattaatggcctgaacttcgaagacaaacttcatccaggtggtccatttgacccattggggcttgcaaatgatccannnnccgctgcactgctanac

SEQ ID NO: 289227 - DNA, 275 bp, Glycine max
  unsure (1)..(275): unsure at all n locations
aattcacagctcaagtgcaaganatttcgtcaacagtaccatacatgattgcaagtggaaatcatgaacgtgactggccaaacacaggatcattctatgatactccagattcaggtggagaatgtggagtccctgcagaaaccatgtattattttcctgctgagaatagagccaaattctggtataaagcagattatggcctgtttcgnttcnggatagcagatagtgaacatgactggagagaaggatcanaacnatacaaattcnttgagcat

SEQ ID NO: 289228 - DNA, 275 bp, Glycine max
  unsure (1)..(275): unsure at all n locations
ctgcttgcacaaaagcnatgggctatgtccatttaatccaaacccgtgttctgatgcatggagtttggaatttctgaagcgtaccggatttcantgtgatatcatttgtgtcactggatggactgccaccccaatgcaggatgttcaggttacaattgattggtttatttcctctcaggaatgtgttcccagaactattgtgttttaaatccacaaaatcctttgtgttaaataggtggatgggaaaactgactttcccccagggcacttcccga

SEQ ID NO: 289229 - DNA, 275 bp, Glycine max
  unsure (1)..(275): unsure at all n locations
gttcttgacggaaaatccaactgagattgttaccatcataattgangactatgtgcacactccaaaggggttgactaatgtgttcacaagtgctggactggataagtattggtttcctgtgtccaagatgccgaaaaagggtgacgattggcccactgtgacggagatggttcaagcaaatcaccgacttgttgttttcacttccgatgcttcaaaggaagcaggggaaggaatagcttatcagtggaagcacatggttganaatgagtctggac

SEQ ID NO: 289230 - DNA, 276 bp, Glycine max
  unsure (1)..(276): unsure at all n locations
annaatcttgatgacagtttcagtgatgagaagttgaaggatctattttctgagtttggaactataatctcttgcaaggtgatgattgattcaaatggacggagtaaggggtctggttttgtttccttttctactcctgaggaagcaagtaaagctttgaatgaaatgaatggcaagttgattggacgaaagcctctatatgttgctgtggcccagcgcaaagaagagaggaaggctcatctacaggctcaatttgctcaaattcgagcactggtg

SEQ ID NO: 289231 - DNA, 278 bp, Glycine max
  unsure (1)..(278): unsure at all n locations
atccnttgcttcccaaagaaagagaaaataaaaagcaatgggtagccttgaagcggaaagaacaacagtaggattggcagcaagagacccttcagggattctctccccatacacctacaatctaagaaacacaggccctgatgatgtttacataaaagttcactactgtggaatttgccattctgatctccaccagattaaaaatgatcttggcatgtccaactatcccatggtcccaggacatgaagtggttggtgaggtactggaggtggggtcnc

SEQ ID NO: 289232 - DNA, 273 bp, Glycine max
  unsure (1)..(273): unsure at all n locations
ctgagatcactttgagcaatggtgaaggctgtggcagttcttggcagcagcgagggtgtcactggaactattttcttcantcagganggaaatggtccaaccaccgtaactggatctcttgctggtcttaagcctggtctccatggcttccatgtccatgccttgggggacactaccaatggttgcctgtcaactggagcgcatttcaatcctaataacaacgagcacggtgcccctgaggacgagaatcgtcatgctggtgatcttgggaat

SEQ ID NO: 289233 - DNA, 279 bp, Glycine max
  unsure (1)..(279): unsure at all n locations
aaaccctagctggataggtcaaacatcatcatgtcggacgaagagcaccatttcgagtccaaggcngacggccggtgcctccaaaanctaacctcagcaagccggtaccattcgcaagaacggctacatcgtcatcaaaggacgcccctgcaaggttgtggaagtcncnacttccaaaactggaaagcacggtcacgccaagtgcccactttgttggaattgatattttcactgccaagnaacttgaggatattgtgccctcttctcacaactgtgatg

SEQ ID NO: 289234 - DNA, 276 bp, Glycine max
atccatctatcttttctaacatggctgctgggactggacctctttgcagagattttggatggagatgcgtacaagtactatgctgatggagagtggaagaaatctgcttctgggaaaagtgtttccatcatcaaccccactaccagaaagactcaatacaaagttcaagcttgttcacaagaggaggttaataaggtcatggacttagcaaaatctgcacaaaagttatgggcaaagaccccactatggaaacgtgctgagcttcttcacaaggcc

SEQ ID NO: 289235 - DNA, 275 bp, Glycine max
attttgttggagatctcgtctttgaagtttctaagatgacttctccctacattaaatgtacagtctctttcctcatagcatttggaaatttggctgatgacaccatcaattttgaggcctttccccacaagctggtgcagtttggagaaattcaggaaaaagttgtattgaaattttcacaagaggaatttcttacagcttggtcaactcaggtgcgtcctgcaacaactctgttgggctgatgggtgcccatatttgtatgctatggtgcatga

SEQ ID NO: 289236 - DNA, 278 bp, Glycine max
  unsure (1)..(278): unsure at all n locations
atttcatttccctcccccaccctcaccaccaacgccaaacaagccctaaatctcnnnnnnnnnnnnnnnnnnnnnnnnaaccatgaganagattttgcacgttcagggaggccaatgcggtaaccaaatcggttccaagttctgggaggtgatctgcgacgagcacggcatcgatcccaccggaaagtacaacgaggaaggcaacagcagcatccaactcgaaaggatcaatgtgtattacaacgaggtctctggcggaaggtacgttccccgtgccg

SEQ ID NO: 289237 - DNA, 275 bp, Glycine max
  unsure (1)..(275): unsure at all n locations
tttcatttctacatccctggctctgttccgtcgatgacgatggcgtttagggtgcgaaaccctgacctccgctttctcattctnctctctctcttgtccatcacttccgccaaggtcttcttcgaggagcgtttcgatgacggatggggaaatcgttgggttaaatcanattggaaaaaagatgagaacctggctggggagtggaaccacacctctggccaatggaatggagacgctaacgacaaaggtattcaaaccagtgaggattacagatt

SEQ ID NO: 289238 - DNA, 288 bp, Glycine max
  unsure (1)..(288): unsure at all n locations
agatggcttctcctcttcttactccttanaagatgggcaaattcaatctgtcccatagagttgttgtggcaccgcncgaccagatagangtcttacgacaacgtccncacaaaccccatgtcatcctcnaactactcccaagagaaatttccaacgggaggcnttcctcattactgaanccactggcgncntnctgacanggctcaaggctatccgcaaacccctggcatatggactaaagaccatgttcaagcttggaaacccattgtcgatnccgtccacgccaaa

SEQ ID NO: 289239 - DNA, 269 bp, Glycine max
  unsure (1)..(269): unsure at all n locations
gctctggggagaagaatgttctcattnttgatctcggtggtgggacttttgancgtctctcttctcaccatcgaggagggtattttcgangtganggccactgcttggtgatactcattgggnangngaagattttgataacagaatggtgaaccattttgtncaggaattcaagaggaagaacaagaaggatattagtggaaatgccaganctctgaggaggttnagaacagcatgtnagcgggcaaagaggactctctcttccactg

SEQ ID NO: 289240 - DNA, 275 bp, Glycine max
  unsure (1)..(275): unsure at all n locations
caaaaatgagagaaatcatcagcattcacatangtcaggccgggatccaggttggcaactccttgctgggaactctactgcctggaanatggcatccagcccgatggcatgntgccaagtgactccttcttcngtgtagnccacgacgccttcaacaccttcttcagcganaccggntnnggcaancangtncctngcgncgtcttcgtngatctcgagcccatcgtcatcgacgaagtccgttgtggcacttancgtcnactcttncaccccga

SEQ ID NO: 289241 - DNA, 274 bp, Glycine max
  unsure (1)..(274): unsure at all n locations
gccgagtttgataggtttgacnacgtgcgtggactctttgaaggtggaattcatctccctacagatgcactcagtaaaattagccccctaccagtgctcaaggaaatcttccgcactgatggtgaaacagtcctcaagtttccaccacctcatgtcatgcnaagttagtaagtctgcatggatgactgatgaagaatttggaagagagatgcttgctggtgttaatccatgcctaattgagtgccttcaagtgttccctccaaagagcaagcta

SEQ ID NO: 289242 - DNA, 277 bp, Glycine max
  unsure (1)..(277): unsure at all n locations
gcagagtttagactttagactttagagtcagtgtacgcagaagagtaaaatcnattggcgatgatggagttgaaagagattcagagactcgaaggccacaccgataaggtttggagcttggcctggaacccgaccaccggtcacgccggtatcccactcgtcttcgcttcttgcagcggcgacaaaaccgtccgaatctgggagcagaacctctcctctggcctctgggcctgcacggcggttctggatgaaacgcacactcgaactgttcgatctt

SEQ ID NO: 289243 - DNA, 275 bp, Glycine max
  unsure (1)..(275): unsure at all n locations
ggcagatcttctcaaaccagatanattagctcctggttcattgatttgggctgcttggtgtccaaatggaactgatgagccaaattatgttggtgaggggttgccatgatatctggaactagcatggctgcaccacatatagctggaattgctgctctcataaagcagaagcatccgcattggagccctgcggccattaaatcagctttgatgacaacatcaacaactctagacagagcagggatcctcttctagcccagcaaattctgaatcag

SEQ ID NO: 289244 - DNA, 236 bp, Glycine max
  unsure (1)..(236): unsure at all n locations
ttgtngtntgtgtgtttgttttttctctcacctgnaaatgtcttnctgcggtggtaactgtggttacggaagcgcctgcnagtgcggcaacggctgcggaggctgcaagatgtacccagacttgagctanaccgagtcaaccaccaccgagaccttggtcatgggagtggcaccagttaaggctcaattcgagagtgctgaaatgggtgtncccgctgagaacgatggctgcaaat

SEQ ID NO: 289245 - DNA, 274 bp, Glycine max
  unsure (1)..(274): unsure at all n locations
canaatggtgaaanaggcaaaaggagatttgtttctggggatggtgaagagatgacattgattccgggaaccagtgttnaagaggcctacaacaagctaatagttgaacttgagagaagtgttcctacattggttggcattgaatgtcccaaggatgagaaacttcctcgtcgcaaaatttttgacaaacctaagacgcgctgcttcactattctccctatggagtttaatcttgtggttcgtcagangtttttaaattttgtgaggttcatta

SEQ ID NO: 289246 - DNA, 273 bp, Glycine max
  unsure (1)..(273): unsure at all n locations
cgtacctcccaggccgactgtgctgtccttattattgactccaccactggtggttttgaagctggtatttctaaggatggacagacccgtgagcatgctcttcttgctttcacccnaggtgtgaagcagatgatctgttgctgtaacaagatggatgccactacccccaagtactctaaggctaggtatgatgaaatcgtgaaggaagtctcttcttacttgaagaaggttggttacaacccagacaagattccctttgttcccatctctggt

SEQ ID NO: 289247 - DNA, 278 bp, Glycine max
  unsure (1)..(278): unsure at all n locations
cggaattgttgtnactttttgattcctaaattctctaaaattcgaaattctaatttcgttaggggaaaganattgtctgtgtgtnagtgcagtatggctggaaaaggcgagggtcctgctatcggaatcgatttgggaacgacgtactcttgcgtcggcntgtggcaacacgatcgtgttgaaatcatagccaacgatcagggtaacagaactaccccatcctacgtggctttcaccgncacagaacggttgatcggcgatncggcgnagaaccaggt

SEQ ID NO: 289248 - DNA, 274 bp, Glycine max
  unsure (1)..(274): unsure at all n locations
ctatttttcttcctcagtagtgtcnttnacgcttctcttctctgcagcaactatgcctaaccctanggtcttcttcganatgaccatcggcggtcaatctgctggccgcatcgtgatggagctctacgccgacgtcactccccgcaccgccgagaacttccgcgcgctttgcaccggcgagaagggcgtanggcggagggcaagcccctccactacaagggctcgtccttccaccgcgtgatcccgagtttcatgtgtcagggtggcgattcac

SEQ ID NO: 289249 - DNA, 276 bp, Glycine max
  unsure (1)..(276): unsure at all n locations
ccagcattcactganagcactcagtagggtttgcngtttcagagtttgtgacgcacgcatccatggccaccaccaccaacgccgccgcagccccgccgcgccagtctcccagaaggaagccgacatccagatgatgttagccgccgacgtccacctcggcaccaaaaactgcgacttccaaatggaacgttacatcttcaagcgccgcaacgacgggatttacattattaaccttgggaagacatgggagaagcttcagnttcagctagggttatt

SEQ ID NO: 289250 - DNA, 206 bp, Glycine max
  unsure (1)..(206): unsure at all n locations
tagtgcctccttgccagaagttaaaatggcccacgaaacttcctattcacatctgaatcagtgaacgaggggcancctgacaagctctgtgacnagatctccgatgctgtgctcgatgcatgnctggagcangancctgacagcaaggttgcctgtnanacntgnacnangacgaacatggggatggttttcggagagatnacaac

SEQ ID NO: 289251 - DNA, 273 bp, Glycine max
  unsure (1)..(273): unsure at all n locations
ccatgatanttcagtgtctacaataccaggtgattttntcattggtgtcaagttgacaaccataaacaatatgtgtgcatatgggctcaatcctggtatttcaggttctcgtcttttgggcaccattcctcagtccatttcacagcaaactgtttggnatcaaatggcaacagtgagaacaccattnaattttgattctagcaagcagagcttttgtcaatnttccattggaccttctcggtggaggaatttcagtggacnaaatgggagatg

SEQ ID NO: 289252 - DNA, 271 bp, Glycine max
  unsure (1)..(271): unsure at all n locations
tttggtttcaaatgcagcggttcatcctcttctcacagatgatgnttaccctcaaacacgtggtgctttcaccagttacaatgtttgggttacaccttacaacaagactgagaaatgggctggtggactttatgttgatcagagccgtggagatgatactttggctgtttggactaagcagantagggggattgagaacanggatnttgtgatgtggtacgtggtgggaatccaccatgttccgtgccaggaagattttccaataatgccc

SEQ ID NO: 289253 - DNA, 269 bp, Glycine max
aacataccaatctacaataaacgatgattctcattatctccctcattttttctcttctctctttctcccatgcttctgtcctagatttctgtgttgcagattatgcaggtcctattggactgcaggatattcctgcaagaagccttcaaaggtcacagcagatgattttgcttacagtggccttggcattgctggtaacacctcaaacattatcaaagctgcagtgacccctgcatttgatgctcagtttgctggtctcaacggtcttg

SEQ ID NO: 289254 - DNA, 274 bp, Glycine max
  unsure (1)..(274): unsure at all n locations
cgcttggnaactatgctgaatacagcggtgcanccanagaagaggaggtctncagtatgccaganttcgtaattggattgtgcaactagcaanacccctgatggccagaaganagctcttgtgataggncganncatagccaactttactgatgttgctgccacatttagtggtataattcgggcattgaaggagaaggagtcgaaattgaaagcagcaaggntgcacatctttgtgaggagagggggtcccaactaccagaagggtctagctt

SEQ ID NO: 289255 - DNA, 272 bp, Glycine max
  unsure (1)..(272): unsure at all n locations
ttcctgcgcgtgaacaagcctcaggtaagccaaagccatggttaancataacaatgttatccccaatggacacttccgtaagcactggcaganctatgtgaagacctggtttcaatcagccagcacggaaganaagaagacggttggctcgttcagaaganagcngtgaagattttccccagacctacagctggacctcttagacccattgtacatggtcaaactttgaaatacaacatgaaagtgagagctggaaggggatttncccttgc

SEQ ID NO: 289256 - DNA, 179 bp, Glycine max
  unsure (1)..(179): unsure at all n locations
cgtnggtattcctgagaatacaggtatagcattggcctgtgctatggatanttcttttagggggcgcgccagtnctgatatttacaccatctgctctcaagactgtgaattatggnatccngcttgcacaaaagcaatggctatgtcatttaatccaaacccgtgttctgatgcatgga

SEQ ID NO: 289257 - DNA, 266 bp, Glycine max
  unsure (1)..(266): unsure at all n locations
attttctgcatcatattgcacacagagatcgtgancgaaaatggcgacgttgaaggnncctgcacaacttcctncctccattggaagacagtgagcaattgcgaaaagcttttcaagggtggggnacgaatgacggattgataatatcaatcctgggtcacagaaacgcggctcagcgtaagttgattcgtgaagcttatagtacaacccatggagaagatcttcttaaagatttagacaaagaactttcaagtgactttgagcgg

SEQ ID NO: 289258 - DNA, 276 bp, Glycine max
  unsure (1)..(276): unsure at all n locations
cntcctattctaggttnttacgcatcacgtatccctgagaaaagagaggaaccanacttctctannnnnnnnnnnnnnnnnnnnnnnnnnnnatggttaaagacacaaagcctttagcctatgctgccaataatggataccaacaaaagggttcttcttttgattttgatcctagcgctcctccaccgtttcagattgcagaaatcagagcttcaataccaaaacattgctgggtcaagaatcnatggagatccctcagttatgttctcagggatg

SEQ ID NO: 289259 - DNA, 274 bp, Glycine max
  unsure (1)..(274): unsure at all n locations
ttccaatatatnccattctctctgtgtattnccctacctctccctttcaagatgcagatcttcgtcaagagcctcaccggcaagaccatnanccttgaggtggaaagctctgacagcatcgacaaggtcnaggncaanatccangacaaggaaggaatccccccggacnagcaacgtctcattttcgccggaangcaacttgangacggncgtaccctngctgnntacaacattcagnaggngnntattcttnacctcgtnctccgtctncgtg

SEQ ID NO: 289260 - DNA, 267 bp, Glycine max
  unsure (1)..(267): unsure at all n locations
cnagggttgtnctgccgcantgaagcaggctggtgctcgtgtcatcgtgaccgagattgatcccatctgtgcccttcaggctctcatggnaggccttcaggntctgaccttggaggatgttgtttctgangctgatatctttgtcaccaccaccggtaacaaggacatcatcatggttgaccacatgaggaaaatgaagaacaatgccattgtttgcnacattggtcactntgacaatgagatcgacatgcttgggctggagaacta

SEQ ID NO: 289261 - DNA, 270 bp, Glycine max
  unsure (1)..(270): unsure at all n locations
cccaaatgtatccaagatggacaaggcatcgttgttaggtgacgccatatcgtacataaatgagcngaaattgaagctcaacgggctggattcagagaaaggggaattggagaagcaattggattcagccaagaaggaacttgagctcgcgaccaaaaacnnnnnnnnnnnnnnnnnnnnnnnnnnnggactacctccatctaataacgaagaagcaaagaagacaacgaccaagctcgctgatttggagatagaggtgaagataattgg

SEQ ID NO: 289262 - DNA, 269 bp, Glycine max
cactcactaagctaaacaatttcatcaagcctgccatggcttcctcgtgtgcttcctctgccattgcagctgttgccatctccacaccaagttcccagaagaatggatcactcttgggaagcacaaaagcttcttttcttagtgggaggaaatgaaggtgaacagttttacagcaccagttggagcacgatccagcactacagtgtgtgcagttgctgagcctgataggcctctgtggttcccaggcagcacccctcctccatggctag

SEQ ID NO: 289263 - DNA, 271 bp, Glycine max
  unsure (1)..(271): unsure at all n locations
cgagataactagaaacagtgtgatgaaaatnaaggtccttgttttcttcgttgctacaattttngtagcatggcaatgccatncgtacgatatgttccctctccgaatgaacactggctatggtgcccgtactccggaggtgaaatgcgcaagtnggaggcttgctgtggaagcanacaacatctttggctttgagaccattcctgaagagtgcgttgaagcaacaaaggnatacatccatggcgaacaatatagatcagacnccaaaaca

SEQ ID NO: 289264 - DNA, 271 bp, Glycine max
  unsure (1)..(271): unsure at all n locations
cttcccattctagggntcccaaatggacgctggcggaaagatcaagaagggcgccggaggaagaaagggcggcggccctaagaagaagccggtttcaaggtccgtcaaggccggtctccaattccccgtcggaagaattggccgttatttgaagaaaggaaggtacgcccagcgtgtcggtaccgntggctcccgtttacttggccgcagttctcgagtacctagctgctgaggtgcttgagttggctgggaatgctgcacgtgacaacna

SEQ ID NO: 289265 - DNA, 274 bp, Glycine max
  unsure (1)..(274): unsure at all n locations
cggantccgcagcactgtcgcgcataggcctggcgggcctggcggtgatgggccaaaacctagccctaaacatcgcagaaaaggggttcccgatctccgtgtacaaccgcacggcctccaaagtggaccagaccgtagatcgtgcccgcnacgagggctccctccctctcacgggccaatacacccctcgcgacttcgttctctccctccagcgccccagatccgtcatcatcctcgtcaaggccggctccccagtcgaccacancatcgccgt

SEQ ID NO: 289266 - DNA, 279 bp, Glycine max
  unsure (1)..(279): unsure at all n locations
tctgacatgtgtgcgagtcaacgggcgagtaaacccgtaagcgcaaggnagctgattggtgggatccccctgtgggttncaccgccgaccnaccctgatcttctgtgaagggttcaccgtnagagcatacctgtgcgggacccgaaagatggtgaactatgtcctgatcggggcgaacntnatgaaactctggtgtaggcccgtaccgatantgacgtgcaaatcgttcgtngacttgggtataggggcgaaagactaatcgaaccgtctagtagctgg

SEQ ID NO: 289267 - DNA, 279 bp, Glycine max
  unsure (1)..(279): unsure at all n locations
cgatggaaaggctctggggtgaaaacttctttgatccagccacaaagaaatggtccagcaagaatactggttctgctacctgcaagcntgggtttgttcagttctgttacgagcccatcaagcagattattancacttgtatgaatgatcagaaggataagctgtggcctatgctgcaaaagcttggggtcaccatgaaatctgaggagaaggacctaatgggcaaagcattgatgaagcgtgtcatgcaaacctggcttccagcaagtagtgcattac

SEQ ID NO: 289268 - DNA, 278 bp, Glycine max
  unsure (1)..(278): unsure at all n locations
ctagaaacagtgtgatgaaaatgaaggtccttgttttcttcgttncntacaattttngtagcatggcaatgccatgcgtacgatatgttccctctccgaatgaacactggctatngtgcccgtactccggaggtgaaatgcgcaagttggaggcttgctgtgacnagcacacaacatctttggctttgagaccattcctgaagagtgcgttgaagcaacaaaggaatacatccatggcgaacaatatagatcagactccaaaacagttaaccaacaag

SEQ ID NO: 289269 - DNA, 276 bp, Glycine max
  unsure (1)..(276): unsure at all n locations
caataccaggtgattttgtcattggtgtcaagttgacaaccataaacaatatgtgtgcatatgggctcaatcctggtatttcaggttctcgtcttttgggcaccattcctcagtccatttcacagcaaactgtttggaatcaaatgncaacagtgagaacaccattgaattttgattctagcaagcagagcttttgtcaattttctattgaccttctcggtggaggaattttagtggacaaaactggagattggatcacacttatacaaaattctc

SEQ ID NO: 289270 - DNA, 275 bp, Glycine max
  unsure (1)..(275): unsure at all n locations
gnactcactggaaggaagatcattatcgacacctatggtggttggggtgctcatggtggtggtgccttctccggcaaggacccaaccaaggttgataggagtggtgcatacattgttaggcaagcagccaagagcgtggtagcttcagggcttgcacgacgttgcattgtgcaggtttcttatgcaattggagttccagagccactttctgtgtttgtagacacataccaaacggggaagattccagacaaggacatattggctctaattaagga

SEQ ID NO: 289271 - DNA, 275 bp, Glycine max
  unsure (1)..(275): unsure at all n locations
ttgaaaacacaaaagaaaaaaaatgggttcttctctgtggacctgnctgattttgttatcacttgcttctgcttccttcgccgccaacccaagagcaccaattgatgtgccatttggcagaaactatgtgcctacctgggcctttgatcacatcaaatacctcaatggtggttctgagattcagcttcatcttgataaatacacaggtactggcttccaatcaaaagggtcctacttgtttggtcacttcagcatgtacataaaattggttgctg

SEQ ID NO: 289272 - DNA, 276 bp, Glycine max
  unsure (1)..(276): unsure at all n locations
cgaaacatggcaagantggnggcactccaacagaaccaactatctttctctaccttagcttcctctctttctgacttcagtggaaccagacttcaaactcaacttcagttcaagaganagcaatgccatccaaaagggtctttctacgtctccgcatcgagcaccaagaaaatcctantaatgggaggcaccangtttattggtgtgtttntgtctaggctccttgtcaaaganggtcaccaggtgactttattcanaagaggtanagcgcctgtt

SEQ ID NO: 289273 - DNA, 286 bp, Glycine max
  unsure (1)..(286): unsure at all n locations
ccgatctcatgagatccattcaggccgatactccttattgttgcctcgcgttgtgntgtgcaccatgtgtgtcttaccttcttcgcaaacgagctctctatgatgatatgtcaaggtacacatgttgtgctggctacatgccttgcagtggtaggtgtggagaaagtaaatgtcctgaattttgcctttgcactgaggtttcctctgctttggaaattcagtcgcctcaactcgcttctantgcnagatgaatttaacattcaaactacgcatgtgntattgcatt

SEQ ID NO: 289274 - DNA, 272 bp, Glycine max
  unsure (1)..(272): unsure at all n locations
ccaganactccagtccacccggcatgtgctgagtgagtacggaaacatgtcaagcgcgtgtgttttgttcattctggatgaaatgaggaagaagtctaaggaggaagggaanagtaccactggagaagggttagagtggggggtgctattcggattcgggccgggtctaaccgttgagaccgttgttcttcacagtgttcccttngagggataaatcatgctgatgcggtgactagtgatttaagagtgatcaataaggaaccctcggaaat

SEQ ID NO: 289275 - DNA, 270 bp, Glycine max
  unsure (1)..(270): unsure at all n locations
cttaattagtgttcatgaatatgtcaagccttactttagtggttccnaattgaaaagctttctagctggtcataatatcaccattactgatggtattgacaaaactagtgcaactttgcaatttagaaagttagcagattgtgattttctcaagagaaactttaagcagatgtctaatgttttgtgggtggctcctgaggacaaggcgagtttgtggtcacaacttcattatgttccgtgtaataatctggaaatgcaagaagcttatct

SEQ ID NO: 289276 - DNA, 272 bp, Glycine max
  unsure (1)..(272): unsure at all n locations
gataactagaaacagtgtgatgaaaatgaangtcctgttttcttcgttgctacaattttngnancatggcaatgccatgcgtacgatatgttccctctccgaatgaacactggctatggtgcccgtactccggaggtgaaatgcgcaagttngaggcttgctgtggangcacacaacatctttggctttnagaccattcctgnagagtgcgttgaancaacaaaggaatacatccatggcgaacaatatagatcanactccaaaacagttat

SEQ ID NO: 289277 - DNA, 273 bp, Glycine max
  unsure (1)..(273): unsure at all n locations
ctnntcttctnttgcggtcagggttttatcgcanttcttctagacttaaggaagatgggtaaggnnaaggttcacatcantattgtggtcattggncatgtcgantctgggaaatccactancactggtcacctgatttacaagcttggaggcattgacaagcgtgttattgagaggtttganaaggaatctgctgatatnancaagaggtctttcaagtatgcctgggtgctggacaaacttaaggctgancgtgaaagannnatcaccatt

SEQ ID NO: 289278 - DNA, 284 bp, Glycine max
  unsure (1)..(284): unsure at all n locations
aagcgcaagatggaggaggaatgggcgttggccaagaagcaagaactcgatgctgccaagaagaagagagccgagagccgcaaactcatctacaacagagctaagcagtacgctaaggagtacgatcaccaggaganggaattgattcggttgaaacgcgaggccaagctgaaaggtggtttctatgtggatccagaggctaagctgttgtttattattcgcattcgtggtattaatgccatggaccccaaatcaaggaagatcctgcagttgttgcgattgag

SEQ ID NO: 289279 - DNA, 279 bp, Glycine max
  unsure (1)..(279): unsure at all n locations
ctctgtttctgtctctgtgtttgcggctgangattccgaacgaganaccttcttcgtttctcgcaaagtttaagtcatcatgggtaangaaaagactcacatcnacattgtcgtcattggacatgtcgactctgggaagtcaactaccactggtcatttgatctacaagcttggaggtattgacaagcgtgtgattgacaggttcgagaaggaggctgctgagatgaacaagaggtcattcangtatgcctgggtgcttgacaagtcaangctgagcgc

SEQ ID NO: 289280 - DNA, 275 bp, Glycine max
  unsure (1)..(275): unsure at all n locations
caaaaagaaagantcccaggcgaggagaaagatggaggggaaggagcaggatgtgtcgttnaccagcnaacaagttccccgagagacagccgattgggacggcggcgcaganccaagacgacggcaaggactaccaggagccggcgccggcgccgctggttgacccgacggagtttacgtcatggtcgttttacagagcagggatagcagagtttgtggccacttttctgtttctctacatcaccgtcttaaccgttatgggagtcgccggggct

SEQ ID NO: 289281 - DNA, 271 bp, Glycine max
ggaatttcgatgctcagtcatctcttttaccattctcttctctcttgctcttgcaggagagagccatgtccatgcatcgctacctgaggaagattattgggaagctgtttggccaaacactcccattcccactgcactgcgagagcttctaaagcctctccctgcaggtgttgaaatcgatgaactccctaagcaaattgatgatacacagtacccaaaaacattcttctataaagaagaccttcatccaggcaaaacaatgaaagtacaa

SEQ ID NO: 289282 - DNA, 273 bp, Glycine max
  unsure (1)..(273): unsure at all n locations
gangcccaaagtagaaagcccancagntatgaagtttcccaatacagatatcgcaatgtgccaataangcgcagagcatgggttgaaggtcagatgtctttcgatcagtctgtagtagcaattatgtctaaatgcaaagccagcatgagaatgggaaacactgatgctcaaattttgatggttccagggcgcagattcataggctcatggacattttttcaaaaatctgactcagaaagtgcgagtcnaaattgttacatctgaaaaaagttt

SEQ ID NO: 289283 - DNA, 271 bp, Glycine max
  unsure (1)..(271): unsure at all n locations
attggtacagcagctcagggtggtggtgacaaggactacaaggaggcacccccagctcctttgtttgaacctggtgagctcaaatcatggtccttctacagagctggaattgctgagtttgtggcaactttcttgttcctctacattaccatcttaactgtcatgggtgtcaacaggncaccctccaagtgtgcctctgttggcattcaaggcattgcttgggcctttggtggcatgatctttgcccttgtctactgcactgctggaattt

SEQ ID NO: 289284 - DNA, 275 bp, Glycine max
  unsure (1)..(275): unsure at all n locations
aaaatgaaggtccttgttttcttcgttgctacaattttngtagcatggcaatgccatgcgtacgatatgttccctctgccgaatgnacactggctatggtgcccgtactccggaggtgaaatgcgcaagttggcaggcttgctgtggaagcacacaacatctttggctttgagaccattcctgaagagtgcgttgaagcaacaaaggaatacatccatggcgaacaatatagatcagactccanaacagttaaccaacaagcttacttttatgcc

SEQ ID NO: 289285 - DNA, 290 bp, Glycine max
  unsure (1)..(290): unsure at all n locations
ctagtttatcgtgaggagaatatgaagttgtttgttttctttgttgctgcagtagttttggtagcatggccatgccatggcgcaggctaccaaaggttccctctccgaatgaaaactggctatggtgagcgttcttcggaggtaaaatgcgcaagttttaggcttgctgtggaagcacacaacatccgagccttaaaaccattcctgaagantgcgttgaaccaacaaaggactacattaatgggcgaacaatttagatcagactctaaaacagttaaccaacaagcttt

SEQ ID NO: 289286 - DNA, 281 bp, Glycine max
  unsure (1)..(281): unsure at all n locations
gaccagggtatcatgttcggatatnccaccgacgagacccccgagctccttcctctgaccgtcctcctctcccacaanctgaactcggccatgaccaaggctcgcnaggattgtactctgccatggctgcgacccgacaccaagactcaggtcactgtcgagtacgcccacgatggcggtgccgtcgtccctctccgtgttgacaccgtcgtcgtctctgnccagcanancgaggacatcactatcgagaagctccgcgaggagatcaaggagaagatcat

SEQ ID NO: 289287 - DNA, 277 bp, Glycine max
  unsure (1)..(277): unsure at all n locations
ctgcacttttcagttacaaagcatttcatngttttacaatatacaacactacaatggctgnntcaacaatggctctctcttcatcatcattggctggccaagctatcaagcttgccccctccacccctcagcttggtgttggaagggttagcatgagaaaaacagcctccaagactgttacctcaggaagcccatggtacggcccagatcgtgtcaagtacttgggcccattctctggtgagcccccatcctacctcactggtgaattcccaggtga

SEQ ID NO: 289288 - DNA, 272 bp, Glycine max
  unsure (1)..(272): unsure at all n locations
ctttcgtcagtntcgggggaaganatccagcagcaatggtgtacgtcaaggctcagaaatcaaaagcctacttcaagagatatcaagtcaagttcaagagaagaagagagggaaaaaccgattaccgtgccaggattcggttgattaatcaggacaagaacaaatataacactccgaaataccgatttgtggttcgctttagcaacaaggacattgttgcacaaataatatctgctagcattgccggcgatttagttcttgctacagcatat

SEQ ID NO: 289289 - DNA, 267 bp, Glycine max
  unsure (1)..(267): unsure at all n locations
cnagaatttttctttgatgtgcctgcngaagaggatcctgaagtccatctgggacagcttaagangttctcactacgagaactgcaagttgcaacagatagtttcagtaataagaacattcttgggaggggaggatttggtaaggtgtacaaaggacgtttggcagatggttcattggtggctgtgaaaagattgaaagaggaacgcacaccaggtggggagcttcagtttcagactgaagtagagatgattagcatggctgtgcat

SEQ ID NO: 289290 - DNA, 271 bp, Glycine max
  unsure (1)..(271): unsure at all n locations
caatggtggcacctttgcaccaggtagatgttctaaatacgttgccaattgtagtgctggcgattcatccactgaaccctatatcgttggacactacttattacttgctcatgaatctgctgccacattatacaagacaaaatatcaggctcgtcaaaaaggacaaattgggatcacnaatccaacacactactttttgccaaaatctcaaagtgctgcagattacaaggcagcaagtagagctctggacttcttctttggttggtattct

SEQ ID NO: 289291 - DNA, 271 bp, Glycine max
ctctttgcgcagttccctacctctcctttcaagatgcagatcttcgtcaagaccctcaccggaaagaccatcacccttgaggtggaaagctctgacaccatcgacaacgtcaaggccaagatccaggacaaggaaggaattcccccggatcagcaacgtctcatcttcgccggaaagcagctcgaggacggccgtaccctcgccgactacaacatccagaaggagtcaacccttcaccttgtccttcgtctccgtggtggcatgcagatct

SEQ ID NO: 289292 - DNA, 272 bp, Glycine max
aaaagacaacccagagagcgcgtcttaataaacgctcttctctgaaaacccccatttcttttcttctttcttcttctctttcgcttcttcgatcttcgatcttcgtcgctgaaaatgagagagtgcatttcaatccacatcggccaggccgggattcaggttggaaacgcctgctgggagctttactgcctcgaacacggcattcagcctgatgggcagatgccaagtgacaagaccgttggtggaggtgatgatgctttcaacaccttctt

SEQ ID NO: 289293 - DNA, 234 bp, Glycine max
gctcggttgatgaaatgaaaaggatcctcaagagtctgaatcattatgatgcccttggatttagccgccacaagaagattgatgccgctgttttgaaaaaggaatacaggaaaaaggctatgcttgttcatcctgataaaaatatgggcagttctttggcaagtgagtcatttaagaagcttcagtgcgcatacgaggttctttctgactccgtaaagaagcgagactatgatg

SEQ ID NO: 289294 - DNA, 287 bp, Glycine max
ctctgtttatctccgcactccgtcttcatcaatcagcatcaccaccgctccaacacaggggaaaatgagggagatccttcacgttcagggagggcaatgcgggaaccagatcggttcgaagttctgggaagtggtgtgcgacgagcacggcatagatccgacggggaagtacgtcggaaactcagatctacaactcgagcgcgtgaacgtgtactacaacgaagcttcctgcgggcggtttgtcccacgcgcagtgctgatggacctggagcccggaaccatggaca

SEQ ID NO: 289295 - DNA, 281 bp, Glycine max
  unsure (1)..(281): unsure at all n locations
acaaagtcaaagaatggatcctgaaggactacactctagcagctagtctcatgaggctccacttccatgattgctctgtcaggggatgtgatggttccattctgttgaagcatgatggaagtgagaggacagcacatgctagcaagacactgagagggtttgaagtggtggatgatatcaaggcagagttagagaaacagtgccccaagactgtgtcttgtgctgacattctcactgctgctgcaagngatgccacgtttgagttaggtgggccttattgg

SEQ ID NO: 289296 - DNA, 269 bp, Glycine max
  unsure (1)..(269): unsure at all n locations
cagtcttcaaatgatacattcccaactgtaatgcacattgcagccgcaatggaaataaactcaagactaattcccagcctgaaaaccttacatggtacactaaactcaaagtcaattgaatncaaagatattgtcaagattggacgcactcatactcaagatgcaacacctttgactcttggacaagagtttagtgggtatactacacaagtgaagtatggtattgatagagtaattggcactttgccgcacatgtatcagcttgccca

SEQ ID NO: 289297 - DNA, 269 bp, Glycine max
caattgaagttaaaagccttagccttccctacaactccaaacaccaaagacatcatcatccatggctgcctccgtctccactgtcggagctgtcaacagagctcttttgaacctgaatggttctggagctggagcttcagctcccagttcagccttctttgggaccagcttgaagaaggttattgcctcaagggtccccaacagcaaggtttccggtggaagcttcaagattgttgctgtagaagagaagaaagagattgaagagaccc

SEQ ID NO: 289298 - DNA, 269 bp, Glycine max
  unsure (1)..(269): unsure at all n locations
aagagaatggctcccaagggtttaatctttttggctntcgttatgcttctcagcactgtcactgagtcgttgtcttgcggaggataatggacttgttatgaacttctacaaggaatcatgccctcaggctgaagacatcatcaaagaacaagtcaagcttctctacaagcgccacaagaacntgctttctcctggctcagaaacatcttccatgactgtgctgttcagagttgtgatgcttcactgttgctggactccacaagaaggag

SEQ ID NO: 289299 - DNA, 270 bp, Glycine max
cctctgtgtatttccctacctctcccttcaagatgcagatcttcgtcaagaccctcaccggcaagaccatcacccttgaggtggaaagctctgacaccatcgacaacgtcaaggccaagatccaggacaaggaaggaatccccccggaccagcaacgtctcattttcgccggaaagcaacttgaggacggccgtacccttgctgactacaacattcagaaggagagtactcttcacctcgtcctccgtctccgtggtggcatgcagatct

SEQ ID NO: 289300 - DNA, 269 bp, Glycine max
  unsure (1)..(269): unsure at all n locations
acatagttggtgcaatgcttttggttgatacttatcataccaatcctgaaaatgcagttcgtagtatttttgtngcgcctttcagaggcngaaggcncattcgggtggttncatttccgnataccattgtncagattgaaccagacatgaattcaaggtttcagcttttgagtaccactaccaatggtgattttgttcaaggaaaagatctcgcgatggttaaagttaatgtngcatgtgctgctgttggcttgacatcaagttacact

SEQ ID NO: 289301 - DNA, 276 bp, Glycine max
cagtgaaacactagctagggtattgggagctctcgttgtttcggagttagggaccttacgcagccatggccactgctacgaatgccgccgccgccccaccacgccagctctcccagaaggaagctgacatccagatgatgttggccgccgacgtccacctcggcaccaagaactgcgacttccaaatggaacgttacatcttcaagcgccgcaacgacgggatttacattattaaccttgggaagacgtgggagaagcttcagctagcagctaggg

SEQ ID NO: 289302 - DNA, 278 bp, Glycine max
  unsure (1)..(278): unsure at all n locations
tttttcattgtgcattattcaatggccaccacagcagctctatccggaaccatggtgagcacctccttcatgaggaagcaacctatgacgaccaagagcctaaagacattccccaacgctctttttggtctgaaaggtggacgaggtggtcgtgtaacttgcatggcctcgtacaaggtgaagctcataaccccagaaggagaagtggagtttgaatgccnngatgatgtttcattgttgacaaggctgaggaagaaggcattgaattccctactcgt

SEQ ID NO: 289303 - DNA, 270 bp, Glycine max
  unsure (1)..(270): unsure at all n locations
ccttagccgaggtcacgaggagcactagctagtttcacaatttccaaatggctaggggattgaagaagcatcttcaagaggctcaatgctcctaagcattggatgcttgacaaactgggtggtgcatttgcgcccaaaccctcatctggaccacacaaatcnagggagtgccttcccctcatactcatcctacgaaaccggctaaagtatgctctgacttaccgtgaagtcatcgctattctgatgcagagacatgttcttgttgatgga

SEQ ID NO: 289304 - DNA, 274 bp, Glycine max
  unsure (1)..(274): unsure at all n locations
gtcatgggaagatgttcacaagattgggagggactcctgcagttatccgcttaccttcttgagtaaggctttttagatggtgactgtatgactgtcactggaaaaaccctagctgaaaatgcngaacttgtccctcctctgtccaacgggcaggaaataataaggccagtagnaaatcccatcaagaagacggctcacattcaaatattatatggaaaccttgcaccacagggttccgttgctaaaattactggaaaagaagggctgtacttct

SEQ ID NO: 289305 - DNA, 271 bp, Glycine max
  unsure (1)..(271): unsure at all n locations
ttttgattctagcaagcagagcttttgtcaattttctattgaccttctcggtggaggaattttagtggacaaaactggagattggancncacttatacaaaattcnccaattagtaacntggtgaagnntnnctgcntgggaagaaaggntgtttaatggncaagattgtgatgtctgggaatgcagcantcaaaaggagtgattgggcctcattggtacaagtgtttttaacaaacagcaacagcacagagcattttgatgcatgtaagt

SEQ ID NO: 289306 - DNA, 271 bp, Glycine max
  unsure (1)..(271): unsure at all n locations
gcttgtgtcgctggagtccatcgcttagaaaccaaaaggctctctcacgcagtcgcagtgagtganaaggaaaaccctaattgcggtattctcagtgccttcgagagaaagaaaaaatggnagataatcttgttctccgtggnaccatgcggggccacaccgacnttgtgacggcgnttgccactcccatcgacaactccgacatgatcgtcancggctnangngacaaatccatcatcctctggcatcttaccaaggaggncaagactta

SEQ ID NO: 289307 - DNA, 271 bp, Glycine max
  unsure (1)..(271): unsure at all n locations
ctcacgcatttcctcgtttttntcttcccttttctctttctccggcgacgatctcagattccgggccactcctctcgccggcgagcccttactcttccctcctccgtcgagccctctccgattcgaatcgttcccagcctcggaccaccatgaatcccgaatacgattatttgttcaagcttttgctcattggagattctggtgtaggcaagtcatgtcttctcctgaggtttgctgatgattcataccttgacagctatatcagtaccat

SEQ ID NO: 289308 - DNA, 265 bp, Glycine max
  unsure (1)..(265): unsure at all n locations
ctanaccttagtgttgggngttacagcnatttcaagttggtcttctattnnnnctgtnatttcatgtaggggcattcngtctataattgaagtagaaggantncnatctttcaagttcttgatttcacggntggaaagtctcanacgtangacatgangtattgggcgnactnagaagcctttgtggattangncggagcacatgcattgngttaaagtnacagtgctgaagcatttnaantctcnanncaaagaaagggnaaca

SEQ ID NO: 289309 - DNA, 267 bp, Glycine max
  unsure (1)..(267): unsure at all n locations
taatgggcaagaacaaagtccttgtcaaggtccacccagaaggaaaatatgttgttgacattgacaaaaatattgacattacaaagattactccatccactagagttgcantccgcaacgacagntaagttcttcacttanntctggcaagtaaagttgatccattggtcaatcngatgaaagttgagaaagttcccgattctacatatgacatgattggtggtttagaccagcaaattanagaaataaaagaggtcattgagctac

SEQ ID NO: 289310 - DNA, 208 bp, Glycine max
  unsure (1)..(208): unsure at all n locations
ganaagggtccattggagaatntngccgatnaccttgctgancntgtcaacaanaacgcctgggcctatgccagaactttcgtccccggaaagtggagcgtaaangaacggaattgactntnnacagttttaagattggtgtncgtgaagtacttcagataatgtgattatcctgtggttngatccaactcaatgttacttgcttttc

SEQ ID NO: 289311 - DNA, 267 bp, Glycine max
  unsure (1)..(267): unsure at all n locations
cgaagtgttcctacattggttggcattgaatgtcccaaggatgagaaacttcctcgtcgcaaaatttttgacaaacctaagacgcgctgcttcactattctccctatggagtttaatcntgtggttcgtcagaagtttttaaattttgtgaggttcattatgaagaaaagggacaagcttagttgtcaagttggaatcaacccatactccatggaatggactggtttggccaatagattactgagtaagggcaacgatattctntgt

SEQ ID NO: 289312 - DNA, 271 bp, Glycine max
  unsure (1)..(271): unsure at all n locations
ttccacccagaataattccncagacggagagtagttctacctcatcgatgttgtgcgcaaggaggctganaactgcgattgcntgaaggttttcaagggtgcantncctggggggaagaactngatcaaggattggnaacntggtggnttcnaaagntnagggaagantncccngttngantgntgnttanttccccngttttccnatctccaaaggtttcagacantgttgtggaaccctacatngctantctctctgttcaccagcttg

SEQ ID NO: 289313 - DNA, 268 bp, Glycine max
  unsure (1)..(268): unsure at all n locations
ctccaaacaaatttttgggctccaattacaacgcatcgatgtttccagcatttggaggtggggtcttgtgtgccaaggcatcaatgctcctgcagaatgttcctcctgctttgcttgttcggtttttgagggagcatcgatcagagtgggctgattatggagttgatgcatactctgccgnatgccttaaagctagtccctatgcagttccttgtgcaagacctggaggcttccccagcacccaggtcattttaccccttgctcatac

SEQ ID NO: 289314 - DNA, 270 bp, Glycine max
  unsure (1)..(270): unsure at all n locations
cactcattaattgcaagaatggnacttcgttgcttggtgatgtccctttctgttctcttcactcttggtcttgcgagagaaagccatggccagagacgaaggattttgggcatgtggttgggcaaaacannccccattccaaagttccatgcgagatcttctaaagcctggccnggnaggggttgaattngtggataacctcntgcaattggaggaacacangtaaccggaaacttcntgcaanaagtnngncttcattcanggnaaact

SEQ ID NO: 289315 - DNA, 264 bp, Glycine max
cctaacttaggtggtctcactgttgagcaggctatccaaaacaagaagttgttcatcttagatcaccatgactatctcattccatatttgaggaaaataaatgcaaataccacaaagacttatgctacaagaaccatatttttcttgaaaaatgatggaactttgacgccattggccattgagttaagtaagccgcatcctcagggtgaagaatatggtcctgttagcgaagtctacgtgccttcgagtgaaggagttgaagct

SEQ ID NO: 289316 - DNA, 292 bp, Glycine max
  unsure (1)..(292): unsure at all n locations
tgcatcttcccgtatttgacgaagataaacagcctacctattgcaaaagcttatgccacaaggacaatcctgttcttgaaagacgatggatctttaaaagccacttgctatcgaattaaggcaagcctggcaacagtggagtaaagtggtgctggcctggcaaacagaaggtgttggagagtaacaatttggttgttgggccaagggcttcatgtgcattggtgaatggaactctgggttattcattcagnctncattanaggcccanttgggtttaaaataactccatggc

SEQ ID NO: 289317 - DNA, 302 bp, Glycine max
  unsure (1)..(302): unsure at all n locations
ttcttcagaagattttcctgaaaaggaagatcaagaaaaacccaaaaagattgatgccagattgagacaaagagtagatcctcaanacaatgaggttcangctcanatggaaacaaatttgtttaaattgtctcttgatgatgtngaaactcctaaaggttccatgttggatcttaaaatttctcaatctaaaattgcacttcccaagaacacagttggaggaaccattctgcgtagtgatctattggcaaatnttntgacagagggcaatttagagcaagtgttgatttgcagcgcactca

SEQ ID NO: 289318 - DNA, 301 bp, Glycine max
  unsure (1)..(301): unsure at all n locations
accctactcattctccatacctcaacgaagaggttaaagagacggcaacactttgctgtccgccttgaccgagcagagttcgtcttggccctcgattttgccctaaagtactctcagtcacaacagacacnnnnnnnnnnnnnnnnnnnnnnaatggcaccgaagcagaccaaggctgagaagaagattgcttacgatgcgaantgtgcgacctaatggaggagtacggccagatcctcgttgtgaactccgataacgtgggatcgaaccagctccagaacattcgcaagggtctccgtgg

SEQ ID NO: 289319 - DNA, 300 bp, Glycine max
caaagaagagatagtgatgcttctaacactttcgatttaaccctagcccaggaggaatgcttgcagaggatacagagacgtatagatgttccatatgatagttctataattgagcaccacgatgcccttagggctttgtggaatgctgcatttcctgaagaagaacttcatggcttgatatctgagcagtggaaggaaatgggttggcaagggaaagatccatcaacagattttaggggtggtggtctatatcattggagaattttctcttctttgctaggaatttcccgaaatccttcc

SEQ ID NO: 289320 - DNA, 303 bp, Glycine max
  unsure (1)..(303): unsure at all n locations
gntcttganacacacacttnccatggtggttgatgaggaaaccaacatggaaagtgtgtgtntcaagagttagaatttanagagcgnaactacatgggattatctgattgtncttctgtggacagctcgactccgtccttctctgaagagactaaaagtaatctgaacctgaaagccactgaactcaggctcgggcttccaggatcacagtctcctgatagagattctgatctttgcttaagaagctcaactcaatttgatgaaaaaactttgtttccgttgcgtcctttgactgatgatcac

SEQ ID NO: 289321 - DNA, 300 bp, Glycine max
  unsure (1)..(300): unsure at all n locations
ccttctcttgcggctagggttttagcgcactttcttctagatttaaggaagatgggtaaggaaaaggttcacatcagtattgtggtcattggccatgtcgactctgggaaatccactaccactggtcacctgatttacaagcttggaggcattgacaagcgtgttattgagaggtttgagaaggaagctgctgagatgaacaagaggtctttcaagtatgcctgggtgctggacaaacttaaggctgagcgtgaaagaggaatcaccattgatattgctttgtggaagtntgaaacaaca

SEQ ID NO: 289322 - DNA, 303 bp, Glycine max
  unsure (1)..(303): unsure at all n locations
ctcaagtttttgaagtatagagatggcagagacattcctatttacctcagagtcagtgaacgagggacaccctgnccaagctctgtgaccaaatctctgatgctgtcctcgacgcttgcctcgaacaggacccagacagcaaggttgcctgcgaaacatgcaccaaaaccaacttggtcatggtcttcggagaaatcacgaccaaggccaatgttgactacgagaagatagtgcgtgacacctgcaggaacatcggctttgtctcaaacgatgtgggactggatgccgacaatgcaaggtcct

SEQ ID NO: 289323 - DNA, 306 bp, Glycine max
  unsure (1)..(306): unsure at all n locations
caagcctcaagctactgcaatgcatgtgggagctatagaaattatcattgatagtttcgcaagtctgactgtaanatagttggtgcaatgcttttggttgatacttatcataccaatcctgaaaatgcagttcgtagtanttttgttgcgcctttcagaggcggaaggcccattcgggtggttacatttccgnataccattgtgcagattgaancagacatgaattcaaggtttcagcttttganctannactaccaatggtgattttnttcaagganaagatctcgcgatggttaaagttaatgt

SEQ ID NO: 289324 - DNA, 307 bp, Glycine max
  unsure (1)..(307): unsure at all n locations
gacntancttcttcttctctcctcctccctctgccattgcagcaagggcacacctcaggcttccaacccatttcacgagggatcggattcgctcggccatcatggggaagaagaagaagagagtttcctcgaaggtgtggtgttattactgcgatcgcgaattcgacgacgagaagatcttggtgcagcatcagaaagccaagcactttaagtgccatgtctgccacaagaagctctctaccgctggcggcatggccatccacgtcctccaggtccacaaggaatccgtcaccaaggtacccaacgc

SEQ ID NO: 289325 - DNA, 306 bp, Glycine max
tccttccataaggcggattagaccctccaccaaatcagagacatattgggacctttcaatcttggaaatccgggagaatttacaatgctagaacttgccaaggtggttcaagaaacaatcgaccctgatgctaggatagagtacaggccgaacacagaggatgatccgcacaagagaaagcctgatataagtagggctaaggatcaacttggctgggaacccaaggttgatctgcgcaagggcctcccactaatggtttctgacttccggcaacgcatttttggtgaccagaaggaaaaggcaacc

SEQ ID NO: 289326 - DNA, 304 bp, Glycine max
caacatggatggattttacattgctccagcttttatggacaaacttgttgttcacattaccaagaacttcatgaccctgcccaacatcaaggttcctctcattcttggtatctggggaggcaagggacaaggaaaatctttccaatgtgagcttgtctttgccaagatgggaatcaaccccatcatgatgagtgctggagagttggaaagtggaaatgcaggagagccagcaaaactgatcaggcagagataccgtgaagccgcagacttgatcaagaagggaaagatgtgtgctctcttcatc

SEQ ID NO: 289327 - DNA, 301 bp, Glycine max
  unsure (1)..(301): unsure at all n locations
cacagtgcaggggctcaattatggagaaagcaattcaaagacagagagttctgcttgaacatcttcaanccatttcttcaagttcanatttttcctctcaaacccatcaatctacggatctctcagcttcattatgttttgctgggaattcttcgcatggtcaaacaggtggatcagatgatgacgtggtgattgtagctgcatatcgtactgccatctgcaaagcaaagcgtgggggctttaaggatacccttccagatgaccttcttgccacagttctgaaggctgtaatagagaaaac

SEQ ID NO: 289328 - DNA, 302 bp, Glycine max
gctaaacttattggactcgctggagaaaccaatgttcagggtgaagaacagaagaaactggatgttctttccaatgaggttttcatcaagggctctcataagcagtggccgaacatgcatcttggtttctgaagaagatgaagaagcgataattgtggagccttctaagcgcggaaagtactgtgtttgctttgacccattggatggctcgtccaacattgattgtggggtttccattggcacaatttttggggtttatgcgttgaaagatgtccatgaaccaaccatagaagatgtcctgc

SEQ ID NO: 289329 - DNA, 305 bp, Glycine max
cgttcgttcactttcactttaccaactcctaacaatttctctctgtttccttcttcaccgcatcaatggagttggacggcgttcttcctcgggcatgtgcaaccctctcctcgacatctctgccgtcgtcgacgacgctttcttgcaaaaatacggtatcaagttgaacgatgcgattctcgctgaggataagcacaaacctatgtatgaagaattggctaacaatcctaatgtggagtacattgctggaggtgctactcagaattcaatcagggttgctcagtggatgcttcaagcaccaggtg

SEQ ID NO: 289330 - DNA, 307 bp, Glycine max
  unsure (1)..(307): unsure at all n locations
gctagtttatcgtgaggagaatatgaagttgtttgttttctttgttgctgcagtagttttggtagcncggccatgcctcggcgcaggctaccaaaggttccctctccgaatgnaaactggctatggtgagcgttcttcggaggtaaaatgcgcaagttttaggcttgctgtggaagcacacaacatccgagcctttaaaaccattcctnnagagtgcgttgaaccaacaaaggactacattaatggcgaacaatttagatcagactctaaaacagtnaaccaacaagctttcttttatgctagtgaa

SEQ ID NO: 289331 - DNA, 305 bp, Glycine max
caattttcaaactcaattaccattccataacctaaatctcctctttgtttccgagtcagagagcaatggcacgtaccaagcaaaccgctcgcaagtccaccggcggaaaggcgccgaggaagcaattggcgactaaagccgctcgcaagtcagctccggccaccggcggagtgaagaagccccaccgcttcaggcccggaacggtggctctgagggagatcagaaagtaccagaagagcactgaacttctgatccgaaaactcccattccagaggctcgtcagagaaatcgctcaggatttcaaa

SEQ ID NO: 289332 - DNA, 303 bp, Glycine max
  unsure (1)..(303): unsure at all n locations
ttcgcacacntcgncttcaaaccnngatccgtgttcttcacccacgtctntctctcgnntcagancggaaacgtctcgctgtnccaagatgngcgtnggctcanaacattcccgatatggaggagggtaccttggagattggaatngaanacagaactgtatctggagttgctggaccattggtcattcttgacaaanttaagggacccaaatttcaagagattgtgcaatattcgtttaggagatggaactactcggcgtggacaagttctagaggttnatggcgaaaaggctgttgttcag

SEQ ID NO: 289333 - DNA, 299 bp, Glycine max
  unsure (1)..(299): unsure at all n locations
aaattgatggtggaacaaccaaggtancaattaaacgtgggaatccactatctgagcagggggtgcatganttccaaactnagttganatgctctcaaaacttcgttcaccgccaccttgtttcactgattggctactgtgaagaaaacactgaaatgatccttgtgtatgactatatggcctatggaacactcagggagcatctgtacaagactcagaaacctccacgcccatggaagcaaaggcttgagatatgcattggagctgctcggggtttacactatctacacactggtgct

SEQ ID NO: 289334 - DNA, 300 bp, Glycine max
gctagatactatggaggaaatgagtatattgacatgggctgagaccttgtgtcagaagcgtgcacttgaagcttttcgggctggatccagcaaaatggggagtcaatgtgcaatcattatctggatccccttctaacttccaagtttacactgctttattgaaacctcatgagagaattatggcacttgatcttccccatggtgggcatctgtcgcatggttatcagactgacaccaagaagatatcagctgtatctatattttttgaaacaatgccatacagattgaatgagagcactg

SEQ ID NO: 289335 - DNA, 299 bp, Glycine max
  unsure (1)..(299): unsure at all n locations
tttganncatccctcaagggatccactaactgaaggagcaatggggttgacatttaccaagctttttagccggcttttcgccaagaaggaaatgcgaattctaatggttggtcttgatgccgctggtaagaccaccatcctgtacaagctcaaacttggagagatcgttaccacaattcccaccattgggttcaacgtggagactgtggaatacaagaacattagtttcactgtctgggatgttggtggccaggacaagattcgtcccttgtggaggcactacttccaaaatacacagg

SEQ ID NO: 289336 - DNA, 299 bp, Glycine max
gtggttccaaatcttgatgcagctggtcttaatcttctttctagtatgctttgcttggatcccagcaaaagaattaccgccaggagcgctgtggagcatgaatacttcaaagacattaaatttgtgccctgattccatatcttgatggcaaacgtgtttatagtaatattgtgcagaatttatgggttttgactcttcgagaaatgcgtgttgtcttttgctactttttttgtgacttgggggttgggactgagtcatacttctattttttggtccttatagaatgtttcagattcaac

SEQ ID NO: 289337 - DNA, 299 bp, Glycine max
  unsure (1)..(299): unsure at all n locations
cagggcgcaaggtgttgagtgtactcggcgtcgagatcggcgaantgtttacgatgacgccgtgacctgcttcttcgtctcaaacctcttcgttccttcgattcattccatttctnccaaaatggccaaagacccagttcgcgttctcntcactggagccgcagggcaaattggatatgctcttgtccctatgattgctaggggagtgatgctgggtcctgaccagcccgtgatcctccacatgcttgacattcctccagcagcagagtccttgaatggggttaanatggaattggtgg

SEQ ID NO: 289338 - DNA, 297 bp, Glycine max
  unsure (1)..(297): unsure at all n locations
gtttgttgttgaatcgtgaaaatgttcagaaaccagtacgacacggacgtgaccacatggagccctgcgnggatgctgttccaggtggagtacgctatggangcggtgaagcagggctcggcggcgatagggctccgatcgaagacccacgtggtcctcgcatgcgtcaacaaggccaactccgaactctcctcgcaccagaagaagatcttcaaggtcgacaatcacatcggcgtcgccatcgctggcctcaccgccgatggccgcgtcctctcccgctacatgagatccgaatgc

SEQ ID NO: 289339 - DNA, 277 bp, Glycine max
  unsure (1)..(277): unsure at all n locations
atgcacgcaaatatatatgtgtatgaatctgcacttcatttcaaatcncaacaaaaaaccaaagtaatctaacaaagtaagcacaatgagggagatattgcacgtgcaaggtgggcaatgcgggaaccaaatcggttccaagttctgggaagtgatatgcgacgagcatggcatcgaccccaccggaaagtacaccggcgacgaggcctccgatctccaactggagaggatcaacgtctactacaatgangcctccggcggaaggtacgttccccgg

SEQ ID NO: 289340 - DNA, 305 bp, Glycine max
  unsure (1)..(305): unsure at all n locations
gcactccaacatgttctgaggaaagctgaggagtatctgggcacagtgcctnctgaaactccctactcagaatttgagcncaagttccaggagattngtttggngagagggtggggtgacaacgcggaggtgtgccttgagtcaattcaacttctcttggatcttcttgaggcccctgacccgtgcacccttgagactttccttggaagaatccctatggtgttcaatgttgttattcnttctccccatggttactttgcccaagataatgtcttnggataccctgacactggtggccaggttgt

SEQ ID NO: 289341 - DNA, 300 bp, Glycine max
  unsure (1)..(300): unsure at all n locations
gataactagaaacagtgtgatgaaaatgaaggtccttgttttcttcgttgctacaattttncgtagcatggcaatgccatgcgtacgatatgttccctctccgaatgaacactggctatggtgcccgtactccggaggtgaaatgcgcaagttggaggcttgctgtggaagcacacacacatctttggctttgagaccattcctgangagtgcgttgaagcaacaaaggaatacatccatggcgaacaatatagatcagactccaaaacagttaaccaacaagcttacttttatgccaga

SEQ ID NO: 289342 - DNA, 300 bp, Glycine max
  unsure (1)..(300): unsure at all n locations
cttaaagtaaatgttggaactgaacctgatgcagancttggtccantcattagcaaanaggcaaaggagcgaatacancgattaattcaatctggggttgaaagtngtgccagactagttcttgatggaagaantatagtggtcccaggatatgaatctggcaattttantggcccaaccatcttatcagatgtcaccgccaacatggagtgctacaaggaggagatctttggaccagttcttcttctcacggaggctgataacttggaagaggccataaacattatcaatgaaaacaag

SEQ ID NO: 289343 - DNA, 295 bp, Glycine max
  unsure (1)..(295): unsure at all n locations
tgagacagagatccaagtagtgcgttaaacctagtttgtntccgttgcttttacaattgcttatgttgtcaaataggacacccagttgttagtggcactggtctctcctttttgatgttttgatacattttgttggattttatttcgtcttatgttcttagctgaaaacaatgctgttactgcgtttgcnaatcaacaggatatcttgtttgcaaaanannaanaanaanaanaaantcaanaanaagcccaaanaatncaanannnnccaaancaaaatcgaaaantnctntnc

SEQ ID NO: 289344 - DNA, 294 bp, Glycine max
  unsure (1)..(294): unsure at all n locations
agagtttgttgtgagctataagctagtttatcgtgaggagaatatgaagttgtttgttttctntgttgctgcagtagttttggtagcatggccatgccatggcgcaggctaccaaaggttccctctccgaatganaactggctatggtgagcgttcttcggaggtaaaatgcgcaagttttaggcttgctgtggaagcacacaacatccgagcctttaaaaccattccngaagagtgcgttgaaccaacaaaggactaccttaatggcgaacaatttagatcagactctaaaac

SEQ ID NO: 289345 - DNA, 294 bp, Glycine max
  unsure (1)..(294): unsure at all n locations
gatcgagataactagaaacagtgtgatgaaaatgaaggtccttgttttcttcgttgctacaattttngtagcatggcaatgccatgcgtacgatatgttccctctccgaatgaacactggctatggtgcccgtactccggangtgaaatgcgcaagttggaggcttgctgtggaagcacacaacatcttcggctttgagaccattcctgaagagtgcgttgaagcaacaaaggaatacatccatggcgaacaatatagatcagactccaaaacagttaaccaacaagcttactt

SEQ ID NO: 289346 - DNA, 299 bp, Glycine max
  unsure (1)..(299): unsure at all n locations
aacggcgcaatcactgaggcgcagagacagcagcaacagcaaggggggaaggcgttagcgtttaagaagccgccgtcaaangaaccgtcacagcaaggtggacggtcgcgggtgccgcataaggatgccaatcatatgcgccgcacgtgtgttccagctcacgcgcgagcttggccacaagtccgacggtcaaaccatcgagtggctcctccgtcaggccgagccctccgtcatcgccgccaccggcancggcaccatccccgccagcttctcctccgtctccctctcctncccttcct

SEQ ID NO: 289347 - DNA, 300 bp, Glycine max
  unsure (1)..(300): unsure at all n locations
agagtgtgaactgcaaaggggcttctccagcctagtttgttctcagatcttcttcttccatggaccagtacgagaaggtggagaagatangcgagggaacatacgggcgtcgtttacaaggctcgcgaccgcgccaccaatgagacaatcgctctgaagaagattcgcctcgancaggaggacgaaggcgttcccagcaccgncattcgcgagatttctcttctcaaagagatgcagcataggancattgttnggttgcaggatgtagtgcacngtcnagangcgattntntctngttnt

SEQ ID NO: 289348 - DNA, 297 bp, Glycine max
  unsure (1)..(297): unsure at all n locations
ctcgtcatactttgttgaatggattcccaacaatgtgaagtccagcgtttgtnatattccacccaggaatttgaagatgtcatccacatttattggcaactcaacatcgattcaagagatgtttaggagggtcagcgagcagttcactgctatgtaccggcgcaaagccttcttgcactggtacactggggaggggatggacgagatggagttcaccgaggcagagagtaatatgaatgatttggtagcagagtaccagcagtaccaggatgcaacagcagaggaggatgcatacga

SEQ ID NO: 289349 - DNA, 283 bp, Glycine max
  unsure (1)..(283): unsure at all n locations
gtcaagtgccatggctaaaagcaccaacagcgagaggatgaagcagaacctgggacatatttgattttgtgctgagtgaagaggatttagagangatcagtcaggttccacaacgcaggcaatacacaggggacatatggctatctgaaaatgggtcttgcaagaccttggaagaactttgggatgganacgtttaagtatttcttcaaggataaaactatgttttgggatataaactatncgaataagcaagatttgaattccatgttattaagatgtcttg

SEQ ID NO: 289350 - DNA, 298 bp, Glycine max
  unsure (1)..(298): unsure at all n locations
gtctacccggagccttggtgtatgccacgactttttacggctggtatagctgaattctatgacgggntattacgcaaataagggtgtaaatatcattaaaggaactgttgctgttggattcacttctaattctgatggagaggtaaaagaagtcanactaaaggatggcagggtcctggaannnnnnnnnnnnnnnnnnnnnnnnngaggaaggcctcaaacagtcttagtcaaagggcaggttgaagaggagaagggtggaatcaagaccgatgctttcttcaaaactaatctctcc

SEQ ID NO: 289351 - DNA, 293 bp, Glycine max
  unsure (1)..(293): unsure at all n locations
cgcggtgagtgagtgagagacggaaagtnccaaagccaccgtcttctcttctcagagcttggctttgcttatcgattctctctcctctcatctttcncattcaaggtttgtaaaagatggccgatgctgagganattcaaccccttgtttgtgacaatggcactggaatggtcaaggctggatttgctggtgatgatgctcccagggctgtctttcccagtattgttggccgacctcgacacactggtgttatggttgggatgggtcaaaaggatgcctatgttggtgatgaa

SEQ ID NO: 289352 - DNA, 293 bp, Glycine max
  unsure (1)..(293): unsure at all n locations
cttgggaccttttttgctgggacagtgagaaaactctgccaaataatttttctgcagaattgctctcttgcaaattggatactgttactggccaatattatcctgagtgggctccaattaattgtcgagttcatcgacaaccaattcacatcactgaagganattatgtcaganagcaagatgtcagcattgaatatgatgcgtgtacaattccaaatgattgtngttcattggttgttgccaaggttggaaatcacaaacaaattgttggtttccatgttgctggaagcaaa

SEQ ID NO: 289353 - DNA, 299 bp, Glycine max
gcgtttgcttctcctccacccatccacaaacgaacacacactttgattgagaatggggcgtgttcgcacaaagacagtgaagaagtcctcgcggcaagtgatcgagaggtactactctcgcatgacgctggacttccacacgaacaagaaggttctggaagaggtggccatcattccctccaagaggctccgcaacaagatcgcgggattctccacccacctcatgaagcggatccagaagggtcccgtacgtggaatctccctcaagctgcaggaggaggagcgcgagcgccgcatgg

SEQ ID NO: 289354 - DNA, 269 bp, Glycine max
  unsure (1)..(269): unsure at all n locations
gatcctgccagtagtcatatgcttgtcctcaaagattaagccatgcatgtgtaagtatgaactaattcagactgtgaaactgcgaatggctcattanatcagttntagtttgtttgatggtatctactactcggataaccgtagtaattctagagctaatacgtgcaacaaaccccgacttctggnagggatgcatttattagataanaggtncacacaggctctgcctgttgcnttgatgattcatgataactcgtcggatcgcacgg

SEQ ID NO: 289355 - DNA, 267 bp, Glycine max
  unsure (1)..(267): unsure at all n locations
aacctacctctttttcttctctctcaacaacttcaccttcttcctcctcgatcatgtctcacttcaagggcaagtaccatgatgagcttatcgccaatgctgcgtacattggcactcctggaaagggtattcttgctgctgatgagtcaacagggacaattggcaagcgtttggccagcatcagtgtagagaacattgaatccaacaggcgagctcttagggagctgcttttcactgctcctggtgttcntcaatatctcagtggtg

SEQ ID NO: 289356 - DNA, 271 bp, Glycine max
  unsure (1)..(271): unsure at all n locations
atatctccatttccatttcctctctctcagtttccaagaatnctaagctatgggaaagtcttacccaaccgtgagcgctgattaccagaaggccgttgagaaggcgaagaagaagctcagaggcttcatcgctgagaagagatgcgctccttctaatgctccgtttggcatggcactctgctggaacttacgacgtgagctcgaagaaccggtggtcccttcggaaccatanagccacccctccgaactcgctcacggcgctaacannggt

SEQ ID NO: 289357 - DNA, 244 bp, Glycine max
  unsure (1)..(244): unsure at all n locations
gttgatcgagataactagaaacanncgtgatgaaaatgaaggtcttgtnntccttcgttgcnacaattttggtagcatggcantgccatgcgtacgatatgttccctctcccgaatgaacactggctatggtgnccgtactccggaggtgaaatgcgcaagttggaggctgctgtggaagcacacaacatctttggctttgagacnatncctgaagagtgcgttgaagcaacaaaggatacatc

SEQ ID NO: 289358 - DNA, 267 bp, Glycine max
ctggatgatgaggagcacattcttggaataaggatagttggaggtgaccacaggctgaggaactattcttccataatcaccgtccatccggaggtcattgatgggagacccagtacaatggtgattgaatcatttgtggtggatgtgcctgatgggaacaccagggatgaaacttgttactttgtggaggctttgatcaggtgtaacctaagctctttagctgatgtctcagagagaatggccgtgcaaggtcgaaccgatcctatc

SEQ ID NO: 289359 - DNA, 268 bp, Glycine max
  unsure (1)..(268): unsure at all n locations
ggctggagagtccagttatggggaggaagcngcttcagaccaacagtatggtgnggngantcatgatagagctnggtggcctatgagggaaaaagatagaggttcggaaagggactggtctggttcttctgagagaaggtacagagatgatagagntcaaggatatgagagagatgcatctagngaaaaagatatgggtctgatncatgaatggtctgaaagaaggcatcgtgatgatagaganacgggcagagaacgattcccgtnc

SEQ ID NO: 289360 - DNA, 263 bp, Glycine max
  unsure (1)..(263): unsure at all n locations
gttgagttccgttgctttgtnggngggcttgcttgggtcaccggcaacgatgccctcgagaaagccttttcaatctacggcgacatcgttgaatcgaaggttatcaacgaccgtgagactggaaggtccagaggattcggatttgtgaccttcgcctcagagcagtcaatgaaagatgcgatcgcaggaatgnacggccatgaccttgacggccgtaacatcactgtcaacgaagctcagacccgcgccagccgtggtggtgc

SEQ ID NO: 289361 - DNA, 269 bp, Glycine max
  unsure (1)..(269): unsure at all n locations
gngcacccagtgcttctnactgaggctccactcaacccaaaggccaacagagaaaaaatgacccanatcatgtttganaccttcaatgtgcctgccatgtatgtggccatccaagctgtcctctccctatatgcaagtggtcgcacaactggtattgttttggactctggcgatggtgttagtcacactgtgccaatctatgagggctatgcactcccctcatgccattcttcgtttggatcttgctgggccgtgatctgactgactct

SEQ ID NO: 289362 - DNA, 264 bp, Glycine max
  unsure (1)..(264): unsure at all n locations
ccgcgagataactagnaacagtgtgatgaaaatgaaggtccttgttttcttcgttgctacaattttggtagcatggcaatgccatgcgtacgatatgttccctctccgaatgaacactggncatggtgnccgtactccggaggtgaaatgcgcaagttggaggcttgctgtggaagcacacaacatcttnggctttgagaccattcctgaagagtgcgttgaagcaacaaaggaatacatccatggcgaacaatatagatcnnc

SEQ ID NO: 289363 - DNA, 256 bp, Glycine max
  unsure (1)..(256): unsure at all n locations
ctcttagtcccaattttctagggttttattcattttccgatggcttctgcagangttgagtaccgttgctttgtncggtgggctcgcttgggccactgacgaccatgccctcgagagagccttctctcagtacggcgaaatcgttganacgaagattatcaacgatcgtgagactggcagatccaggggttttggatttgtgaccttccgcctcggagcagttccatgaaagatgcgatcggagcgatgaatggcc

SEQ ID NO: 289364 - DNA, 264 bp, Glycine max
  unsure (1)..(264): unsure at all n locations
tttctctctcccttagtcaaagggactcattgttcttctcccaggntatttagaaaagcnaaatggtgaagatttgctgcattggtgctgganatgtggggggtcctactatggcagtcattgcacttaagtgcccatccattgaagttgctgttgtngatatctctaaatcccgcattgcagcctggaacagtgaccagcttctatctatgaacctggcttgatggtgttgtgaagcaatgccgtggcaagnacctcttctnc

SEQ ID NO: 289365 - DNA, 272 bp, Glycine max
  unsure (1)..(272): unsure at all n locations
tattcttcaagattcaggtactgcgtttcggaagcagacacagatggctcgtacgaagcaaaccgcttcgtaagttccacaggaggaaaggctcctaggaagcagcttgcaaccaaggctgcacgtaagtctgcaccaactactggtggtgtgaagaagccccaccgttatcgtcctggtaccgttgctcttcgtgagattaggaaataccagaagagtaccgagcttttgatnccggaagctccccttccagaggctggttcgtgaaattc

SEQ ID NO: 289366 - DNA, 264 bp, Glycine max
  unsure (1)..(264): unsure at all n locations
agaaattgagtttccgagataaccagttttctctttgattcatcaatggcaactgcgaggaccgtgaaggatgtttcgcctcacgatttcgtgaaggcttatgcttcccacctcaagcgttccggcaagatggagcttcctgagtggaccgatattgtaaaaacagcaaaatttaaggagttggctccatatgatcctgactggtactacattagggctgcctcaatggcaaganagatctatttgagaggtggtcttggtgtt

SEQ ID NO: 289367 - DNA, 263 bp, Glycine max
  unsure (1)..(263): unsure at all n locations
gtcgccgtcgctgtcggacttcctcgcgttaaaatcggagagcgcgtactcggtggaggtcgggactaagaagaagccgcttccgaagccgaagtggatgaaggangccgttcccggcggcgagaagtacgtgcngatcaagaagaagctccgtgaattgaagcttcacacggtttgcgaggaggctcggtgccctaatttgggggantgctggtccggaggcgagaccggcactgccaccgccactatcatgattctcggcg

SEQ ID NO: 289368 - DNA, 263 bp, Glycine max
  unsure (1)..(263): unsure at all n locations
cggctccacttgtcaagtacagngaagaagaattgaagaatgtaagangggatggaactggtgagcgcaaggaatgggataggatctatgattatnatgtctacaatgacttgggcgatccagataagggtgaaaagtatgcacgccccgttcttggaggttctgccntaccttaccctcgnagaggaagaaccggaagaggaaanactagnaaagatcccaacagtgagaagcccagtgattttntntaccttccgaganat

SEQ ID NO: 289369 - DNA, 249 bp, Glycine max
  unsure (1)..(249): unsure at all n locations
cagagatgcactgctgttaaggttgtcctggtaatggagtccgctgctgatgcnttggttgagaaagtgaaggctaaggtggcaaaactaactgttggaccaccagaggatgactgtgatatcaccccggttgtgtcagaatcatccgccaatttcattgaaggcctggtcttggatgctaaggagaaaggagcaacattctgtcaggagtacaaaagagaaggcaatctcatttggcctttgctacng

SEQ ID NO: 289370 - DNA, 260 bp, Glycine max
  unsure (1)..(260): unsure at all n locations
ctcnctcttctccgccacttctnaatctattgaatcaacaatcatgtccggacgaagagcaccatttcgagtccaaggccgacgccggagcctccaaaacctaccctcagcaagccggtaccatccgcaagaacggctacatcgtcatcaaaggccgcccctgcaaggttgtggaagtttcgacttccaaaactggaaagcacggtcacgctaagtgtcatttgttggaattgatattttcactgncaagaaacttgagg

SEQ ID NO: 289371 - DNA, 260 bp, Glycine max
aagcatctaagtgagatacacagtagttaggtagcaagcataagtgtctaaccttagaaacatatctgctacatatcgtgtgcattttggaattgtgccactaaaattctattcatctatggctgcctcatcttatgctatgcaatcaatccttgcaaaccctatgatccgcatttccagcgggtctagggagaaccattttggtgttcctgcttatcacatgagaaggaatgttgggccgagagttaggtccatgggct

SEQ ID NO: 289372 - DNA, 289 bp, Glycine max
  unsure (1)..(289): unsure at all n locations
ggctcactggtagcttcagcctcactagtcacttcaccctctatcttgacaaagatgctgttctccttgcttctcaggatataactgagtggcctgtgcttgaaccccttccatcatacggtagaggaagagacgcaccagcaggaagattcacaagcctcatatttggaacaaacctcactgatgttatagtcacaggtgaaaatggcaccataganggtcagggtgagttttggtggcagcaatttcacaggaaaaagttgaagtacactcgcccatacctgattga

SEQ ID NO: 289373 - DNA, 295 bp, Glycine max
  unsure (1)..(295): unsure at all n locations
tcttgggccacagatgcattcgatggaaatcttttgagccttgagttcgataattttgctgaagtgcgcaaactctatgaaggtggagttacattgcctacaaactttcttagcaatatcactcctataccaataattaaggaactttttcgaactgatggcgaacagttcctcaagtatccaccacctaaagtnatgcaggtcgacaagtctgcatggatgactgatgaagaatttgcaaganaaacaattgctggtttgaatccaaatgtcatcaagattattgaggagttcc

SEQ ID NO: 289374 - DNA, 294 bp, Glycine max
  unsure (1)..(294): unsure at all n locations
cttganctctgcgagatcttgagtcgccgatttgaaaagatgagtnagcttcagagtgatgctttgcgtgaagccatctcangaatcatggccgattccaaggagaagaatcgcaaatttgtggagaccatcgaactccaaatcggtttgaagaactacgatccacagaaggacaagcgtttcagtggctccgtcaagttgccccacatccctcgccccaagatgaaaatttgcatgcttggtgatgctcagcatgttgaagaggcagagaagataggactggactggatggat

SEQ ID NO: 289375 - DNA, 288 bp, Glycine max
  unsure (1)..(288): unsure at all n locations
agagatcagagagaatcaaaataccactttcttagtttcaaactcaactttttgagggtcttttctgtattaaaaacacaagagttagtcttagctaacagtgttcatatgatgaatgcttcaaagttcattaaatgtgttactgttggagatggagctgttgggaaaacctgcatgctcatttgctacaccagcaacaagttccccactgattacataccaacagtatttgataattttagtgccaatgttgctgtggatggaagcattgtcaatntggggctatgg

SEQ ID NO: 289376 - DNA, 287 bp, Glycine max
  unsure (1)..(287): unsure at all n locations
gtttgcaaaaagacagagggttaattgtggagtattttggaaggatgtcttacgttgctcataacgttaatcagcnccaaganaaagatttgtnagagggaaatttttcctttgatattaaatctcgctctagattggaaaaagtttcctctacaaaagaccaatttgttagtggaaaaaccttcaaatatgatataattggtgctggttcacattcttcagaagattttcctgaaaaggaagatcaagaaaaacccanaaagattgatgccagattgagacaaaga

SEQ ID NO: 289377 - DNA, 290 bp, Glycine max
  unsure (1)..(290): unsure at all n locations
aaaggaaagaaaaggagacatnataatggctcgntcgttttnatgcnggtctctgcttnntctngnnatcgtgtcnnnnagtatgtctagttgtgctttnnattgnaaaggagganncccaccaagttggggacggtcattggnattggtcttggaanaacntattcntgtgttgggtgtttacaagaaaggncatgttgaaatcatagccaatgattcaaggtaancgtatcaacccatcgtgggttgcnttnaccgacagtgngagactaattggagnngntgccaga

SEQ ID NO: 289378 - DNA, 316 bp, Glycine max
  unsure (1)..(316): unsure at all n locations
aacactcataacacaaagcacaaagcaaagctcatccttggagttaaaaaatggcagcagcttcttccatggctctctcatccccatccttggctggcaaggccgtgaagctgggcccattaagccccagaagttgggaagggtgaggcatgnggaagaccgtcaaccaagcaaggtttcctcaggaagcccatggtacggcccagaccgagttcaagtatttgggggcccattctttnggcgagnccccggtcttaccttaaccngtgaanttcccagggganttaagggtnggaanattgctgggctttccgca

SEQ ID NO: 289379 - DNA, 291 bp, Glycine max
  unsure (1)..(291): unsure at all n locations
cgggggaagagatccagcagcaatggtgtacgtcaaggctcagaaatcaaaagcctacttcaagagatatcaagtcaagttcaagagangaagagagggaaaaaccgattaccgtgccaggattcggttgattaatcaggacaagaacaaatataacactccgaaataccgatttgtggttcgcnttagcaacaaggacattgttgcacaaataatatctgcnagcattgncggcgattnagttcttgctacagcatattcacatganctgccacgatatggtcttgcagt

SEQ ID NO: 289380 - DNA, 278 bp, Glycine max
  unsure (1)..(278): unsure at all n locations
ttccaatatattccattctctctgtgtatntccctanctctcccttcaagatgcagatnttcgtcaagaccctcaanggcaagatcatcannnttgaggtggaaagctctganaccatcgacaacgtcaaggccaagatccangacaaggaangaatcaccncggaccagcaacgtctnattttcgccgggaagcaacntgaggacggtcgtnacccttggtgactagaanattcagaagganantaatcttnactangtgntgcgtntccgtggtgg

SEQ ID NO: 289381 - DNA, 285 bp, Glycine max
  unsure (1)..(285): unsure at all n locations
ggaagtcggggctgagcgacgggtggaactacaacacggatctcaccggcggntantacgacgcnggcgacaacgtcaaattcgggtttccgatggcctttaccaccacaatgcttgcgtggagcgtgctcgaattcggtgacgtcatgcctcccaatgagctcaggaacgccctcgtcgcaattcgttggggcaaccgattatctcctcaagactgtttctcagcccatcgggattttcgttcaggtgggtgatccaaactcagaccatgaatgttgggagaga

SEQ ID NO: 289382 - DNA, 254 bp, Glycine max
  unsure (1)..(254): unsure at all n locations
gcacttggaatccaaaaatgagaganatcatcagcattcacataggtcaggccgggatccaggnaggcaantccngctgggnactctactgcctggaanatggnatccagcccgatggcatgntgccaagtgnntcctccttcggtgtagcccangacgcnttcaacaccttcttcatcgnaacnggtccggcnagcacgtcnctcgcgccgnatcgtcgatctcgagnccnccgtcatngacgannccgttgt

SEQ ID NO: 289383 - DNA, 285 bp, Glycine max
  unsure (1)..(285): unsure at all n locations
caaaacactcataacacaaagcacaaagcaaagctcatccttgagttaaaaaatggcagcagcttcttccatggctctctcatccccatccttggctggcaaggccgtgaagctgggcccatcagccccagaagtgggaagggtgagcatgaggaagaccgtcaccaagcaggtcttcctcaggaagcccatggtacgggnccagaccgagtcaagtattggggcccattctctggcgagcccccgtcctacctaaccggtgagttcccaggcgactacggctgg

SEQ ID NO: 289384 - DNA, 282 bp, Glycine max
  unsure (1)..(282): unsure at all n locations
cnagaagtttccaatatgtctctgatttggttaatggggctggtggctttgatggaaagcgaacatgtgggacctttcaacctgggtaacccaggggagtttaccatgttagagnctgctcaggttgtcanagaaacaattgattcaagtgctacaatagantaccaancggtactgctgatgatccacacatgaggaagccagatattagcnaagccaaggaactgctgaactnggagncaaaaatccctctgatagaagggttgcctctcatggttaatg

SEQ ID NO: 289385 - DNA, 282 bp, Glycine max
  unsure (1)..(282): unsure at all n locations
aagaaagagactgtacatttaatgtagggagaagtcatcttagcatttggaaatttggctgatgacaccatcaattttgaggcctttccccacaagctggtgcactttggagaaattcaggaaaaagttgtattgaaattttcacaagaggaatttcttacagcttggtcaactcaggtgcgtcctgcaacaactctgttggctgatgggtgcccatatttgtatgcnatggtgcatgatagttcagtgtctacaataccaggtgattttgtcattggtgtc

SEQ ID NO: 289386 - DNA, 282 bp, Glycine max
agcagaagaaggcaaagatagtggcagagctccaagctgtgaagcacaacagtggcaagtcctacaatcagttagcggaggagactggactcaccaacgtctatgttgctcagcttctcaggagacaggctcagctcaatccccaaactgcccctctacttcgggcagcgctgcccgacctgccccaagacttgtttctgagatgatgagaccccctttgaggtcttatgaccccaatctcatccaagaccccactgtctataggttgaatgaagctgttat

SEQ ID NO: 289387 - DNA, 289 bp, Glycine max
  unsure (1)..(289): unsure at all n locations
cgaaatcatcagcattcacataggtcaggcngggatccaggttggcaactcctgctgggaactctactgcctggaacatggcatccagnccgnnggcatnatgccaagtgantnctccntcggtgtagcncacgacgccttcaacacnttctncagngaaaccgganccggcaancacgncnctcgcgcngtcttcgtcgatctcgagcccaccgtcatcgangaatnngttgtggcattacngtcanctngtcnanccngaacaactcangnccggnnaggnngatgc

SEQ ID NO: 289388 - DNA, 287 bp, Glycine max
  unsure (1)..(287): unsure at all n locations
catgatgctatcacctaaaccttctggagttaagcctaccacagtgaaagaaataccaagcaaggtattacaagaacatccttctgcagcaaatggaactggtcataaccatacgggagcttctatcagtagcagtgcaccggctgctaaggcgcaagtngttggttggcctcctataagatcatttaggaaaaactcattggccaccacttcaaagaacaatgatgaagtagatggaaaaccaggtgcagctgcaatctttgtgaaggtcagcatggatggggctc

SEQ ID NO: 289389 - DNA, 283 bp, Glycine max
  unsure (1)..(283): unsure at all n locations
cnaacaaagaaaagaagaaaatggctgtggccaacaatgtgctttgcattttcttcattatctccttaacatgtatggttcaagctcgaatcccaggggtttactctgctggtgcatggcaaagtgcccacgccnccttctacggaggctccgatgcttccggcaccatggggggagcgtgtgggtatggaaacctgtacagccagggttatgggtgtgaacacngcggcattgagcacggcgctcttcaacagcgggcttagctgcggtgcgtgttttgaga

SEQ ID NO: 289390 - DNA, 281 bp, Glycine max
  unsure (1)..(281): unsure at all n locations
agatggcagagacattcctatttacctcagantcggtgaacgagggacaccctgacaagctctgcgaccaaatctccgatgctgtcctcgacgcttgcctcgagcaggacccagacagcaaagttgcctgcgaaacatgcaccaaaaccaacttggtcatggtcttcggagaaatcacgaccaaggccaacgttgactacgagaagatagtgcgtgacacctgcaggaacatcggcttcgtctcaaatgangtgggactggatgccgacaactgcaagtct

SEQ ID NO: 289391 - DNA, 291 bp, Glycine max
  unsure (1)..(291): unsure at all n locations
gatcgagataactagaaacagtgtgatgaaaatgaaggtccttgttttcttcgttgctacattttggtaagcatggcaatgccatgcgtacgatatgttccctctccgaatgaacactggctatggtgccccgtantccgggagtggaatgcggcaattgggaggcttgctgtggaagnncacaactctccggctttgngaccatcctgaagattgccttgaagcaacaaagggaatacatccatgggganantntggtncagattccaaacagttaaccaaaagnttttt

SEQ ID NO: 289392 - DNA, 277 bp, Glycine max
  unsure (1)..(277): unsure at all n locations
cagcttcaccggcttggcgctcgccgtcgagaaacccggttccntcatcgtcacactacaacgttcccaaaaaggactttcggtttcagtttatgaacacggttagggttggggagaggccgttgaatttgacctacgcgcacagcaggggcgacaacaggaccgtcttggatggaacctttgtgtatgattctgcgaacaaggtttctgccaattacgcgctcgactcagggaactgcaagcttaagtacacctatgttcacaaggggttgaccac

SEQ ID NO: 289393 - DNA, 293 bp, Glycine max
  unsure (1)..(293): unsure at all n locations
cgaagagatacaattggaggaagacatgaggacttatgacatggaatgcatatctatgagaaagaggnccaatcaattcgtgactttgnaggttcccgggctagctgagagnagaccctcgctggttcatggggattttatctttgtcaagctcacatctgaacgtgataataacaccacacccgtttaccagggatatatccaccgagttgaagctgntgagatctatttnaagtttgatcctggatttcacttttaccacagggatgaaaatcgctatgatgttcacttca

SEQ ID NO: 289394 - DNA, 290 bp, Glycine max
  unsure (1)..(290): unsure at all n locations
anaatatcccgtgaagtggatcccacaggggaaagaacatttggagtcttgacaaagattgatcttatggacaagggtactgatgctgttgaaatgttggaggggagagcttatagattaaagtatccgtggatcggtgttgtcaatagatcacaagcagatattaacaagaatgttgacatgattgctgctagacgtagagaacgtgaatatttttctaatacccctgaatataatcaccttgctaacagatgggtctgagncattagcangangcttctaagnntttg

SEQ ID NO: 289395 - DNA, 293 bp, Glycine max
  unsure (1)..(293): unsure at all n locations
anaccacggaaccattcacttcgtatgcaactcctgggtttacaactcaaaatcctaccattctgatcgcantttctttgccaacaatacatatcttccaagcgagacaccggcaccacttgtcaagtacagagaagaagaattgaagaatgtaagangggatggaactggtgagcgcaaggnatgggataggatctatgattatgatgtctacaatgacttgggcgatccagataagggtgaaaagtatgcacgccccgttcttggaggttctgccttaccttaccctcgca

SEQ ID NO: 289396 - DNA, 293 bp, Glycine max
ctgaaactgcgaatggctcattaaatcagttatagtttgtttgatggtatctactactcggataaccgtagtaattctagagctaatacgtgcaacaaaccccgacttctggaagggatgcatttattagataaaaggtcaacacaggctctgcctgttgctttgatgattcatgataactcgtcggatcgcacggcctttgtgccggcgacgcatcattcaaatttctgccctatcaactttcgatggtaggatagtggcctaccatggtggtgacgggtgacggagaatta

SEQ ID NO: 289397 - DNA, 292 bp, Glycine max
  unsure (1)..(292): unsure at all n locations
cgccagtnctgatatttacaccatctgctctcaagactgtgaattatggaatcctgcttgcacaaaagcaatggctatgtcatttaatccaaacccgtgttctgatgcatggagtttggaatttctgaagcgtaccggatttcattgtgatatcatttgtgtcactggatggactgccaccccaatgcaggatgttcaggttacaattgattggtttatttcctctcaggaatgtgttcccagaacctattgtgttttacntccacaaaatccttttgtgttaaataggtgg

SEQ ID NO: 289398 - DNA, 291 bp, Glycine max
  unsure (1)..(291): unsure at all n locations
gcatcgctggcatctcagggcgattttctacattgtaatgcaatgcttgggtgctatttgtggcgctggcgtggtgaagggtttcgaggggaaaacaaaatacggtacgtgaatggtggtgccaactttgttgcccctggttacaccaagggtgatggtcttggtgctgagattgttggcactttcgtcctgtttacaccgttttctccgccaccgatgccaaacgtaacgccaganactctcacgtccccattttngcacctttgcctattgggttcgcggtgttcttgg

SEQ ID NO: 289399 - DNA, 300 bp, Glycine max
  unsure (1)..(300): unsure at all n locations
cgcgtttctnacagtgttactgtgtgtgtnttccgcggaaaatcaaaatgggtatcattgaaaagatcaaagaaattgaagccgagatggctcggacacagaaaaataaagccccagagtatcatcttgggcagtccaagctaaaattagcnaaanttagggncnccanttattggagccccnaaaaggttctagtggaggtggagaaggatttgaagttacaaaattcggtcatggacgtgttgcactgnttggatttccaagtgtggggaagtctacncttttgacaatgttaacggg

SEQ ID NO: 289400 - DNA, 293 bp, Glycine max
acacgtttggctcttgcttcaattggtaaactcatgtttgctcaattctctgagcttgtcaatgattattacaacaatggtttgccttcaaatctcactgccagcagaaaccccagcttggattatggattcaagggagctgaaattgccatggcatcttattgttctgaacttcaatatttggcgaatccggtgacaagccacgtgcaaagcgcggagcaacacaaccaagatgtgaactctctggggctgatttcatcaaggaagactcatgaggctattgagatcctcaa

SEQ ID NO: 289401 - DNA, 291 bp, Glycine max
  unsure (1)..(291): unsure at all n locations
gttcttctttcctcaacctnctttcttcttatatatcgaacatggctaagtatcattcaagtgggaaaagctcttccatgactgctatagccttcctgtttatccttctaatcacttatacaggcacaacagatgcacaatccggggtatgttatggaagacttggcaacaacttaccaacccctcaagaagttgtggccctctacaatcaagccaacattcgcaggatgcgaatctacnntccaagcccagaagtcctcgaagcactaagaggttccaacattgagcttt

SEQ ID NO: 289402 - DNA, 293 bp, Glycine max
  unsure (1)..(293): unsure at all n locations
agctctgacaccatcgacaacgtcaaggccaagatccangacaaggaaggaatccccccggaccagcaacgtctcattttcgccggaaagcaacttgaggacggccgtacccttgctgactacaacattcagaaggagagtactcttcacctcgtcctccgtctccgtggtggcatgcagatcttcgttaagacactcaccggcaagacnataaccctagaggttgaaagcttccgacaccatcgataacgtcaangccaagatccaggacaaggagggtatccccccggacc

SEQ ID NO: 289403 - DNA, 292 bp, Glycine max
  unsure (1)..(292): unsure at all n locations
cagtgacagtcatctaagcactgatgaagccattggtgcatataggaaaaatggatctcctttggtcagtcttgagtactctactggatgggaccctttgggctgatagtaggaatntcaatggctatagtcaagagatgttccagagtttgaggttcaacttggaggaagtggagtcagctactcagtatttctcagagttgaatctgttgggtaagaatagctttagtgcaacttatagaggagttttaagagatggatctgttgttgctgtgaagagcatcagcaaaac

SEQ ID NO: 289404 - DNA, 289 bp, Glycine max
  unsure (1)..(289): unsure at all n locations
ttttctattgaccttctcggtggaggaattttagtggacaaaactggagattggatcacacttatacaaaattctccaattagtaacttgttgagagttgctgcttggaagaaaggctgtttaatggtcaagattgtgatgtctgggaatgcagcagtcaaaaggngtgattgggcctcattggtacaagtgtttttaacaaacagcaacagtacagagcattttgatgcatgtaagtggacaaaatcanaaccacattcctgggaattgatcttcccaatagaggtat

SEQ ID NO: 289405 - DNA, 288 bp, Glycine max
  unsure (1)..(288): unsure at all n locations
ctctttgtcgcaaanagangagatctgcctcctttttccttcccaaatcaaatctatctcttcttcaagttgaaaatggngctgtcgttcaccaagttgttcagccggctgtttgccaagaaagagatgcgtatactaatggtgggtctcgatgctgcgggtaagaccaccattctgtacaagctcaagcttggagagattgtcaccaccattcccaccattgggtttaatgtggaaactgtggaataccagaacatcagctncactgtctgggatgttggaggtcag

SEQ ID NO: 289406 - DNA, 273 bp, Glycine max
  unsure (1)..(273): unsure at all n locations
cttcttctcttgcggctagggttttagcgcanttcttctagtttcnttgcagatttaaggaagatgggtaaggaaaangttcacatcagtattgtggtatnngccatgttgactctgggaagtcactancactggcactgattacaagctngaggatgacaagntgtatgagagattgagaaggangctgctgagatgancagaggtcttcaagntgcctggntgcttgataacttaaggctgagcgtgaaagaggatcacaattgatattgc

SEQ ID NO: 289407 - DNA, 288 bp, Glycine max
  unsure (1)..(288): unsure at all n locations
ggccgtttgtntcaggttgagtatgcaatcgaagccatcaagctgncgatcaactgcgattgggttgaagaccaaagaaggagttgtccttgcagttgaaaagcgcatcacatcgccgctcctggagcctagtagtgttgagaaaattatggaaattgatgagcacatcggttgtgcaatgagtgggttgattgcagatgctcgaacacttgttgagcatgcacgggtggaaactcagaatcacaggttctcctatggtgagcctatgactgttgagtccaccacccc

SEQ ID NO: 289408 - DNA, 287 bp, Glycine max
  unsure (1)..(287): unsure at all n locations
tcacatcgcagagaagaacagagagagatccatccatcaattccaatggccgatcagctcaccgacgaacagatctccgagttcaaggaagccttcagcctcttcgacaaggacggggatggttgtattaccaccaaggaacttgggaccgtgatgcggtcacttggccagaacccaactgaggcagagctgcaggacatgataaatgagggtgatgctgatgggaatggtaacattgatttcccagaattcctgaatctcatggctcgcnagatgaaagacactgt

SEQ ID NO: 289409 - DNA, 286 bp, Glycine max
  unsure (1)..(286): unsure at all n locations
aaaggaaganttgttaatgtttcctcagaggctcaccgatttgcatattctgaaggaatccgttttaacaaaattaatgatgaatcaagttacaacaactggcgtggcatatgggcagtcaaagctcgccaacattttacatgcaaatgaacttacaagacgtctcaaggaagatggggtggatatttctgcaaattctcttcatccnggaacaattaccacaatccttttccgacataacagtgcngtgaatggtctattaatgtgatggggaactggggcttaa

SEQ ID NO: 289410 - DNA, 284 bp, Glycine max
  unsure (1)..(284): unsure at all n locations
cacacccctcctctctctcttttgctcatttcctttgactcctcattatcaaagaaaatggctctcattgggttgctcttgatgggttttctcacaatgttctcctctgcttcatgcctatggtggagggtggactaatgctcatgccaccatctatggagggagtgatgcatcngggacaatgggtggggcatgtggatatgggaatctctacagccaagggtatggaacaaacactgctgctctaagcactgcactgttcaacaatggcttgagctgtggct

SEQ ID NO: 289411 - DNA, 285 bp, Glycine max
  unsure (1)..(285): unsure at all n locations
caataaccaaagaanacttagagatcaaccttggtggactctctgtggaacaggcactgagtggtaacagnttgttcatattagatcaccatgatgcattcatcgcatatctgaggaagatcaatgaccttcccantnccaaagtcttatgccacaaggaccatccttttcttgaaagatgatggcacctaaagccattggccatcgaattaagtttgccacatcctaggggagatgagtttggtgccgttagtagagtcgtcttgcccgcagaccaaggtgctg

SEQ ID NO: 289412 - DNA, 286 bp, Glycine max
  unsure (1)..(286): unsure at all n locations
tctaacctacctctttttcttctctctcaacaacttcaccttctncctcctcgatcatgtctcacttcaagggcaagtaccatgatgagcttatcgccaatgctgcgtacattggcactcctggaaagggtattcttgctgctgatgagtcaacagggacaattggcaagcccnttggcnagcatcagtgtagagaacattgaatccaacaggcgagctcttagggagctgcttttcactgctcctggtgttcttcaatatctcagtggtgtcatcctctttgagg

SEQ ID NO: 289413 - DNA, 287 bp, Glycine max
  unsure (1)..(287): unsure at all n locations
cagacttaacaacagcacaaagcgggttactgtctgttcaagctaccatctctctcncctctttcttagtgcctccttgccagaagttaaaatggcccaagaaactttcctattcacatctgaatcagtgaacgaggggcaccctgacaagctctgtgaccagatctccgatgctgtgctcgatgcatgcttggagcaggaccctgacagcaaggttgcctgtgaaacctgcancaagaccaacatggtgatggttttcggagagatcacaaccaaggccaacgtgg

SEQ ID NO: 289414 - DNA, 284 bp, Glycine max
  unsure (1)..(284): unsure at all n locations
gacaacacagagagaagcgtcttaataaacgctcttctctgaaaaacctgatttcttctcttcttctcttctctttcgtttcgatcttcgatctctgaaaatgagagagtgcanttcaatccacatcggtcaggccggtattcaggtcggaaacgcctgctgggagctctactgcctcgaacacggcnttcagcctgatgggcagatgccaatgataagactgttggtggaggtgatgatgctntcaacaccttcttcagtgaaactgggggctgggaaagcac

SEQ ID NO: 289415 - DNA, 287 bp, Glycine max
  unsure (1)..(287): unsure at all n locations
tttatgacatgaganacaagcttaatgacaaataccaagagtttgtcattgattcagagagggaagcatttactgctaaacttcaggaggtggaagactggctatatgaggatggtgaagatgaaactaaaggcgtaaccattgccaagctagaagagctcaagaagcaaggtgatccaattgaagagcgttacaaggaatacatggagaggggtacagtaattgatcaacttgcctattgtataaatagttatagagaagctgcaatgtccaaatgatcccaagtt

SEQ ID NO: 289416 - DNA, 283 bp, Glycine max
  unsure (1)..(283): unsure at all n locations
gtgaaagcagagaagtgagatacactaagttatcctcataaatacactctaattaggtggcaagataagtgtctaaccttagtaacattgccacatattgtgttcattttggaattgtgccactaaaattctattcaattcatctatggctgcctcttcttatgctatgcaatcaatcctggcaaaccctttgatccgcatttccagcgggtctanggtgaaccaattgggcgttcctgctttgcacatgagaagggatgttggctgagagttaaggtcatgg

SEQ ID NO: 289417 - DNA, 287 bp, Glycine max
  unsure (1)..(287): unsure at all n locations
ctccataacctccgagctctacaccgaagaacgaagccatggggaagacacatggaatgggagctgctcgcaagctcaagtctcaccgcaggaggcaaaggtgggctgataagtcatacaagaaatcccatcttgggaatgaatggaagaaaccttttgccggttcatcccatgccaagggaattgtccttgaaaagataggtattgaagctaagcagcccaactctgctattcgtaagtgtgccagagttcaacttatcaagaatggggaagaaaattgcngcttt

SEQ ID NO: 289418 - DNA, 284 bp, Glycine max
  unsure (1)..(284): unsure at all n locations
ccatttttctctaagcgttccttccttttcgttctgttttngcatcttcgctgcaactctctaccttccctctttttccgaatctgaatagaaatggcttcggagactgagacgttcgcttttcaggccgagatcaaccagctcctcagtctaataatcaacaccttctacagcaacaaggagactttcttcgtgagctcatcagcaatgcctctgacgctttggacaagattcgatttgagactcttacagacaagagcaagcttgatgctcagccagagttg

SEQ ID NO: 289419 - DNA, 285 bp, Glycine max
  unsure (1)..(285): unsure at all n locations
gtacaattcttcgttcgttctctgcagttatatcctttttgagcttcaatggcggacgctgaaaccttcgctttccaggctgagatcaaccagcttctaagtctcatcatcaacacattctacagcancaaggagtnntcttgcgtgaactcatcagcaatgcttctgatgctttggataagattcgattcgagagcttaaccgacaagagcaagctcgatgctcagccagagctcttcattcgtcttgtgcctgacaaggataacaagactctttccattattg

SEQ ID NO: 289420 - DNA, 286 bp, Glycine max
  unsure (1)..(286): unsure at all n locations
ctccataacacaaggcaganagcaagctcatcctagagttttaaaaatggcagcagcctcctccatgggctctctcttccccatccttggctggcaaggccgtgaagctgggcccatcagcccccgaagtcgggagggtcagcatgaggaagaccgtcaccaagcaggcctcctccggaagcccatggtacggcccagaccgcgtcaagtacttgggcccattctctggcgagcccccgtcctacctcactggcgagttcccaggtgactacggctgggacactgc

SEQ ID NO: 289421 - DNA, 275 bp, Glycine max
  unsure (1)..(275): unsure at all n locations
aagccacatcctcagggtgaagaatatggtcctgttagcgaagtcnacgtgcctcccagcgaaggagtggaagcttatatttggttactggcaaaggcttatgttgttgtgaatgatgcatgctaccatcaaatcattagccattggctaagcactcatgcaattgttgagccatttgtcatagcaacaaacaggcaactgagtgtggttcaccctatttacaaacttctgtntcctcactaccgtgacacctgaatattaattcacttgcccgg

SEQ ID NO: 289422 - DNA, 291 bp, Glycine max
  unsure (1)..(291): unsure at all n locations
cagtggtgttagatctgtacctgnntagccattgatttggaaaagtcnaagcttcaaagatgagtaagcttcagagtgatgctcttagagaagctatctcaggaatcatgactgattccaaggaaaagaacaggaaatttgtggagaccattgaactccaaattgggctgaaaaactatgatccccagaaggacaagcgttttagtggctctgttaagttgcctcacattcctcgncccaagatgaagatttgtatgcttggagatgcccaacacgttgaagaggctgagt

SEQ ID NO: 289423 - DNA, 283 bp, Glycine max
  unsure (1)..(283): unsure at all n locations
ctctggnaccatatggtgaagatgtcattttcgtcgccaatgattggcacactgcccttatcccctgctacttgaaaagtatgtaccagccaaggggcatctatatgaatgcccgggttgttttttgtatccacaacattgcttaccaaggaagatttgcattcgccgacttctcacttctaaatctcccagaccaatttaagagctcctttgactttattgatgggcatgttaaaccagtggttggaaggaaaatcaattggttgaaagctggacttataga

SEQ ID NO: 289424 - DNA, 276 bp, Glycine max
  unsure (1)..(276): unsure at all n locations
tttttaacaaacagcaacagtacagagcattttgatgcatgtaagtggacaaaatttctccaattagtaacttgttgagagttgctgcttggaagaaaggctgtttaatggtcaagattgtgatntctgggaatgcagcagtcanaaggagtgattgggcctcattggtacaagtgtttttaacaaacagcaacagtacagagcattttgatgcatntaagtggacaanatcagaaccacattcctgggaattgatcttcccaatagaggtatgtg

SEQ ID NO: 289425 - DNA, 277 bp, Glycine max
  unsure (1)..(277): unsure at all n locations
ccctataccagtggtcaaggaaatttttcgaactgatgggcgaacagttcctcaagtatccaccacctaaagtgatgcaggtggataagtctgcntggatgactgatgaagaatttgctagagaaacgattgctggtgttaatccaaatgtcattaagattcttgaggagttcccaccacgtagcaagctagattctcaagcctacggtgatcatacctctataataacaaaacaacacttggagcctaacttgggtgggctcaccgttgagcaggc

SEQ ID NO: 289426 - DNA, 275 bp, Glycine max
gagaaagcgaaacgcatagaatcgaaagaggggaaaagaaaaagaaaagttagggttagggattttgagagatggcatcgactaagaagatcaccctgaagagttcggacggtgaggccttcgaggtggaggaggcggtggcgctggagtcgcagacgatcaagcacatgatcgaggacgactgcgccgacagtggaatccctctccccaatgttaccagcaagattctggcgaaggttatcgagtactgcaagaagcacgttgaggctaacagt

SEQ ID NO: 289427 - DNA, 275 bp, Glycine max
acacaccaaaccaaagcaagaatagtgttctaagagtgagcaacaacttcaaacaccattgtgagaaatggcttccaagggtgcacttctcttgtgtctcaacattctcttcttcactgtggtaagctccacatatgtcccatgcaacccaccccctaaaactcctaaacacacacctgtcccaaagccaccttccccaaagcaaccaagttgccccaaagacaccattaagtttggtgtgtgtgctgatgtgttaggtttgattaacgtgcaat

SEQ ID NO: 289428 - DNA, 272 bp, Glycine max
  unsure (1)..(272): unsure at all n locations
aacagcttcagaggcatatgaggaaatgtgatcttaagcatccccctggtgatgagatatacagnagtggtacactgtcaatgtttgaggtcgatggcaaaaagaacaaggtttatgggcagaatctttgttatttggccaagttatttcttgatcacaagaccctctattatgatgtagacctgtttctgttctatgttttatgtgaatgtgatgatcgaggttgtcacatggttggctatttctccaaggaaaaacattctgaggaatct

SEQ ID NO: 289429 - DNA, 274 bp, Glycine max
  unsure (1)..(274): unsure at all n locations
ctaaggtgaaaaaggagagatgggcagctgcaacatctagtgctgtgttaaacgggtttggatctcacttcttgtgtggaggaaagaggagccatgcccttcttgctgctagcattgganggaaagttggtgcttctgttagtcctaaaagagttattgtggcagttgctgctgcaccaaagaagtcatggatccccgctgtaaaaggtggtgggagtttcatagacccagaatggcttgatggctcgctaccaggtgactatggttttgaccc

SEQ ID NO: 289430 - DNA, 272 bp, Glycine max
  unsure (1)..(272): unsure at all n locations
caaaaaagtaacaaaaagtgagcatgggaaattccttggtcttcttattgttcctcatcacattgnagnccanaggcaatgttcaatgcaacccaaactacagagaagcattggcnaaatccttattntttttccaagggcagaggtcagnaaggcttccttctgaccaacaaatcaaatggagatccaattctggtctctttgatggtcgccttgccaatgtggatttaagtggagggtactatgatgcaggagacaatgtgaaattcaat

SEQ ID NO: 289431 - DNA, 276 bp, Glycine max
  unsure (1)..(276): unsure at all n locations
tcacgatgacatataccaatgcagtncatgtatataagcaagggccctgcaaatctggtaggtataaagctttacatatattaaaggcattcgctggttaatcctcagaacctacttgttcnacccgcacactcatcagctncanactatgtgattttgggagtgcaaaagtgttggtgaaaggagaacctaatgtttcttacatctgttcaagatactaccgtgctccggaacttatatttggggccactgaatatacaactgccatagatatat

SEQ ID NO: 289432 - DNA, 280 bp, Glycine max
  unsure (1)..(280): unsure at all n locations
ctaaaccaaacctctcactcgccgtcgtagggtttctcctttcgnntancaacaacaacaatggttgcagccaagaaaaccaagaagacccatgagagcatcaacaacaggctcgctcttgtcatgaagagtggaaaattcaccctcggttacaagacggttctcaaatcacttaggagctccaaagggaaattgattatcattgctaacaactgcccccctttgaggaaatcagagattgaatactatgctatgttggccaaggttggagttcatcatt

SEQ ID NO: 289433 - DNA, 275 bp, Glycine max
  unsure (1)..(275): unsure at all n locations
tcgtcagccaatactccacgctcctcgctcccctcgccgtcgacgccgttctctccgtcgtggatgcccccaagcccgacatggtcgatctcngcgatgtcaagatcgtgaagaaactcggcggcaccgtcgacgacaccgagctcgtgaaaggtctcgtctttgacaagaaggtcagccacgccgccgggggacccacccgcatggagaacgccaagatcgccgtcattcaattccagatttcgccgcccaaaaccgacatcgaacagagcatt

SEQ ID NO: 289434 - DNA, 272 bp, Glycine max
aactgctggcatttggagaatagctgctatcaatgaagctggagggtggaaagacagaacaacagtggaagatatggaccttgctgttcgtgctagtcttaggggatggaaatttttgtaccttggagacctccaggccaaaagtgagcttcctagtactttgagagccttcagattccagcagcacagatggtcttgtggtcctgctaatttgttccgcaaaatggtgatggagattgtgaggaacaagaaagttaagttttggaagaaag

SEQ ID NO: 289435 - DNA, 276 bp, Glycine max
  unsure (1)..(276): unsure at all n locations
cggacgcagagcagaagaaggctgaggctctgaaggaaaaggaagcgggcaatgcagcgtataagaanaaggattttgataccncgattcaacattacaccaaggctttggagttggatgatgaggatatttcgtatctcactaaccgcgctgctgtctatttggaaatgggaaagtatgaggaatgcataanagattgtgacaaggctgttgaaagaggaagagaactaagatcagattttaagatgatagcaagagctttgacaaggaaaggaa

SEQ ID NO: 289436 - DNA, 275 bp, Glycine max
cacactctacgaccttagctcttcctctgggttgaacaaacttgatgagtaccttctcccacgcagttacatcaccgggtaccaaggctacaaaggatgatcttactgtttatgcagctttgccaactgctccatcagatgaatatggaaatgtttccaggtggtacaagcacattgatgctttgttgagaatctctggtgttactggcgagggatctggtgttattgttgagggatctctagttgcagagcctgttgcaactccccctgctgca

SEQ ID NO: 289437 - DNA, 271 bp, Glycine max
  unsure (1)..(271): unsure at all n locations
gcttttgagagaggcaatgacggatccgctattggagcgatacaaagtaattattctggatgaagcacatgagaggactttgggctactgatgtgctatttggccttcttaaggaagtgcttagaaatagacctgacttgaagttagttgttatgagtgcgacacttgaagctgagaagttccagggatattttagcgnggcccctcttatgaaggntcctggaagactacatccggtggaaattttctatacccaggatccagaaaggga

SEQ ID NO: 289438 - DNA, 274 bp, Glycine max
ggtgatgcatctgggcacaatgggaggggcttgtggatatggaaatttgtacagccaagggtatgggcactaacactgcagcacttcagcactgctctattcaacaatggcatgagttgcgggtcttgctatgagatgaaatgtgacactgaccccaaatggtgcctccccggtagcataatcgttactgccacaaacttctgcccccctaactttgcattggctaacaacaatggtggctggtgcaaccctcctttgcaacactttgatcttg

SEQ ID NO: 289439 - DNA, 276 bp, Glycine max
  unsure (1)..(276): unsure at all n locations
atttttcttcctcagtagtgtcattnacgcttctcttctctgcagcaactatgcctaaccctaaggtcttcttcgacatgaccatcggcggtcaatctgctggccgcatcgtgatggagctctacgccgacgtcactccccgcaccgccgagaacttccgcgcgctttgcaccggcgagaagggcgtagggcggagggcaagcccctccactacaagggctcgtccttccaccgcgtgatcccgagtttcatgtgtcagggtggcgacttcaccgc

SEQ ID NO: 289440 - DNA, 274 bp, Glycine max
  unsure (1)..(274): unsure at all n locations
tatggttggggacatcttacaatggtgatttttactgtccacggactcctctatgntgttgcatgggcaatggaaggacaccttgtacaagaattagtacaatggaaagatattggtgttgccaatctcccaggagttattagccttctagctggtttgttaatgtgggtgacctctcttcccggagtgcgaacgtggaactttgagttgtttttctacacccaccaattatntgtagtctttattgtctttttggccttgcatgttggtgact

SEQ ID NO: 289441 - DNA, 273 bp, Glycine max
  unsure (1)..(273): unsure at all n locations
caaccctaacgcgtgcagagcagagagagacgcagccatggggcgaagncccgcgaggtgttataggcaaattaagaacaaaccataccccaagtcacggttttgccgtggtgttcctgatcccaagatcaggatttacgatgttggtatgaagaagaagggtgttgatgagtttcctttctgtgtccatctggttagttgggagaaggaaaacgtttctagtgaggccctggaagctgctcgtattgcttgcaacaagtacatggccaaatt

SEQ ID NO: 289442 - DNA, 275 bp, Glycine max
gcagaaagcaagctcatcctagagttttaaaaatggcagcagcctcctccatggctctctctttccccatccttgggctggcaaggccgtgaagctgggcccatcagcccccgaagtcgggagggtcagcatgaggaagaccgtcaccaagcaggcctcctccggaagcccatggtacggcccagaccgcgtcaagtacttgggcccattctctggcgagcccccgtcctacctcactggcgagttcccaggtgactacggctgggacactgctg

SEQ ID NO: 289443 - DNA, 272 bp, Glycine max
  unsure (1)..(272): unsure at all n locations
tagtcctgttatttctcagcgcgtaaagcatggctttgttggtggagaaaaccacgagtggtcgcgagtacaaggtcaangacctttcccaggccgacttcggccgcctcgagatcgagctggccgaggttgagatgcccggcctcatggcctgtcggaccgagttcggcccctcccagcccttcaagggggcccgcatcaccggctccctccacatgaccatcnantcaaangttctcattgagaccctcaccgcccttggcgccgaggtc

SEQ ID NO: 289444 - DNA, 270 bp, Glycine max
  unsure (1)..(270): unsure at all n locations
tcttgcggctagggttttagcgcanttcttctagatttaaggaagatgggtaaggaaaaggttcnnatcagtattgtggttattggccatgttgactctgggaagttccactaccactggccacntgatctacaagcttggaggcattgacaagcgtgttattgagagatttgagaaggaagctgctgagatgaacaagaggtctttcaagtatgcctgggtgcttgataagcttaaggctgagcgtgaaagaggaatcacaattgatat

SEQ ID NO: 289445 - DNA, 272 bp, Glycine max
  unsure (1)..(272): unsure at all n locations
tgatgcagtttgaaactgattatgttgttgaaagtgaattggcaataaatgaagatctttataacacaaagtacaaggacaagttggatctgtcttataaggggcttattcatgncgtgttcaccacaatattacgtggccttgtctggtgccaaagtgaccaagcccggaaaatttaggagttgtcaagatggctatgcagtgaaatcatctttgaaagctgaagatggaattctgtatccccttgagaagagcttcttctttctacctaa

SEQ ID NO: 289446 - DNA, 274 bp, Glycine max
  unsure (1)..(274): unsure at all n locations
ggaagaccgagaagcctccgaggaagtcgcgttccaaactcgcggagaaggttgtttccgacaaggagaacaacaactcttgtaaggtggaagctgcgtcctggtcgtcggaaggttcttcgccgctttcggatctgacgtttgctgacgtgagcgaggctcagtgggaaggngattcggatnattataatctccagaagtacccctcttatgagatcgattgggattctctgcgaagtgtcctattatgtatggtctagtctaggtcttagtg

SEQ ID NO: 289447 - DNA, 271 bp, Glycine max
cttgcaaggtctgggaccaaggaattcatggaagccctggctgctggtgctgacgtgagcatgattgggcagttcggtgttggtttctactcggcttatcttgtagctgataaggttattgttaccacaaagcacaatgatgatgaacagtatgtctgggagtcccatgccggtggctcatttactgtgacaagagatacatctggtgagaaccttggtaggggaacaaagataactttgtttcttaaggaagatcaacttgagtatcttg

SEQ ID NO: 289448 - DNA, 271 bp, Glycine max
tagactattagttacatgggcagaacgggttgtaggaactggatcatttggaattgttttccaggcaaaatgcttggaaactggggaagcagtggctattaaaaaggttttacaggacagaagatacaagaatcgcgaactacagttaatgcgtgttttggatcatccaaatagtctatgtatagagtcattaagcactataccaatgctaatcaaagaatgccaatcatctatgtaaaactttatatgtaccagattttcagggggctgg

SEQ ID NO: 289449 - DNA, 240 bp, Glycine max
  unsure (1)..(240): unsure at all n locations
agatcttgtagcaatggcgagcgctcccactccacgcgaagagttcgtntacatggcgaactggcggagaggccgagcgctacgaggagatggtggagttcatggagaaggtctccgcctccgccgagagcgaggagctgaccgtggaggagcgtaacctcctctccgtcgcctacaagaacgtgatcggcgctcgccgcgcctcctggcgcatcatctcctcaatcgagcagaaggagg

SEQ ID NO: 289450 - DNA, 270 bp, Glycine max
  unsure (1)..(270): unsure at all n locations
aattcattagctatccaatttctctctggattgagaagactactgaaaaggagatttctgatgatgaggatgaggaagagaagaaggatgaggagggtaaagttgaagatgtggatgaagataaggagaaggaggagaagaaaaagaagaccattaaggaggtatctcacgagtggtcattggtgaacaagcagaagcctatttggatgagganacctgaagagattacgaaagaagaatatgctgctttctacaagagtcttaccaatg

SEQ ID NO: 289451 - DNA, 270 bp, Glycine max
  unsure (1)..(270): unsure at all n locations
ctctgtttctgtctctgtgtttgcggctgaggattccgaacgagcgaccttcttcgtttctcgcaaagtttaagtcatcatgggtaangaaaagactcacatcaacattgtcgtcattggacatgtcgactctgggaagtcaactaccactggtcatttgatctacaagcttggaggtattgacaagcgtgtgattgagaggttcgagaaggaggctgctgagatgaacaagaggtcattcaagtatgcctgggtgcttgacaagctcaa

SEQ ID NO: 289452 - DNA, 268 bp, Glycine max
  unsure (1)..(268): unsure at all n locations
gcctcacctgctggaaaggatgaatattcagagtgggtgattgcctctcagagaagtctccttgaggtcatggctgaatttccatcagccaaacctccaattggtgtctnttttgcagcagttgctcctcgcctgcagcctagattttattcgatctcctcatctccaagaatggtgccaaacagaattcatgttacctgtgcattagtacatgagaaaatgcccaccggaaggattcacaaaggagtgtgttcaacatggatgaaga

SEQ ID NO: 289453 - DNA, 268 bp, Glycine max
  unsure (1)..(268): unsure at all n locations
ttaagggctgcactataccagaatgtctcagggaagaggcagtgcatctttgcctattgtggtcactgtggtttcactactgtgccttttggaacgtgctaacgcagcaacttactccgttggaggacctgggggatggaccttcnacactaatgcttggcccaatggaaaaagattcagagctggtgatatcctaatcttcaactatgactcaacgacccacaatgtggttgctgtggacagaagtggatacaacagctgcagacac

SEQ ID NO: 289454 - DNA, 269 bp, Glycine max
cttggggaacttggtgggcgtgatgagtattccttagtggaggccctaaaacaaggaaaagtatccaaaccggttgttgcctgggtcagtgggacatgtgcacgactattcaaatctgaagtacaatttggtcatgcaggagccaaaagtggtggtgagttggagtctgctcaagcaaagaatcaggcactaagggatgctggagctgttgttcccacatcatatgaagcttttgaagtttcaattaaggaaacatttgataaattggt

SEQ ID NO: 289455 - DNA, 266 bp, Glycine max
  unsure (1)..(266): unsure at all n locations
ggctgggtgtcaattgcatggaaagctgcgtgtttcttcncaggcatttcctttttgatcctcacaaccttgaaaggctatngtggggaagccacagcactggagccattccattttcactcnttgtaatactnatcttgctttggttctgcatatctgtaccccttaccattgttggtggctactttggagccaaggcaccccacattgagtatccagtccgaaccaaccaaattcctcgcgaaattccccagcagaagtaccca

SEQ ID NO: 289456 - DNA, 268 bp, Glycine max
  unsure (1)..(268): unsure at all n locations
ctgcaaagagcattgttgcaaatggacttgctaggagggcaattgngcaagtttcctatgccattggtgtgcctgagcccttgtctgtgtttgttgacacttatgggcactgggaagatccctgacaaggaaatcctcagcattgtgaaggagagttttgacttcaggcctggcatgatctccatcaaccttgatctcaagaggggtggaaatggcaggttcttgaagactgctgcatatggacactttggcagagatgaccctgact

SEQ ID NO: 289457 - DNA, 270 bp, Glycine max
  unsure (1)..(270): unsure at all n locations
ttggattatggagtggcattgcttggttggttggaatgactgtattcattgctgtgttgtctgaatatctgatgcatcctcaattgtgctggttgcagggataaagatctggctcatattgaggaacatatgaaggcattcaaggccaaaggtggtgatgtgtcttggcacatccacgatgaaagatccctacttgctctgcagggtcctcttgctgctcccgttcttcaacacctaacaaaagaggatttgagcaagctattctttngg

SEQ ID NO: 289458 - DNA, 269 bp, Glycine max
  unsure (1)..(269): unsure at all n locations
gcatgtgctgctnttggcttgacatcaanttacactccaactccattgttggaatctggtttgcaanaagacagagggttaattgtggagtattttggaaggatgtcttacgttgctcataacgttaatcagccccaagagaaagatttnttagagggaaatttttcctttgatattaaatctcgctctagattggaaaaagtttcctctacaaaagcacaatttgttagtggaaaaaccttcaaatatgatataattggtgctggttc

SEQ ID NO: 289459 - DNA, 269 bp, Glycine max
  unsure (1)..(269): unsure at all n locations
gactcgggaaggtatcgcaacattatgggatatgaatgctggattgggtagttttgcagcagctattcattcttcaaagttatggggtcatgaatgttgtgcncactatagctgaggcgaatacactgggtgtgatatacgagcgaggacttattggcatctatcatgattggtgtgaagccttttcaacatatccaaggacatatgaccttattcacgcccatggtgtctttagtctgtacaaggataaatgcaaggccgaagatata

SEQ ID NO: 289460 - DNA, 258 bp, Glycine max
  unsure (1)..(258): unsure at all n locations
canagntgcactgctgttaaggttgtcctggtnatggagtccgctgctgatgctntggttgaganagtgaaggctaangtggcaaaacnaactgttggaccaccagaggatgactgtgatatcaccccggttgtgtcagaatcatccgccaatttcattgaaggcctggtcttggatgctaaggagnnaggagcaacattctgtcaggngtacaaaagagaaggcaatctcatttggcctttgctactggacaatgtt

SEQ ID NO: 289461 - DNA, 267 bp, Glycine max
  unsure (1)..(267): unsure at all n locations
caccattgagattgattccttgtatgagggtattgacttctacacaaccatcacccgntgcccgtttcgaagagcttaacatggacctattcaggaagtgcatggagcccgtggagaagtgtttgcgggatgctaagatngacaagagcaccgtccatgatgttgttcttgtcggtggttctactaggattcccaaggttcaacagttgttgcaggacttcttcaacggaaaggagctttgcaagagcattaacccagatgaagctg

SEQ ID NO: 289462 - DNA, 266 bp, Glycine max
  unsure (1)..(266): unsure at all n locations
cctgccagtagtcatatgcttgtctcaaagattaagccatgcatgtgtaagtatgaactaantcagactgtgaaactgcgaatggctcattaaatcagttatagtttgtttgatggtatctactactcggataaccgtagtaattctagagctaatacgtgcaacaaaccccgacttctggaagggntgcatttattagataaaaggtcaacacaggctctgcctgttgctttgatgattcatgataactcgtcggatcgcacggc

SEQ ID NO: 289463 - DNA, 288 bp, Glycine max
  unsure (1)..(288): unsure at all n locations
aagaattttatggtgagggatatgatgatagtgacaagagaattcctgacatgaccataattaataggcagcttggctggaatcctaaaacctcactttgggacctgcttgaatcaactctcacctatcagcacaggacttatgctgaagccgtaagaaagtcattgcnaagcccgtggcaagttaaacttgtatggnattgaattgcattgagaagagtgtttctgcctataggggcacttatatatagttcaatggttgatttattatatactggnaattcccccc

SEQ ID NO: 289464 - DNA, 306 bp, Glycine max
  unsure (1)..(306): unsure at all n locations
gagaaagagaagtgtgtagttggtgaagtttttgagaagaatatggaacgaagtgncggaatggtaacggggtcgcatgaaaggaacgaacttgttagagttagacacggttctgacagtgggtctaaacccttgaagaatttaaatggtcngattgtcnaataatgtgggtgacaccnattggattaaagggcnaatgggtgaccctcctttggttgcttgtccatgagtgtggcttccccactttgtcaattccttgttaacgagtaatgagnntgaaaaaatgtgagccaatcttgtccccag

SEQ ID NO: 289465 - DNA, 285 bp, Glycine max
  unsure (1)..(285): unsure at all n locations
ataactagaaacagtgtgatgaaaatgaaggtccttgttttcttcgttgctacaattttggtagcatggcaatgccatgcgtacgntatgttccctctccgaatgaacactggctatggtgcccgtatccggagtgaaatgcgcaagttggaggcttgctgtggaagcacacacccatctttgggtttgagacnattctgaacgagtgcgttgaagcaacaaaggantacatccatggccngccatatngntcnagantcnaaaacngttaaccaccangnttat

SEQ ID NO: 289466 - DNA, 301 bp, Glycine max
  unsure (1)..(301): unsure at all n locations
cacaaagcacaaagcaaagctcatccttgagttaaaaaatggcagcagcttcttccatggctctctcatccccatccttggctggcaaggccgtgaagctgggcccatcagcccccagaagtgggaagggtgagcatgaggaaagancgtccaccaagcagtctcctcangaagcccatggttacggccaagacggagtcnangtaacttgggccaattctcntggnganccccgtctnaacctaaccggtgagttcccaggcgaantanggctgggacactgntgggtttccgcanaccc

SEQ ID NO: 289467 - DNA, 291 bp, Glycine max
  unsure (1)..(291): unsure at all n locations
gaaaaagttgtattgaaattttcacaagaggaatttcttacagcttggtcaactcaggtgcgtcctgcaacaactctgttggctgatgggtgcccatatttgtatgctatggngcatgatagttcagtgtctacaataccangtgancttggtattggtgtcaagttgacaaccataaacaatatgtggtgcatatgggctcaatcctggtatttcaggttctcgtcttttgggcaccattcctcagtccatttcacagcaaactgtttggnatcaaatggcancagtgag

SEQ ID NO: 289468 - DNA, 290 bp, Glycine max
  unsure (1)..(290): unsure at all n locations
tctcagtctctgtgtttgcggctgaggattccgaacgagtgaccttcttcgtttctcgcaaagtttaagtaatcatgggtaaggaaanggttcacatcaacattgtcgtcattggacatgtcgactctgggaagtcaactaccactggtcacttgatctacaagcttggaggtattgacaagcgtgtgattganaggtncgagaaggaggctgccgagatgnacaagaggtcattcaagtatgcctgggtgctcgacaagctcaaagctgagcgtgaaagaggattaccc

SEQ ID NO: 289469 - DNA, 296 bp, Glycine max
  unsure (1)..(296): unsure at all n locations
aacgacgcagatgtctcaaagcaaatccagcagatggtgcagttcatccgccaggaagctgaggaaaaggccaacgagatctctgtctccgccgaagaggaattcnatatcgagaagctgcagttggtcgaagccgacaagaagaagatcaggcaagaatacgaacgcaaagagcgccaagttgaaattcgcaagaagttgagtactcgatgcagctaaatgcttctcggattaaaggtcttcaagcncnagatgacgtgattagttccatgaaagaagctgcatncaggaatgtt

SEQ ID NO: 289470 - DNA, 291 bp, Glycine max
  unsure (1)..(291): unsure at all n locations
gcattgttgagggtttgatgaccactgttcattccatcactgccacccagaagactgttgatgggccatcagccaaagactggagaggtggaagagctgcttcatttaacatcattcctagcagcactggagctgccaaggctgttggaaaagtcttcctgctttgaacggaaaattgactggtatggcattccgtgttcccaccgtggatgtctctgttgttgaccttcacagtgaggcnggagaaggnagctcctaagatggaatnanaatgntattcnaggnngaatt

SEQ ID NO: 289471 - DNA, 298 bp, Glycine max
  unsure (1)..(298): unsure at all n locations
agtcatctgatttccttacatatggaatcaaatccttatctcagaacgtgatacctttgttcaaatctataatatttgacttaagggtcacatcgagtgagttcgatagcttcgacgaagtgcgtggtctctttgaaggtggaancaaagctgccaacaaaatataactgaggccaaattagccccctaacnagtccctcaaggaaatccttcggcantganggtgaaantacccttcaatttccacnacntcangtaatcagagtnagtaantctggntggatgactgangatgant

SEQ ID NO: 289472 - DNA, 290 bp, Glycine max
  unsure (1)..(290): unsure at all n locations
gagaaagagatcacatagcagaatggcttctactcaatgtctcttgcaccaccatgctcttaccanccctgccagatccccatcacaacgcatcatggttagcaccaagcctaaccagcttgtntgcaaggcacagaagcaagaggatattgagtcagcccaatctctcgccggttagctctaaccgtgcttcattggtgcngctgctgttggctccaaagtccaacctgctgatgcagcttatggggaagctggcaatgtgtttggnaagccaaagacagacaccgntt

SEQ ID NO: 289473 - DNA, 289 bp, Glycine max
  unsure (1)..(289): unsure at all n locations
ccatcacccttgaggtggagagctctgacactattgacaatgtcaaagccaagattcaggacaaagaaggtatcccaccagaccaacagaggctcatttttgctggcaaacagcttgaagatggccgaaccttggctgattacaacatccaaaagaatctaccctccacttggtgctccgtctgcgcggtggtatgcnaatcnttgtgaagacccttaatggggaagaccattaacttggaggtagagngctcagacaccatttnccatgtgaggccaaggtccnagnc

SEQ ID NO: 289474 - DNA, 285 bp, Glycine max
  unsure (1)..(285): unsure at all n locations
ctcggaggccacagaggcgaaagcaggacctttaagcttcctaatcccctgtactacattcagtagttccttcacctctcaacaatctagcttgctcctatctatctatatgtaataagatgcgttcaaataggggcactagcttcactttagttgttcagctgtgtgtcaacaagtcatgtaagagacttcatatgttggtttcncctttcgtggcctttaataaatnatgggccntggtcccataaaaannaaaacagngcnncnnngnnacnnnnggncgcg

SEQ ID NO: 289475 - DNA, 290 bp, Glycine max
  unsure (1)..(290): unsure at all n locations
gttcatgtggtgtctggaactcctggccgagtttgtgacatgatcaaaaggagaacattacgcacaagggctatcaagatgcnagttcttgatgaatctgatgaaatgttgagcagagggtttaaagatcaaatttatgatgtgtatagatatctccccactggaccttccaggtttgtntgatttctgcaacccttccctccatgaaatacgggagatgacanccagttcatgacagntctggtaagnatccttgtaaaacgtgntgaatngaattggagggcttcaac

SEQ ID NO: 289476 - DNA, 288 bp, Glycine max
  unsure (1)..(288): unsure at all n locations
ttcttaactcaacttctgctacccactctcttcttccaagtccaaccacgcttttctctacagtcatgggcaaggtcaagatcggaatcaacggatttggaagaattggccgtttggttgccagagtcgctctgnaaagagacgatgtggagtcgttgccgttaacgacccttcattaccaccgattacatgacatncacgtttaaaatacgacagtgttcacggacaactggaagcatcacgatgtcacgttaaggacgagangacccttctcttcggtgacaagcc

SEQ ID NO: 289477 - DNA, 290 bp, Glycine max
  unsure (1)..(290): unsure at all n locations
gtaagggcaacgatattctgtgtngcgattatgctagttttgatggtttgattaccaagcaagttatgagcaagatggcaganatgataaacagtctttgtggtggtgatgaaaaattgatgcgtgaaaggacacactggccgttggcttgtngttcaaggatgggcaatttgtaagaaagatgtttggagagttgaatgtggaatcccttctggatttccggctcacagttatttgcaatagcatttttaatgagatgctcattagatatagctatgaaaaattactgc

SEQ ID NO: 289478 - DNA, 285 bp, Glycine max
  unsure (1)..(285): unsure at all n locations
ctgctgacaaggcaaagttcaacaatgtttttgtgaagaatctgtcagaatcaaccactgatgatgaattgaagaatgtttttggtgaatttggnactattactagtgctgtcgtaatgagggatggagatgggaaatcnaagtgttttggattgtgaattttgagaatgctgatggagcngccaaggcngttgaaggcncccaatgggcaaaaagtttgatggccaagaatggtatgtttggaaaagctcnaaaggaatctggaaggngattgantggaaccac

SEQ ID NO: 289479 - DNA, 284 bp, Glycine max
  unsure (1)..(284): unsure at all n locations
attctagacaacaactactacagaaacatattagacagcaagggtctcttgatcagtggatcaccaactagccaatgacaagaggaccaagccttatgtgaagaaaatggccaagagccangactatttcttcaaggngttctctaggccattaccttgctctcagagaacaaccctctcactggcacaaagggtgaggtcagnaagcagtgcaatgttgccaacnagcaccatgatcngggaccttgaatttcctccccttgtcnatgtccanggagnaaatc

SEQ ID NO: 289480 - DNA, 303 bp, Glycine max
  unsure (1)..(303): unsure at all n locations
caatataataccaagttatctganntttttnagantctggnaacatnngaggatagatgtggtnagncttncgtttccacagcacgtggtaggaaatatnccgtgactgtcaacctatgggcaaccagagaaaaatgcttttgaatggggtacatntttgaaagcccntcanacaggaggatgcaattncggggttantcagtccaacaggaaactgttttccataagtgnnagctangaaattcnanaaaacacaactgggatggctcaaaaagtgcgnggttattctgcttnntacnattt

SEQ ID NO: 289481 - DNA, 277 bp, Glycine max
  unsure (1)..(277): unsure at all n locations
ctgctggtgctatcggagcaactgttggtagtccagcagatttggcactcattcgcntgcaggctgatgcaacattacctgctgctcagcgccgaaattacactaatgccttccatgcactctatcgaattactgctgatgaagggtttggcgcnttggaaagggtgctgggctaactgttgttaagagccatggcattgaacatgggcatgcntggcatcttnatgatcaagtgttgagtcttcnagggatccggtngncctgggtgaaccgctac

SEQ ID NO: 289482 - DNA, 287 bp, Glycine max
  unsure (1)..(287): unsure at all n locations
gcttagttgtcaagttggaatcaacccatactccatggaatggactggtttggccaatagattactgagtaagggcaacgatattctgtgttgcgattatgctagttcttgatggtttgattaccaaagcaagttatccgcaagatggnagaaatggataaacagtcctttgtggtggtgatgaaaaattgatgcgtgaaaggacacacctgctgttggcttgttgttcaaggatggcatttgtaaganagntgtttggagagttgatgtggatnccctnctggatt

SEQ ID NO: 289483 - DNA, 285 bp, Glycine max
  unsure (1)..(285): unsure at all n locations
gttttctcccaactgagttctctgttgcagttcatgtggatggtgcaagcaagttgtttgatcagacgtgttttctggatgttaagggatactgtcgcgaagagaggagccacgaagggcttggaatgggtggttctcttgtctaccaaaatttgccaagacttgtgactgtggttcacctagatcaactctgaagtgctggnaagaggnagatgcagaagagtagttttcttaagtgtctttattatgtccttgcgaaaataagtccggttttccagacagtga

SEQ ID NO: 289484 - DNA, 245 bp, Glycine max
  unsure (1)..(245): unsure at all n locations
gnagattccgaacgttccagggcggcggtgcgtcctctgcgctgctgaagcttgggctctcttggtggaattggtttatatgcagctgctaacagtctctacaacgttgaaggaggtcaccgagccattgttttcaaccgtctagttggtgtcaaagacaaggtctatcctgaaggaacacactttatgattccgtggtttgagaggcctgttatctatgatgtccgtgcacgaccccatctagt

SEQ ID NO: 289485 - DNA, 247 bp, Glycine max
  unsure (1)..(247): unsure at all n locations
agataactagaaacagtgtgatgaaaatgaaggtccttgttttcttcgttgctacaattttngtagcatggcaatgccatgcgtacgatatgttccctctccgaatgaacactggctatggtgcccgtactccggaggtgaaatgcgcaagttggaggcttgctgtggaagcacacnacatctttgggctttgagacattccgcaagagtgcgttgaagcaacaaaggaatacatccatggcgaaca

SEQ ID NO: 289486 - DNA, 188 bp, Glycine max
  unsure (1)..(188): unsure at all n locations
tagtgcctccttgccagaagttaaaatggcccaaganactttcctattcacatctgaatcagtgaacgaggggcaccctgacaagctctgtgaccagatctccgatgctgtgctcgatgcatgcttggagcaggaccctgacagcaaggttgcctgtgaaacctgcaccaagaccaacatggtgatgg

SEQ ID NO: 289487 - DNA, 230 bp, Glycine max
  unsure (1)..(230): unsure at all n locations
tttgtncactcttcttctcttgcggctagggttttancgcacttcttctagacttaaggaagatgggtaaggnaaaggttcacatcagtattgtggtcattggccatgtcgactctgggaaatccactaccactggtcacctgatttacaagcttggaggcattgacaagcgtgttattgagaggtttgagaaggaagctgctgagatgaacaagaggtcttcaagtatg

SEQ ID NO: 289488 - DNA, 240 bp, Glycine max
  unsure (1)..(240): unsure at all n locations
gcattgtttctattcaacgactgacaaagaagaagtttacttgaatcttgtacttgaatatgttcctgaaactgtgaatcgcatcgccaggngctatagcaggattaaccagcgaatgcctttaatatatgtaaagctttatacctaccagatttgcagggccctgcttatatacataactgcattggtatatgtcatcgtgacatcaaacctcagaaccnacttgtgaacccgcacact

SEQ ID NO: 289489 - DNA, 243 bp, Glycine max
  unsure (1)..(243): unsure at all n locations
gagagatgnaagcatttggtcacttgaagtcatcagattttctcgtttatggaatcaaatcagtggctcaagacgtcttgcccgtgttgactgatgcgtttgatggcaatcttttgagccttgagtttgataactttgctgaagtgcgcaaactctatgaaggtggagttacactacctacaaactttcttagcaagatcgcccctataccagtggtccaagggaaatttttcgaatgatggc

SEQ ID NO: 289490 - DNA, 242 bp, Glycine max
  unsure (1)..(242): unsure at all n locations
gngagttgctgctgatatcagtcactgcaacacaccctcacaggtcagggatttcactggagcttctgagttgccgaattgtttgaaggatgtgaatgttgttgtcatacccgccggtgttccaaggaagccnggcatgactcgtgacgaccttttcaacatcaatgctggcattgtcagggacttggtttctgctgttgcggattactgcccctgatgctttgttcaaatnatcagtaacc

SEQ ID NO: 289491 - DNA, 244 bp, Glycine max
  unsure (1)..(244): unsure at all n locations
tcggcgtcgtccttacactgttgtactgtttgatgagattgagaaagcccatcctgatgtgttcaacatgatgcttcagatcctggaagatggaancctaacagacagtaagggcagaacagtggatttcaagaacacacttcttataatgacatcaaatgttggaagcagtgtgattgagaaaggaggccgcaaaatnggatttgatctggattacgatgagaaggatagcagttataacaga

SEQ ID NO: 289492 - DNA, 249 bp, Glycine max
  unsure (1)..(249): unsure at all n locations
gaggcattcctgntgatgttcttgcaaagcgagctcatgaatntgaaaaacatgttgcttcatgaaagcctcaaggatcaanttcctgctgttgacangttntattctactaaggtnaataagtttgcanaaattatgaacctagacaaagtgttgtnggtgatttaaacttcttactgangggaagttgtatgagggntaagcatatncctgtanctaatatcgtnccaggggnaaatcatgnanttc

SEQ ID NO: 289493 - DNA, 246 bp, Glycine max
  unsure (1)..(246): unsure at all n locations
cccttcaaagaaaacaagttacatcctctctgacacagtgaacttgaagagtaatcttcccgaatgggtgagcgttgggttctctgccaccaccgggttgcatgaaggctccgttgaaacccatgntgtgatttcttggtcttttgcttccaagttgtcagatggtagcagcaatgatgctttggatcttccaagctttgtgctcncngaggccatctaaatttcaaaacatcgtagttaaatgtg

SEQ ID NO: 289494 - DNA, 241 bp, Glycine max
  unsure (1)..(241): unsure at all n locations
cnaaggggtatactcaccttgaagtatcctatagagcatggcatagnccagcaactgggacgatatggagaagatttggcatcacacattttacaatgagtacgtgttgcccctgaagaacaccccgtacttcttaccgaggcaccactcaatcccaaggccaacagagagaagatgacccaaattatgtttganactttcaatgtgcctgccatgtatgttgcaattcaggctgtcttgt

SEQ ID NO: 289495 - DNA, 236 bp, Glycine max
ggactgataattgcatttatgtaggttctgatgattttgatcatctgttgtaggtggtctggtcatttcctgataaacatatttcttgcttccaaaaaatatttccctgctccctccgtaaattggttgtctttccaaaacgtgaatagtttaaagaagggagttcttatttgtacttctaaatccaactgtttagttaaggggtgtttatctcttgtagagctttagtttgattt

SEQ ID NO: 289496 - DNA, 242 bp, Glycine max
  unsure (1)..(242): unsure at all n locations
aagcatctaagtgagatacacagtagttaggtagcaagcataagtgtctaaccttannaacatatctgctacatatcgtgtgcattttggaattgtgccactaaaattctattcatctatggctgcctcatcttatgctatgcaatcaatcctggcaaaccctatgatcccgcatttccagcgggtctagggagaaccattttggtgttccctgcttatcacatgagnaaggaatgttggcc

SEQ ID NO: 289497 - DNA, 242 bp, Glycine max
  unsure (1)..(242): unsure at all n locations
ccttatctttctctcttctctctccccgcccaaaccctaactccctaccctattccgctttctctcatccatcatgaaaggaggaaagtncaagaccgaatctaagagagccgatgccaaantgcngtgaataagaagggcgccgccaccaagactaggaaacccgccggaaaggggaaggcagcgaaagatcctaacaagccaaagaggcttccagtgctttcttcgttttcatggaggaa

SEQ ID NO: 289498 - DNA, 244 bp, Glycine max
  unsure (1)..(244): unsure at all n locations
aaggatcctaccggagccaaggtcaccaaggctgcccagaagaagaagtgaatcgtgcgggctggttcatcaggggatgttggttacaataaatgttggtttcttttctgtactcttgtgtctcttttctaggtagcttgtttttcggacaaagtttgaagtctcccaccatcatctcgcaactgttgttcccagaactgggttcttgatcgacggtggcaaaaattgcttttatttatcntgt

SEQ ID NO: 289499 - DNA, 250 bp, Glycine max
  unsure (1)..(250): unsure at all n locations
caggagtgctagatggactttcccctgagcaagttcttgagtgcaacacagaagaagtctctgttgagcttgtgaaacagctaaagccaactgaatcagccttgctcaactgggctattgatctcatgtctgatgttgtagcagaagaagattataacaaaatggatgcnaganacattgctatggtttttggctccaaatatgactccagatgtctgatccactaactggctcnggatggcatggcggt

SEQ ID NO: 289500 - DNA, 246 bp, Glycine max
  unsure (1)..(246): unsure at all n locations
tagggctcaccacttccatcaactttagaatccaagggcataaaatgacaattgttgaggtggaagggacccacactnncccaaaacgtttatgactcacttgatgttcatctggggcagacttactctgtgttggttactgctgatcaaccaccccaagactacctcattgtcgtcacgacacgattcacctcccaagtgttgaatgctaactccattttcgttacagtaaatctggtgggaggt

SEQ ID NO: 289501 - DNA, 304 bp, Glycine max
attgtgttggccttcgggatcggagtaatgattaacagggacagtcgggggcattcgtatttcatagtcagaggtgaaattcttggatttatgaaagacgaacaactgcgaaagcatttgccaaggatgttttcattaatcaagaacgaaagttgggggctcgaagacgatcagataccgtcctagtctcaaccataaacgatgccgaccagggatcagcggatgttgcttttaggactccgctggcaccttatgagaaatcaaatctttgggttccgggggaatatggtcgcaaggctgaaat

SEQ ID NO: 289502 - DNA, 304 bp, Glycine max
  unsure (1)..(304): unsure at all n locations
gttgatcgagataactagaaacagtgtgatgaaaatgaaggtccttgttttcttcgttgctacaatnttggtagcatggcaatgccatgcgtacgatatgttccctctccgaatgaacactggctatggtgcccgtactccggaggtgaaatgcgcaagttggaggcttgctgtggaagcacacaacatctttggctttgagaccattcctgaagagtgcgttgaagcaacaaaggaatacatccatggcgaacaatatagatcagactccaaaacagttaaccaacaagcttacttttatgcc

SEQ ID NO: 289503 - DNA, 293 bp, Glycine max
ggagctaagaaggtgctcatcactgctcctggtaaaggagatatccccacctacgtggttggtgtcaatgagtatgactacagccctgatgaacccatcatcagcaatgcctcttgcaccactaactgccttgcaccctttgtcaaggtccttgatcagaaattcggtatcatcaagggtaccatgaccaccactcactcctacaccggtgaccaaaggttcttgatgcgagccacgtgactgaggcgtgcaagggcagcagcactcaacatgtcccacttcaacaggagcag

SEQ ID NO: 289504 - DNA, 298 bp, Glycine max
  unsure (1)..(298): unsure at all n locations
cgcgaacaaaagcaaagaaccctagacagtcacagaaccattccatagaaatgtcaggtgttggccctctttctcaagattgggaacccgtcgtcctccgcaagaaggctcccactgccgccgccaagaaggatgagaaagccgtcaacgccgcccgccgctccggcgccgaaatcgaaaccctaaaaaaatataatgtgggacaaataaagcagcatctagcagcattcattgaacactaagaggntggatgatgatactgagagtctagctcatgagaaggtacaactganttaag

SEQ ID NO: 289505 - DNA, 298 bp, Glycine max
  unsure (1)..(298): unsure at all n locations
gaaatgcgcaagttggaggcttgctgtggaagcacacaacatctttggctttgagaccattcctgaagagtgcgttgaagcaacaaaggaatacatccatggcgaacaatatagatcagactccaaaacagttaaccaacaagcttacttttatgccagagacctcgaagtccatcccaaggacacatttgtgttcagtatagatggcaccgtactctctaatattccatactacaaaaaacatggatatngggtggagaatttaactcgaccttgtatgatgatgggttaacaangg

SEQ ID NO: 289506 - DNA, 293 bp, Glycine max
  unsure (1)..(293): unsure at all n locations
ggttttgcatttcatttgacgaagagtgagagagtcttatctgtcgtctctgatctctgatcgcatcttcattccgaaaatggtgtttcggctatcactggagcgaggtaactctagggatgtctctttcctcttccacgcgatcacgaactgaagcaatggccgtatctatcgaccccaagaccgataacaaacncatcttaccaagttcgaggaagtttcgctgcggccaaggagtgatgctggaggcgtgaactccccagttcgtgccttcaaatccgtgggtggtcaac

SEQ ID NO: 289507 - DNA, 296 bp, Glycine max
ggttgtgtgaattggtgaggaaggcggttggggcggcggaatcggttcggagatatcacgtgaacttgtctattttcacgtccgttccagacgcgtggggcattgaccaggtgtttcccattatccccattcaccggttggaagaaaagccttcggtgaggggtattctctcggacttgacttgtgacagcgacggtaagattgacaagttcatcaacggagagtccagcttggcgcttcatgaaatggaaggaggaagttactatctgggaatgtttttgggtggggttacgagg

SEQ ID NO: 289508 - DNA, 292 bp, Glycine max
  unsure (1)..(292): unsure at all n locations
ccaagattgacaggcgatccggcaaagagcttgagaaggagcccaagtttttgaagaacggtgatgctggttttgttaagatgattccaaccaaacccatggttgttgaaactttctccgagtatcctccacttggtaggtttgctgttagggacatgcgtcaaactgttgctgtgggagtcatcaagaacgttgagaagaaggatcctaccggagccaaggtcaccaaggctgcccagaagaagaatgaatcgtgcgggctggttcatcaggggngttggttacataatgt

SEQ ID NO: 289509 - DNA, 286 bp, Glycine max
ggctgacttgttggaatggtcaaagcaagataagaaacgaatgcttcatgtcgtctaccgtgttggtgaccttgatcgcaccatcaaattttacacagaatgtttaggaatgaagctttgaggcaaagagatatcccagaggagaaatatgctaatgcttttctggatttggccctgaagaatcccattttgttgttgaataacatataattatggggtacctcgtatgacatggcgatggcttggacatttgcaattgcaactcaggcatttataattggtgagc

SEQ ID NO: 289510 - DNA, 293 bp, Glycine max
  unsure (1)..(293): unsure at all n locations
ctttcttttttcccgcagtcatgggcaaggtcaagatcggaatcaacggatttggaagaattggccgtttggtggccagggtggctctgcagagagacgatgttgaactcgttgccgttaacgatcctttcattaccaccgattacatgacatacatgttaaatacgacagtggttcannggnaatgggancnatcannatgtnnacgntaaaggtgaggagaaccttctctcggtgacnagccagtcactgttttggacacaggaaccctgaagagatcccatggaagtcga

SEQ ID NO: 289511 - DNA, 292 bp, Glycine max
  unsure (1)..(292): unsure at all n locations
gaaaatgaagaacaatgccattgtttgcaacattggtcactttgacaatgagatcgacatgctggggctggagaactaccccggcgtgaagcgcatcaccatcaagccccaaacngacagatgggtcttccccgagaccaatgtcggcatcattgtcttggccgagggtcgtttgatgaacttgggatgcgccacaggacaccctagttttgtgatgtctgtnccttcaccaaccaggtcatgctcagttgagttgtggaaangagaagagtaccggcaagtacgagaagna

SEQ ID NO: 289512 - DNA, 290 bp, Glycine max
  unsure (1)..(290): unsure at all n locations
cattaacgtttcttctcttcactctgcccgctgcaacaatggcttcagagaagaaactttcgaacccaatgagggagataaaagtgcagaagctcgtcctcaatatctctgttggcgagagtggagatcgtctcaccagagcctccaaggtgttggaacaattagtggccaaaccccagtgttttccanagcaaggtacactgttcgttcctttgggattagaaganatgagaagattgcatgctatgtcactgtcagaggtcacaaggcatgcaacttttggagagtgg

SEQ ID NO: 289513 - DNA, 292 bp, Glycine max
ctaaatcgaagcaaacaatagtgagtgagatcgtgaagaaattagtttggaaatggcagtggcaggttgtcagaagcttctggaactgagcaccaagatcgtcgctgttggcagaaactacgctgctcacgccaaggaattaggcaacgccgttcccaaggagcggtgttgtttctgaaaccgacgtcgtcttacttgaaaaacggcggaaccatccaaatcccacacaacgagggtctctgcatcacgaggttgagctcgctgtggtcatcgccaagaaagcacgtgacgt

SEQ ID NO: 289514 - DNA, 282 bp, Glycine max
tgttgatcgagataactagaaacagtgtgatgaaaatgaaggtccttgttttcttcgttgctacaattttggtagcatggcaatgccatgcgtacgatatgttccctctccgaatgaacactggctatggtgccgtactccggaggtgaaatgcgcaagttggaggctgctgtggaagcacacaacatctttggcttgagaccattcctgaagagtgcgttgaagcaacaaaggatacatccatggcgaacaatatagatcagactccaaaacagttaacca

SEQ ID NO: 289515 - DNA, 278 bp, Glycine max
  unsure (1)..(278): unsure at all n locations
ggaatttctgaagcgtaccggatttcattgtgatatcatttgtgtcactggatggactgccaccccaatgcaggatgttcacgttacaattgattggttatttcctctcaggaatgtgttcccagaacctattgtgttttaaatccacaaaatccttttgnnctaaataggtggatgggaaactgactttnccccagggcacttccgaagtgttaagagaatgctctttctatagggggangantggtgaaagaatgcatcncatgaacatgccaaat

SEQ ID NO: 289516 - DNA, 279 bp, Glycine max
  unsure (1)..(279): unsure at all n locations
gctaaatcgaatcgaatcgaatctccgaagatggccgcgagcgatcgcacagtgttgcaattcnnnnnnnnnnnnnnnnnnnngcagagcttgtccgcgaaggtccaccctctggtcatcttcaacatctgtgattgctacgttcgacgcctgaccaagncgatcgtgtcatcggaaccctactcggctccgtcttcccgatggaaccgtcgatatccgcaattctatgctgttcctcacaacgaatctaccgaacagttgcgtnggatatagagtacc

SEQ ID NO: 289517 - DNA, 254 bp, Glycine max
  unsure (1)..(254): unsure at all n locations
agatcttgtagcaatggcgagcgctcccactccacgcgaagagttcgtgtacatggcgaantggcggagagggccgagcgctacgaggagatggtggagttcatggagaaggtctccgcctccgccgagagcgaggagctgaccgtggaggagcgtaacctcctctccgtcgcctacaagaacgtgatcggcgctcgccgcggctcctggcgcatcatctcctcaatcgagcagaaggaggagagccgcggcaa

SEQ ID NO: 289518 - DNA, 281 bp, Glycine max
  unsure (1)..(281): unsure at all n locations
ctagccgtagtcctcatgatactgggaagactagccctgaaaatggncntngcancggaagtcctgatgaaaaagggaatcccagcccttacaatggttatggagggagcccaaataatatgcctgatcccagggacagtcccaactanggcggtcctgaaagtcccatgcatgaaagataccgcagccagtcaccccctgcagaagaatgattgcagtctttgatgaagccggaagggccaactgattgtagncctgtttcatggctggactaaaatttc

SEQ ID NO: 289519 - DNA, 275 bp, Glycine max
aattttgtttctttgtgtgtgtatggtgatgataacttaattagtgttcatgaatatgtcaagccttactttagtggttctaaattgaaaagcttctagctggtcataatatcaccattactgatggtattgacaaaactagtgcaactttgcaatttagaaagttagcagattgtgattttctcaagagaaactttaagcagatgtctaatgtttgtgggtggctcctgaggacaaggcgagtttgtggtcacaacttcattatgttcgtgtat

SEQ ID NO: 289520 - DNA, 286 bp, Glycine max
  unsure (1)..(286): unsure at all n locations
gctgagcgtgatggttcaaatgaatatgctgattatcaaccgggttctctaaacaccacagaccaactcgtcaaggatttagaaaattatgacattgttttccacataggagacatgccttatgcaaatggatacatctcacaatgggaccaattcacagctcaagtgcaaganatttcgtcaacagtaccatacatgattgcaagtggaaatcatgaacgtgactggccaaacacaggatcattctatgatactccagattcaggtggagaatgtggagtcctgc

SEQ ID NO: 289521 - DNA, 285 bp, Glycine max
  unsure (1)..(285): unsure at all n locations
agcgaananaatggctcccaagggtttnatctttttggctgtgttatgcttctcagcnctgtcactgagtcgttgtcttgcggaggataatggacttgttatgaacttctacaangaatcatgccctcaggctgaagacatcntcnaagaacaagtcaagcttctctacaagcgccacaagaacactgctttctcctggctcagaaacatcttccatgactgtgctgttcagagttgtgatgcttcactgttgctggactccacaanaaggagcttgtctgagaa

SEQ ID NO: 289522 - DNA, 257 bp, Glycine max
  unsure (1)..(257): unsure at all n locations
aaagaactgtatngacnctgtttagatcaannatatgctgaccgcaatctaattgcaaaatggaagaagcctggttatgaacgtctttgctgcctgaggtgcatgcagccacgtgatcacaattttgccaccacttgtgtttgcagagtacccaagcaacttagggaggagaangtcatagagtgtgttcactgtggatgcnagggttgtgcaagcggggactaattgantatcgattctagttttagttgccaatg

SEQ ID NO: 289523 - DNA, 286 bp, Glycine max
aggaacattgttgaacaggctgcagtcagagatgtgcaggaagcttgtgtctatgaacaatatacacttccaaaactctatgtgaagatgcagtactgtgtttcctgtgctatccactctcatgttgtgagggttcgatcccgcaccgacaggaggaagcgtgagcctccacagagattcatcaggcgcagggatgatgcaccaagacctggtcagcccggtcaaggacctcgtcctgctggcacagcagcagcacctgtccgaacctaaaagcaagtcctaagga

SEQ ID NO: 289524 - DNA, 288 bp, Glycine max
  unsure (1)..(288): unsure at all n locations
aananaatggctcccaagggtttaatctttttggctgtgttatgcttctcagcactgtcactgagtcgttgtcttgcggaggataatggacttgttatgaacttctacaaggaatcatgccctcaggctgaagacatcatcaaagaacaagtcaagcttctctacaagcgccacaagaacactgctttctcctggctcagaaacatcttccatgactgtgctgttcagacncgtgatgcttcactgttgctggactccacaagaaggagcttgtctgagaaggaaaca

SEQ ID NO: 289525 - DNA, 290 bp, Glycine max
  unsure (1)..(290): unsure at all n locations
tttgtctctntttggcaggccttgtcaaaaacattgactgcagntgaactctattatctgagggagcaatttgcactgctaganccaagcaaaaatggcagcntntctttagagaatgttaacaaggccttgatgaaatatgcnacagatgccatgaaagagtctcgcatccttgacttcctttcntcgctgaactcgttacaatatagaaggatggattttgaaganttttgtgcagctgcattgagtgtgcntcaacttgaagctcttgatcgttgggaacaacatgc

SEQ ID NO: 289526 - DNA, 293 bp, Glycine max
  unsure (1)..(293): unsure at all n locations
aagaacgcagaaactgaaataaaaaatggcagaacccaaggttaaatacgatcgtcaactcagaatatggggtgaacaaggacaggcagcccttgagaagtctagtatttgcttacttaactgtggtcctactggttctgaaacacttaagaatcttgttcttggtgggggttggaagcatcactgtagttgatgggatctaaagttgaagcgggagactcggaaacnatttttggtggatgaagcangtcttgggangtcaaaggcaaaatgtgtatgctcatttcttcang

SEQ ID NO: 289527 - DNA, 290 bp, Glycine max
  unsure (1)..(290): unsure at all n locations
attacaatggcaacaagcttcctttcgctgctgcgcagattggccaagcgtttaggaatganatatctccacgacaggggcttctganagtgcgggantncacgttggcggagattgancactttgttgaccctctagataagtctcatcccaagtnccctgaggtagctgacttggagttcttgatgttcccgagggatgagcaaatgtcgggtcagtctgccaagangattcctcttcgtgatgctgtttccaanggaattgtcaccaatgagacacttggttactnc

SEQ ID NO: 289528 - DNA, 286 bp, Glycine max
  unsure (1)..(286): unsure at all n locations
ccanagcncagctgcaggcaagccctttgtggaagtcttgaaggaggctggtgttcttcctggcatcaaggttgacaagggcncagttgagcttgctggcactaatgganaaaccnccnctcagggtctanntggccttggtcagcgttgcgccaantactatgaagccggtgcacgttttgccaagtggcgtgctgtgctgaagattggtcccaacgagccatctgagctggctatccntganagtgctatggcttggcacatacgctgtcatntgccacgggat

SEQ ID NO: 289529 - DNA, 286 bp, Glycine max
  unsure (1)..(286): unsure at all n locations
cacaatcatgtcagataaanaagtagtantaaatgggttatctgaggaccaagcatggcaagagctcaagtttccagagttgttgaacagtgatgctgttanagaaatccatgcaactnttgaaaaagaatgggattttcttcaaaggtcagcttgccaaaccgctgcgggaagggctctgtggaagcatgccatccatgatccactggctgacgtgctggcaggagagacttacttgagaaacctccatgannagntcaagagagacattctcaacaatgctcgc

SEQ ID NO: 289530 - DNA, 284 bp, Glycine max
  unsure (1)..(284): unsure at all n locations
ggtgagagagattcccttgaganccagaggagtatttggccgtacaggaagtgggaaatcaaccctcnttcaggtgttatttaggttgattgagccttcngctgggaaaataactgttgatggantcnacatttgcnctgtgggccttcatgatctgaggtctagatttggnnttnttcctcaagagcctgtcctctttcaaggaacagtacgaagcaatgttgacccccttggnctgtattcagaagaagaaatttggaagagccttgagcgctgccaactgg

SEQ ID NO: 289531 - DNA, 283 bp, Glycine max
  unsure (1)..(283): unsure at all n locations
ctagctanggtattgggagctctcgttgtttcggagttagggaccttacgcagccatggccactgctacgaatgccgccgccgccccaccacgccagctctcccagaaggaagctgacatccanatgatgttggccgccgacgtccncctcggcaccaanaactgcgacttccnaatggaacgttacntcttcaagcgccgcaacgacgggatttacattnttnaccttgggaagacgtggganaagcttcagctagcagtagggttatagttgcaattgagg

SEQ ID NO: 289532 - DNA, 284 bp, Glycine max
  unsure (1)..(284): unsure at all n locations
gtaagattgaagctggggaaaggttcagtgtgtatgttgtggttccaatgtggccanagggtgtcccagaaagtgcatcagttcaggcaatattggattggcagaggagaacaatggatannatgtacaagnatgttgttcaggcgctccgggccaagggaatagtggaaaatcctcgtaactatttgacattcttctgccttggtaatagggaggtgaagaaacaaggagagtacgagcctccagaaagaccagatcctgatacagattatatcagagctcag

SEQ ID NO: 289533 - DNA, 286 bp, Glycine max
  unsure (1)..(286): unsure at all n locations
tgaaccataaccatgtcagacgaggagcaccacttcgagtcaaaggctgatgctggagcatcaaagacatttccccagcaagctggaaccatccgcaaaaacggttacattgtcntcaagaacaggccatgcaaggttgtggaggtttcaacttccaaaactggcaagcatggacacgcaaagtgtcactttgttgcaattgacntcttcactgggaaaaagcttgaggatattgtcccntcttcccataactgtgatgttccccatgttaatcgcattgactacc

SEQ ID NO: 289534 - DNA, 287 bp, Glycine max
  unsure (1)..(287): unsure at all n locations
aaatgatatggttgagtacttcggtgaacaattgtcaggctttgccttcaccgttaatgggtgggtgcaatcctatggttcccgttgcgtgaagccaccgatcatctatggtgatgtgagccgcccaaagccaatnaccgtcttctggtcatctctggctcagagctttaccaagcgcccaatgaagggaatgcttaccggtcctgttaccattctcaactggtcctttgttagaaatgaccaacctangtataaactccacaccgaaaaatgaacatcaaggaggg

SEQ ID NO: 289535 - DNA, 290 bp, Glycine max
  unsure (1)..(290): unsure at all n locations
tttccnttcnttcnttcgttgttcttctttccaccaacaagaaanaanacanagagaaactttcatttcntagnttttcntcatctcagcaaaggaatcaatcnatcaagccatggcaggcttcagtggcgacgaanccgctcctttcttcggcttcctcggtgccgctgcggccctcgtcttctcctgtatgggagcggcgtatggaacggcgaanagtggggtgggggtggcgtcgatgggagtgatgangccggagctggtgatgaagtcgatcgtgccggtggttg

SEQ ID NO: 289536 - DNA, 289 bp, Glycine max
  unsure (1)..(289): unsure at all n locations
atcgagataactaganacagtgtgatgaaaatgaaggtccttgttttcttcgttgctacaattttggtagcatggcaatgccatgcgtacgatatgttccctctccgaatgaacactggctatggtgcccgtactccggaggtgaaatgcgcaagttggaggcttgctgtggaagcacacaacntctttgggctttgagaccattcctgaagagtgcgttgaagcaacaaaggaatacatccatggcgaacaatatagatcagactccaaaacagttaaccaacaagct

SEQ ID NO: 289537 - DNA, 279 bp, Glycine max
  unsure (1)..(279): unsure at all n locations
acacactttcaacccaatccaatcctngcacacatgcatnnngnntctgccaaagttggggccaagtcataactacatttccattgttacgattcttnctttccatcccaaccacttanggagcgtctgatccaatttctttctctcaccatggatcatcgcaaaccattgttacccacttcctctgacgatgctccaaatccacgcactcggaaggaccttgttctaatgatttgcggtttgtttttgctctcttcccttgttgcctttggagggtag

SEQ ID NO: 289538 - DNA, 304 bp, Glycine max
  unsure (1)..(304): unsure at all n locations
aagcaagctcatcctagagttttaanantggcagcagcctcctccatggctctctcttccccatccttggctggcaaggccgtgaagctgggcccatcagcccccgaagttcgggagggtcagcatgaggaagaccgtcaccaagcagggcctcctcccggaagcccatggtaacgggcccagaaccgcgtcaagtaacttggggcccattctctggncgagcccccgttcctaccttcactgggcgagtttcccaggtgactacgngctggggacnctggctggggcttttcgggccgaaccc

SEQ ID NO: 289539 - DNA, 263 bp, Glycine max
  unsure (1)..(263): unsure at all n locations
gagaatggctcccaagggtttaacntttctggctgtgtnantntgcgtttcngcnctgtcnctgagtccttctgttgcgggggaacggcaaaataatggccttgttatgancttctncnaggantcntgccctcnggctgaanacatcntcncagaacnagtcaagcttctctncnagcgccacaagancactgctttctcctggctcaggancntcttccntgactgtgctgttcagagttgtgatgcttcactgttgctgg

SEQ ID NO: 289540 - DNA, 283 bp, Glycine max
  unsure (1)..(283): unsure at all n locations
agcctcangagganaataaggntgtctcacagnaagtttcgagcacccaaggcacgggtcactgggatttctccccaggaagcgtgctgctcgtcacaggggaaaantgaaggcattccccaaggatgacccatccaaggcacccnagctcnctgcattcttgggttacaaggctggtntgactcncattgttagagangtcganaagccacgntcngagcttcacganaaggaaacatgtgagcctgttacaattnttgagacccctccaatggttattgtt

SEQ ID NO: 289541 - DNA, 291 bp, Glycine max
  unsure (1)..(291): unsure at all n locations
gactgacttttcgagaaangaaaaaaaaanagtttccggcattnttccatcatgaacgctcttcccnttctnctcttcttcctcttcgtttcggcnttngtttatgcgaanaaaactggcgatgtgacggagttgcaaattggcgtgaagcataaaccagcatcntgtgaagttctggcacacaaaggtgncagagtcaaagtacactatcggggaaaactcactgatggaactgttttcgattctagctttgnnnganatnntccaattgaatttgagcttggtactggt

SEQ ID NO: 289542 - DNA, 296 bp, Glycine max
  unsure (1)..(296): unsure at all n locations
cctgntgaacccatcatcagcaatgcntcttgcaccactaactgccttgcaccctttgtcaaggtccttgatcagaaattcggtatcatcaagggcancntgaccaccactcactcctacaccggcgaccaaaggcttctcgacgcgagccaccgtgacctgaggcgcgccagggcggcagctctcnacattgtccccacttcaacaggagcagcaaaggcagtggcccttgtcctcccaaccctcaagggcaaactcaatggcattgcactccgtgtgccancaccaaacgtctc

SEQ ID NO: 289543 - DNA, 283 bp, Glycine max
  unsure (1)..(283): unsure at all n locations
gttcactcttcttctcttgcggctanggttttagcgcanttcttctanntttnaggnanatgggtaagnaaaangttcacatcngtattgtggtcattggccatgtcgactctgggaaatccactaccactggtcncctgatttacnggttggaggcnttnncaagcgtgttattganaggttttanaacgaagctgctgagntgaacaagaggttttcaagtatgcctgggtgctggacaaacttaangctgagcgtgaaagaggaatcaccattgatntng

SEQ ID NO: 289544 - DNA, 283 bp, Glycine max
  unsure (1)..(283): unsure at all n locations
tctctgttctgctcttgtcctgcttttccatccntttatgtgaaaaaggaaaaattgcctgaggtggttcaatcactatggnatcctgcaattgtattgncccacaagtgccagctgntgncttattgatganntaccaatatatctctgatttcttcnttgcccttgcttatttctcnatccntttggagcttatcnactttgttaagnnntcagcngtatttcntatagatgggtccttgntcagtttggtgcttttntagtnttatgtggagcaacacat

SEQ ID NO: 289545 - DNA, 288 bp, Glycine max
  unsure (1)..(288): unsure at all n locations
gcnannagaattgctcccaagggtttaatctttttgngctgtgttatgcttcngcagcnctgtcactgantcgttgtcttgcggagggtaatggncttgttatgaacttctncaaggaatcatgccctcaggctgaagacatcatcagagaacaagtcgagcttctctacnagcnccacaagagcnctgtctttctcctggctcagngncatcttcccatgnctgtgctgttcagagttgtgntgcttcantgtngctgggnctccacaagnaagagcttgtctgata

SEQ ID NO: 289546 - DNA, 282 bp, Glycine max
  unsure (1)..(282): unsure at all n locations
aacactcntnacacaaagcacaaagcaaagctcntccttgagttanaanntggcagcagcttcttccatggctctctcatccccntccttggctggcaaggccgtgaagctgggcccatcagccccanaagtgggaagggtgagcntnangaagaccgtcaccnagcnggtctcctcaggnagcccatggtacggcccacaccgagtcaagtncttgggcccattctctggcgagcccccgtcctncctaaccggtgagttcccaggcgactacggctggga

SEQ ID NO: 289547 - DNA, 288 bp, Glycine max
  unsure (1)..(288): unsure at all n locations
agtgatttcagtgagtgatcggtgttcacttgatctcatcatantcgtcagcgtcaattgaagaagatgccgatcanaaacatcgccgtcggaaggcctgaagaggcgactcaccccgacacgttgaaggcggctttggctgagttcntctcnnccttcntcttcgtgttcgccggctcaggctccggcatcgcctncnacnagctcnccgacaacggcgctgccacccctgccggcctcatctccgcctccntcgcccatgcnttcgccctcttcgtcgngtctccg

SEQ ID NO: 289548 - DNA, 257 bp, Glycine max
  unsure (1)..(257): unsure at all n locations
catggctatggctatgcaaagcggaatcggagtctccaagatcctcatcatagcaggagcaggttacaccggcaccgtcctcatcaaaaacggaaaactctcggatttaatcggcgagcttcagttgctggtgaagggattggaaaaatctggggagcatgctgaaggtgaaggtgaatatgctgntgccatagctgctcaggtgcgtcgcctggcgaatgaagttcggnagctagcatcaaaaaggccaatcacag

SEQ ID NO: 289549 - DNA, 280 bp, Glycine max
  unsure (1)..(280): unsure at all n locations
cgganctccaagncctatcctcagcaggccggaaccatccgcaaaaacggctacatcgtcatcaagggtcgtccctgcaaggttgttgaagtttctncttccaagactggtaagcacggccatgctaagtgtcactttgttgggattgntattttcactgccaagaagcttgaagatattgtgccctcttcccacaactgtgatgttccccatgtgnatcgtactgattnccagttgattgacattgctgaggatggatttcttagcttgcttactggaa

SEQ ID NO: 289550 - DNA, 279 bp, Glycine max
gcaacctcgtcttgtgatttccatggagggtgctgggatggaagagaataatattattaatgatgatgataataataacaagtctgaggcgcatttgacttctgccgctgcttttgtggagggtggaattcaggacgcttgtgatgatgcttgcagtatatgccttgaagctttctgtgatagtgatccttccacggtgacgagctgcaagcatgagtttcatcttcagtgcattctcgaatggtgtcaaagaagctcccagtgccccatgtgttggca

SEQ ID NO: 289551 - DNA, 293 bp, Glycine max
  unsure (1)..(293): unsure at all n locations
gacgtgcgtggactctttgaaggtggaattcatctccctacanatgcactcantaaaattagccccctaccagtgctcaaggaaatcttccgcactgatggtnaacncngtcctcaagtttccaccacctcatgtcanaanagttagtaantctgcaatggatgactnatgaanaatttnnaagatanatgcttgctggtgttaatccatgcctaattgagtgccttcaagtgttccctctacaacancaagctagatccacagtgtatggtgatcaactantacaataacca

SEQ ID NO: 289552 - DNA, 204 bp, Glycine max
  unsure (1)..(204): unsure at all n locations
agaatggaatttcgatgctcagtcatctcttttaccattctcttctctcttgctcttgcaggagagagccatgtccatgcatcgctactgaggnagattattgggnagcngttggncaaacaattccatcccaatngaatnnnngnnnntcnnaaggctcttcctngangtgtngaatnngtgacnccntagnaaatggntgtt

SEQ ID NO: 289553 - DNA, 261 bp, Glycine max
  unsure (1)..(261): unsure at all n locations
gtccttgttggtggttctaccagaattnccaaggttcaacaactgctgcaggacntctttaatggnaaagaagnttgnaaaannnntnantcccgnngaggntnttgnatatggtgcggctgttcaggctgcaatcttaagtggtgagggcaatgagaaggttcaggatcttctcctcctggatgtcacccctctgtctcttggtttggagactgnccggtggtgtgatgactgtcctgatccctaggaacactacaattc

SEQ ID NO: 289554 - DNA, 274 bp, Glycine max
  unsure (1)..(274): unsure at all n locations
cacctttccagccttagcctcaacgttatcagccgcatggtgttgggaaaaaagtaccttgaagaatcccaaaacgcngtcnttttgncntatgnnntcnaanangntncttnntgngtngtttttncttaatggggtgnataacattggggactttattccttggattgatttcttggacttgcagggttacataaagaggatgaagactttgancaagaagtttgatatgtncatggagcacgtccggatgaacatattgngaggaagaaag

SEQ ID NO: 289555 - DNA, 275 bp, Glycine max
  unsure (1)..(275): unsure at all n locations
cagaattctctaaaaganatctttttctgctctttgaagaaagaagggtcttgcttnattttngagatggctcnggtctcananctcnncnaccntaancnnnccggnnacnacngagaagnggntccccagantnnntatggatcggtggatcaggantggacctgaggancaaagcaaggactctcccaggaccagttagcgacccttcagagcttcccaagtggaactatgatggttccagcacaggtcaagctcctggtgaagacagtgaa

SEQ ID NO: 289556 - DNA, 275 bp, Glycine max
  unsure (1)..(275): unsure at all n locations
ttttatctccccaaaatggagcattcaagggaagcnaagatatggaacagcgtgtttganaangctgangatgtagtaggcattcaaaanagnaagcataagggcaacngttctgatagaaacacttcctgcantgnttcnaatnnatnnaatttgnantnnccnaagnncnantccgntgggccnaaactttggncnttgggattnctttncagtnatgttangacttcccaggctcacccagatcgcctcctaccagacagggttcaggttgc

SEQ ID NO: 289557 - DNA, 275 bp, Glycine max
  unsure (1)..(275): unsure at all n locations
gcacttttcagttacaaagcatttcattgttttacaatatacaacactacaatggctgctttcaacaatggntcncncnttcancancantggcttggcaagnnnnnnangtttgccccttcaacccntnngctnggtgttggaagggttancntgagaaaaacagcctccaagactgttacctcaggaagcccatggtacggcccagatcgtgtcaagtattgggcccattctctggtgngcccccatcctacctnactggnganttcccnggg

SEQ ID NO: 289558 - DNA, 274 bp, Glycine max
  unsure (1)..(274): unsure at all n locations
caagttttcaaaaagcgatatcattgtttctccatccattctttctgcaaactttgcaaaattggganagcangtgaaagcagtggagtngnnggntggtaatnggntcaangtngatgtaatggatggccngtttngtnccaaatattacaattggacctcttgtggttgatgcattgccgcccctgtgacagatcttccttnggatgtacacctgatgattgtagaccctgaacaaagggtaccagattttattaaggcaggagcccgatac

SEQ ID NO: 289559 - DNA, 296 bp, Glycine max
  unsure (1)..(296): unsure at all n locations
attaattgnnagantggcacttcgttgcttggtgatgtcctttctgttctctttcactcttggtcttgcgagagaaagccatgccagagacgaagatttttgggcatgctgtttggccaaacactcccattccaagttcattgcgagancttctaaagcctggccctgcaagtgttgaaatcgatgatcaccctatgcaaattgaagaaacacagtacccgaaaaccttcttctataaagaagacttcatccaggcaaaacaatgaaagtacaattcagcaagcctcccttttcaa

SEQ ID NO: 289560 - DNA, 304 bp, Glycine max
  unsure (1)..(304): unsure at all n locations
caatatattccattctctctgtgtatttccctaccttctccctttcaagatgcagattcttcgtnnagaaccttcacnggcaagacntcanccttgaggtggnaagctctgacancatcgacaacgtcaaggccaagatccnggacaagganggaatccccccggaccagcaacgtctcattttcgccggaacgcaacttgaggacggccgtacccttgctgactacaacattcagaaggagagtactcttcacctcgtcctccgtctccgtggtggcatgcagatcttcgttaagacactcac

SEQ ID NO: 289561 - DNA, 291 bp, Glycine max
  unsure (1)..(291): unsure at all n locations
gcttggactaatggaaacattctctgcctttatgaggcatcaaatggcagatagggggcgaagcnttgacatcngggtgcgaacagattcanatcctgaacacagtgcaagttttgctcctctgttgatctttggtggccacataccttttagattgtccagacatggtggctttgaagctctatttaatggggctccaggaatcggtctgacacngggtaacacangcgattattttatcggtcctggactagaaganctgtttgaacagctttcagctaacaacaggca

SEQ ID NO: 289562 - DNA, 291 bp, Glycine max
  unsure (1)..(291): unsure at all n locations
gaaccatatttttcttgaaaaatgatggnactttgacgccattgggcnttgagttaagtaaagccgcatcctcagggtgaagatatggtctgttagcgaagtctacgtggcttcgagtgaaggagttgaagcttacattggttactggcaaaggctatgtgttgtgaatgatgcatgctaacatcaaatcattagccattggctaaacactcatgcggttgttgagccatcgtcatagcgacaaacaggcatctgagcgtggttcaccctatttacaaacttctgtttcct

SEQ ID NO: 289563 - DNA, 300 bp, Glycine max
  unsure (1)..(300): unsure at all n locations
cttnaccttctgctctaganaattcngtgctgaaanatgggcttcggctaattctctctgtaggcaaaacnagcctttcaggcaaatggganaggcttctctgaattctctggcctccgaagctcatcaggcttccttcccttttctagaaaatcttcagaggatttccattctgtcatngccttccagacctatgcngttggaagcagtggaggatacaagnngggtgtgacagaagcaaaactgaaggttgccataaacgggtttggaaggattggaaggaattcttgaggtgctggc

SEQ ID NO: 289564 - DNA, 292 bp, Glycine max
  unsure (1)..(292): unsure at all n locations
ctcttttttctctctcttncaaaacctaattttcatttctttccctcaaatttcaaaatgcgtgagatccttcacatccagggtggccaatgcggcaaccagatcggngccaagttctgggaggtggtttgcgcggagcacgggatcgaccctaccggaaggtacggtggggactcggagttgcagctcgagaggatcaatgtctactacaacgaggccagttgcngtcggttcgtgccgcgcgcggttctcatggacctcgaaccgggnaccatggacagcgtccggtccg

SEQ ID NO: 289565 - DNA, 294 bp, Glycine max
  unsure (1)..(294): unsure at all n locations
cgaagagaatgggctcccaagggtttaatctttttgggctgtgttatgcttctcagcactgtcactgagtcgttgtcttgcggaggataatggacttgttatgaacttctacaaggaatcatgccctcaggctgaagacatcatcaaagaacaagtcaagcttctctacaagcgccacaagaacactgctttctcctggctcagaaacatcttccatgactgtgctgttcagagttgtgatgcttcactgttgctggactccacaagaaggagcttgtctgagaagganacaga

SEQ ID NO: 289566 - DNA, 296 bp, Glycine max
  unsure (1)..(296): unsure at all n locations
gtcacactggtgtgatggttggcntgggccaaaaagatgcatatgttggtgatgaggcacaatctaagaggggtattttgactctcaagtnaccccantgaacatggaattntgagcnattgggatgatatggaaaagatttggcatcataccttctataatgagcttcgtgttgccccagaagagcatccagttctcttaactgangcccctcttaaccccaaggctaatcgtgagaagatgacccaaatcatgtttgagaccttcaanacccctngctatgtacgtagccatcc

SEQ ID NO: 289567 - DNA, 296 bp, Glycine max
  unsure (1)..(296): unsure at all n locations
aggatgggaatgtaaggggctggtcaatttactgntgtaacctcactattactgattatttccagaactaacagttcgagaatctctttcttccaagcggaantcgccggtggcgcacggccgtcggattttgggactaccactcgttcatcgccnctgccgcgcttttcgagccgcaagggttcggcaccaccgggaacaagacgatgcagatgatggagattgcggcgttcctcggacacgtcggcagcaagacctcttgtggttatggagtggctaaccggaggactttggcc

SEQ ID NO: 289568 - DNA, 301 bp, Glycine max
ggctagatgagagcaactcattgggtgtgcttggaagttctggaagaggtctcacttgaacactgtgggagttccagttgagaagatagacattataactgctgctatgggacatgcattggccacagaaggaggattctgcaccggaagtacaagagttatagatcaccaaagattgagcagctctggttatgtcttctctgcttctttgcccccatatcttgcaagcgctgctattacagctattgatgtcctggaggaaaatcccaatctgataaaaaagctgaagaaaaatattgct

SEQ ID NO: 289569 - DNA, 281 bp, Glycine max
  unsure (1)..(281): unsure at all n locations
caattcccaatcttctcaaaccctaatttctcntcttgnaaatgngagnantcttgcacatccagggngggcnatncgggaaccagatcggagcgaagttctgggaggtgatatgcgacgagcacgggcatcgaccacaccggaaagtacagtggcgactctgaactccaattggnacgcatcaatgtttattacaacgaagcgagtggcggaaggtacgttccacgcgccgtcctcatggatctagagcccggcaccatggactccgtcagatccggccc

SEQ ID NO: 289570 - DNA, 302 bp, Glycine max
  unsure (1)..(302): unsure at all n locations
ggaatcnccccggaccagcaacgtctcattttcgccggaaagcaacttgaggncggncgnaccntgctnatancaaatttcaganggagagtactcttcacttcgtcctccgtctccgtggtggcatgcagatcttngttaaganctcaccggcaanaccntaactctagaggttgaanagctccgaactcatcgataaagttnaagggncaanatccggnacanggnnggtatcccccgggaccaggcaangtctcattttcgncgggaaagcngttcgnggacggccgnnaccttcgcgg

SEQ ID NO: 289571 - DNA, 289 bp, Glycine max
ctccccaattctcaagccaaccatgtcttccttcaagagcaagtaccaagatgaactcattgccaatgctgcttacattggcaccccagggaagggtatccttgctgctgatgagtcaactggtacaattggcaagcgattggccagcattaatgtcgagaatgttgaagcaaataggcgtgctcttcgtgaactcctattcaccacacctggtgcttttgagtgcctcagtggtgtgatcttgtttgaggaaaccctataccaaaagacagcttcaggaaaacccttc

SEQ ID NO: 289572 - DNA, 226 bp, Glycine max
  unsure (1)..(226): unsure at all n locations
tagtgcctccttgccagaagttaaaatgggcccaaganactttcctnctcacatctgaatcagtgaacgaggggcaccctgacaagctctgtgaccagatctccgatgctgtgctcgatgcatgcttggagcaggaccctgacagcaaggttgcctgtgaaacctgcaccaagaccaacatggtgatggttttcggagagatcacaaccaaggccaacgtggacta

SEQ ID NO: 289573 - DNA, 297 bp, Glycine max
  unsure (1)..(297): unsure at all n locations
ctttctttgttccgttctactttcccttcccaacaacaacaagaancatgccttcttgcagaagcttcctccgaaaccatttgtgtcaccgggcgctggtggcttcatcggcctttggatggtcaaattcttcttggaaaaaggctacactgtccgaggaaccctcagaaatccagatgatcccaagaacgggcacttgaaggattttnaaggagcctccgagaggttaactctgcataaggttgacctccttcatctggactccgttagatcagttattaacggttgcccatgngg

SEQ ID NO: 289574 - DNA, 295 bp, Glycine max
  unsure (1)..(295): unsure at all n locations
cnctcaatggtgttgngggtttggnctntntggnaagnnttcctcttgccacatctgaggggtttcctccatgtgctttcacgcaaaantggtgaccaaggcaaaaggagntttgtttctggggatggtgaagagatgacattgattccgggaaccagtgttgaagaggcctacaacaagctaatagttgaacttgagagaagtgttcctacnttggttggcattgaatgtcccaaggatgagaaacttcctcgtcgcaaaatttttgacaaacctaagacgcgctgcttcacta

SEQ ID NO: 289575 - DNA, 290 bp, Glycine max
  unsure (1)..(290): unsure at all n locations
gggaaaccaacactggagttaagaggctctatcagatgcnaggcgaatgggattcctctcttccngntaataaatgtcaatgactcntgtcaccangagcnagtttgacaacttgtatgggtgccgtncactctctccctgatggtctcatgagggctaccgatgttatgattgctggaaaggtggctgttgtngctggatatggtgatgttggcaanggttgtgctgctgcaatgnagcaggctggtgctcgtgtcatcgtgnacgagattgatcccatctgtgccctc

SEQ ID NO: 289576 - DNA, 289 bp, Glycine max
  unsure (1)..(289): unsure at all n locations
ttnccttctccaacatgccaaacgacagcgttctgagtcttttcntcttcgttaccctcttcacatgccttctctctgctaattcccacgatgaccatattttcctaccgagtcaactccatgacgatgactcagtnagttgcactgctaccganccanaancttaaanaanaagccggtgatcggaatcctgacccaccccggngacggtgctnctggccggcttnnccaacgccaccggggtttcttacatcgccgcntcctacgttaaattcgtggagtccggtgg

SEQ ID NO: 289577 - DNA, 259 bp, Glycine max
  unsure (1)..(259): unsure at all n locations
gatngcgttgttggttgaaaaaaaaaannattganagggantacaaggtgaagganatgatgcaagccgntttnggaagattggaaattcgagctggcggaggttgaaatgcccggcctcatgtcctncccgcaccgagttcggcccctcttcaatccttcaagggcgctaggatcancggctccctccacatgaccatcnanagccgncgtccttcatngagacnctcaccgctctcggcgccgaggtccgctggtgc

SEQ ID NO: 289578 - DNA, 294 bp, Glycine max
  unsure (1)..(294): unsure at all n locations
gttgagctggacatccaaaaggnaaatccgttgcttctatccttgcctgaggaattccgtgttttcattctcagttatgataatccatccacaaaccagattagnnccgagttcctttcaattttttctgattcacactatttacttcnngatttattcagcaatttgaataaagttgtggttctggatgatgatgttgttatccaacaagacttatctgccctgtggaacacagacttgggagataaagtgaacggtgcagtgcagttctgctcggtaaagctgggtcaactg

SEQ ID NO: 289579 - DNA, 289 bp, Glycine max
  unsure (1)..(289): unsure at all n locations
ctaatcctccaatccaaccacctcagcctcacactcacatatacacntatctgaacgcgtatcgtccctcctatggctttcaaagcgcatcctcanggagctcanggacttgcagaaagacccaccaacttcttgcagcgctggtccagtagctgaggacatgttccattggcaagcaacaataatgggtcctgctgctagtccttatgctggaggtgtattcctagtcactattcacttccctccggattatcctttcaagcctcctaaggttgcctttaggactaag

SEQ ID NO: 289580 - DNA, 291 bp, Glycine max
  unsure (1)..(291): unsure at all n locations
agnaganaagatggnagtnattagaaatagaggcnttcctgctgatgttcttgcnaagcgngcttcatgaatttgnanaacatgttgcctcatganaggcctcaaggatcaaattcctgctgttgacaagttgtattctactaaggttaataagtttncaaaaattatgaaccttagacaaagtgttgttggtgatcttaaacttcttactgatgggaagttgtatgagggtaagcatattcctgtatctcaatnttagtgcnggggaaaatctcntagttcaaataccct

SEQ ID NO: 289581 - DNA, 293 bp, Glycine max
  unsure (1)..(293): unsure at all n locations
gcgnttcttccattggntttttnggccggtgctactgatggatgcagccgaacggttcggnnattttctttaacagggttccnaggnagtaccctgcaaatgccttgccgcatcgcccaacattactacagtacattgtctcgttannggtgaanacaactgcccagttagatgcagcattatcatttcttgctaccacaggctccgagaatcttgatttggaccggtttgaagaagcttgtggtgttggtgttgaggtttcagaagaagatatcaaacaagctgttagtgat

SEQ ID NO: 289582 - DNA, 292 bp, Glycine max
  unsure (1)..(292): unsure at all n locations
ctaagagttgctgcttcttccgccactcagcactttcgctcccttctgtgnttcaccaaacatgggcgaatngaangtaacgttccagatccctctcaaatcgagtcaaantttcanccgctggagcttcgacgacgttgaggttactgatatgtctctggctgattacattggagtgtccccgtcaaagcatgtacatatgttcctcacactgctggtangtactcagtgaagaggttcaggaaggcgcagtgccccattgttgagagactcaccaactctctcatgatgg

SEQ ID NO: 289583 - DNA, 310 bp, Glycine max
  unsure (1)..(310): unsure at all n locations
anccaacctaacccaaaccttaatctgggtgctgttggcttaacacctgggttcggccggtggacttgatggtcctgatcggatttttgttggtggacttccatattactttactgaaacacagatcagggagcttttagagacttttggtcctctacggggttttgatctagtgaaagatagagaaacgggtaactcanagggttatgcatttgtgtttnccaggatcttgcagttacagatatngcgtgtgcngntccnaaatggnataaagatgggagtnagactcttncagttagacgagcaatcc

SEQ ID NO: 289584 - DNA, 309 bp, Glycine max
  unsure (1)..(309): unsure at all n locations
cagagattatatagatatcagcatagctgttggtactccaaagggccttgttgtaccggttatccgcaatgctgataccatgaactttgctgatatagaaaagcagattaatacttttgcaaagaaggcaaatgatggatctttatcaattgatgagatggctggaggcactcttacaatatccaatggtggtgtttatggaagncttttgagtacccctattatcaaccctcntcagtctgcaatcttgggtatgcattccatagtgagccgtccaacggttgttggaggaaatattgtcccaagacc

SEQ ID NO: 289585 - DNA, 311 bp, Glycine max
  unsure (1)..(311): unsure at all n locations
ccaccaacagcagcaacaccaacaacagcagcttcaaatgttctggtcaaaccaaatgcaagaaattgagcaaacaattgactttaaaaaccatanacttcctcttgctcggataaaaaagataatgaaagctgatgaagatgtccggatgatttcagcagaagctccggtcatatttgcaaaagcttgtgaaatgttcatattagagttgacgttggcgatcttgggatccacacagaagagaacaagaggagaatctacaaaagaatgatatagcagctgctatttcgagaaacgatgtttttgatttc

SEQ ID NO: 289586 - DNA, 307 bp, Glycine max
  unsure (1)..(307): unsure at all n locations
tcaaaacactcataacacaaagcacaaagcaaagctcatccttgagttaaaaaatggcagcagcttcttccatggctctctcatccccatccttggctggcaaggccgtgaagctgggcccatcagccccagaagtgggaagggtgagcatgaggaagaccgtcaccaagcaggtctcctcaggaagcccatggtacggcccagaccgagtcaagtanttgggcccattctctggcgagcccccgtcctactaacggtgagttcccaggcgactacggctgggacactgctgggctttccgcagacc

SEQ ID NO: 289587 - DNA, 306 bp, Glycine max
  unsure (1)..(306): unsure at all n locations
aagctaaatggaggcttgggcacaactatgggttgcactggtcctaaatctgtaattgaagttcgtgatgggttgacatttctagatttaattgtgatccagattgagaatctcaattccaaatatggaagcaatgttcctttgcttttgatgaattcattcaacactcatgatgacactcaaaagattgttgaaaaataccaaaactccaatattgagattcatncttttaaccagagccagtatcctcgattggttgctgagggactttttgccattgccttccaaagggcatactgacaagga

SEQ ID NO: 289588 - DNA, 305 bp, Glycine max
  unsure (1)..(305): unsure at all n locations
cggacccgccgccaaaacctacacctactccgagacacacctcatttcacgcaagattgccgcncngattgtccaaccttcggaatccgcaagggcgacgtggtcatgatccttctccagaactccgccgagttcgtcttctccttcctcgctgcctccatgatcggcgcgtcgccaccacagccaatccgttctacaccgccgcggagatcttcaagcagtttaccgtctccaagacgaagctgatcataacgcaggcaatgtacgtggacaagttcgcaaccacgacgacggcgcgaatcggt

SEQ ID NO: 289589 - DNA, 307 bp, Glycine max
  unsure (1)..(307): unsure at all n locations
gttgaaactcctaaaggttccatgttggatcttaaantttctcaatctaaaattgcacttcccaagaacacagttggnggaaccattctgcatagtgatctattggcaaattttttgacagagggcaattttagagcaagtgttgatttgcagcgcactcatcgtattaaaggaatgattaaaatggtgggctacagttggtattccctgagaatacaggtatagcattgggctgtgctatgaatagctcttttagggggcgcgccagttctgatatttacaccatctgctctcaagactgtggaat

SEQ ID NO: 289590 - DNA, 309 bp, Glycine max
  unsure (1)..(309): unsure at all n locations
tttctcaagagaaactttaagcagatgtctaatgttttgtgggtggctcctgaggacaaggcgagtttgtggtcacaacttcattatgtttcgtgtaataatctggaaatgcaagaagcttatcttgtcaatctcgtaaatgtgttacgagaattgtatttgcacagtccagaggaagctcgccaattgagaaggaaagctctttctcgtattgaatgggcgcaaaaactgatgtgctaccatagcacagattgaagagttncattcgatgccgaggatgatgaatgctcctgattcaaatgataatat

SEQ ID NO: 289591 - DNA, 313 bp, Glycine max
  unsure (1)..(313): unsure at all n locations
aaanaagaaaaaagactcagttgtgtatcgttgcagctctactagctagggtttngcaagtnccgatcgaagaagaacgatggcgatggctgctgctctgcgtcgcgaaggaaggcgtttganccaaccaatcaacgccctccgttcctctctcatctctcaagaccaatcccctcatgggcgcgcgcttcatttccactcaagtggtgaganaccgaatgaagagtgtgaggaatatccagaagatcaccaaggccatgaagatggttgccgcatccaagctgagagccgttcagaccagagctgaaaattc

SEQ ID NO: 289592 - DNA, 297 bp, Glycine max
  unsure (1)..(297): unsure at all n locations
tatttttcttgaaaagtgatggaaccttgacgccattggccattgagttaagtaagccgcatcctcagggtgaaggatatggtcctgttagcgaagtctacgtgccttcgagcganggagttgaagcttacatttggttactggcaaaggcttatgttgttgtgaatgattcgtgctaccatcaactcgtcagccactggctaaacactcatgcggttgttgagccattcgtcatagcaacaaacaggcatctgagcgtggttcaccctatttacaaacttttgtttcctcatatcg

SEQ ID NO: 289593 - DNA, 301 bp, Glycine max
gtgagtgatcggtgttcacttgatctcatcataatcgtcagcgtcaattgaagaagatgccgatcagaaacatcgccgtcggaaggcctgaagaggcgactcaccccgacacgttgaaggcggctttggctgagttcatctcaaccttcatcttcgtgttcgccggctcaggctccggcatcgcctacaacaagctcaccgacaacggcgctgccacccctgccggcctcatctccgcctccatcgcccatgcattcgccctcttcgtcgccgtctccgtcggcgccaacatctccggcgg

SEQ ID NO: 289594 - DNA, 303 bp, Glycine max
  unsure (1)..(303): unsure at all n locations
cgcctgaaaatatcttacttcagaaggatggtcatgttgtgttagctgattttnatctatcatttatgacatcttgtaaaccccaggttgtgaagcaagcagtacctggtaaaagaagatcacgaagtgaaaccaccaccaacatttgttgcagagccagttacacaatcaaactcatttgttggaactgaagaatacattgctcccgaaattataactggagctgggcatactagcggtatagattggtggacccttgactccacctccattagatgttcctcttaaattgataggaaacga

SEQ ID NO: 289595 - DNA, 264 bp, Glycine max
  unsure (1)..(264): unsure at all n locations
tcttagatctcttctttctctacgcngcacgccgaaaccatgggccggaaaaggagagggtcctgctatcggaatcgatctcggaaccacctactcttgcgtcggtgtgtggcaacatgaccgcgttgaaatcatcgccaacgaccaagggaacagaaccacgccgtcttacgtcggattcatgacaaccgagcgtctcatcggtgatgcggccaagatcaagtcgccatgaaccccatcaacacgtcttcgatgccagaggtt

SEQ ID NO: 289596 - DNA, 305 bp, Glycine max
  unsure (1)..(305): unsure at all n locations
acaaatcaaagccatggccacctccaacttctctattgttctctccgtctccctagccttctttttggtgctacttaccaaggcacactcgaccgataccgtttctttcaccttcaacaagttcaacccagtccaaccaaacattatgctccaaaaagatgctagtatttcatcctctggggtgttacaactcaccaaagttggcagcaacggcgtgcccacctcgggatctctcggtcgtgccctttacgctgccccaatccagatttgggacagcgaaaccngcaaggtagccagctgggcta

SEQ ID NO: 289597 - DNA, 306 bp, Glycine max
  unsure (1)..(306): unsure at all n locations
aaaccatctcattccctctctccctaaaatggccactcttccctcctacgaccacctcatcttcactgccttagctttcttnttatctggccttattttcttcctcaaacacaaatccancntcnaaatccaaaaaattcaacctccctccaggancccctggatggcctattgttggaaanctcttccaagttgctcgttccgggaaacctttctttgaatacgtgaacgatgtgagactcaaatatggctcaatcttcaccctcaagatggggacaaggaccatgatcatcctcaccgactcaa

SEQ ID NO: 289598 - DNA, 294 bp, Glycine max
  unsure (1)..(294): unsure at all n locations
ccttgatgngtaccctaacatcaagtgttggacctgagtgtgtagagttgatctcttntgtgtagagttgatctcttgtgtgtagagttgatctctagtgtgtagagttgatctcttttgttcagagagcaatctctggtgtgttgttttgatttgattgtaaacacgggagtgtgattganagggagtgatcaggggttctcatatctaagagtggtcttaggtagaggtcgcacgggtagtggttaggtgagaaggttgtaaacagtggctgttagaccttgaataacacta

SEQ ID NO: 289599 - DNA, 307 bp, Glycine max
  unsure (1)..(307): unsure at all n locations
cattcctgctgatgttcttgcaaagcgagctcatgaatttgaaaaacatgttgctcatgaaagcctcaaggatcaaattcctgctgttgacaagttgtattctactaaggttaataagtttgcaaaaattatgaaccttagacaaagtgttgttggtgatcttaaacttcttactgatngcaagttgtatgagggtaagcatattcctgtntctgntattagtgncagggggaaatccagtagttcaaatacccttatggccacaggaggaattctgtcctctngtgcagtgctttcagactgcatt

SEQ ID NO: 289600 - DNA, 307 bp, Glycine max
  unsure (1)..(307): unsure at all n locations
caaaggattctacccgccgctcgatgggaattgcgcttcaaggcgtctcgtagggctaatccgcctcacgagggtcaccaacngcacgnacnctttggggggccgaggacccctactgctggtcggcaaacggacggcgggngcacgcgtcgcttntagcccggattctgacttagaggcgttcagtcataatccaangcacggtagcttcgcgccantggcttntcaaccaagcgcgatgaccaattgtgcgaatcaaggttcctctacgtattangttgnattactattgcgacactgtcatcag

SEQ ID NO: 289601 - DNA, 304 bp, Glycine max
atttggaaagtgttgttttctttttttcatttgcattgcaaagcaaaaaccttgcaaattgcaatggcttccaacaaggttattgccaccatcttggttctttctctccttgcctactcaacatcattcaccaatgcatgtggcacatgccacccaaaacctactccttctccccctcctccatcagggaagtgccccaaggacacattgaagctaggggtgtgtgctgatgttctaggacttgttaatgttgttgttggttcccctgtctctagcaagtgttgtgcattgcttgaaggtttgg

SEQ ID NO: 289602 - DNA, 301 bp, Glycine max
  unsure (1)..(301): unsure at all n locations
ggaggatgaccccacttgtggccccatcattgacaacattgctatcaagaagcttttcactcctcttaaacccaaagacaatgcagtgatnaatggggattttgacgagggtccatggatgttcaggaacacttcactgggtgtgttgcttcccacaaatttggatgaagaaacttcatcnctgccaggttggatagtccgaatccaaccgtgccgtccgttacattgattccgatcactactctgttccacaaggcaggagagccattgagttgctctcaggaaaggaaggaatcatatc

SEQ ID NO: 289603 - DNA, 303 bp, Glycine max
  unsure (1)..(303): unsure at all n locations
caaaaatggtgaaaaangcaaaaggagatttgtttctggggatggtgaaganatgacattgattccgggaaccagtgttgaagaggctacaacaagctaatagttgaacttgagagaagtgttcctacattggttggcattgaatgtcccaaggatgagaaacttccctcgtcgcaaaatttttgacaaacctaagacgcgctgcttcactattctccctatggagtttaatcttgtggttcgtcagaagtttttaaattttgtgaggttcattatgaagaaaagggacaagcttagttgtca

SEQ ID NO: 289604 - DNA, 294 bp, Glycine max
  unsure (1)..(294): unsure at all n locations
ggaatgttcagttgtttagatccattgatggtggggctgcttttgggttcccggagactcctgaagatgctgccaganctggtcttattagtgggaaggataatatcattgattcgtagcattcaagatgcttatattaatgctattcgacgtgcaaagaacttcatctatattgaaaatcagtatttccttggaagctcttttgcctggagtgtgatgatattaagcctgaagacattggtgctttgcatctaatcccaaaggaactttcactcaagattgttagtaagattg

SEQ ID NO: 289605 - DNA, 303 bp, Glycine max
  unsure (1)..(303): unsure at all n locations
ttcattatgaagaaaagggacaagcttagttgtcaagttggaatcaacccatactccatggaatggactggtttgggccaatagattactgagtaagggcaacgatattctgtgttgcnattatgctagttttgatggtttgattaccaagcaagttatgagcaagatggcaganatgataaacagtctttgtggtggtgatgaaaaattnatgcgtgaaaggacacactggctgttggcttgttgttccaaggatggcaatttgtaaganagcatgtntggagagttgaatgtngaatccct

SEQ ID NO: 289606 - DNA, 298 bp, Glycine max
  unsure (1)..(298): unsure at all n locations
gaggcattctcatgaacatgccaaatgctgttctttcaatgtggagatattttgttggagatctcgtctttgaagtttctaagatgacttctccctacattaaatgtacagtctctttcttcatagcatttggaaatttggctgatgacaccatcaattttgaggncttccccacaagctggtgcagtttggagaaattcaggaaaaagttgtattgaaattttcacaagaggaatttcttacagcttggtcaanccaggtgcgtctgcaacaactctgttggctgatgggtgcccat

SEQ ID NO: 289607 - DNA, 287 bp, Glycine max
  unsure (1)..(287): unsure at all n locations
tctaaaaganatctttttctgctctttgaagaaagaagggtctttgcttgattttggagatgtctctgctctcagatctcatcaaccttaacctctccgataccaccgagaaggtgatcgcagagtacatatggatcggtggatcaggaatggacctgaggagcaaagcaagggantctccccaggaccagttagcgacccttcagagttcccaagtggaactatgatggttcccagcacaggtcaagctctgntgaagacagtgaagtgattttatacccacaagc

SEQ ID NO: 289608 - DNA, 302 bp, Glycine max
  unsure (1)..(302): unsure at all n locations
cactcttcatcaagctccgctccaacacaggggaaaatgagggagatccttcacgtggcagggagggcaatgcgggaaccagatcggttccaagttctgggaagtggtntgcgacgagcacggcatagatccgacggggaagtacgtcggaaactcagatctgcaactcgagcgcgtgaacgtctantacnatgaagcctcgtgncgggcgcttcgtgccacgcgcggtgctgatggacctggagcccggaaccatgtgacagcgtgcggaccgggccgtacgggcagatttccgccccgac

SEQ ID NO: 289609 - DNA, 299 bp, Glycine max
  unsure (1)..(299): unsure at all n locations
gcggagatagcaatctcatctcattcatttcaatggcaactcaaggtcaagtcattacctgcaaagctgcggtggcctgggaacccaacaagcccttaactgtccaagacgttcaggtggctccgcctcaggccggcgaggtccgtgtccaaatcntcttcaccgctctctgccacaccgatgcttacacttggggcggcaaggatcccgaaggtctcttcccctgtattcttggccatgaagctgcaggattgtggagagtgttggagaaggtgttataatgttcagcctggggatca

SEQ ID NO: 289610 - DNA, 300 bp, Glycine max
  unsure (1)..(300): unsure at all n locations
agcatttggtcacttgaagtcatcagattttctagcttatggaatcaaatctgtggccnaagatgtcntgcctgtgctgactgatgcattcgatggaaatctntngagccttgagnncgntagttttgctgaagtncgcaanctnctatgaaggnggagttacattgcctagaaantttcttagcaatatcactcctataccantgnttaanganctttttcgaactgatgggcgancagttcctcaaggtccancacctacagtgantaccgtcganaagtctgcatggatnactggtg

SEQ ID NO: 289611 - DNA, 297 bp, Glycine max
  unsure (1)..(297): unsure at all n locations
gnacgtaaaggtcttgacattgttcgtcgtgactggagcatatnagctaaagaactaggagatttttgcttgactcaaatttnatcgggagggtcatgcgaagatnttgtggagtcaatccacaactcactaatgaaggtacaagaagaaatgagaaacggacaggtagcattagagaaatatgtcattacaaagacattgactaaacctcctgaagttatcctgatgccaagaaccagccacatgttcttgtggcacaaagattgangcaacaaggtatcttctggttgctctgtt

SEQ ID NO: 289612 - DNA, 295 bp, Glycine max
  unsure (1)..(295): unsure at all n locations
attaatttattaattatatatgtaactctctccatcgatcagaattcattcagagaagtgagagttaaagatggaagggatagagcaccaaacactgaacgtgaatggcataaacatgcacatagccgagaagggtgaaggcccattgatcctcttcatccatgggcttccccgacctatggtactcntggcgccaccagatcacagctcttgcctccctaggttaccgctgcgtggcgccggacttcgtgggtacggcgacactgacgtgccggccaaccccacagcctacacc

SEQ ID NO: 289613 - DNA, 291 bp, Glycine max
  unsure (1)..(291): unsure at all n locations
atttctgatgatgctgtagttatgatcaaagggaccaaaactacaagcgcagtcactttgattctaagaggtgcaaatgaccatatgcttgatgagatggacagagctctgcatgatgcattgtcaattgtcaagagaactcttgaatcaantacggtggtagctggtggaggtgctgttgaggcagcattatcagtttatttggagtaccttgctacaactttaggatctcgggagcagttggctatagcagaatttgctgagtctctgttaattattccaaaggtgctt

SEQ ID NO: 289614 - DNA, 293 bp, Glycine max
gtgagatagagagagacgcttcgcaaatctcaatcgaatctcagaaaaatgagagaaatcatcagcattcacataggtcaggccgggatccaggtcggaaactcctgctgggaactctactgcctcgaacatggcatccagcccgacggcatgatgccttctgactccaccttcggtgtagcccacgacgccttcaacaccttcttcagcgaaaccggatctggcaagcacgtcccccgtgctgtcttcgtcgacctcgaacccaccgtcatcgacgaggtccgctgcggcac

SEQ ID NO: 289615 - DNA, 292 bp, Glycine max
  unsure (1)..(292): unsure at all n locations
gaatggctcccaagggtttaacctttctggctgtgttnatatgcgtttcagcacngtcactgagtccttctgttgcgggggaagggcaaaataatggccttgttatgaacttctacaaggaatcatgccctcaggctgaagacatcatcacagaacaagtcaagcttctctacaagcgccacaagaacactggctttctcctggctcaggaacatcttccatgactgtgctgttcagagttgtgatgcttcactgttgctggactccacaagaaggagcttgtctgagangg

SEQ ID NO: 289616 - DNA, 299 bp, Glycine max
  unsure (1)..(299): unsure at all n locations
cgatgttatgattgctggaaaggtggctgttgtggctggatatggtgatgttggcaagggttgtgctgctgcaatgaagcaggctggcgctcgtgtcatcgtgaccgagantcnatcccatctgtgcccttcaggctctcatgnaaggccttcaggttctgaccttggaggatgttgtttctgaggctgatatctttgtcaccaccaccggtaacaaggacatcatcatggttgaccacatgaggaaaatgaagaacaatgccattgtttgcaacattggtcactttgacaatgagatc

SEQ ID NO: 289617 - DNA, 300 bp, Glycine max
ctcgaagacgttccgcatttcaccgattacattcccaatctcccaacataccctaatcctttgcaagacaaccctgcttattcagttgttaagcaatattttgtgcatgttgatgacagcgttcctcaaaaggtcgttgttcacaaagatggtgcaagaggggtacattttaggcgtgccgggcctcgtcaaaaggtgtactttgaagctgatgaagttcaagctgccattgttacttgtgggggtctgtgtcctgggctcaacactgtcattagggattagtgtgtggcttacaccata

SEQ ID NO: 289618 - DNA, 301 bp, Glycine max
  unsure (1)..(301): unsure at all n locations
cttcgtttgcgtttttatcacagaggaattaacatatatatagcaanccatggcagtcacactctacgaccttagctcttcctctgggttgaacaaacttgatgagtaccttctcccacgcagttacatcaccgggtaccaagctacaaaggatgatcttactgtttatgcagctttgccaactgctccatcagatgaatatggaaatgtttccaggtggtacaagcacattgatgctttgttgagaatctctggtgttactggcgagggatctggtgttattgttgagggatctctagtt

SEQ ID NO: 289619 - DNA, 300 bp, Glycine max
  unsure (1)..(300): unsure at all n locations
cagatattgacaaaganccaagtaagcgccaagggcttgttgacatagtgaagaaagcatctgaaacatggggtttctttcaggtgatcaatcatgatatccctttgagtgttcttgaggagatgaaaaatggggtaaaaaggtttcatgagatggatactgaagccaagaaagaattttattcgagagatagatccaaaatcctttctgtataatagcaattttnatctatacggctcacagccagcaatcaattggagggattcttgtaggtgtttgttgtatcctgatacccccaaa

SEQ ID NO: 289620 - DNA, 291 bp, Glycine max
atcaaatggcaacagtgagaacaccattgaattttgattctagcaagcagagcttttgtcaattttctattgaccttctcggtggaggaattttagtggacaaaactggagattggatcacacttatacaaaattctccaattagtaacttgttgagagttgctgcttggaagaaaggctgtttaaacgtcaagattgtgatgtctgggaatgcagcagtcaaaaggagtgattgggcctcattggtacaagtgtttttaacaaacagcaacagtacagagcattttgatg

SEQ ID NO: 289621 - DNA, 297 bp, Glycine max
ctggttagttcttatcgatatgaaggagatgaggtcaacttgaccctgggcaaaaactgaggcaaaattgctgcatgagaagatttcaaacaaggcttataatgatgacgacttcatcaggattttggccacaaggagcagagcacagattaatgctactttgaatcactacaaagatgcatttggacaagatatcaacaaggacctgaaggctgatccaaaggacgagttcctgtctttactaagagcaactgtgaagtgcttgatccgtcccgagaagtattcgaggaaggttgt

SEQ ID NO: 289622 - DNA, 301 bp, Glycine max
  unsure (1)..(301): unsure at all n locations
tactacttcctcttgcttgttctcgtcggtgcaactacagcttctggggctgaactatgtgcagacttttactcatgcacctgcccaaacttgttgcctatagtgaagaaaggagttnccanagccattcagaaagaaccacgcatgggcgcttccttactccgattgcatttccatgactgctcttgtaaacggttgtgatgcatctatactgttggatgatacaagcaattcattggggagcaaacagcagcagcnaacaaccaatcagctagagggttcaacgtgattaatgatatta

SEQ ID NO: 289623 - DNA, 298 bp, Glycine max
  unsure (1)..(298): unsure at all n locations
ggngaacagagagacccgaagccagatttcaagatgaagttcaacattgcgaatcccaccactggttgtcagaagaagctggagatcgatgatgacctgaagctacgagcattttgggacaagaggatctcacaagaggttgttggtgatgctctgggtgaggaattcaaaggctatgtcttcaaaattactggaggttgcgacaagcaaggatttccaatgaagcaaggagtgttgacccctggtcgtgttcgcctcttgctgcatagaggaactccttgtttccgtggttatggaa

SEQ ID NO: 289624 - DNA, 289 bp, Glycine max
ccagtggtggcaagaagatcaagactgacaaaccttatggaattaatggtggcatggctttgagggatggaactgatgcatctggcaggaaaggaaagggaaagggtgtttaccagtttgtagacaaatacggtgctaatgtcgatggttacagtcctatctacgacaccaaggactggtctccaaccggtgatgtctacgctggcggtacgactggcttggctatctgggctgtgactctacttggtcttttagctggtggtgcacttcttgtctacaacacaagtgc

SEQ ID NO: 289625 - DNA, 286 bp, Glycine max
gacaatcactcatcaatgcaggtggcattattgagcaatcatttctgcctgggccatttgctgtggagatgtcttcggcagtttacaaggggtgggttttcactgatcaagcccttcctgcggatcttatcaagagaggaatggcagtggaggatccatcctctccctatggccttcgccttgtgatagatgactacccttatgctgttgatggactagagatatggagtgctatccagacatgggttaaggactacgtctccttgtactatgccacggatgatgc

SEQ ID NO: 289626 - DNA, 289 bp, Glycine max
caacgtgaataccctaattcggagggtttcagttttcgccctcttttctcatctccaacatcttcgtcgtcacggaggctagtcttcctgttatcacaaacaatgtctgacggtcaagaatcagacaagaatattgagatatggaagatcaagaaattgataaaggcattggaagctgctcgaggtaatggtaccagcatgatttctctgataatgcctccacgtgatcaaatatctcgggtcactaagatgttgggagatgaatttgggaactgcttcaaacatcaaa

SEQ ID NO: 289627 - DNA, 289 bp, Glycine max
  unsure (1)..(289): unsure at all n locations
ctggatgcggcttctttctgtctgaaactattatccacagtagctaagcctgcaagcttcgccgtttgaaacagtgcctcaaccatggcagaacaaacagagaaggcttttctgaagcaaccaaaagtgtttctatgctctaaganaggtgggaagggaaagaggcctgggaaaggtgggaatcgcttttggaagtcaattgggcttggattcaagactcccagagatgccattgaaggaacctatattgacaagaagtgccccttcactggcaatgtttccattcggg

SEQ ID NO: 289628 - DNA, 283 bp, Glycine max
  unsure (1)..(283): unsure at all n locations
atcgagataactagaaacagtgtgatgaaaatgaaggtccttgttttcttcgttgctacaattttngtagcatggcaatgccatgcgtacgatatgttccctctccgaatgaacactggctatggtgcccgtactccggaggtgaaatgcgcaagtnggaggcttgctgtggaagcacacaacatctttggctttgagaccattcctgaagagtgcgttgaagcaacanaggaatacatccatggcgaacaatatagatcagactccaaaacagttaaccaac

SEQ ID NO: 289629 - DNA, 284 bp, Glycine max
  unsure (1)..(284): unsure at all n locations
ctcaccgcncaagaccatcacccttgaggnggaaagctctgaccaccatcgacaacgtcaaggccaagatccaggacaaggaaggaattcccccggatcagcaacgtctcatcttcgccggaaagcagctcgagnanggtcgtaccctcgccgactacaacatccagaangnntcanngctgcanntngtccttcgtctccntggtggcatggngatcttcgtcaagagtctcnctggcaaanccataancctagatgtngacagctctgncaccattgacacc

SEQ ID NO: 289630 - DNA, 283 bp, Glycine max
  unsure (1)..(283): unsure at all n locations
tgctcttcttgctttcacccttggtgtgaagcagatgatctgctgctgtaacaagatggatgccactaccccgaagtactctaaggctaggtatgatgaaattgtgaaggaagtctcttcctacttgaagaangttggttacaacccagacaagattccattngtgcccatctctggtttcgagggtgacaacatgattgagaggtccaccaaccttgactggnacaagggaccaactctccttgaggctcttgaccanatcaatgancccaagaggccctca

SEQ ID NO: 289631 - DNA, 284 bp, Glycine max
gcggttgctccaccacctaatcacttcccctgtaaatcacgtttagttcgcacaaggttttaaaaaatggctgatgctgaggacattcaacctcttgttgttgataatggaactggaatggtcaaggctggttttgcaggtgatgacgctcctagggccgtgttccccagtattattgggcgaccacgccataccggtgtaatggttgggatgggtcagaaggatgcttacgtgggtgatgaagctcaatcaaaaaggggtatactcaccttgaagtatcctat

SEQ ID NO: 289632 - DNA, 290 bp, Glycine max
  unsure (1)..(290): unsure at all n locations
gatctcaacggagcacctctcttnaggtcgncatctagactgcaatcatggctgatggaccacagcatccatcagttgttcagaagctagctggacagtcttacctggtgcccaggctaagccccaactttaactctgggaattattcctcgactggttcttacttcaatggaggactgcactcttctgggttggctgttgtgtcgcctggatctccagttactgtgcatgctccagcagagaaaggagtgagtggatttctagtggattttctgatgggtggagtgtct

SEQ ID NO: 289633 - DNA, 292 bp, Glycine max
gcacttttcagttacaaagcatttcattgttttacaatatacaacactacaatggctgcttcaacaatggctctctcttcatcatcattggctggccaagctatcaagcttgccccctccacccctcagcttggtgttggaagggttagcatgagaaaaacagcctccaagactgttacctcaggaagcccatggtacggcccagatcgtgtcaagtacttgggcccattctctggtgagcccccatcctacctcactggtgaattcccaggtgactatggttgggacactg

SEQ ID NO: 289634 - DNA, 290 bp, Glycine max
gaatttgaaaaacatgttgctcatgaaagcctcaaggatcaaattcctgctgttgacaagttgtattctactaaggttaataagtttgcaaaaattatgaaccttagacaaagtgttgttggtgatcttaaacttcttactgatgggaagttgtatgagggtaagcatattcctgtatctaatattatagcaggggaaaatcatgtagttcaaatacccttaatggcacaggaggaaattctgtcttctagtgcaagtgatttcagaactgcaatggtgagtaaaaatag

SEQ ID NO: 289635 - DNA, 209 bp, Glycine max
  unsure (1)..(209): unsure at all n locations
agaaggttatttattgcacaagtntgaactggagtgcggatggaagcactttgtttagtggctataccgatggtgtggtcagagtttgggctattggacgttattaggttaagctttttagtgttttcagatgcgaatctgtttttgagttttgggacaaagttagttactgctttactgtagaatngattttnatnttgaagaccgtg

SEQ ID NO: 289636 - DNA, 281 bp, Glycine max
tttccctggacctcagggtccatactactgtggtgttggcgctgacaaggcttttggccgtgacattgttgacgcacactacaaagcctgtatttatgctggcatcaacatcagtggaattaatggagaagtgatgcccggtcagtgggaattccaagttggaccttcagttggaatctcagctggtgatgagatttgggcagctcgttacatcttggagaggatcactgagattgctggtgtggtggtttcctttgaccccaagccaattaagggtgatt

SEQ ID NO: 289637 - DNA, 262 bp, Glycine max
  unsure (1)..(262): unsure at all n locations
cttttatgccaganacctcgaagncncatcccaaggacacanttgtgttcagtatagatgncnaccgtactctctaatattccatactacaaaaaacatggatatggggtggagaaatttaactcgaccttgtatgatgaatgggttaacaagggcaatgcaccggcactgcccgagactcttaagaattacaacaagctggtgtctcttggcttcaagattatattcttgtcaggaagaacactggacaaacaggccgtaa

SEQ ID NO: 289638 - DNA, 279 bp, Glycine max
gccaggccagcctagacctccttaccttgatggttcagcacctggtgactttggattcgaccctcttcgtcttggtgaagtaccagagaatcttgagaggttcaaagagtcagaactcattcactgcagatgggccatgcttgctgttccagggattttggttccagaggcattgggcttaggcaactgggtaaaggctcaggaatgggcagcagttcctgggggccaagcaacctacctaggcaatccagttccatggggcaccctacccaccattct

SEQ ID NO: 289639 - DNA, 272 bp, Glycine max
  unsure (1)..(272): unsure at all n locations
ttttcgatcagatgcgtgtcaggnggctgaggccgaatgagaggacttacactactttgattgatgggttctgccaganagggttgatgaatgaggcttataaggtcttgagtgagatgattgtnagtggattttcgccatcggttgtgacttacaacgcccttgtccatggatattgcttcttggggagggtgcaggaggctgtgggaattttgagggggatggttgagagaggtttgcctcctgatgttgttagttatagcactgttata

SEQ ID NO: 289640 - DNA, 259 bp, Glycine max
  unsure (1)..(259): unsure at all n locations
ctngnnaagcactantantctcntcactgcagatctcaattgcatcgntgtccatggntaccancgttagcatcaagggccgncagatctncgacantcgtggcaatccaantgtcgaggtggatttnanttgctccgatggtacttttgccagagctgctgttccaagtggtgcatccactgggattatcgaggcccttgaattgagagtggaggatctgactacttggaaagggtgtatcanaggctgttgacaatg

SEQ ID NO: 289641 - DNA, 293 bp, Glycine max
catcgatattggaggtggactgggcatagattacgacggttccaaatcgtgtgactctgatatttccgttgagtacagtctcgaggattatgcagtcgcggttgttcacgcggttcagtgtgtgtgcgaccgaagtccgtgaaacacccagttatctgcagcgagagtgggagagccatcgtgtctcatcattcggtcttgattttcgaggcggttggcaccagcagcaccaccgggggaggagcttcccctgcattgtccgctcaatatctggcggaggagctgtcggagga

SEQ ID NO: 289642 - DNA, 290 bp, Glycine max
agcttacatgctcctaccctgggcatcaaattcttctatggaccagagacttactacggaaatgaggtgtcagttgtagaaatggatggacaatttgacagactagatgaactaatatacgttgagagccacctaagcaacctctctacaaagttctatggagaggttactcaacagatgttgaagcatgctgatttccccggcagcaacaatggaacaggtctcttccaaaccatagttggtttgaagataagagatttatatgagcagctaatagccaccaaggctga

SEQ ID NO: 289643 - DNA, 283 bp, Glycine max
gcgatctggcaaagagcttgagaaggaacccaagtttttgaagaatggtgatgctggttttgttaagatgattccgaccaaacccatggtggttgaaactttctctgagtaccccccacttggtcgctttgctgtcagggatatgcgtcaaactgttgctgtgggagtcatcaagaacgtggagaagaaggatcctactggagccaaggtcaccaaggctgcccagaagaagaagtgaatcgtgcggtttggttcatcaggggtgtcgttctatggttacaat

SEQ ID NO: 289644 - DNA, 282 bp, Glycine max
  unsure (1)..(282): unsure at all n locations
ccttttcttggtggaattcaaaaatatgccactcccatgatgcccctagatgaagaaattctttctaaggttgcacaagacatggttgangaatggtttgattgtgttgatgaggaggattcctttgaggaagtctctttaagtgcagcactcaatggtgttgagggtttggactatatggaaagaattcctcttgccacatctgagggttttcctcatgtgctttcacgcaaaaatggtgcnaaaggcaaaaggagatttgtttctggggatggtgaagac

SEQ ID NO: 289645 - DNA, 287 bp, Glycine max
  unsure (1)..(287): unsure at all n locations
gcagctcttccagtagtcttancggtgattctgagagagatttcttcgttgaactgtgggatgtctcaggacatgaacggtacaaagattgtcggtctctgttttattcgcagattaatggtgtaatttttgttcatgatctttcacaaagaagaacaaagactagcttgcagaagtgggcagctgagattgctgcaactgggacattttcagctcctttgggatctggtggtcctggtggccttcctgttccatatattttnattggtaataaagctgntattgcg

SEQ ID NO: 289646 - DNA, 284 bp, Glycine max
  unsure (1)..(284): unsure at all n locations
tgctggttcacattcttcagaagattttcctgagaaggaagatcaagaaaaacccaaaaagattgatgccagattgagacaaagaatagatcctcaatacaatgaggttcaggctcagatggaaacaaatttgtttaaattgtctcttgatgatgttgaaactctaaaggttccatgttggatcttaaantttctcaatctaaaattgcacttcccaagaacacagttggnggnaccattctgcgtagtgatctattgggcaaatnttttgacagcnggcaatt

SEQ ID NO: 289647 - DNA, 285 bp, Glycine max
  unsure (1)..(285): unsure at all n locations
tttcttggggaggagaggattttgataatgctttattggattttctagtgaacgaattcaaaagaactgagagtattgatctttcaaaggataagcttgcattgcaaaggcttcgggaagctgctgagaaagccanaatagaactgtcttcaacatctcaaacagaaattaatcttcctttcatcactgctgatgcatctggtgcaaagcatctgaacatcacattgactagatctaagtntgangctttggtaaaccacttgattgaaaggacaaaggcaccgt

SEQ ID NO: 289648 - DNA, 279 bp, Glycine max
  unsure (1)..(279): unsure at all n locations
aggcctttccccacaagctggtgcantttggagaaattcaggaaaaagttgtattganattttcacaagaggaatttcttacagcttggtcaactcaggtgcgtcctgcaacaactctgttggctgatgggtgcccatatttgtatgctatggtgcatgatagttcagtgtctacaataccaggtgattttgtcattggtgtcaagttgacaaccataaacaatatgtgtgcatatgggctcaatcctggtatttcangttctcgtcttntgggcacca

SEQ ID NO: 289649 - DNA, 263 bp, Glycine max
  unsure (1)..(263): unsure at all n locations
ggcaaaaagaaagaatcccaggcganngagaaagatggagggnnaggagcaggatgtgtcgttnggagcgaacaagttccccgagagacagccgattgggacggcggcgcagagccaagacgacggcaaggactaccaggagccggcgccggcgccgctggttgacccgacggagtttacgtcatggtcgttttacagagcagggatagcagagtttgtggccacttttctgtttctctacatcaccgtcttaaccgttatng

SEQ ID NO: 289650 - DNA, 283 bp, Glycine max
ctcattgatgccattcatggatccacggccatcaccatctccaacaattacatgacccatcatgacaaggttatgcttttgggacacagtgattcgtacacccaagacaaggacatgcaggtcactatagcattcaatcattttggtgaaggccttgtccaaagaatgccaaggtgtagacacgggtatttccatgtggtgaacaacgactacacccactgggaaatgtatgcaattggtgggagtgcaaatcctaccatcaacagccaagggaacaggttcc

SEQ ID NO: 289651 - DNA, 257 bp, Glycine max
  unsure (1)..(257): unsure at all n locations
ctgagcaacactaatccgaaccctaacaagtcctttgaggtgaatcagcctcccactgattccgtgtccagtctcagcttcagtcccaaagccaacttcctcgtcgccacttcttgggacaatcaggttcgttgttgggaggtagcacagaatggagttaatgttgccactgttcccaaggcttctataacgcacgatcatccggttttgtgctctacatggaaggccnatggcacaactgtcttctctggtggatg

SEQ ID NO: 289652 - DNA, 229 bp, Glycine max
tcttagatctcttctttctccacgccgcacgccgaaaccatggccggaaaaggagagggtcctgctatcggaatcgatctcggaaccacctactcttgcgtcggtgtgtggcaacatgaccgcgttgaaatcatcgccaacgaccaagggaacagaaccacgccgtcttacgtcggattcactgacaccgagcgtctcatcggtgatgcggccaagaatcaagtcgccc

SEQ ID NO: 289653 - DNA, 278 bp, Glycine max
ctctagcacacaaaacttgctatagcagtaagctataactcatttgaggctctgtgagaattgagaaatggctaaagatgttgaggttcaagagcaaggaggagagtactctgccaaagactaccatgaccctcctccagcacctttgttcgacccagaggagctcacacagtggtccttctatagagccctcatcgctgagttcatagcaacccttctcttcctttatgtcactgtgctcaccattattggctacaaaaggcagactgatacaaggt

SEQ ID NO: 289654 - DNA, 276 bp, Glycine max
  unsure (1)..(276): unsure at all n locations
gaacaggctatccaaaacaagaagttactcatcttagatcaccatgactatctcattccatatttgaggaaaataaatgcaaataccacaaagacttatgctacaagaaccatatntttcttgaaaaatgatggaactttgacgccattggccattgagttaagtaagccgcatcctcagggtgaagaatatggtcctgttagcgaagtctacgtgccttcgagtgaaggagttgaagcttacatttggttactggcaaggcttatgttgttgtga

SEQ ID NO: 289655 - DNA, 279 bp, Glycine max
  unsure (1)..(279): unsure at all n locations
ccggtggcacagacagcatcctcatcaacgccggcancgactgcaccgaggagttcgaagccatccactccgacaaagccaagcaaatgcttgaagactaccgaatcggcgagctcaccaccacctgctacaactctgattcttcatcgtcaaacccctccgtgcatggcagctccgacaccatccctttgacccccatcaaggaagtgattacaccaatgcgaangtgggctcttaacccacgcgaganaatcccatgcaagctcatctccaaaactc

SEQ ID NO: 289656 - DNA, 288 bp, Glycine max
  unsure (1)..(288): unsure at all n locations
atcctcctcaaaatgaagagtcaacagatgttggtgaattattaaatgatcctgcccaaactgctcttaaacctaatgggactgtttcaagcagtgttcgtgagcttttagagtgccctgtatgcctgaatgccatgtaccctccaatccatcagtgttcaaatggtcacactntatgctcaggttgcaaacccagggtccataaccggtgccctacttgtaggcacgagcttggcaatatcagatgcctggcactggagaaagtggctgcgtctttggaattccctg

SEQ ID NO: 289657 - DNA, 290 bp, Glycine max
  unsure (1)..(290): unsure at all n locations
tgngatatcttggttgtttnttatacaatagcaactcaatttcagaaaatttctacngcattancattaggtggcatctgtataccttgttgatctacattctcccatcttttctcactgctgaaattaaatataagcggaatctgagtaatattcatatttccggcttnttttacgacggcagatacaaattctggactanacacgagtnaaaccttggctttgacagaagaagaaaagatggaagtnattagaaatagaggcattcctgctgatgttcttgcaaagcg

SEQ ID NO: 289658 - DNA, 277 bp, Glycine max
  unsure (1)..(277): unsure at all n locations
ctactaagaacaaagagaagagcaaaaatggctcccctttcatgctaccttgttgtttttgctctttctcttctgaaacctagctttgtttcctcgtctgcagtgagagaccctgagctagttgtacaagaggtacaaagaagcatcantgcctctagaaganacttgggttatttatcatgcggaacaggcaaccccattgacgattgctggcgatgtgaccccattgggagaacaaccggcaaagactagctgattgctccattgggttcggcag

SEQ ID NO: 289659 - DNA, 268 bp, Glycine max
  unsure (1)..(268): unsure at all n locations
attttttgacagagggcanttttagagcaagtgttgatttgcagcgcactcatngtattaaaggaatgattaaaatggtggctacagttggtattcctgagaatannnggtatagcattggcctgtgctatgaatagttcttttagggggcgcgccagttctgatatttacaccatctgctctcaagactgtgaattatggaatcctgcttgcacaaaagcaatngctatgtcatttaatccaaacccgtgttctgatgcatggagtt

SEQ ID NO: 289660 - DNA, 274 bp, Glycine max
  unsure (1)..(274): unsure at all n locations
aagagtatgaganagaaaagctgaatgagagaattgctaaattgtctggtggtgtggctgtgatacaggttggcgcacaaactgagacagagctcaaggaaaagaaattgagagttgaagacgctcttaatgctacaaaggcagctgtagaggaaggtattgttgttggtggtggttgcactcttctgagacttgcatcaaaggtggatgcaatcaaggatagccttgataatgatgaagaaaaagttggagctgatattgtgaaaagagctct

SEQ ID NO: 289661 - DNA, 276 bp, Glycine max
tttcatgataaatactggctacatcattttgggccggttcagccttgaaagctacttatgttctattcagggatgatgggctgctgaaacttccatattgtattgccataggtggatttgtgtgtgcaatgtttgccatctgcattcctcatctttcagctctgggaatttggctaggattttcaacagtcttcagcctggcatatattgttatatcatttgtgttgtcgcttaaagatggattacaatcaccgcctcgagattacgagattccag

SEQ ID NO: 289662 - DNA, 293 bp, Glycine max
  unsure (1)..(293): unsure at all n locations
cttngtagccctcancgtccttctctttactacgtgaacttcaccggaatcagcgtnggacgtgtcctgggtaccctttcccagcgagtatcttgggtttaacccgaatacaggatccggaaccataattgattcgggcacggtgataacccggttcgtggagcccgtttacaacgcggtgagggaggagttcaggaagcaggtnggaggcactacattcacgagcattggagccttcgatacgtgttttgtgaaaacctacgaaactctggcgccgccaattacgctgcatt

SEQ ID NO: 289663 - DNA, 291 bp, Glycine max
  unsure (1)..(291): unsure at all n locations
ggaaaccgcaccacctcgtgccagctggcctccgctggccccgttccggctccaccgccgagcgtgaccccggtgtcngagtacacccagaggaagatttttgtgagcaatgtgagtgctgagattgatcctcagaagcngcttgaattcttcaagcagtttggagaggttgaggatggtcctcttggtttggatancnncactgggaaacctaagggttttgcgcttttcgtgtataagtctgtggagagtgctaagaaggctttggaagagcccaataagaatatgagg

SEQ ID NO: 289664 - DNA, 290 bp, Glycine max
gaagaagaataagaagaaggttttgatcggatgcgatgagcacacaaggacaagtgattgatgaggcggttctggatgacataatccggcgcctaacggaggtccgattggcccgacccggaaagcaggttcagctctccgagtctgagatcaagcaactttgcgtcgcttccagagacatcttcattaaccagcccaatttgcttgaactcgaagcccccatcaagatttgtggtgacattcatgggcagtacagtgatttgttaaggctatttgaatatgggggtttg

SEQ ID NO: 289665 - DNA, 290 bp, Glycine max
  unsure (1)..(290): unsure at all n locations
tcaagattcaggtactgcgtttcggaagcagacacagatggctcgtacgaagcaaaccgctcgtaagtccacaggaggaaaggctcctaggaagcagcncncaaccaaggctgcacgtaagtctgcaccaactactggtggtgtgaagaagccccaccgttatcgtcctngtaccgttgctcttcgtgagattaggaaataccagaagagtaccgagcttttgatccggaagctccccttccagaggctggttcgtgaaattgctcaggacttcaagactgatctgcgtt

SEQ ID NO: 289666 - DNA, 293 bp, Glycine max
  unsure (1)..(293): unsure at all n locations
atacaaagaanaaanaaaccctagccannncaaccatcatggncacctctgntatgcagcaattcagcattcactggtnnaaactgctctgaagcagctcaatgagttcgtccgcaanaccggtggnnccggnaaaggtcgnactaanatncgcngnaccgtcaagagtgctcctcagagcatttggtatggccctgaccgtcccaagtacttgggtccattctcggagcagattccatcatacctgaccggagaattccctngtgactanggatggganactgctggattat

SEQ ID NO: 289667 - DNA, 292 bp, Glycine max
  unsure (1)..(292): unsure at all n locations
gtggaancacacctctggtcaatggaatggagangctaatgacaaaggnattcaaacnncngangattacagantctatgctanttcagctgagtaccctgaattcagcaacaagggtaacacactagtcttccaattttctgttaagcacgaacagaagcttgactgtggtggtggctacatgaagttgctcagtggggatgttgatcagaagaaatttggcggggatactccttacagtattatgtttggcccagatatctgcggttacagnaccangaaagttcacgct

SEQ ID NO: 289668 - DNA, 297 bp, Glycine max
  unsure (1)..(297): unsure at all n locations
tgctgttctttcaatgtggagatattttgttggncatctcgtctttgaagtttctaagatgacttctccctacattaaatgtacagtctctttcttcanagcatttggnaatttggctgatgacaccatcaattttgaggcttttccccataagcnggtgcagtttggagagattcaggaaaaagttatattgaaattttcacaagaggaatttcttacagcttngtcaactcangtgcgncctgcancaantctgttggctgacgggtgtccatatttgtatgcnatggtgcatga

SEQ ID NO: 289669 - DNA, 297 bp, Glycine max
  unsure (1)..(297): unsure at all n locations
gtggtgtcggaatcgacgagtggtggaggaatgaacagttttgggtcatcggtggtgtctcggcgcanctctttgctgttttccaaggcttgctcaaagtgcttgctggaattgacaccaacttcactgtcacctccaaggcctcggatgaagacggcgactttgccgaactatacatgttcaaatggaccacccttcttattcctccaacaacccttctcataataaactncctgggggtggttgctggcatctcctatgccatcaacagtggctaccaatcttggggacccctct

SEQ ID NO: 289670 - DNA, 294 bp, Glycine max
  unsure (1)..(294): unsure at all n locations
cntcgctccgcaccagtttcaccgcacgaatatcttgttgtttggngcgatccgagaaaaacttctgtaaaacatgttggtttaccaggacctccttacaggtgatgagcttctctctgactccttccgttacaaggaaattgagaatggaatgctgtgggaagttgaggggaagtgggttgttaaaggagcagttgatgtagacattggtgcaaacccttctgctgagggtggaggagaagatgagggagttgatgatgcagctgttaaggttgttgacatgttgacacattc

SEQ ID NO: 289671 - DNA, 289 bp, Glycine max
  unsure (1)..(289): unsure at all n locations
cctttgttcactcttcttctcttgcggctagggttttagcgcagttncttctagatttaaggaagangggtaaggnaaaggtcacatcagtattgtggtccttggccatgtcgactctgggaaatccactaccactggtcacctgatttacaagcttggaggcattgacaagcgtgttattgagaggtttgagaaggaagctgctgagatgaacaagaggtctttcaagtatgcctgggtgctggacaaacttaaggctgagcgtgaaagaggaatcaccatgatatgc

SEQ ID NO: 289672 - DNA, 297 bp, Glycine max
  unsure (1)..(297): unsure at all n locations
cggggctanccgctgagtttaagcatatcaataagcggatgaaaaganactaacaaggattcccttaagtgacgnccnagcgaancgggaaaagcccaccatgaaantcggnccgccctcggcgtccgaattgtagtctggagangcgtcctcagtggcggaccgggcncaagtcccctggaagggggngccaganagggtgagagccccgtcgtgcccggaccctgtngcancangaggcgctgtnggcgagtctggttgttttggaatgntngccccaatctggcggcnaattcc

SEQ ID NO: 289673 - DNA, 292 bp, Glycine max
  unsure (1)..(292): unsure at all n locations
gataactagaaacagtgtgatgaaaatgaaggtccttgttttcttcgttgctacaattttngtagcatggcaatgccatgcgtacgatatgttccctctccgaatgaacactggctatggtgcccgtactccggaggtgaaatgcgcaagttggaggcttgctgtggaagcacacaacatctttggctttgagaccattcctgcagagtgcgttgaagcaacaaaggaatacatccatggcgaacaatatagatcagactccaaaacagttaaccaacaagcttacttttat

SEQ ID NO: 289674 - DNA, 291 bp, Glycine max
  unsure (1)..(291): unsure at all n locations
gagagagacgcttcgcaaatctcaatcgaatctcagaaaaatgagagaaatcatcagcattcacataggtcaggccgggatccaggtcggaaactcctgctgggaactctactgcctcgaacatggcatccagcccgacggcatgatgccttctgactccaccttcggtgtagcccacgacgccttcaacaccttcttcagcgnaaccggatctggcaagcacgtcccccgtgctgtcttcgtcgacctcgaacccaccgtcatcgacgaggtccgctgcggcacctaccg

SEQ ID NO: 289675 - DNA, 294 bp, Glycine max
ctagtttcttacaaggctctactctactgcttcaccttctgctctagaaaattcagtggtgatacatggcttcggctactctgctctgtagccaaaccagcccttcaggcaaatgggaaaggcttctctgaattctctggcctccgcagctcatcaggcttccttcccttttctagaaaatcttcagaggatttccattctgtcattgccttccagacctatgcagttggaagcagtggaggatacaagaagggtgtgacagaagcaaaactgaaggttgccataaacggattt

SEQ ID NO: 289676 - DNA, 295 bp, Glycine max
  unsure (1)..(295): unsure at all n locations
aaaggattctacccgccgctcgatgggaattgcgcttcaaggcgtctcgtagggctaatccgnctcacgagggtcaccaacggcacgtgccctttggngggccgaggccccctactgctggtcggcaaacggacggcgggcgcacgcgtcgcttctagcccggattctgacttagaggcgttcagtcataatccaacgcacggtagcttcgcgccactggcttttcaacacagcgcgatgaccaattgtgcgaatcaacggttcctctcgtactaggttgaatacnattgcgaca

SEQ ID NO: 289677 - DNA, 302 bp, Glycine max
acaactccataacacaaggcagaaagcaagctcatcctagagttttaaaaatgggcagcaacctccttccatgggctctctcttccccatccttggctggcaaggccgtgaagctgggcccatcagcccccgaagtcgggagggtcagcatgaggaagaccgtcaccaagcaggcctcctccggaagcccatggtacggcccagaccgcgtcaagtacttgggcccattctctggcgagcccccgtcctacctcactggcgagttcccaggtgactacggctgggacactgctgggctttcg

SEQ ID NO: 289678 - DNA, 292 bp, Glycine max
  unsure (1)..(292): unsure at all n locations
ttgatcgagataactagaaacagtgtgatgaaaatgaaggtccttgtnttcttcgttgctnacaatnntngtagcatggcaatggccatgcgtacgatatgttccctctccgaatgaacactggctatggtgcccgtantccggaggtgaaatgcgcaagtnggaggcttgctgtggaagcacacaacatcttnngctttgagaccattcctgaagantgcgntgaagcaacaaaggaatacatccatggcgaacaatatagatcagactccaaaacagttaaccaacaagc

SEQ ID NO: 289679 - DNA, 287 bp, Glycine max
  unsure (1)..(287): unsure at all n locations
gatcgagataactagaaacagtgtgatgaaaatgaaggtccttgttttcttcgttgctacaattttggtagcatggcaatgccatgcgtacgntatgttccctctccgaatgaacactggctatgttgcccgtactccggaggtgaaatgcgcaagttggaggcttgctgtggaagcacacaacatcnttggctttgagaccattcctgaagagtgcgttgaagcaacaaaggaatacatccatggcgaacaatatagatcagactccaaaacagttaaccaacaag

SEQ ID NO: 289680 - DNA, 289 bp, Glycine max
  unsure (1)..(289): unsure at all n locations
catcaattgcatctgggaatataataaagtggactaaaggtttcaatattgaggatgcggttngagaaagatgtngtgggtgaactgnccaagtccttagnaaaaattggtctggatatgcatgttgcagctctagttaatgacacagttggaacagtggctagagcaagattcagcaatcaggatgtcattgctggantgantcttggtactgggacaaatgcagcttatgtagagtgtgcacatgcaattccacaatggcatggtcttctaccaaaatcaggagacc

SEQ ID NO: 289681 - DNA, 267 bp, Glycine max
  unsure (1)..(267): unsure at all n locations
gagagagtattggcgcttcatcaagatgggtattctnagggactccatgcacaagaggcgtgccactggtggcaagnaaatggcttggagatnagangagaaagtatgancntgggcgtcaggcagcaaacaccaagttatcaagcaacaagacaatcaggaggattcgtgttagaggtggcaatgttatntggagggcattgaggctggatactggcaattactcatggggtagtgaagcagttactcgcnagactcgtattctag

SEQ ID NO: 289682 - DNA, 287 bp, Glycine max
  unsure (1)..(287): unsure at all n locations
taaaagtngtgttggaacacttcaccccggggaactggggaaggatattttcttcttttttggtggttctagttgtnaagggaagatattgtaaccatgaatgttgaagaagaggttcagcgtctcagccaagaaatcaagaggcttggtaaggtccaagcagatggttcttacaaggtaacatttggaacactatttaacgatgatgaatgcgcaaatatatttgaagcacttgttggaacactaagagcagcgaaaaagcgtaaagtactgacatacgagggtga

SEQ ID NO: 289683 - DNA, 286 bp, Glycine max
  unsure (1)..(286): unsure at all n locations
tgtgattcgggtaatggccaccagtggaggcgatgagggccagaacaaccctccgcctncgacccggatttggatgtncccgatgacccggatcacgagttcgctgagttcgggtcgggttgcttctggggtgctgagttggcctttcagcgagtngtgggtngtggtgaagactgaggttggttacactcagggtcacactccggatccgaattacaaactggtttgcaccggaaccactaaccacgttgaagtggttcgggtccanttcgacccgaagtttgcc

SEQ ID NO: 289684 - DNA, 284 bp, Glycine max
  unsure (1)..(284): unsure at all n locations
aganaacattcttgtggggtaggtactctttggaaatgtctgctgttatttacaaggattgggttttcaccgatcaagcattgcctaatcgatcttgtcaagagaggagttgctgttaaggatccatctgctccccatggagttcgacttctgatcgaggactatccttatgcttctgatgggctagagatatgggatgctatcaagtcttgggtggaagaatatgtctcattctactacaagtcagatgaggaacttcaaaaagaccccgagctccaagcttg

SEQ ID NO: 289685 - DNA, 284 bp, Glycine max
  unsure (1)..(284): unsure at all n locations
tggcgaacatagacatcgaagggatcttgaagcagcagcagccttatgatgggcgcgttccgaagacgaagatagtgtgtactttgggncctgntcctcgatccgtagaaatgaccgagaagcttctgagggcagggatgaacgttgctcgtttcaatttctctcatggcacccacgactatcaccaggaaaccctcaacaatctcaagactgccatgcacaacactggcatactctgtgccgtcatgcttgacactaagggacctgagattcgnatggttttc

SEQ ID NO: 289686 - DNA, 283 bp, Glycine max
  unsure (1)..(283): unsure at all n locations
tngagcngcanctatttaananaaaaggtggatgggaaaactgactttngcccagggcattnccgaagtgttaagagaatgngtctnnaaaaggnaagaggagctggtgcaaagaatgctattctcatgaanatgccaaatgctgttctttnaatgtggagatatttngtnggagatctcgtcttagaaacttcaaagacgagatctncaacaaaatatctncannttgaaagaacagtctctttcttcatagcatttggaaatttggctgatgacaccatca

SEQ ID NO: 289687 - DNA, 288 bp, Glycine max
accagacataatccacaagcatggccaacccattactctttctgagttggtgtcaattctgaatgttccaccagctagagttggcccacgtgcaaagtctcatgcgctaccttgcacaccatggattctttgaaagactaagaatccatcttgaaaaagaatcttatgctctcactgctgcttcagagctacttgtcaaaagcagtgagctttgtttaactccaatggttgagaaagtgcttgacccaactctctcagcttcattccatcaaatgaagaagtgggttt

SEQ ID NO: 289688 - DNA, 287 bp, Glycine max
ctgatgttctaggacttgttaatgttgttgttggttcccctgtctctagcaagtgttgtggcattgcttgaaggtttgggctgattcggaggctgcactttgcctttgcactgctattaaggccaatgttcttggaatcaacttgaatgtgcctatcacactcagtgtgctactcttagcttgccaaaaaactgttcctgctggcttccaatgtgcatagaactccatcacatgctaggttcattccatcacctgtgtcctcaaattgttgttttgttttagttctc

SEQ ID NO: 289689 - DNA, 308 bp, Glycine max
  unsure (1)..(308): unsure at all n locations
gtacaatttnggctaattgccaaggcatatnttgtngtcaatggntcctggctatcatcaactcatgangccantggttnaatactcatactgtgattaanccatttgtcatagcaacaaaccggcatcttagtgtgctccaccctantnataaacttttgttgcctcactatcgtggcaccatgaacatgcaatggactcgcaagacatcatcatcaatgcangtggcattnttgagcaatcatttctgcctgggccattgctgtggagatntcttcggcagtttacaaggggtgggtttcactgat

SEQ ID NO: 289690 - DNA, 298 bp, Glycine max
  unsure (1)..(298): unsure at all n locations
aactctttcttctcataactctgncgncgcaacagccccaaatccaatggcttcagagaagaaactttcgaacccaatgagggagataaaggtgcagaagctcgtcctcaatatctccgttggcgagagtggagatcgtctcaccagagccgctaaggttttggaacagcttagtggccaaacccctgtgttttccaaagcaaggtacacggtttcgttccttgggattagaagaaatgagaagatgcatgctatgtcactgtcagaagtgacaaggcgatgcnacttttggagagtg

SEQ ID NO: 289691 - DNA, 298 bp, Glycine max
  unsure (1)..(298): unsure at all n locations
caaacactcccattccaagttcattgcgagatcttctaaagcctggccctgcaagtnttgaaatcgatgatcaccctatgcaaattgaagaaacacagtacccgaaaaccttcttctataaagaagaccttcatccaggcaaaacaatgaaagtacaattcagcaagcctccctttcaacaaccatggggtgttggtacatggttaaaggaaattaaagacactactaaagaaggatatagttttgaagagctatgcatcaaganagaagccattgagggagaagagaagttttgtgc

SEQ ID NO: 289692 - DNA, 299 bp, Glycine max
  unsure (1)..(299): unsure at all n locations
tgatgaaaatgaaggtnctngttttcntcgntgctaanattttngtaagcatggcatgccatgngtacgatcangttccctctccgnntgaacactggctatggtgcccgtaatccggaagtgaaatgcgcaagttggangnttgctgtggaagnacacaacatntttgcgctttgagaccattcctgaagagtgcgttgaagnaacaaaggaatacatccatggcgaacaatatagatcagactccaaaacagttaaccaacaagcttacttttatgccagagacctcgaagtccatc

SEQ ID NO: 289693 - DNA, 307 bp, Glycine max
  unsure (1)..(307): unsure at all n locations
tcttcngaaccccctccnaagaagcctctctccanacnccattcctccgacaaggatcaaaacaagcgtcaccatacngttggatttgaatancttgaagggtcntggtgatgcagtgacaggggtatgcntctcccgcgatggacgacatttggcaactgcttncgctgatggagttgtgagagtattcaagttggatganncttcgagtaaaagtttcagtttctaaggattaatttgcctgccggcggtcatccaacggcattgcatttccgatgatgcatcctccatgttgtggcgtcanata

SEQ ID NO: 289694 - DNA, 291 bp, Glycine max
  unsure (1)..(291): unsure at all n locations
tctcntctnacttncattnctacatccctggctcngttccgtcgatgangatngcgtttagggtgcganacnctgacctccgctttctcattcttctctctctcttgtccatcacttcngccaaggtcttcttcgaggagcgtttcgatgacggatggngaaatcgttgggttaaatcagattggaaaanagatgagaactggctggggagtggnaccacacctctggccaatggaatggagagctaacgacaaaggtattcaaaccagtgaggattacagattctacgct

SEQ ID NO: 289695 - DNA, 302 bp, Glycine max
  unsure (1)..(302): unsure at all n locations
ctattattcncnttttcaatatgcagatcttcgtcaaaaccctaaccnggtaaaacgattacncctagaggtcgagtcctccgacacaattcgataacgtgaaagctanaatccaagacaaggaaggcattccaccggatcagcagcgtttgatcttcgccggtaaacaactcgaagacggcagaactctcgccgattacaatatccagaaagaatcgacgctccaccttngtcctccgccttcgcggtggcatgcaaatcttcgtcaaaaccctaaccggtaaaacgattacgctagaggt

SEQ ID NO: 289696 - DNA, 311 bp, Glycine max
  unsure (1)..(311): unsure at all n locations
gcctatctcaaccttatcccgctccttgttggcaatgtgggattgattttcaccaaaggtgacctgaaggaggtcagtgaggaggttgccaagtacaaggttggagctcctgctcgtgntggtttggttgncccaattgatgttgttgttcctcctggcaacacagggctcgatccctcccagacctctttcttccaggtgctcaacattcctacccaagantaacaagggtactgttgaaatcatacccctgtggagctccattangaanggagacaaggttggancttctgaacngcatgcttgcnagc

SEQ ID NO: 289697 - DNA, 305 bp, Glycine max
  unsure (1)..(305): unsure at all n locations
gcatctggantcgttcgttcactttcactttaccaactcctaacaatttctctctgtttccttcttcaccgcatcaatggagtnggacggcgttctcctcggcatgtgcaaccctctcctcgacatctctgncgtcgtcgacgacgctttcttgcaaaaatacggtancaagttgaacgatgcgattctcgctgaggataagcacaaacctatgtatgaagaattggctaacaatcctaatgtggagtacattgctggaggtgctactcagattcaatcagggttgctcagtggatgcttcaagc

SEQ ID NO: 289698 - DNA, 292 bp, Glycine max
  unsure (1)..(292): unsure at all n locations
cggatttcattgctgccaancaaggngaangagccactaacgtaatcaggggcacaaagaaagaacgagttcaacaaatcatcaaagacattaaggagttcaaaagaaaggcactaaggttgacaaggtngttgtctgtggacagccaacacagagaggtacagcaacgtagttgtgggactaaacgacaccatggaaaacctctttncttccttggacaggatgaggctgagatttccccttccacctngtatgccatgcttgtgttatggaaatgttccttcntcatgga

SEQ ID NO: 289699 - DNA, 297 bp, Glycine max
  unsure (1)..(297): unsure at all n locations
gnnnatntctccnctacacaaaacatggctnngcanaatcagcaaacncgtngnntancccaanttcaagcttgtcatncgtcggcgacggtggcacaggacagacaaccttcgtgaagangcatctcactggtgaantcgagaagaaatatganacgaccattggtgtggaagttcatccgttggattntttcnacgaantgtggaaagattcgcttcnattgttgggatactgctggggcagagaagtttngtggcttcagagatggatattatatccatgggcaatgtgcgatt

SEQ ID NO: 289700 - DNA, 299 bp, Glycine max
  unsure (1)..(299): unsure at all n locations
gatcgaggataactagaaacagtgtgatgaaaatgaaggtncttgtnttcttcgttgctacaatnttngtagcatggcaatgccatgngtaacgatatgttccctctccgaatgaacactggctatggtgcccgtactccggaggtnaaatgcgcaagttggaggcttgntgtggaagcacacaacatctttggctttgagaccattcctgaagagtncgttgaagcaaacaaaggaatacatccatggcgaacaatatnagatcagatccaaaacagttaaccaaccaagctttactt

SEQ ID NO: 289701 - DNA, 293 bp, Glycine max
  unsure (1)..(293): unsure at all n locations
cagactgaaancaaggtggtgnctnttngnttcaagattatattcttgtcnagnngnacactggacanacgggccgtcnacaggagcaaacttnaagaaggctggctaccacacatgggaannattaattctcaaggatccacaagatccttccagtccnaatgcaggttcatacaaaacagcancgagagannnactgataaggcagggatacaacattgttgggatcattggagaccaatggagcgatctcctncggggccacagaggcgaaagcaggactttaagcttct

SEQ ID NO: 289702 - DNA, 304 bp, Glycine max
  unsure (1)..(304): unsure at all n locations
caaaggtgtattttggtacaacaataagttgtgatgattantgtagccgaggcttctttgaactttcccttgtgactgtttcagtatcatggctncntattgggaataatttgttgaaccctggtgttggtagtaagtatctagacagttgcatagcggttttgtttacagaataagatatagcctctctgaacagtttgattattgcaccatggtttgcaatcggtgcatgtcgaccaagtttctcaagactgtggagaagttatcttgntccagttcttgaatccaagttgttaccgtatct

SEQ ID NO: 289703 - DNA, 298 bp, Glycine max
  unsure (1)..(298): unsure at all n locations
tgatctggnctgctgttnctggagtnagatactcaattgagcaaataaganaaaggagatcttcggttttgtttggccaattatggaagtggtgtggcattcttgtgaagagttctgcacttctgtctatatggatatttgttatcccagtgcttattgggcttctctttgagttgtggtcattgtgccaatgagagttccagtggatgaaagtccagtantcctnctttatcaagactgggnnntaggcctatatttctcnagatagggactagattgtnatgttgngaccacatgg

SEQ ID NO: 289704 - DNA, 297 bp, Glycine max
  unsure (1)..(297): unsure at all n locations
cacannacatccacnaaccgcaaatatggtcgtcaaggtcggtatcaacggtttcggccgcattggtcgcatcgncttccgcaacgccgtcgancaaccaggacatcgacatcgtctgccgtgaacgaccccttcattgaggcccgagtacgccgcctacatgctcaagtacgactccacccacggtgtcttcaagggtgacatccaggtctccggcaagaacctcattgtcaacggcaaggagatcnccttctacaccgagcgtgaccccggcaacatnccctgggtctgaagaag

SEQ ID NO: 289705 - DNA, 292 bp, Glycine max
  unsure (1)..(292): unsure at all n locations
catttatccatttncatttnctctctnanttttcaagaatcgtaagctcatgggaaagtcttanaccaactgtgagtgcngattaccagaaggncgtngagaaggcgaagaagaagctcagaggcttcatcgctgagaagagatgcgctcctctaatgctccgtttggcatggcactctgctggaacctttgacaagggcacgaagaccggtggacccttcgggaaccatcaagcacnctgccgaactggctcacagcgctaanaacggtcttgacatcgtgttaggctttt

SEQ ID NO: 289706 - DNA, 189 bp, Glycine max
  unsure (1)..(189): unsure at all n locations
caatctagctagagtntgctcctatctatatgtnatanggtatgctgatatgcactattcaaataggagcattagctatgtttgttcaatgncactttatgttatgtgggtaagtcacctaagacactccacgtacctacttgttgtctctncgcggctttaataaatcttctgccctgttccataaaa

SEQ ID NO: 289707 - DNA, 293 bp, Glycine max
  unsure (1)..(293): unsure at all n locations
ttctcatgaacaaatcaagttcctagtaagccaagggtgtattaagcccttgtntgatcttctcatctgtcctgatcctagaattgttacagtttgtctggnaggccttgaaaacatcttgaaggtgggagaagctgataanaacanagganatactggtgatgtgaatctatatgcccaaatgattgatgaagctgagggatggagaaantgagaacctccagagtcatgacaaccacagagatttacgaaaaggcggtcaagattcttgagacatacnggttggaggaggg

SEQ ID NO: 289708 - DNA, 287 bp, Glycine max
  unsure (1)..(287): unsure at all n locations
cctaaaccctactcattctccatacctcaacgaagaggttaaagagacggcaacactttgctgtccgccttgaccgagcagagcttcgtcttgggccctcgattttgccctaaagtactctcagtcacaacagacacnnnnnnnnnnnnnnnnnnnnnnaatggcaccgaagcagaccaaggctgagaagaagatcgcttacgatgcgaantgtgcgacctaatggaggagtacggccagatcctcgttgtgaactccgataagtgggatcgaaccagctccagaac

SEQ ID NO: 289709 - DNA, 290 bp, Glycine max
  unsure (1)..(290): unsure at all n locations
cncgaaggacacgggttcactatcaaaggacatagtataagctgggccaattggaagtnccacataggntatnatnancngagctggtgtgatnatttcaactgcatcaatttacgacnctgaagtgcataagtcacgtcaagtattatacagagggtacatttctgaattattngtgccatatcaagacccaggtgaggaatggtattacaagacttctttgagctggtgaanttgggnttngtcnaatctatggtttctttggaacttngcatgatngntccaccaca

SEQ ID NO: 289710 - DNA, 278 bp, Glycine max
  unsure (1)..(278): unsure at all n locations
ggaaccggnggtgtttgtagacaganaaggtncatggaaacacattcaagcaggagctaagaaggtgctcatgcactgctcctggtaaaggagatanccccaccttacgtggttggtgtcaatgagtatgactanagcnctgatgancccnttcatnancaatgcctcntgcaccactaactgccttgcaccctntgtcaaggtccttgatcagaaattcggtatcatcaagggtancatgaccaccactncatcctacaccggtgaccaaaggcttc

SEQ ID NO: 289711 - DNA, 283 bp, Glycine max
  unsure (1)..(283): unsure at all n locations
cagaaagaccactgagtctaggggatgtaacagccaagaacttaaaggaggttggattcaacacatggngagaagttaattctcaggganccatctgagtactctggtaagttatcatttgaatacaaatcagctgagagagagaagctggagantgagggatacagaatcattggaaacgttggagaccaatggagtgacctcctgggaagcaacaaagggactaggacttttaagctgccttaatcccttgtactatggttaagctctcaaatcangcctc

SEQ ID NO: 289712 - DNA, 296 bp, Glycine max
  unsure (1)..(296): unsure at all n locations
attctctgcacttttcagttacaaagcatttcattgttttacaatatacaacactacaatggctgcttcaacaatggctctctcttcatcatcattnggntggcnagctatcaagcttgncccctccacccctcagcttggtgttggaagggttagcatgagaaaaacagcctccaagactgttacctcaggaagcccatggtacggcccagatcgtgtcaagtacttgggcccattctctggtgagcccccatnctacctcactggtgaattcncaggtgatatggttgggacac

SEQ ID NO: 289713 - DNA, 266 bp, Glycine max
  unsure (1)..(266): unsure at all n locations
aggngtcntccaaatttggtactttggtgaatgtggtgatcccacgaccaccgtctgatggtgaacctgccgctggagttggaaaggtgtttttggagtacgttgatattganggtgctacaaaagcccgtgccggattaaatggccgaaaatttgatggaaatcaagtagtagctgttttctatccagagaacaantttgctcagggagattatgaaggttaattatgtggtgtntggattcnatcttgattagcaaggataatc

SEQ ID NO: 289714 - DNA, 270 bp, Glycine max
  unsure (1)..(270): unsure at all n locations
agagattgaacaaaagcttatacagaagaacaaggacgagacgttgagaaaccgcagtgggccggctaaaatgccttanactttgctctatccttctagtgaggagggattgactttcagaggaattcccaacagtatctccatctaggggctctatggttgttgnagtactttccctcgttttcaataaaagtgaatagaaggaatatgnttccttcatctacctatgtatggttaagttatgtattggggtgattgaatgttctcgtg

SEQ ID NO: 289715 - DNA, 280 bp, Glycine max
  unsure (1)..(280): unsure at all n locations
cgaggagcactagctagtttcacaatttccaaatggctaggggattgaagaagcatcttcaagaggctcaatgctcctaagcattggatgcttgacaaactgggtggtgcatttgcgcccanaccctcatctggaccacacaantctagggagtgccttcccctcatantcatcctacgaaaccggctaaagtatgctctgacttaccgtgaagtcatcgctattctgatgcagagacatgttctgttgatggaaaagtcaggactgacaagacttacct

SEQ ID NO: 289716 - DNA, 295 bp, Glycine max
  unsure (1)..(295): unsure at all n locations
gcataacaatgttntccccantggacacttccgtaagcactggcaganctatgtgaagacctggttcaatcagncagcacggaaganaagaagacggttggcntctcagnngaaagctgtgaggatttccccagacctanaggtggacctcttagacccattgtaacatggtcaaactttgaaatacaacatganagtgagagctggaaggggattttcccttgaagaactcaaggcagcagggattcccagaaagcttgcaccancaattggtattgctgttgatcatcgccgc

SEQ ID NO: 289717 - DNA, 271 bp, Glycine max
  unsure (1)..(271): unsure at all n locations
antgngactnangnctttccccacaagcnggtgcannttggagaaattcaggaaaaagttgtattnaaattttgcacnagangaatttcttacagcttggtcaantcaggtgcgtcctgcaacaantctgttggctgntgggtgcccatatttgtatgctatggtgcatgatagttcantgtctacaataccaggtgattntgtcattggtgtcaagttgacaaccataaacaatatgtgtgcatatgggctcaatcctggtatttcaggt

SEQ ID NO: 289718 - DNA, 267 bp, Glycine max
  unsure (1)..(267): unsure at all n locations
caatgcncctcaatggtatgatgctgggaaatcggagtactttgcttcntcgtcgaccctctttgtgatcgagttcatcttgttccactacgtcgagatccggagatggcaggacatcaagaaccctggatcngtcaaccaagannccatcttcaagcaatacagcttgccccaacatgagtgtggataccctggtagtgtgtttaaccccttgaactttgcaccnactttggaggccaagganaaggaacttgccaatgggagatt

SEQ ID NO: 289719 - DNA, 278 bp, Glycine max
  unsure (1)..(278): unsure at all n locations
ctngggaagaaaggctgtttaatggtcaagattgtgatgtntgggactgcagcagtcaaaaggagtgattgggcctcatttgtacaagtgtttttaacnnacagcaacagtacagagcattttgatgcatgtaagtggacaaaatcagaaccacattcctgggaattgatcttcccaatagaggtatgtggtcccaataatggttttgaaatgtggagttctgagtgggcaatcaaacttcatggcnttgagtttccttttgacaatcccaaacanct

SEQ ID NO: 289720 - DNA, 270 bp, Glycine max
  unsure (1)..(270): unsure at all n locations
atttgagaaganatacgaaccgaccattggagtggaggttcacccattggatttcttgcacaaactgtggaaagattgcgcttctantgttgggatactgccggacaagagaagtttggtggcntcagggacggatattatatccatgggcaatgcgccattatcatgtttgatgttactgcccgantaacttacaaaaatgtccctacctggcatcgggatctttgccgggtctgtgagaacatcccaattgttctttgcggtaacaag

SEQ ID NO: 289721 - DNA, 266 bp, Glycine max
  unsure (1)..(266): unsure at all n locations
cgatttctcaacactgtatgctcctctcatccgtgatgggcgtatggagaagttctactgggcacctacaagggacgatcgtgttggcgtctgcaatggaattttccgcactgacaatgttcctaaggatgacattgtcaagcttgttgacaccttccccggccantctattgatttctttggtgcactcagggcnagagtatatgatgatgaggtgaggaagtggatttctgttgttggtgttgacttcattgggaagaagcttg

SEQ ID NO: 289722 - DNA, 303 bp, Glycine max
  unsure (1)..(303): unsure at all n locations
cnctctctctcttctgcaccggagccctnnctcgccngcggcctctactggttcgtgtgcgtnctgggccccgccgagcagaagggcaaaacgcgccaaccgatcttcnggcgggctccatctccgccgagaaagtccaagacaactacaaacagtactggnccttcttccgccgcccaaaggagatcgagaccgccgacaaagtccccgacttcgtcgacaccttctacaatctagtcacagacatctacgagtgggggtggggccagtccttccacttctccccctccatccccggcaagt

SEQ ID NO: 289723 - DNA, 281 bp, Glycine max
  unsure (1)..(281): unsure at all n locations
gtagtgagtantgananggcganaaatgnatgccctnaagcggtttncgnngnagntggtatcncnnntgatggaagatccgaaggaaagggatcggangttcagggagcacgtttatagagtgaaggacaggtgcganaagacgaaggagatgtggagctaccctatgcgaccctatgggttttggacattcgaacgccacaattctcagcttgcttgggatgcacagattagccaagtggccgggaggagggacccttatgatgatctcctccaacntt

SEQ ID NO: 289724 - DNA, 272 bp, Glycine max
aagaaggggaataagatcaacagtgtaggatggtggtttaaaccctggttctatcagcatgcacagacggcactgaagaaaggagagtttgtagaatacattcctaccagagaatattatccacaggcacacgagatgcttgtactgggagggaaagcttatcctcccatttgctgattcaattttggtttaggtatctgtttggctggttgatgccacccaaggtttctctccttcaaggcaacttcaaggtgatgctataagaaactcat

SEQ ID NO: 289725 - DNA, 271 bp, Glycine max
  unsure (1)..(271): unsure at all n locations
ctcattaattgcaagaatggcacttcgttgcttggtgatgtccctntctgttctcttcactcttggtcttgcgagagaaagccatgccaganacgaagatttntggncatgctgnttggccaaacactcncattnccaagttnattgcgagatcttctaaagcctggccctggcaagtgttgaaatcgatgattcancctatgncaaattgaagnnacacagtacccgaaaaccttcttctatnangaagacctncatccaggcaaaacat

SEQ ID NO: 289726 - DNA, 275 bp, Glycine max
  unsure (1)..(275): unsure at all n locations
cacgtttcacaatcactttttgcgcttctctcnntcactcactcttcttcttcctcttngtgtggttttctttctcgaactcgaacgaagatgcgtgagattcttcacatcccagggagggcaatgcgggaaccagatcggagccaagttctgggaggtggtgtgcgcggagcacgggatcgttcaacggggaggtaccaagnggacaaccagttgcaactcgagcgagtcaacgtctactacaatgaaagcgagttgcggaaggttctgctang

SEQ ID NO: 289727 - DNA, 270 bp, Glycine max
  unsure (1)..(270): unsure at all n locations
gntganagcactatcttggtgaatgcatggnggctggccaacaaccctgcacactggaagaagccagangagttccggcctgancaggttcttcgaggaggagtcgcttgttgaagccaatggcaatgactttaggtaccttccctttggtgttggcagaagaagctgcccggaatcattcttgcattgccantncgtggcatcactttggggagtatangnccaaaactttgagctcttgcctccccctggccancacagattggacac

SEQ ID NO: 289728 - DNA, 266 bp, Glycine max
  unsure (1)..(266): unsure at all n locations
ttctttagactacgcgctattcanngnaaaccccggcgtggttgattccggtantggtttaaaatacacgaacttattcgacgctcaaatcgacgccgttttcgctgccatgtcagcactcaaatacgaagacgttaagatcgcggtttcggaaacgggttggccttctgctggggactctaacgagattggagccagccccgacaatgcggcgtcgtataacggaaattggttaaacgcgttcngagtgggatgggacccccttt

SEQ ID NO: 289729 - DNA, 261 bp, Glycine max
  unsure (1)..(261): unsure at all n locations
caaggctgnctggagtgaagcacattgtgtnagtagngtctatgggtggaacganaccttaanccatcctttgaacagcttgggtaatgggaatatattggtttggaaaaggaaggctgagcaatatctggctgattccggcatcccatatacaattataagggctggtggctgcnagacaaagatggaggtcttcgggaactantgtagggaaggatgatgagcttctccagactganaccagaacntaagtagatctga

SEQ ID NO: 289730 - DNA, 273 bp, Glycine max
  unsure (1)..(273): unsure at all n locations
gtgaagcngcagagggaggagcggcatnnaaaangcagatcttcgtgaacaccctaacggggaagaccataaccctcgaggtcgaaagcagcgacaccattgacaatgtcaaggctaagattcaagacaaggaaggcatcctccggatcagcagcgtttgattttcgccggaaagcaacttgaagatggaaggaccttggccgattacaacatccagaaggnatcaacccttcaccttgtcctcaggcttcgtggtggnccatcgagccttcc

SEQ ID NO: 289731 - DNA, 266 bp, Glycine max
  unsure (1)..(266): unsure at all n locations
ctcgatcacttgtgggatgataccctcgccggtcctcgcccggagaacggcctcggcaagctccgaaagcaccactcctttcgctttccgatctgcctccgccaaggaatcagacagcggaagcgtgaaatcgtacggtnaggattcgcccaagaatgcggtgagagtgacgcgaagtataatgatcgtgaaaccacctggtaaccagagtcccagtggatccgctccggcttcccccgccggttctatctcgtgtctccgttttt

SEQ ID NO: 289732 - DNA, 261 bp, Glycine max
  unsure (1)..(261): unsure at all n locations
cnagggtgagggccttccatggcttccgcttgtgcttcctctgcaattacagctgttgccatctctacgccgagttccgggcagaagaatggatcaggaggttgttttcttagtggaaggaaattgagggtgaaaaaggagagagcagcaattggaggacgatcgatgggcactacagtgtgcgcagttgctgagcctgacagacctctatggttcccaggcagcacccctcctccatggctgatggctctacctggagac

SEQ ID NO: 289733 - DNA, 270 bp, Glycine max
  unsure (1)..(270): unsure at all n locations
ccaacttggtcatggtctncggatanatcntgnccaaggccancgttgnctacgagnagatagtgcgtgacacctgcaggaacatcggcttcgtctcanatgatgtgggactggatgccgacaactgcaaggtcctcgtcaacattgagcagcagagccctgatattgctcagggtgtacacggccaccttaccaaaaaacctgaagaaattggtgctggtgaccagggtcacatgtttggctatgccatgatganccctgaattgatgc

SEQ ID NO: 289734 - DNA, 267 bp, Glycine max
  unsure (1)..(267): unsure at all n locations
gtctctccgcagcagncanacttctncgccgtttcagctgangagccatccgcaggtaagccatggttaagcataataatgttatccccaatgggcacttccggnaacactggcaaaactatgtgaagacttggtttaatcaaccagcccgaaagaccagaagacggttggctcggcagaagaaggctgtcaagattttccccaggcctatgctggatctctcaggcctattgttcatgggccgactctganatcaacatganagtc

SEQ ID NO: 289735 - DNA, 288 bp, Glycine max
  unsure (1)..(288): unsure at all n locations
gagataactagaaacagtgtgatgaaaatgaaggtccttgtnttcttcgttgctacaattttgcgtagcatgggcatgccatgcgtacgatatgttccctctccgaatgaacactggctatggtgcccgtactccggaggtgaaatgcgcaagttggaggcttgctgtggaagcacacaacatctttggctttgagaccattcctgaagagtgcgttgaagcaacaaaggaatacatccatggcgaacaatatagatcagactccaaaacagttaaccaacaagctta

SEQ ID NO: 289736 - DNA, 284 bp, Glycine max
gggggtgcaggatatattggttcacatgctgctctacgacttctgaaggagaactatcgtgtcaccatagtagacaatctgtcacgtggaaatttgggggccgtcaaggttcttcaagacttatttccagaacctggaaggcttcaatttatttatgctgacttgggagatccacaatctgttaataaaatatttttggagaacaaatttgatgccgtgatgcactttgctgctgttgcatatgtgggagaaagcactgctgatcctcttaagtattatcacaa

SEQ ID NO: 289737 - DNA, 280 bp, Glycine max
ctctcactttctccaatatggcttcttctcgaaatgagttttatgcacttatgctagtggtggtggttggctccatagtggcttcctgtggtgctaacttcaaccaagactttgatctaacttggggtgatcagcgtgctaagatattcaatggtggtcagcttctatctctttccctggacaaagtctctggctctggcttccaatccaagaaagagtacttatttggaaggatcgatatgcagctcaagctcgttgctggcaactctgccggcactgt

SEQ ID NO: 289738 - DNA, 280 bp, Glycine max
  unsure (1)..(280): unsure at all n locations
gttgatcgagataactagaaacagtgtgatgaaaatgaaggtccttgttttcttcgttgctacaattttggtagcatgggcaatgccatgcgtacgatatgttccctctccgaatgaacactggctatggtgcccgtactccggaggtgaaatgcgcaagttggaggcttgctgtggaagcacacaacatctttggctttgagaccattcctgaagantgcgttgaagcaacaaaggaatacatccatggcgaacaatatagatcagactccaaaacagt

SEQ ID NO: 289739 - DNA, 284 bp, Glycine max
tcctcgccacaccctgtttcgtgaagctcagtgcatcaagatctctctctctgtaatcgaaaatgagcaagggaccgggtctctttaccgatatcggcaaaaaatccaaagatcttttgactaaggactacaactccgatcagaaactcaccatttcctcatacagcatctccggagtggccctcacttcaacatctgtcaagaaaggaggactctccactggggatgtggcagcactgtacaagtataagaacactattattgatgttaaactggacaccgca

SEQ ID NO: 289740 - DNA, 284 bp, Glycine max
gccaagatccaggacaaggaaggaatccccccggaccagcaacgtctcattttcgccggaaagcaacttgaggacggccgtacccttgctgactacaacattcagaaggagagtactcttcacctcgtcctccgtctccgtggtggcatgcagatcttcgttaagacactcaccggcaagaccataaccctagaggttgaaagctccgacaccatcgataacgtcaaggccaagatccaggacaaggagggtatccccccggaccagcaacgtctcatcttcgg

SEQ ID NO: 289741 - DNA, 271 bp, Glycine max
  unsure (1)..(271): unsure at all n locations
ctaaacgactctatctctcttcgttttgttcttccttgcgctcctcctcgttcgttcgttctccctcgcgtagatcggcaatggcggagaccgagacgtttgctttccaggctgagatcaaccagctcctcagtctcatcatcaacaccttctactccaacaaggaaatcttccttcgtganctcatcagcaacgcctctgatgctttggacaagattagatttgagagtttgacggacaagagcaagctcgatgctcagccagagttgtt

SEQ ID NO: 289742 - DNA, 279 bp, Glycine max
gcagaaagcaagctcatcctagagttttaaaaatggcagcagcctcctccatggctctctcttccccatccttggctggcaaggccgtgaagctgggcccatcagcccccgaagtcgggagggtcagcatgaggaagaccgtcaccaagcaggcctcctccggaagcccatggtacggcccagaccgcgtcaagtacttgggcccattctctggcgagcccccgtcctacctcactggcgagttcccaggtgactacggctgggacactgctgggcttt

SEQ ID NO: 289743 - DNA, 280 bp, Glycine max
  unsure (1)..(280): unsure at all n locations
cactgttgagcaggctatccaaaacaagaagttgttcatcttagatcaccatgactatctcattccatatttgaggaaaataaatgcanataccacaaagacttatgctacaaganccatatttttcttgaaaaatgatggaactttgacgccattggccattgagttaagtaagccgcatcctcagggtgaagaatatggtcctgttagcgaagtctacgtgccttcgagtgaaggagttgaagcttacatttggttactggcaaaggcttatgttgtt

SEQ ID NO: 289744 - DNA, 279 bp, Glycine max
  unsure (1)..(279): unsure at all n locations
ggccatgcggttgcgcagtcgtctttacatcgcccangctttgcattattgcagttctgagggtccgtcccctgtaccatgacttgaatgcttaccgtgttctcttcgaccaggaaggcgatccccgtctctcttgctttggttttatgaagaacagcagggatggtaagagttatagcaccaatcttgcttacacacctcctgaatatttaaganatggaagggtcacgcctganagtgtcatttacagctttggaacgttcttctagacctcctcag

SEQ ID NO: 289745 - DNA, 277 bp, Glycine max
actgtcctgatccctaggaacactacaattccaacaaagaaggaacaagttttctcaacatactctgacaaccagcctggtgtgcttatccaggtctttgagggtgaaagagcaaggaccagagataacaatttgttgggcaaatttgagctatctggcattcctcctgcacccaggggtgttcctcagattacagtgtgctttgacattgatgccaatggtatcttgaatgtctctgccgaagataaaaccactggccagaaaaataagatcacta

SEQ ID NO: 289746 - DNA, 283 bp, Glycine max
  unsure (1)..(283): unsure at all n locations
gccttcgtttgcntttttatcacagaggaattaacatatatatagcaagcatggcagtcacactctacgaccttagctcttcctctgggttgaanaaacttgatgagtaccttctcccacgcanttacatcaccgggtaccaagctacaaaggatgatcttactgtttatgcagctttgccaactgctccatcagatgaatatggaaatgtttccaggtggtacaagcacattgatgctttgttgagaatctctggtgttactggcgagggatctggtgttat

SEQ ID NO: 289747 - DNA, 280 bp, Glycine max
ctttctttgcatagggcaacctcctttctctgtgactctgagtatcgtatcgttttattattatttctaattctctcttatcaggtccattgaatatgtctctgtcgttggatcttcctcccaagggtggcttcagttttgatctatgccgaagaaacgcaatgcttcaaaacaagggcctcaaagccccaacctttctcaaaactggcaccactattgtcggtttagttttccaggatggtgtcattcttggtgctgatactagggcaatgaaggacct

SEQ ID NO: 289748 - DNA, 241 bp, Glycine max
  unsure (1)..(241): unsure at all n locations
tgcaatggctgccattgttttcatccacattgcatcattggtctctctttttgttgcaacaagtgcaagaatccctggagtttacaccggtngcccctggcagagtgctcatgccaccttctacggtggcagtgatgcttctggaacaatgggtggtgcttgtgggtacngaaacctgtacagccagggctacggagttaacaccgcggcgctgagcactgctctgttcaacaacggttta

SEQ ID NO: 289749 - DNA, 275 bp, Glycine max
  unsure (1)..(275): unsure at all n locations
tggaatggactggtttggccaatagattactgagtaagggcaacgatattctgtgttgcgattatgctagttttgatggtttgattaccaagcaagtnatgagcaagatggcagaaatgataaacagtctttgtggtggtgatgaaaaattgatgcgtganaggacacacctgctgttggcttgttgttcaaggatggcaatttgtaaganagatgtttggagagttgaatgtggaatcccttctggatttccgctcacagttatttgcaatagc

SEQ ID NO: 289750 - DNA, 279 bp, Glycine max
  unsure (1)..(279): unsure at all n locations
cactaacattaccctttacttgctaaaacatggtccaagaaaaganactagttgacgaggtgtccggttggctcaaaatttatgcacgacggttcagtggaccggacatggtccggaccggaccaattcaagttcatggccgaaccggcccctccccatgaacaattcntagacggcgttgccattcgcgacgtcgccgttactcacggtggtggccagagtggccaccatgtccgactttatctgccagagataaagccggaagacagccaannacta

SEQ ID NO: 289751 - DNA, 259 bp, Glycine max
  unsure (1)..(259): unsure at all n locations
gatcgagataactagaaacagtgtgatnaaaatgaaggtccttnctttcttcnctgcttacaattttggcagcatggcaatgccatgcgtacgatatgttccctctccgaatgaacactggctatggtgcccgtactccggaggtgaaatgcgcaagttggaggcttgctgtggaagcacacaacatctttggctttgagaccattcctgaagagtgcgttgaagcaacanaggaatacatccatggcgaacaatatag

SEQ ID NO: 289752 - DNA, 279 bp, Glycine max
  unsure (1)..(279): unsure at all n locations
gtgagtnttgtttatttgaaattaacaagtagcaaagatgtttggaatcatcggaggcaacaagggtcacaagataanaggggaacttggtgattatgcgaaanaatgtgttggatatcaacagcattaccagtgttaagggtgncatcggaaccggcattaacatcattggaggagtcgtcgacaccgttactgctttggcgtcccacatctccatccagctccattagtgccaccaaggctgatgnccatgggaaaggaaaagttgggaaaggctac

SEQ ID NO: 289753 - DNA, 272 bp, Glycine max
  unsure (1)..(272): unsure at all n locations
gcggatcttatcaagagaggaatggcagtggaggatccatcctctccctatggccttcgccttgtgatagatgactacccttatgctgttgatggactagagatatggagtgctatccagacatgggttaaggactacgtctccttgtactatgccacggatgatgcagttaaganagactcagaactccaagcttggtggaaggaagctgttgagaagggtcacggtgacttgaaagacaagccatggtggcctaagttgaacactcttca

SEQ ID NO: 289754 - DNA, 280 bp, Glycine max
ggaggttatatcgtgaaccgtccaactctagccagaaggtttatcccagaagaaggaaccaaagaatatgatgagatggtgaaggatcctcaaaaggcatatctgagaacaatcacacccaagttcgagacccttattgacatttcagtgatagagatattgtcaaggcatgcttctgatgaggtctaccttggccaaagggataatccaaattggactacggattcaaaggcattggaagctttcaaaaagtttggaaacaaactggcagaaattgagg

SEQ ID NO: 289755 - DNA, 277 bp, Glycine max
catcaagaaacaaggccttgatatcacccctcgtattctcattatcactcgtcttctccctgatggcagtaggaactacctgtggccaacgtctagagagggtatatgatactgaatattgtgacattctcagagttcctttcagaacagaaaagggaattgttcgcaaatggatctcaagattcgaagtctggccatacctagagacttacactgaggatgtcgcccttgaacttgccaaggagttgcaagccaagccagatctgattgttggaaa

SEQ ID NO: 289756 - DNA, 275 bp, Glycine max
  unsure (1)..(275): unsure at all n locations
gccagatcggntagagagtntctttatcaaattttggnagangttatcaaagctggggcaacaactttgggcataggtgacactgtgggcataacaatgccattcgagattagacaattgattgcngatataaaanccaatgtccctggagcagaaaatgttattatttctatgcactgtcataatgatcttggacatgctactgcaaacgcaatagaggctgctcaagctggtgcaatgcaattagaagtaacaattaatgggattggtgaaag

SEQ ID NO: 289757 - DNA, 273 bp, Glycine max
gcaccagcgaaacgctcttcgttatcttttctcagactccgcggcgtagatccgaggagttcgggaaatcctaactcatccatctcaactcaagtcatggctggacttgcacctgagggatcacagttcgatgctcgtcaatatgattctaaaatgagtgacttactttcatctgatggacaggacttcttcacatcctatgacgaggtttatgatagttttgacgctatgggtttgcaggaaaatcttctcaggggaattacgcatatggtt

SEQ ID NO: 289758 - DNA, 288 bp, Glycine max
  unsure (1)..(288): unsure at all n locations
cactcccctcctcnatcatannattttcnatagcnctctggaataagnaattcngangatgactctttgaaancgggntatcattggtaaancctnaggttgagtntcagtccagattaaganggccattccncctcactgtttccagcgctctgtnctccgntcattctcctatgttgnttatgacctcaccatagccttctgcctctantatgttgcnanccattactncnacctccttcccgggnngntntctnncgtggcatggncaatnnatngggcggtgca

SEQ ID NO: 289759 - DNA, 280 bp, Glycine max
cggggactttcactagccgcagcagcctcaggaggagaataaggatgtctcacaggaagttcgagcacccaaggcaccggtcactgggatttctccccaggaagcgtgctgctcgtcacaggggaaaagtgaaggcattccccaaggatgacccatccaaggcacccaagctcactgcattcttgggttacaaggctggtatgactcacattgttagagaggtcgagaagcctgttacaattattgagacccctccaatggttattgttggtgttgtggg

SEQ ID NO: 289760 - DNA, 272 bp, Glycine max
agtagaagcacttttcctctgatgaaatacttgagagtgcgcgtcgacgctcttccccgcaacactcccttaaccctcgctcccaactttttgattcgccgcttctgtgaagaggttaggggttgttttctcgacaagtctgaggtcacagatcgcgtcatttcctgcgtcaaaaacttccagaaagttgatccttcaaaggttaaccctaatgctcattccagaatgaccttggatggatagtttagattcagtagagattgtgatggctc

SEQ ID NO: 289761 - DNA, 272 bp, Glycine max
  unsure (1)..(272): unsure at all n locations
ctagcacacaaaacttgctatagcagtaagctataactcatntgaggctctgtgagaattgagaaatggtaaagatgttgaggttcaagagcaaggaggagagtactctgccaaagactaccatgaccctcctccagcacctttgttcgacccagaggagctcacacagtggtccttctatagagccctcatcgctgagttcatagcaacccttctcttcctttatgtcactgtgctcaccattattggctacaaaaggcagactgatacaa

SEQ ID NO: 289762 - DNA, 271 bp, Glycine max
aacaagtagttgagaactaagaaggagaagcaaatggcttcctcaatgatctcttccccagctgttaccactgtcaaccgtgccggtgccggcatggttgctccattcactggcctcaagtccatggctggcttccccaccagaaagaccaacaatgacattacctccattgctagcaacggtggaagagtgcaatgcatgcaggtgtggccaccagttggcaagaagaagtttgcgactctttcctacctgccagaccttgatgatgcac

SEQ ID NO: 289763 - DNA, 273 bp, Glycine max
  unsure (1)..(273): unsure at all n locations
aactagaaacagtgtgatgaaaatgaaggtccttgttttcttcgttgctacaattttngtagcatggcaatgccatgcgtacgatatgttccctctccgaatgaacactggctatggtgcccgtactccggaggtgaaatgcgcaagttggaggcttgctgtggaagcacacaacatctttggctttgagaccattcctgnagagtgcgttgaagcaacaaaggaatacatccatgggcgaacaatatagatcagactccaaaacagttaacc

SEQ ID NO: 289764 - DNA, 244 bp, Glycine max
  unsure (1)..(244): unsure at all n locations
cggtaangcaaataatacctgctgatcctggccagcttgattctcacgaganggttgttcctcaagccgggcaagtgtggttccctgattccgcaaccaagacagcccaagcaatattggatttcaacagagaagagctcccgcttttcattcttgcaaactggagaggctttcaggagggcaaagggaccttttcgaaggaatcttcaggctgggttccctattgtggagaacctagacatac

SEQ ID NO: 289765 - DNA, 246 bp, Glycine max
cggaaccagtgttgaagaggcctacaacaagctaatagttgaacttgagagaagtgttcctacattggttggcattgaatgtcccaaggatgagaaacttcctcgtcgcaaaatttttgacaaacctaagacgcgctgcttcactattctccctatggagtttaatcttgtggttcgtcagaagtttttaaattttgtgaggttcattatgaagaaaagggacaagcttagttgtcaagttggatc

SEQ ID NO: 289766 - DNA, 281 bp, Glycine max
  unsure (1)..(281): unsure at all n locations
cgaaatattacctctatgtacacagttacttgcgatacggtatgctagcagctcgtgcagaggctttaaaggttcgtgattctgaaaatccttgtattttggctggctttgatgggtattacgtatatggaggagtgcagtataaggccaaagctcccccttctggctcaagcttcagccaatgccaaaatgttgttgttgaagcactcccatgttaanacaacatgctcttacaagggattgcactttcggagggatatgggatggtggtgggggagtgg

SEQ ID NO: 289767 - DNA, 277 bp, Glycine max
cacaaagcacaaagcaaagctcatccttgagttaaaaaatggcagcagcttcttccatggctctctcatccccatccttggctggcaaggccgtgaagctgggcccatcagccccagaagtgggaagggtgagcatgaggaagaccgtcaccaagcaggtctcctcaggaagcccatggtacggcccagaccgagtcaagtacttgggcccattctctggcgagcccccgtcctacctaaccggtgagttccaggcgactacggctgggacatgctg

SEQ ID NO: 289768 - DNA, 269 bp, Glycine max
  unsure (1)..(269): unsure at all n locations
cccggaaatcatgtgcagtgacaacactgggaagagggggcagtgatttgacggctacaacaattgggaaagcactagggttgcctganatccaggtatggaaggatgttgatggtgtcctaacctgtgatccaaatatatacccaaaagcagaacctgttccttatttgacatttgatgaggctgcagaactagcttactttggtgctcaggttctacatccacagtctatgagacctgccagagaaagtgatattcctgttagggtt

SEQ ID NO: 289769 - DNA, 274 bp, Glycine max
ctctagagtaattgcggaatcagctagaattttctaataatggccaaagacgttgagcaggttacagagcaaggtgaatactccgcgaaggattaccatgacccacctccggcgccgttgatcgacccagatgagctcactaagtggtccttgtacagagccgccatagctgagttcatagcaacactccttttcctttacatcaccgtgttgaccattattggctacaagagacagagtgacaccaaaatccccggtaacaccgagtgcgacg

SEQ ID NO: 289770 - DNA, 155 bp, Glycine max
  unsure (1)..(155): unsure at all n locations
ctaatgtnatcatggctacatatgaagatccactacttgntgatgntcaggtctacccagagaaaggaacagttnctttttctgctggtttgcatcgctgggcttttaccctgactaactttgccaagatgtatgcatccaagtttggagttgat

SEQ ID NO: 289771 - DNA, 274 bp, Glycine max
  unsure (1)..(274): unsure at all n locations
cctttgttcactcttcttctcttgcggctagngttttagcgcanttcttctagatttaaggnagatgggtaaggaaaaggttcacatcagtattgtggtcattggccatgtcgactctgggaaatccactaccactggtcacctgatttacaagcttggaggcattgacaagcgtgttattgagaggtttgagaaggaagctgctgagatgaacaagaggtctttcaagtatgcctgggtgctggacaacttaaggctgagcgtgaagangatc

SEQ ID NO: 289772 - DNA, 275 bp, Glycine max
cagaaccctcgatcactcccacgcgctcctatatcctctccttcaccgtcgctctctccaacgatcacaacaacatcgtcatcccatggcaaacgccgcatctggtatggcagtccatgatgactgcaagttaaggtttttggagctgaagacaaagaggacacaccgtttcatagtttttaagattgaggagcagcagaagcaggtcattgtggagaagcttggtgagccagcccaaggctatgaagatttcactgccagccttcctgctgatg

SEQ ID NO: 289773 - DNA, 272 bp, Glycine max
  unsure (1)..(272): unsure at all n locations
cacaggctccacaaaacatctcatcnttcacccaacaaaatggcgctgcttctgataattcccatctcactggtcaccctctggctcggttacaccctataccagcgattaagattcaagctccctccgggtccacggccctggccggtagtcggtaacctctacgacataaaacccgtccgcttccggtgcttcgcggagtgggcgcagtcttacggccccataatatcggtttggttcggttcgaccctaaacgtcatcgtttcgaactc

SEQ ID NO: 289774 - DNA, 262 bp, Glycine max
  unsure (1)..(262): unsure at all n locations
tgctgttcttgcgcgtgaacaagcctcaggtaagccaaaaccatggttaancataacaatgttatcccaaacggacacttccgtaagcactggcagaactatgtgaagacttggttcaatcagccagcacggaagacnaggagacgattggctcgtcagaagaaagctgtgaagatattccccagacctacggctggacctctcaggcccattgtacatggtcaaactttgaaatacaacatgaaagtnagaggtggaaggg

SEQ ID NO: 289775 - DNA, 199 bp, Glycine max
  unsure (1)..(199): unsure at all n locations
canancattagtgtaattncngtgtgcccaaagggaatgggtccatctgtaaggnggctctatgtccaaggcaaagagataaatggtgctggaattaatgcaagtcttgcagtccaccaggatgtggatggcagggctactgatgttgctttgggatggtctgttgcccttggttctccattcacttttgccactacat

SEQ ID NO: 289776 - DNA, 278 bp, Glycine max
  unsure (1)..(278): unsure at all n locations
ttttcttcatatcttccttgtcactgcccgtgtgtcgccgccatggccaccgtcaccacccaagcctccgccgcaattttccggccatgtacctcgaaatcgaggtttttgaccggctcttccggtaaacttaaccgggaagtgactatgcggccaatggggtgccctccttctgcctctttcaaggttgaagccaagaagggagagtggttacctggcttggcntcccccaacttacctcaaatggcactcttcctggtgacaatggattgaacccc

SEQ ID NO: 289777 - DNA, 267 bp, Glycine max
  unsure (1)..(267): unsure at all n locations
cccgcactccgtcttcatcaatcagcatcaccaccgctccaacacaggggaaaatgagggagatccttcacgttcagggagggcaatgcgggaaccagatcggttcgaagttctgggaagtggtgtgcgacgagcacggcatanatccgacggggaagtacgtcggaaactcagatctacaactcgagcgcgtgaacgtgtactacaacgaagcttcctgcgggcggtttgtcccacgcgcagtgctgatggacctggagcncggaa

SEQ ID NO: 289778 - DNA, 268 bp, Glycine max
  unsure (1)..(268): unsure at all n locations
cgcgagtcagaganaccctaggtaagaagaaaagatgccggctggtcatggtttganatcccgcaccaganattccttctctcgtcctttcaggaagaagggaaccatcgccctcaccacatacctgagaacctaccacgtcggcgactatgttgacgtcaaggttaacggtgccgttcacaagggaatgccccacaaattctaccatggccgcaccggacgcgtctggaatgtcaccaaacgtgctgttggcgtcgaagtcaacaag

SEQ ID NO: 289779 - DNA, 265 bp, Glycine max
  unsure (1)..(265): unsure at all n locations
tcgagataactagaaacagtgtgatgaaaatgaaggtccttgttttcttcgttgctacaattttngtagcatgncaatgccatgcgtacgatatgttccctctccgaatgaacactggctatggtgcccgtactccggaggtgaaatgcgcaagttggaggcttgctgtggaagcacacaacntctttggctttgagaccattcctgaagngtgcgttgaagcaacaaaggaatacatccatggcgaacaatatagatcagactc

SEQ ID NO: 289780 - DNA, 271 bp, Glycine max
cattcctcagtccatttcacagcaaactgtttggaatcaaatggcaacagtgagaacaccattgaattttgattctagcaagcagagcttttgtcaattttctattgaccttctcggtggaggaattttagtggacaaaactggagattggatcacacttatacaaaattctccaattagtaacttgttgagagttgctgcttggaagaaaggctgtttaatggtcaagattgtgatgtctgggaatgcagcagtcaaaaggagtgattgg

SEQ ID NO: 289781 - DNA, 275 bp, Glycine max
cgaagaaaccaaagatatccttctcctgggatgtggctcccctcactctcggaattgaaactgttggtggagtcatgacaaagttgattcccagaaacactgttatcccgaccaagaaatctcaagtgttcaccacctaccaggaccagcagactaccgtctccattcaggttttcgaaggtgagaggagtctcacaaaggattgtcgccttcttgggaaatttgatctgtctggaattccaccagctccaaggggcaccctcaaattgagtgac

SEQ ID NO: 289782 - DNA, 263 bp, Glycine max
  unsure (1)..(263): unsure at all n locations
ataacctccgtcgganaangcagtgctaaggacaccgccaccgatttcttgggcaaaggcttggacgcattaggtcatgcagttgatgctctcactgccttcgctggccatagcatctccttgcagcttatcagtgctactcagactgatggtagtggnaaaggaaaagttggaaacgaagcctatttgcaaaaacatcttcncgaccttggccaacgttgggagcaaggcaggaagcattcgatattaactttgaatgggat

SEQ ID NO: 289783 - DNA, 266 bp, Glycine max
  unsure (1)..(266): unsure at all n locations
accatgatnagcttatcgccaatgctgcgtacattggcactcctggaaagggtattcttgctgctgatgagtcaacagggacaattggcaagcgtttggccagnatcagtgtagagaacattgaatccaacaggcgagctcttagggagctgcttttcactgctcctggtgttcttcaatatctcagtggtgtcatcctctttgaggaaaccctctaccagaggacagctgcangcaagccctttgtgaatgtcttgaagggagct

SEQ ID NO: 289784 - DNA, 287 bp, Glycine max
  unsure (1)..(287): unsure at all n locations
ctacagtgttcatcggagtgcattaggtgctaaagaagtggatnctncaaggaagaatcttggatggccatacgagcctttccatgtgccagaagatgtcaagaagcattggagtcgccatacacctgagggtgctaaacttgaagctgagtggaatgccaagtttgtgggaatatgagaagcaatacagtggagggaagcngcagagctgaaggttatnattactggcgaattaccagcntggttgggagaaagcnttccgacatccacacnagaaagccngctgt

SEQ ID NO: 289785 - DNA, 279 bp, Glycine max
  unsure (1)..(279): unsure at all n locations
tttgttgatcgagataactagaaacagtgtgatgaaaatgaaggtccttgttttcttcgttgctacaattnnngtagcatggcaatgccatgcgtacgatatgttccctctccgaatgaacactggctatggtgcccgtantccggaggtgnaatgcgcaagttggaggcttgctgtngaagcacacaacatctttgggctacnagaccattcctgaagagtgcgttgaagcaacaaaggaatacatccatggngaacaatatagatcagactccaaac

SEQ ID NO: 289786 - DNA, 275 bp, Glycine max
cgcgatcacaggttgccgcaccttaaaaccggtgaaaatgagagagtgcatttcaatccacatcggtcaggccggtattcaggtcggaaacgcctgctgggagctctactgcctcgaacacggcattcagcctgatgggcagatgccaagtgataagactgttggtggaggtgatgatgctttcaacaccttcttcagtgaaactggggctggaaagcacgtgccctcgtgcggatttttgtagatctcgagcctacgtgattgatgaagttagg

SEQ ID NO: 289787 - DNA, 272 bp, Glycine max
  unsure (1)..(272): unsure at all n locations
cattgggtgaagagtcatacaaagatagtacattgatcatgcaacttctccgtgacaatctgactttgtggacatcagacatcacggacgatgctgganctgagatcaaggaaacatctaagcaacaaccaggcgaataggcgatggcagttgcgatgtggtagttgattggatatgtattaccgataatatggatccaatntggcttgccatagtgggattattgtattaatgaattttatgatttcaagtgcgcgttgcgcttgggattt

SEQ ID NO: 289788 - DNA, 264 bp, Glycine max
caattctcaagccaaccatgtcttccttcaagagcaagtaccaagatgaactcattgccaatgctgcttacattggcaccccagggaagggtatccttgctgctgatgagtcaactggtacaattggcaagcgattggccagcattaatgtcgagaatgttgaagcaaataggcgtgctcttcgtgaactcctattcaccacacctggtgcttttgagtgcctcagtggtgtgatcttgtttgaggaaaccctataccaaaaga

SEQ ID NO: 289789 - DNA, 269 bp, Glycine max
ctgtagagactggggttgtgaagcctggtatggtggtgacttttggtcccactgggctgacaactgaggttaagtctgttgagatgcaccatgaggctctcacagaggctcttccaggtgacaatgttggatttaatgtgaagaatgttgcagtcaaggatctcaagcgtggttttgttgcatccaactccaaggacgaccctgccaaggaagctgccaacttcacatcccaagtcattatcatgaaccatcctggccagattggtaat

SEQ ID NO: 289790 - DNA, 283 bp, Glycine max
  unsure (1)..(283): unsure at all n locations
cacaaggcagaaagcaagctcatcctagagttttaaaaatggcagcagcctcctccatggctctctcttccccatccttggctggcaaggccgtgaagctgggcccatcagcccccgaagtcgggagggtcagcatgaggaagaccgtcaccaagcaggcctccttccggaagcccatggtacggcccagaccgcgtcaagtacttgggcccatctctggcgagccccgttcttacttcantggcgagtcccagtgataanggttgggacatngttggnnttc

SEQ ID NO: 289791 - DNA, 277 bp, Glycine max
  unsure (1)..(277): unsure at all n locations
tctctctcncngtctctacaaaacttagctctnttttttaattattccttgcattctcttgagttcagatggaagcanctaatngccancaaaatggttcgttttgcttgtccagtactaagggaagtgatccgttaaactggggagcggcggcggaggcgatgaaggggagncnctggangaggtgaagcgcatggtgtccgagtaccggaagccgtgggtcggctcggcggcggagacgctcnaccatngccaagtggcngccgtggttggaaaa

SEQ ID NO: 289792 - DNA, 272 bp, Glycine max
  unsure (1)..(272): unsure at all n locations
caaagacttacgctacaagaaccatatttttcttgaaaagtgatggaaccttgacgccattggccattgagttaagtaagccgcatcctcagggtgaancatatggtcctgttagcgaagtctacgtgccttcgagcgagggagttgaagcttacatttggttactggcaaaggcttatgttgttgtgaatnattcgtgctaccatcaactcgtcagccactggctaaacactcatgcggttgttgagccattcgtcatagcaacaaacagg

SEQ ID NO: 289793 - DNA, 266 bp, Glycine max
  unsure (1)..(266): unsure at all n locations
cttttaagttaaatagtttttcattgtntcatttaatctacaatggctgcttcaacaatggctctctcttcatcatcattggctggccaagctatcaagcttgccccctccacccctcagcttggtgttggaagggttagcatgaggaaaacagcctccaagactgtttcttctggaagcccatggtacggcccanaccgtgtcaagtacttgggcccattctctggtgagcccccatcctacctcactggtgaattcccaggtga

SEQ ID NO: 289794 - DNA, 263 bp, Glycine max
  unsure (1)..(263): unsure at all n locations
cgtcgaactgcaacagaaagttgatcggagcaagattctttgctaaaggtgtagaagccatgcttggtccaattaacgannccgaggagtccagatccgcgcgcgacgacgacggccacggcacccacacgtccagcaccgccgctggatcagttgtttccggcgcgagcctcctcggttacgcctccggaacaccgcgtgggatggccacgcgcgctagagttgctgcatacaaggtatgctggaaaggagggtgtttcagt

SEQ ID NO: 289795 - DNA, 262 bp, Glycine max
cgcccattcaatctcaaggttggcccatggctttgaaggggcgtgatctgataggaattgcagaaacaggatcagggaagacacttgcttacttgttgccatccattgtgcatgttaatgctcagcctattctaaatcctggagatggaccaattgtgttagttttggctccaactcgtgaacttgctgtccaaatacaacaagaggctactaaatttggtgcatcatctaggattaagagtacatgcatctatggtggggt

SEQ ID NO: 289796 - DNA, 267 bp, Glycine max
  unsure (1)..(267): unsure at all n locations
ganaaaccatggcaataacactcaacaatggcttcaagatgcctatcattggattgggcgtgtggcgcatggaaggaaacgaaatcagggacctaattctcaattccatcaaaattggttatcgccattttgattgtgctgctgactacaaaaacgaagcagaagttggagatgcgcttaaggaggcttttgatagtggccttgtgaagagagaggatctcttcattaccaccaagctttggaattctgatcaaggccacgttcttg

SEQ ID NO: 289797 - DNA, 270 bp, Glycine max
ctttctggaagcttcgttcgggcatcaatgggcgtccttcgatgaagctcctcccggaaactccaagaacggcgagaagatcttcaaaaccaagtgcgctcagtgccacaccgtcgacaaaggtgccggccacaaacaaggacccaatctgaatggtttgtttggaagacaatctggtacaactcctggatattcctattctactgctaacaaaaacatggccgtgatttgggaggaaaagacctctatgattacttgctcaacccaaaa

SEQ ID NO: 289798 - DNA, 250 bp, Glycine max
  unsure (1)..(250): unsure at all n locations
cacagcaacaataacaatggcagcctcactacaagctgcagctaccttcatgcaacccaccaaggtgggcatggccactcgcaacctcaaatctacacaatgcatttctaaggcttttggcttggaacccgctgcagctaaactcatttgctcccttaagcccgatctcaaagattttgctcaaaaatgtgtcgacgccaccaaaattgcaggattcgcccttgccacctcagctctcgttgtttctnga

SEQ ID NO: 289799 - DNA, 255 bp, Glycine max
  unsure (1)..(255): unsure at all n locations
cccactcttcgtttaaaatgtctgacgtggaagagtatcgttgtttcattggtggccttgcgtggtcaacatctgatagaaagttaaaggatacgtttganaagtttggcaagcttattgaggcaaaggtggttgttgacaagttctctgggcgttctcgtggttttggatttgtcacatttgatgacaagaaagcaatggacgaggctattgatgctatgaatgggatggatttagacgggcgaactattactt

SEQ ID NO: 289800 - DNA, 258 bp, Glycine max
  unsure (1)..(258): unsure at all n locations
ttttagagcaagtnttgatttgcagcgcactcatcgtattaaaggaatgattaaaatggtggctacagttggtattcctgagaatacaggtatagcattggcctgtgctatgaatagttcttttagggggcgcgccagttctgatatttacaccatctgctctcaagactgtgaattatggaatcctgcttgcacaaaagcaatggctatgtcatttaatccaaacccgtgttctgatgcatggagtttggaatttct

SEQ ID NO: 289801 - DNA, 266 bp, Glycine max
  unsure (1)..(266): unsure at all n locations
ganaatggctcccaagggtttaacctttctggctgtgttaatatgcgtttcagcactgtcactgagtccttctgttgcgggggaagggcaaaataatggccttgttatgaacttctacaaggaatcatgccctcaggctgaagacatcatcacagaacaagtcaagcttctctacaagcgccacaagaacactgctttctcctgggctcaggaacatcttccatgactgtgctgttcagagttgtgatgttcactgttgctggact

SEQ ID NO: 289802 - DNA, 261 bp, Glycine max
ccgcaccagtttcaccgcacgaatatcttgttgtttggagcgatccgagaaaaactctgtaaacatgttggtttaccaggacctccttacaggtgatgagcttctctctgactccttccgttacaaggaaattgagaatggaatgctgtgggaagttgaggggaagtgggttgttaaaggagcagttgatgtagacattggtgcaaacccttctgctgagggtggaggagaagatgagggagttgatgatgcagctgttaa

SEQ ID NO: 289803 - DNA, 259 bp, Glycine max
  unsure (1)..(259): unsure at all n locations
gtttgttgagatagctagaagcaataagatgaaaatgaaagtgcttgtnttgtttgtngctacagttttggtagcatatgaatgccatggctcagactaccagaagttccctctccaaatgaaaactgggtttggtgggcaatacagcaatgaggtggcatgtgccagttggaggcttggcgtggaagcanacaacgtagtcaagtggcaaactgttcctgcagcttgcggagagtacatagctgactacgttctagga

SEQ ID NO: 289804 - DNA, 256 bp, Glycine max
  unsure (1)..(256): unsure at all n locations
ccctagtcctatggcttcttcaaaccttatgtccaatgtaagtnggacagggttgggtggatggaatagtcttcagcaagagcagagattatgtggagcccctggaatgacaatggactggcaaagtgcacctgcaagtcctagttcgttcactgttaagagaatcttgcgcttggaaattccagtagatacatatcccaatttcaattttgtnggaagacttctggggcctagaggaaattctttgaaacgggtt

SEQ ID NO: 289805 - DNA, 259 bp, Glycine max
  unsure (1)..(259): unsure at all n locations
ccgnaagnnccngaggnnagctgattggtgggatccccctgtgggttcgcaccgccgaccgaccctgatcttacngtgaagggttcgagtgagagcatacctgtcgggacccgaaagatggtgaactatgcctgagcggggcgaacagtaggaaactctggtngaggcccgcagcgatactgacgtgcaaatcgttcgtctgacttgggtataggggcnnnagactanttcgaaccgtctagtagcttgtncncncngg

SEQ ID NO: 289806 - DNA, 256 bp, Glycine max
  unsure (1)..(256): unsure at all n locations
caggctttgagcttttccgtataaaagaacgggntataccaattgangttttggagcttgagaataagaatgataagatcattgcgtttgcntggnagccaaagggtcacagatttgcagttattcatggtgataaccctaagcctgatgttagcatttattccatgcgtactngtcagaacagccgagtttcaaaactcattactctgaagggcaagcaagcaaatgctctgttttggtcacctgccggtcgcta

SEQ ID NO: 289807 - DNA, 256 bp, Glycine max
cggacgcaaagcaaaatgctcctgtatcccttcctatggaaaccttcaagagttatgttctcaaggagcccatcggagttgttgcattaattactccatggaactatcctctattgatggctacatggaaagttgctcctgctctagctgctggttgtacagcaatattgaagccatctgaattggcatctgtgacctgtttggagctggctgaaatatgcagagaagttggccttcctccaggggtattaaacat

SEQ ID NO: 289808 - DNA, 258 bp, Glycine max
cgctagctttgctgtttgttccatccagcacattcagttctgcttgaatcactttgctgcaaatgtgtatgttgggctaccgagtgggaatgactggtttgaaaagcagacaagtgggacattggatatctcttgctcctcttcgatggattggttcttcggtggcttgcagtttcagcttgagcatcatttgtttccaaggctacctcggtgccaattgaggaacatttcgcctttggtcagtgacctttgcaagaa

SEQ ID NO: 289809 - DNA, 269 bp, Glycine max
cggacgccgcccagagaatgtgaaggcggcacaagatgcacttcttttccgtgccaagtccaactcgctcgcccagcttgggaagtacaccggtgagggtgaatctgaggaagccaagaaggagttgttcgtcaaaggctactcctactaagatgtttgtagtgaatatgatacatgttaggcagcagcaacaccagcagttgtagtaggtgttgacggaggatgaagtggaagaagactaatttgtctaaaatgtaatgtttttatag

SEQ ID NO: 289810 - DNA, 268 bp, Glycine max
  unsure (1)..(268): unsure at all n locations
ctctacaaaagcacaattngttagtggaaaaaccttcaaatatganataattggngctggttcacattcttcagaagattttcctgnaaaggaagatcangaaaaacccaaaaagattgatgccagattgagacaaagaatagatcctcaatacaatgaggttcaggctcagatggaaacaaatttgtttaaattgtctcttgatgatgttgaaactcctaaaggttccatgttgggatcttaaaattctcaatctaaaattgcnctt

SEQ ID NO: 289811 - DNA, 256 bp, Glycine max
  unsure (1)..(256): unsure at all n locations
tctgcaacaaaggtaactttccctcttgtgtggacaaacacctgttgtagccatcctctgtaccgtgaatctgagcttattgatgagaatgcccttggagtaagaaacgcagctcagaggaagcttttggatgagcttggtattgttgccgaagatgtaccagttgataagttcacccccttgggtcgcattctttacaaggcaccttctgatggcaaatggggttnacatnaacntnacgancnntnananacag

SEQ ID NO: 289812 - DNA, 255 bp, Glycine max
  unsure (1)..(255): unsure at all n locations
cggaggattgtnccttctctcgagacgatccggagggatgggaggtcctggtggccctggatttcctcttgcttttggtcnatccaaagccaagtttcaaatggaaccaaacaccggagtgacatttgatgatgttgctggggtggatgaagccaagcaggactttatggaggtggtggagtttttaaagaagcctgagaggtttactgctgttggggctcgcattcctaaaggagttcttcttgttggtcctcc

SEQ ID NO: 289813 - DNA, 253 bp, Glycine max
acacaagaacactctcttgaacattcatggatccagtgagcgtgtggggtaacacgcccttggcgacggtggatcccgagatccatgacctcatcgagaaggagaagcaccgccaatgccgcggcatcgagctcatcgcctccgagaacttcacctccttcgcagtcatcgaggccctcggcagcgccctcaccaacaaatactccgagggcatgcccggcaaccgctactacggcggcaacgaattcatcga

SEQ ID NO: 289814 - DNA, 255 bp, Glycine max
  unsure (1)..(255): unsure at all n locations
cctaaagcaagtccccagctcaactctctagttgttgttgctgcatttttcattttctaggcttagtcattagatagaaagagaaggaaaaaaaggctattatggcaggaggaggagctccagctaaagcagatganccacagccacatccaccaaaggatcagttaccaaatatttcttactgtatnactagtcctcctccatggcctgaggccatacttcttggttttcancattttcttgtgatgcttggca

SEQ ID NO: 289815 - DNA, 256 bp, Glycine max
ggagtcaagggtccctgaaattttaaatttgatggagccactctcctataaaaaaatggacttcgaagagttttgcgctgctgcaatcagtgtatatcagcttgaagttcatcaagaatgggatagaatcgctaccacagcttttgagtattttgaggaaacaggaaaccgggtcatttcagttgaggagttggctcaggagatgaatttggttccatcagcctactctttaatgggtgattggatcagaaaatct

SEQ ID NO: 289816 - DNA, 270 bp, Glycine max
  unsure (1)..(270): unsure at all n locations
ttctttcaatgtggagatattttgttggagatctcgtctttgaagtttctaagatgacttctccctacattaaatgtacagtctctttcttcatagcatttggaaatttggctgatgacaccatcaattttgaggcctttccccacaagctggtgcantttggagaaattcaagaaaaagttgtattgaaattttcacaagaggattncttacagcntggtcaactcaggtggcgtcctgcnacaactctggtggctgatgggtgcccat

SEQ ID NO: 289817 - DNA, 261 bp, Glycine max
  unsure (1)..(261): unsure at all n locations
cttctagtatttttcaagtaacttaaggtttcaaacctaggaagtnggaagtcatggcagcaacattgatggcagcaacaagttctggcactcttaaagcaactcctttcctaggccaaggcaagggtgccaatgccaatgctcttagggatgttgtttccatgggaactgggaagtacaccatgggcaatgatttgtggtatggaccagacagagtgaaatacttgggacccttttcagctcagaccccttcatacttgg

SEQ ID NO: 289818 - DNA, 252 bp, Glycine max
  unsure (1)..(252): unsure at all n locations
tcgagataactagaaacagtgtgatgaaaatgaaggtccttgttttcttcgttgctacaattttcgtagcatggcaatgccatgcgtacgatatgttccctctccgaatgaacactggctatggtgcccgtactccggaggtgaaatgcgcaagtnggaggcttgctgtggaagcacacaacanctttggctttgagaccattcctgaagactgcgttgaagcaacaaaggaatacatccatggcgaacaat

SEQ ID NO: 289819 - DNA, 253 bp, Glycine max
  unsure (1)..(253): unsure at all n locations
cacaaggcagaaagcaagctcatcctagagttntaaaaatggcagcagcctcctccatggctctctcttccccatccttggctggcaaggccgtgaagctgggcccatcagcccccgaagtcgggagggtcagcatgaggaagaccgtcaccaagcaggcctcctccggaagcccatggtacggcccagaccgcgtcangtacttgggcccattctctggcgagcccccgtcctacctcactggcgagttccc

SEQ ID NO: 289820 - DNA, 253 bp, Glycine max
  unsure (1)..(253): unsure at all n locations
caaattcctgctgttgacaagttgtattctactaaggttaataagtttgcaaaaattatgaaccttagacaaagtgttgttggtgatcttaaacttcttaccgatgggaagttgtatgagggtaagcatattcctgtatccaatattagtgcaggggaaaatcatgtagttcaaatacccttaatggcacaggaggaaattctgtcttctagtgcaagtnacttcagaactgcaatggtgagtaaaaatagca

SEQ ID NO: 289821 - DNA, 255 bp, Glycine max
attgctagaatggaatttcgatgctcagtcatctcttttaccattctcttctctcttgctcttgcaggagagagccatgtccatgcatcgctacctgaggaagattattgggaagctgtttggccaaacactcccattcccactgcactgcgagagcttctaaagcctctccctgcaggtgtcgaaatcgatgaactccctaagcaaattgatgatacacagtacccaaaaacattcttctataaagaagacctt

SEQ ID NO: 289822 - DNA, 247 bp, Glycine max
  unsure (1)..(247): unsure at all n locations
gcttaactaagcatgtcttcaaaatgagcaagcagtaccttgcaaatgttgctttnaaaattaatgtcaaagttggagggagaaacactgtactggttgatgcgctctcacgacgcattcccttggtcagtgacagacctacaattatttttggagctgatgtgactcatccacatcctggagaggattcaagcccatcaattgcagcagttgtggcttcgcaagactatcctgaaattacaaagta

SEQ ID NO: 289823 - DNA, 257 bp, Glycine max
  unsure (1)..(257): unsure at all n locations
ctagcaagcagagcttttgtcaattttctattgaccttctcggtgnaggaattttagtggacaaaactggagattggatcacacttatacaaaattctccaattagtaacttgcngagagttgctgcttggaagaaaggctgtttaatggtcaagattgtgatgtctgggaatgcagcagtcaaaaggagtgattgggcctcattggtacaagtgtttttaacaaacagcaacagtacagagcattttgatgcatgt

SEQ ID NO: 289824 - DNA, 259 bp, Glycine max
  unsure (1)..(259): unsure at all n locations
cngccacgtggccgatgctttgagtttgtttgancggatgaagagggcgggagacaggccggacggngttacttttgttgggattttgtcggcctgcacgcatatggggttggtgagaaacgggcttttgcatttccaatcgatggttgatgattactccgattgtgcctcagattgagcattatggatgcatggtggatttgttgggaagagctggtcttatagacaaggctgtggatatcgtgaggnagatgcctat

SEQ ID NO: 289825 - DNA, 250 bp, Glycine max
gcgttactggcagtgaatctcccgttgttgttgttctttctggaagcatggaacccggattcaagcggggagacatcttgttcttgcacatgagtaaagatcctattcgggcaggggagattgttgtgtttaatgttgatggacgtgagattccaattgttcatcgtgtaattaaggtacatgaaagggaagatactggggaggttgatgttctcacaaaaggagacaacaattatggggatgacaggct

SEQ ID NO: 289826 - DNA, 252 bp, Glycine max
  unsure (1)..(252): unsure at all n locations
ctctgctcgtgncctctagggttatcatatctccatttccatttcctctctctcagtttccaagaatcttaagctatgggaaagtcttacccaaccgtgagcgctgattaccagaaggccgttgagaaggcgaagaagaagctcagaggcttcatcgctgagaagagatgcgctcctctaatgctccgtttggcatggcactctgctggaacttacgacgtgagctcgaagaccggtggtcccttcggaacc

SEQ ID NO: 289827 - DNA, 232 bp, Glycine max
  unsure (1)..(232): unsure at all n locations
ctgggatatgcttcattgataccatatgttgagccagtngtgcaagnccaaagtgacnaagtttatnttgacttcttccctgtggaggttgatagtcaagagggagttgctcacattggtnaattgaaatctggtgtctatgttccattgcctacaaaaactaatttggtggaaactcccaaggaatggcaactggatctaccttgtgacaaaattcctagtgtcttgacta

SEQ ID NO: 289828 - DNA, 251 bp, Glycine max
  unsure (1)..(251): unsure at all n locations
cctgccagtagtcatatgcttgtctcaaagattaagccatgcatgtgtaagtatgaactaattcagactgtgaaactgcgaatggctcattaaatcagttatagtttgtttgatggtatctactactcggataaccgtagtaattctagagctaatacgtgcaacaaaccccgacttctggaagggntgcatttattagataaaangtcaacacaggctctgcctgttgctttgatgattcatgataactc

SEQ ID NO: 289829 - DNA, 252 bp, Glycine max
ttgggagttaggttctgcacgctctgcttccagcgagtgttctttcttcgtttcaacaccttaatttgcacacgctgcttcttcagcttgagaaatggcacaagaaacctttctattcacatctgaatctgtaaacgagggtcaccccgacaagctgtgcgaccagatctctgatgcagtgctcgatgcgtgccttgaacaggaccctgacagcaaggttgcctgtgagacatgcaccaagaccaacatggt

SEQ ID NO: 289830 - DNA, 260 bp, Glycine max
  unsure (1)..(260): unsure at all n locations
cttcgatttggtctccatggagtcaagagcgacatcgttggttcccnccctcttcaatcttcactccaatctacaaggagaatggatgaagcgatgaagaagcaatgcaaagttaacctgtacggaactgcttttcccctgaaggaggagcttgacaggcaaatcctgtctaggttccagcggcctcctggaccaattccatcttcaatgctgggcttggagactgttacaggaagtgttgatcactttggttttgagga

SEQ ID NO: 289831 - DNA, 255 bp, Glycine max
  unsure (1)..(255): unsure at all n locations
gaaaccctagctggataggtcaaacatcatcatgtcggacgaagagcaccatttcgagtccaaggcagacgccggtgcctccaaaacctaccctcagcaagccggtaccattcgcaagancggctacatcgtcatcaaaggacgcccctgcaaggttgtggaagtntcgacttccaaaactggnaagcncggtcacgccaagtnccactttnttggnattgatattttcactgccaaganacttgaggatattgt

SEQ ID NO: 289832 - DNA, 251 bp, Glycine max
cgaagagttgaacatgttgatcattctcgcaaatcggctgaacaggctgtgaaggccatcaaggcagctgaggaaggaaaaacagttgaggagtatgattaccttccatacttctattcccgttcattcgatctgtcttggcaattctatggcgacaatgtcggcgacacagtgctattcggagacaacaatcctgcgtcttcaaagccaaagtttgggacatactggattaaagacgggaaagttgtcgg

SEQ ID NO: 289833 - DNA, 251 bp, Glycine max
  unsure (1)..(251): unsure at all n locations
ctgtggttganagtnaagaagtagcaaacatgtttccattccgggcacaagggccaaaagataaaggggactatggtggttatgcagaagaatgtgttggatatcaacagcatcaccagtnttgacgggatcgtcggcaccggcttagacttcttaggcagtgcactcgatacagttacttttttagcctcctccatctccatccaacttattagtgctaccaaggctgatggtgggaaaggaaaagttgg

SEQ ID NO: 289834 - DNA, 187 bp, Glycine max
  unsure (1)..(187): unsure at all n locations
tgattgaagaagatgccgatcagaaacatcgccatcggaaggcctgaagaggctactcaccccgacacgttgaaggcggggttggctgagttcatctccaccttnatcttcgtgttcgccggttcaggttccggcatcgcctacaacaagctcaccgacaacggcgccgccactcccgccggcctca

SEQ ID NO: 289835 - DNA, 251 bp, Glycine max
  unsure (1)..(251): unsure at all n locations
attaatgtgtgttctgcacaggagaggttagaatacttgtngagtattggtgttaaacaaagagatgtaagangaatccttttgaggcaaccacaaattcttgagtatacagtggagaacaatttgaagtctcatgttgctttcttgaggggcctgggcataccnaattctagaatagggcaaatcattgctgctgcaccatccttgtnttcttatagtgttgagaattcgttaaaacctacagttagtta

SEQ ID NO: 289836 - DNA, 307 bp, Glycine max
  unsure (1)..(307): unsure at all n locations
aataatcgagacacaaagatcatagtgatcattttttaatttctcagatttatccgacgtccttgcagatccaccaaccgttatggctgccttcagcggtgatgaaacggcaccgtttttcggcttccttggcgccgcagctgccctcgtcttctcctgtatgggagctgcctatggcacagcgaagagtggcgtgggcgtggcttccatgggtgtaatgagacctgagctggtgatgaagtcgattgttcctgttgtcatggctggagttttgggtatttatggccttattattgctgtnattatc

SEQ ID NO: 289837 - DNA, 297 bp, Glycine max
  unsure (1)..(297): unsure at all n locations
catgttcaagcttttggttagtagagcngctagggtttcaactccacacaaccacaatgcccttgcttctttcgctttctctaggtatgctcattcattaccatttgcaactgtagaagcagaagagatatcaggctctagggctgctgangttttgaacctggtgcaaggtaaatgggtaggatcttcaaattggaatacagttgtagatcctttaaatggagactcatttattaaagttgctgaagttgatgaaacaggcattcagccctttgtagaaancttgtccagctgtcc

SEQ ID NO: 289838 - DNA, 287 bp, Glycine max
  unsure (1)..(287): unsure at all n locations
tttctgtctctgtgtttgcngctgaggattccgaacgagcgaccttcttcgtttctcgcaaancttaagtcatcatnggtaaggaaaagactcacatcaacattgtcgtcattggacatgtcgactctgggaagtcaactaccactggtcatttgatctacaagcttggaggtattgacaagcgtgtgattganaggttcgagaaggaggctgctgagatgaacaagaggtcattccagtatgcctgggtgcttgacaagctcaaggctgagcgcgaaanaggatta

SEQ ID NO: 289839 - DNA, 285 bp, Glycine max
cgttgacaaccataaacaatatgtgtgcatatgggctcaatcctggtatttcaggttctcgtcttttgggcaccattcctcagtccatttcacagcaaactgtttggaatcaaatggcaacagtgagaacaccattgaattttgattctagcaagcagagcttttgtcaattttctattgaccttctcggtggaggaattttagtggacaaaactggagattggatcacacttatacaaaattctccaattagtaacttgttgagagttgctgcttggaagaaag

SEQ ID NO: 289840 - DNA, 288 bp, Glycine max
  unsure (1)..(288): unsure at all n locations
atcaagnnacantccaactccattgntggaatctggtttgcaaaaagacangagggntaattgtggagtattttggaaggatgtcttacgttgctcanaacnttaatcagcncncaagagaaagatttgttagagggaaatttntcctttgatattaaatctcgctctagattggnaaaagtttcctctacaaaagcacaanttgttagtggaaaaaccttcaaatatgatatnattggtgctggttcacattcttcagaagattttcctgaaaaggaagatcaagaa

SEQ ID NO: 289841 - DNA, 287 bp, Glycine max
gatgaatcaagaacatcacggtgtgatcagtttcttgacatttttgctagtgaagggtgccgaatggttgaaatgtcatgtgctgaacatgattggcatgcagctggatcacaatttatcacgcatactaccggaagatttttagaaaaactggagttggagggaacgccaattgacacaaagggctatgagactttgttgagtttggtggaaaatactgctggagatagttttgatctatactatggtttgttcttgtataatataaatgccatggagcaactaga

SEQ ID NO: 289842 - DNA, 303 bp, Glycine max
  unsure (1)..(303): unsure at all n locations
ggtaancctnttgacaganggcnattttagagnaagtgttgatttncagcgcactcatcgtattaaaggnatgattaanatggtggctacagttggtattcctgagaatacaggtatagcattggcctgtgctatgaatagttcttttagggggcgcgccagttctgatatttacaccatctgctctcaagactgtgaattatggaatcctgcttgcacaaaagcaatggctatgtcatttaatccaaacccgtgttctgatgcatggagtttggaatttctgaagcgtaccggatttcattg

SEQ ID NO: 289843 - DNA, 290 bp, Glycine max
  unsure (1)..(290): unsure at all n locations
ctgatttatgaatacatggnaaacaatagtcttgctcatgctttanttgccaaaaatgatgaatctgaganatgtcaattganattngattggcaaacnaggcataggatttgtnttggtatcgctaaangtttggcttaccttcatgnngagtccaaactgaagattgttcatagggacatcaaggccaataatgtgttgcnggatcaagatctcaaccccaagatatctgattttggatggcaaagcttaatgatgagggccaaacccattgagcaccagatagntgg

SEQ ID NO: 289844 - DNA, 291 bp, Glycine max
  unsure (1)..(291): unsure at all n locations
ctttaccagttgccacactacannganncaacnccctaaacccgtttgcnttgttgtttgcgaagaaatggcgacncagaggagcntgggaacgttgaaggagggtgatttgaaagggaagagggtgttcgtgagggtcgatctgnacgtgcctttggatgacaaccttaacatcaccgatgacactagagtccgtgctgctgttcccaccatcaagtacttaactggtcatggagccaaagtggatcctttctagccacttggtatgttctttataaaccattttatttt

SEQ ID NO: 289845 - DNA, 282 bp, Glycine max
ggatttccatggaagtctcaaaagaagaagctcgagtggcacccgcaccggccctagtggcgatgctgccatcccctggcatgggccacctaatcccaatgatcgagttcgcaaagcgagtggtgtgctaccataacctggcggtgagcttcgtgatccccactgacggcccaccttcaaaagcccaaaaggcagttctggaggcccttccggactcaatttcccacaccttcctccctccggtcaatctctccgacttcccgccggacaccaaaatcgaaa

SEQ ID NO: 289846 - DNA, 285 bp, Glycine max
  unsure (1)..(285): unsure at all n locations
cgacgaagatgcattagtaagancactcgacagtggaatcnttgctcaggctgctcttgatgtcttcaccgaggagcccccttccaaagacagtnagtnantgcaacacgagantgtcaccgttacccctcatcttggagctagcaccaaagaggcacaggagggtgtagctattgaaatagcagaggctgtgcttggngcattgaagggggaactttcagccactgctgtcaatgctcctatggttgctcctgaggtgttgtcagaattggccccatatgtggt

SEQ ID NO: 289847 - DNA, 301 bp, Glycine max
gcaataatgtacatggtggctcagtgcttgggagccatatgtggagttgggttggttaaggccttccaaaaggcttactacaacaggtatggtggtggggccaatgagctcagtgaagggtacagcacgggtgttggattgggtgctgagatcattggaacctttgttttggtctacactgtgttctctgcaactgaccccaagaggaatgctagagattctcatgtgccggttttggctccacttccaattggctttgctgtgttcatggttcacttggcaaccatcccagtaacaggca

SEQ ID NO: 289848 - DNA, 300 bp, Glycine max
  unsure (1)..(300): unsure at all n locations
gnaacaagctcacnggctcaattccggcctcattnggatccttcnaaaagcccgggccggctattatggctctctannaaccagctttcagggcgccttcctgcttctttggccaacttagactcggacaggatagacttgtcaaggaacaagctcgaaggcgatgcctccatgcttttcgggagcnataaaaggacgtggtctctttacctttcaaggaacaatttcgcgtttgatctatctcgcgtggagattccccacaagaccctggcaaggttggatctcaaccacaataagatt

SEQ ID NO: 289849 - DNA, 296 bp, Glycine max
  unsure (1)..(296): unsure at all n locations
cnaacaaatgataagggatgattccaatcttggttgctacatttgtgcctagcacaatgatggctcagataaataccctttttgtgaagcaaggtactactctagacagacaccttggaagcttcaaaattcccccagcaagtttggctgcctttgttaccgtgtccttgcttgtgtgcattgtgctctatgaccgtttctttgtgaagatcatgcaaaggtttaccaagaacccaagaggcattacccttcttcagaggatgggaatggccttgtaatccacacattgatcatgg

SEQ ID NO: 289850 - DNA, 291 bp, Glycine max
cggagtagcggcattaaaaatgcagatcttcgtgaaaactctgacagggaagactataaccctcgaggtcgagagcagcgacaccatcgacaatgtcaaggccaagattcaagacaaggaaggcattccctccggatcagcagcgtttgattttcgccggaaagcagcttgaagatggaaggaccctggccgattacaacatccagaaggaatcaacccttcatctcgtcctcaggcttcgtggtggcatcattgagccttccctcatggcttggctcgcaaatacaaacc

SEQ ID NO: 289851 - DNA, 280 bp, Glycine max
  unsure (1)..(280): unsure at all n locations
gggtggtgaggaaaccaaagatatccttctcttggatgtggctcccctcacccttggaattgaaactgttggtggggtgatgacgaagttgattcccagaaatactgttatccctacnaagaaatcccaggtgtttaccacctaccaggatcagcagagtaccgtctccattcaggtttttgaaggggagaggagtctcacaaaggattgccgtctgcttgggaaatttgaactgtctggaattcctccagctccaaggggtacccctcaaattgaagtg

SEQ ID NO: 289852 - DNA, 280 bp, Glycine max
  unsure (1)..(280): unsure at all n locations
tctccatacatcaacttgggaggttaaagagacggcaacgttgtgctgtccgccttgaccgagccagagcttcgtcttggccctcgattttgccctgtaaaactaatcccagtcacaacagaaataatcaatggcaccgaaacagaccaaggctgagaagaagatcgcttacgatgcgaantgcattgcttgccaagctaggcataaggcccttctcatatgggcttgtggttctctctgtttatgataatggttcagtgttcagccctgaggttcttga

SEQ ID NO: 289853 - DNA, 203 bp, Glycine max
  unsure (1)..(203): unsure at all n locations
caccacatgatcatgatcatatgatcaatccccttaattttntctnctttncttttcccttttctttactctgtattgtatcaatgcttgaaaatgnggttgttccaaaaatgtcatatatatttggcctgctaatgggtattgtaaanctctgaacttgaagtgatgcacggttttgagatggttttctaataaacctaccc

SEQ ID NO: 289854 - DNA, 288 bp, Glycine max
  unsure (1)..(288): unsure at all n locations
cnatcatcacacacacatacncaagccgcaacaattcttctacaatggatctcctccttctggaaaagaccctcataggtctcttcctcgctgcggtggtcgccatcgccgtctccaccctccgcggccggaaattcaagctcccaccgggcccactccccgtcccaatcttcggcaactggctccaagtcggcgacgacctcaaccancgcaacctcaccgatttgggccaaaaaattcggtgacatcttcctcctccgcatggggcagcggcaactcgtcgtggtt

SEQ ID NO: 289855 - DNA, 281 bp, Glycine max
  unsure (1)..(281): unsure at all n locations
cttttgatgacatggttcagaaatgcaagggntgtgggtgcaacccttgtcatttgccaatggggttttgacgatgaagcaaatcatctcttaatgcacaggaacttgccagctgttagatgggttggtggtgtagagtnggaattgatagctatagcaactggtggaagaattgttcctaggttncaggagttatctccagaaaagttgggaaaggctggtatggttcgagaaaagtcctttggtacaacaaaagaccgaatgctgtacattgaacattg

SEQ ID NO: 289856 - DNA, 288 bp, Glycine max
  unsure (1)..(288): unsure at all n locations
atttcagtgagtgatcggtgttcacttgatctcatcataatcgtcagcntcaattgaagaagatgccgatcagaaacatcgccgtcggaaggcctgaagaggcgactcaccccgacacgttgaaggcggctttggctgagttcatctcaaccttcatcttcgtgttcgccggctcaggctccggcatcgcctacaacaagcttcaccgacaacggcgctgccaaccctgccgggctcancttcggcttcatcgccatgcattcggcctttcgtnggcgtctcgtcggg

SEQ ID NO: 289857 - DNA, 282 bp, Glycine max
  unsure (1)..(282): unsure at all n locations
ccactgtaagangcttgctcccnagtatgaganagctgcttctatcttgagtagtcatgatcctccggttgtnttggctaaaattgatgccaatgaggagaagaacaaagaccttgcatctcaatatgatgttaggggatacccaacaattaagattctgagaaatgggggaaagaatgttcaggaatacaaaggtccccgtgaagcagatggcatcgttgactatttgaagaaacaaagtggtctgctttcaatgaaattnaatctgctgatgaagctatg

SEQ ID NO: 289858 - DNA, 253 bp, Glycine max
  unsure (1)..(253): unsure at all n locations
aaggcctttttattccaaagcaaggaaggaaganataaaccgaatgagagcattaacctcttcttcttccactttcattccaaagcgttatnnnnnnnnnnnnnnnnnnnnnnntctcttcgctcttcgatcctcgtccgggggctgctnccgaataccaccaccaccacgcgccgatggccacgataggnggcttacgcgactcccaaggctctcagaacagcgtccaaaccgaggccctcgctcgattcgc

SEQ ID NO: 289859 - DNA, 273 bp, Glycine max
  unsure (1)..(273): unsure at all n locations
canaggcgcagagcgtgatncattgacgaagatggtgcagcgtctcacctaccgcaagangcacagctatgccaccaaatccaaccaacacanggtcgtcaaaacccctggtgggaagctcgtttatcagaccaccaagaaganggccagcnggcccaagtggcccgtcactggcaagaggattcaggggatnccacacttgaggcctgcagagtacaagagatcaggttacccagaaaccgtagactgtcaancgtgcatatngcggatttt

SEQ ID NO: 289860 - DNA, 269 bp, Glycine max
  unsure (1)..(269): unsure at all n locations
ananacagtgtgatgaaaatgaaggtccttgttttcttcgttgctacaattttngtaccatggcaatgccatgcgtacgatatgttccctctccgaatgaacactggctatggtgcccgtactccggaggtgaaatgcgcaagttggaggcttgctgtggaagcacacaacntctttggctttgagaccattcctgaagnntgcgttgaagcaacaaaggaatacatccatggcgaacaatatagatcagactccaaaacagttaacca

SEQ ID NO: 289861 - DNA, 284 bp, Glycine max
  unsure (1)..(284): unsure at all n locations
tgagaacaccattgcnttttgattctagcaagcagagcttttgtcaattntctattgaccttctcggtggaggaattttagtggacaaaactggagattggatcacacttatacaaaattctccaattagtaacttgntgagagttgctgcttggaagaaaggctgtttaatggtcaagattgngatgtctgggaatgcagcagtcaaaaggagtgattgggcctcattggtacaagtgnttttaacaaacagcaacagtacagagcatttgatgcatgtaagt

SEQ ID NO: 289862 - DNA, 285 bp, Glycine max
  unsure (1)..(285): unsure at all n locations
acgagggngcaccctgacangctctgtgaccagatctccnatgctgtgctcgatgcatgcttggagcaggaccctgacagcaaggttgcctgtgaaacctgcaccaagaccaacatggtgatggttttcggagagatcacaaccaaggccaacgtggactatgagaagattgtgcgtgacacatgcaggaacattggtcttgtctctnatgatgttggtcttgatgctgacaactgcaagtcctcgtcaacantgagcnacagagtcctgatattnntccaggng

SEQ ID NO: 289863 - DNA, 280 bp, Glycine max
  unsure (1)..(280): unsure at all n locations
cattactgccgatcattgaggtttgatgataagccagattatgcgtacctcaaaaggatatttcgtgacctgtttattcgtgaaggattccagtttgattatgtctttgactggaccattttgaagtatcagcnatcacagctanccactcctccaacacgggccattggtcctagtgctggaaccagttctggaatgccccccgctgttactaatgctnataggcatacaggaggggnagaaggtagacctcctgctttggtttcagcggattcctcga

SEQ ID NO: 289864 - DNA, 280 bp, Glycine max
  unsure (1)..(280): unsure at all n locations
tctattcattcaagattcagcaagtgcgttttggaagcagagaccgaaatacttcgagatggcccgtacaaagcaaactgctcgtaagtcaactggaggaaaagctcccaggaagcagcttgcaaccaaggctgcacgtaagtctgcaccaacaactggtggtgtgaagaagcctcatcgttatcgccctggaactgttgctcttcgtgagattaggaaataccagaagagcactgagctcctaatcaggaagcttcctttccagaggttggttcntgac

SEQ ID NO: 289865 - DNA, 151 bp, Glycine max
  unsure (1)..(151): unsure at all n locations
ctcctatctatctatatgtaataagatgcgttcaaataggggcactagcttcactttatgttgtttcagctgtgtgtcaacaagtcatgtaaganacttcnctatgtngtnttctctttcgtggctttaataaattatgcgcccttgttcc

SEQ ID NO: 289866 - DNA, 280 bp, Glycine max
  unsure (1)..(280): unsure at all n locations
cgnagcaacaaaggaatacatccatgggcgaacaatatagatcagactccaaaacagttaaccaacaagcttacttttatgccaganacctcgaagtccatcccancgacacatttgtgttcagtatagatggcaccgtactctctaatattccatactacaaaanacatggatatggggtggagaaatttaactcgaccttgtatgatgaatgggttaacaagggcaatgcaccggcatgcccgagactcttaagaattacaacaagctggtgtctctt

SEQ ID NO: 289867 - DNA, 298 bp, Glycine max
  unsure (1)..(298): unsure at all n locations
cagcgcgtaacgattgtctggaactggtgcgcgagtgcccagccaagatcgaatccatccgaatcctacggttcgaagcttctcgtgggntgctccgatggatcgctccgaatattcgcgccggaaacggaatcttcctccgacggntccaagtcctacgccttggagaagaacctcgccgggttcgagaanaagcccgtgctctcaatgacggtggnggagtcncgagacttcctcatctcgatctctgaatccatcgcgttccacacaacatangagnnaaanannttaccgnccc

SEQ ID NO: 289868 - DNA, 291 bp, Glycine max
atctgctctcaagactgtgaattatggaatcctgcttgcacaaaagcaatggctatgtcatttaatccaaacccgtgttctgatgcatggagtttggaatttctgaagcgtaccggatttcattgtgatatcatttgtgtcactggatggactgccaccccaatgcaggatgttcaggttacaattgattggtttatttcctctcaggaatgtgttcccagaacctattgtgttttaaatccacaaaatccttttgtgttaaataggtggatgggaaaactgactttcccc

SEQ ID NO: 289869 - DNA, 288 bp, Glycine max
  unsure (1)..(288): unsure at all n locations
gaaagatgtttggagagttgaatgtggaatcccttctggatttccgctcacagttatttgcaatagcatttttaatgagatgctcattagatatagctatgaaaaattactgcgccaggctaaagctccaagtatgtttttacaatccttcaaaaattttgtntctttgtgtgtgtatggtgatgataacttaattagtgttcatgaatatgtcaagccttactttantggttctaaattgaaaagctttctagctggtcataatatcaccattactgatggtattga

SEQ ID NO: 289870 - DNA, 287 bp, Glycine max
  unsure (1)..(287): unsure at all n locations
cagcaatgcagatttctttgcgaaatgctctgggaatgatnaataataggactactgatggtcctatggatgatttaacaatcatgaaggaaacacttagagtgaaggatgaggagctacagaatttgtctcgagaccttcgggcacgtgattcaactataaaanatatagcagataaactctctgagactgctgaagctgctgaggctgcagcatctgctgcatatactatggatgagcatcggagaattgcttgtgcagaaattgagcgtttgaataatgattct

SEQ ID NO: 289871 - DNA, 288 bp, Glycine max
  unsure (1)..(288): unsure at all n locations
ctcttgatgatgttgaaactcctaaaggttccatgttggatcttaaaatttctcaatctaaaattgcacttcccaagaacacagttggaggaaccattctgcgtagtgatctattggcaaattttttgacagagggcaattttagagcaagtgttgatttgcagcgcactcatcgtattaaaggaatgattaanatggtggctacagttggtattcctgagaatacaggtatagcattggcctgtgctatgaatagttcttttagggggcgcgccagttctgatattt

SEQ ID NO: 289872 - DNA, 292 bp, Glycine max
  unsure (1)..(292): unsure at all n locations
gcggatgttgacgcaatgtgatttctgcccagtgctctgaatgtcaaagtgaagaaattcaaccaagcgcgggtaaanggngggagtaactatgactgccttaaggtagccaaatgcctcgtcatctaattagtgacgcgcatgaatggattaacgagattcccactgtccctgtctactatccagcgaaaccacagccaagggaangggcttggnggaatcagcggggaaagaagaccctgttgagcttgactctagtccgactttgtgaaatgacttgagaggtgtagga

SEQ ID NO: 289873 - DNA, 295 bp, Glycine max
  unsure (1)..(295): unsure at all n locations
aaaggtttgacttttgacagtggtggctacaacatcaagactggacctggctgttcaattgagctcatgaaatttgatatgggtggttcagcagcagttttaggaacagcaaaagctctcggtcaaatcaaacctcttggggtggaggttcattttatagttgcagcttgtgagaatatgataagtggaacaggtatgaggcctggagatattgtcacagcttcaaatggaaagactatanaggttaacaacactgatgctgaaggtagacttaccctggcagatgctctggtat

SEQ ID NO: 289874 - DNA, 288 bp, Glycine max
  unsure (1)..(288): unsure at all n locations
cagcttttgagtaccactaccaatggtgattttnttcaaggaaaagatctcgcgatggttaaagttaatgtagcatgtgctgctgttggcttgacatcaagttacactccaactccattgttggaatctggtttgcaaaaagacagagggttaattgtggagtattttggaaggatgtcttacgttgctcataacgttaatcagccccaagagaaagatttgttagagggaaatttttcctttgatattaaatctcgctctagattggaaaaagtttcctctacnaaa

SEQ ID NO: 289875 - DNA, 288 bp, Glycine max
  unsure (1)..(288): unsure at all n locations
gcggcaacagaggagagaagatgaagttcaatccacgagtgtcgagcagccgccgcaagagccgaaaggtcacttcacggcgccgtcgagcgtgcggagggtgctgatgagcgcccctctgtcggnggagttccggtcgaagtacaacgtgcggtcgatcccagtccgcaaggaggacgaggtgcaggtggtgcgcggaacatacaagggtcgcgaggggaaggtgacgcaggtgtaccgtcgcaagtgggtcatccacatcgagcgcataacccgcganaaggtgaa

SEQ ID NO: 289876 - DNA, 296 bp, Glycine max
  unsure (1)..(296): unsure at all n locations
cccaattcaaaactctcactccgttagaagcaccaaatcctgatggcaccaaaggcagagaagaagccagcggagaagaagcccgcagaggagaagaagtccacggtgggagacaaggctccggcggagaagaagccaaaggccggaaagaagcttccgaaggagggaggcgccggcggcgaaggnnnnnnnnnnnnnnnnnnnnnnnnnagcgtggagacatacaagatctacatcttcaaggttctgaagcaggttcaccctgacattggtatctcaagcaaggncatgggaat

SEQ ID NO: 289877 - DNA, 292 bp, Glycine max
  unsure (1)..(292): unsure at all n locations
tccttctcgctctttcagctttgacttttgttggaaactaaggcctaatcaaaatggtgaagttcacagctgaagagctacgtcgtattatggactataagcataatatccgtaatatgtctgtcattgctcatgttgatcacggaaaatcaaccctcactgattctcttgtggctgntgctggtattattgctcaagaagttgccggtgatgtccgtatgactgatacccgtgcagatgaagctgagcgtggtattaccatcaagtctacaggtatctcactctactatga

SEQ ID NO: 289878 - DNA, 290 bp, Glycine max
  unsure (1)..(290): unsure at all n locations
ccactacggattgttataggaagactanaatattcattgagacttttcttccaaagatggggatcacgaccactgtaattgatccagcagatgttggagccttggaatctgcattggagcagcacaatgtgtctctattcttcactgagtctcctaccaatccattcctgagatgtgttgatattaagctggtttcagagctttgccacaagaaggggatttgctctgtattgatggtacatttgcaactccatgaaccagaaggncttgccttggcgtgatccgatttg

SEQ ID NO: 289879 - DNA, 292 bp, Glycine max
  unsure (1)..(292): unsure at all n locations
ggnaaaaagaggattggagggtcgccacgtttagcaacaaccaaaccctctctactctttcttcttctcttcgctagggttttagcttcttcctcttcacttcgttcttctggcctctacaatgagcaacgacaaggacaccttcaacgtcgctgatctcacttccgctctcaacgaggacaatagagcagaccttgtcaatgctctcaagagcaagatacagagtttggctggacagnattctgatattctagagtctctgtcgcccaatgtcaggaagcgtgtggaggtt

SEQ ID NO: 289880 - DNA, 289 bp, Glycine max
gcagcattcactgaaagcactcagtagggtttgcggtttcagagtttgtgacgcacgcatccatggccaccaccaccaacgccgccgcagccccgccgcgccagcttctcccagaaggaagccgacatccagatgatgttagccgccgacgtccaccttcggcaccaaaaactgcgacttccaaatggaacgttacatcttcaagcgccgcaacgacgggatttacattattaaccttgggaagacatgggagaagcttcagttagcagctagggttattgttgcaatt

SEQ ID NO: 289881 - DNA, 293 bp, Glycine max
gttaaaacactgcatatcagttctcctatcctggctgctaagagtcctttcttctataagcttttctccaaatgggatgaaggagtctgagcaaagacatgtcaccctcagaattaatgcctctgaagaggtttctctcatggagctactgaattttatgtacagtaataccttgaccactactacggcacctgcattgctggatgtgttgatggctgctgataaatttgaagttgcttcatgcatgagatattgtagccgattattgcggaatatgcctatgacactgactc

SEQ ID NO: 289882 - DNA, 287 bp, Glycine max
  unsure (1)..(287): unsure at all n locations
tgtccttccaccacacaattcaatnccatttatcaactcactcatcaatctccgtttgttctcactaactattacttcatcatgtcgtcgagcacagttggtcaagtcatcaaatgcaaagctgcggtttcatgggaggcagggaagccacttgtgattgaagaagtagaggtggcaccaccacaagctggtgaagtgcgtttgaagatcctctacacctctctttgccacactgatgtttacttctgggaagccaagggccaaactccattgtttcctcgtatatt

SEQ ID NO: 289883 - DNA, 285 bp, Glycine max
  unsure (1)..(285): unsure at all n locations
gttcgtggggtcgcacctggtggatcggttgattgcgagaggggacagcgtgatcgtggtggacaatttcttcacgggaagaaaaganaacgtgatgcaccattttgggaaccctagattcgagctcatccgacacgacgtcgttgagcctctcctgctcgaggttgatcagatctaccatctggcttgccctgcttcccctgtccactacaagttcaaccccgtcaagactatcaagacgaatgtggtggggaccttgaacatgctggggcttgcaaagagagt

SEQ ID NO: 289884 - DNA, 289 bp, Glycine max
  unsure (1)..(289): unsure at all n locations
ataacacaaagcacaaagcanagctcatccttgagttaaaaaatggcagcagcttcttccatggctctctcatccccatnccttggctggcaaggccgtgaagctnggcccatcagccccagaagtgggaagggtgagcatgaggaagaccgtcaccaagcaggtctcctcaggaagcccatggtacggcccagaccgagtcaagtacttgggcccattctctggcgagcccccgtcctacctaaccggtgagttcccaggcgactacggctgggacactgntgggctt

SEQ ID NO: 289885 - DNA, 285 bp, Glycine max
tctaacctacctctttttcttctctctcaacaacttcaccttcttcctcctcgatcatgtctcacttcaagggcaagtaccatgatgagcttatcgccaatgctgcgtacattggcactcctggaaagggtattcttgctgctgatgagtcaacagggacaattggcaagcgtttggccagcatcagtgtagagaacattgaatccaacaggcgagctcttagggagctgcttttcactgctcctggtgttcttcaatatctcagtggtgtcatcctctttgagg

SEQ ID NO: 289886 - DNA, 286 bp, Glycine max
  unsure (1)..(286): unsure at all n locations
ctganaaattgtttccatgctgactacaagcttgcaatagtgaaantagctttagggcttggggtgctatgcctctgcagctacattcacccttccattatatgctcttgttactcagatgggctcgagaatgaaaaaatcaatatttgacgaacaaacgtcgaaggcgttgaagaaatggcacatggctgtgaaaaagaagcaaggagtgaaattggaaattccagggtgcgagccctggatggaagctccactgcttcaacaatacactcttctggtcccacat

SEQ ID NO: 289887 - DNA, 291 bp, Glycine max
  unsure (1)..(291): unsure at all n locations
cgtttctggctttgngggttgagcaatggccggaaaacaggtcggcgagggtttaccggcgaacctcgctggaatgtcaaagaatcagctctacgatatcntgtctcagatgaagaatctgatcgaacagaaccagcaacaggccaggcagatcctcatccaaaatcctatgttaaccaaagcgcttttccaggcacaaattatgcttggaatggtgcaagcaccttcaagtggttccaaaagttcagccaatggtttcacagaacaatcagcagccagtacaaccaacac

SEQ ID NO: 289888 - DNA, 288 bp, Glycine max
  unsure (1)..(288): unsure at all n locations
ttaaancgcnaatggcagacncaagagaanagcagaaggcaaaccatatgataagcccaacatagtaactggggctaatgtgcaggnttgttgggaaaaatttgcaaggtactttgaggtagagctcaaggaagtgaaactcaaagaaggatactatgngatggaccctgcgaaagcagttganatggtagatgagnaacacncanctgtgntgcagccattcnccgggtcaaactatgaccggagagtttgangangtgaagcttctcatgnnnttcntactaaaaa

SEQ ID NO: 289889 - DNA, 273 bp, Glycine max
gagtgattgggcctcattggtacaagtgtttttaacaaacagcaacagtacagagcattttgatgcatgtaagtggacaaaatcagaaccacattcctgggaattgatcttcccaatagaggtatgtggtcccaataatggttttgaaatgtggagttctgagtgggcaaatcaaacttcatggcatttgagtttccttattgacaatcccaaacaatctacagtttttgatattctcttgggaatctctcaagattttgaaattgctggtaa

SEQ ID NO: 289890 - DNA, 281 bp, Glycine max
  unsure (1)..(281): unsure at all n locations
atcattatcattcgggtaatggacacatcactagtgtttactgtgangaggagtgaggcagagctgatagctccggcgaanccacccctcgtgaagtgaagctactctcagacatagatgaccaagatgggttacgtttccaaattccggtgatacagttctatcgccacgacccatcaatggcagggaaagaccctgtcgatgtgataagaaaggctgtggccaaaacgcttgtgttttactatccttttgcaggtaggcttanggaaggacttggtcgg

SEQ ID NO: 289891 - DNA, 284 bp, Glycine max
actgatgctctgaagaaaatgaaagaacatggtgccatctatcttactcccttttcacatccgcttagctgaagaaattgacaatcctgagtaccaaaggttgaggtgtagagtcaactatcatgctttaagattcaagccacatatcatgaagctaagtcaatcaatagttgaaaagctacgtgcacaaggtccctttatgtccatacatcttcggtttgagatggacatgttgtcatttgctggatgctttgatatatttacacctgaggagcaacagattt

SEQ ID NO: 289892 - DNA, 295 bp, Glycine max
  unsure (1)..(295): unsure at all n locations
cgttgatctacagcttcgtcgctcgaggcaccgttatcctcgcggagtacaccgagttcaccggaaacttcaccggngtggcggacgcagtgcctccagaaactcccttcctccaacaacaagttcacctacaactgcgatgggccacaccttcaactaccttcgtcgataacggattcacttactgtgtggttgccgttgagtctgctggacggcagattccaattgctttccttgaacgaatcaaggaggattttaccaagaaatatgctngnggaaaagcagcaacagcggc

SEQ ID NO: 289893 - DNA, 282 bp, Glycine max
  unsure (1)..(282): unsure at all n locations
aaggaatacatccatggcgaacaatatagatcagactccaaaacagttaaccaacaagcttacttttatgccaganacctcgaagtccatcccaaggacacatttgtgttcagtatagatggcaccgtactctctaatattccatactacaaaaaacatggatatggggtggagaaatttaactcgaccttgtatgatgaatgggttaacaagggcaatgcaccggcactgcccgagactcttaagaattacaacaagctggtgtctcttggcttcaagatt

SEQ ID NO: 289894 - DNA, 290 bp, Glycine max
  unsure (1)..(290): unsure at all n locations
aacaagannggatgccactaccccgaagtactctaaggctaggtatgatgaaattgtgaaggaagtctcttcctacttgaagaaggttnnttacaacccagacaagattccatttgtgcccatctctggtttcgagggtgacaacatgattgagaggtccaccaaccttgactgctcacaagggaccaactctccttgaggntcttgaccaaatcaatgagcccaagaggccctcagacaagccactcaggcttccattgcaggatgtctacaaaattggtggtattggt

SEQ ID NO: 289895 - DNA, 299 bp, Glycine max
  unsure (1)..(299): unsure at all n locations
caagcttggtggaaagaacttgtagaggtgggtcatgggcgatttgaaggataagccatggtggcaaaagatgcaaattcgtgaaaganntgggttgangcttccgctaccctcatatggattgcttcagctcttcatgctgctgttaactttggacagtatccatatggaggtttaatcctgaataggccaactattagcaggagattcatgcctgagaaagggtctcctgaatatgatgcgttggctaagaaccctgagaaggagtttttgaagactatnatggcaagaaagagacc

SEQ ID NO: 289896 - DNA, 283 bp, Glycine max
  unsure (1)..(283): unsure at all n locations
gatcaatcaacaacgagtagctgtttgtaatgctgtcgttgtggctcgtttactcaattcaactttagttatccccaaatttatgtacagtagtgtatggagagatgtgagnccaattcagcgatatctatcaggaggagcattttattaactactgactcctgatattcggatagtgagggagcttccaaaggagctacaatctttggacttggaggcaattagtagtgttgtgacagatgttgacatggagaaggaggccaagccaagtttttacttaaac

SEQ ID NO: 289897 - DNA, 284 bp, Glycine max
  unsure (1)..(284): unsure at all n locations
acagaaccgaaaatggttgcnactttgagtcttccgatcatagacctctcttctccccatcgtctttccacagccaattccattcgtcaggcatgcgtggaatatggtttcttttaccttgtgaaccatggggtggacaccgattttgtgagcaaagtcttcgaccaaagttgcaagttcttctccgcttccggtccaacgcaaaatggacctggcccgcaaggnatatagaggctacactcctctctatgctgagannttgatcctattcantctccaaaggt

SEQ ID NO: 289898 - DNA, 302 bp, Glycine max
  unsure (1)..(302): unsure at all n locations
gttgttactcagaagaaggttccggataagcttttggacaacacaagtgttacacacctncttttcccatcaacaagtaacntggnttaatgggcaatggaatgaccagcntgatgctaggacactggtccancaagcaagaaatgaagcagtgagtttcgctttacatatggatatgaaatgcctgtagatgnattagctaaatggattncngacaaatccncaagtctatactcaacatgcttatatgagaccacttggagtagttgccatggttttgggtattgatgatgaatatggnc

SEQ ID NO: 289899 - DNA, 299 bp, Glycine max
  unsure (1)..(299): unsure at all n locations
catagctgcagcattagggtttttcatctgcttcaatggggaagggaacanggagttttggtaagagaangaacaagactcaacactcctntgtgtgaggtgtggcngccgaagtttccatctccagaanagtcgttgcgccgcttgtgcttnccccgcngaangcactaggaaatataactggagcgtcaaggcattccgcagaaagaccaccggaatggnaggatgagnnacttggcgtaacgtgcctcgccgattcaagagtggcttcagagaangtaccgaagctgcacctagga

SEQ ID NO: 289900 - DNA, 286 bp, Glycine max
  unsure (1)..(286): unsure at all n locations
cagcatcaacgtttcctccttgtgcttcagattattttcaattggacaacttattgacagcagaggagcaagccattangaagaaagtaaganagtgtatggaaaaagaaattgctccaataatgactgagtactgggagaaggccaaatttccatttcatgttattccaaagcttggtgcattgcgcattgctggacggcacaatcaaggattatggttgtcctggtctttctatcactggaagtgctatagctgtggcagaagttgcaagagttgatgcaagtt

SEQ ID NO: 289901 - DNA, 276 bp, Glycine max
  unsure (1)..(276): unsure at all n locations
aaaaaatggcagcagcttcttccatggctctctcatccccatccttggctggcaaggccgtgaagctgggcncatcagcccaagagtgggaaggtgagcatgaggaagaccgtcacaagcagtctctcaggaagccatggtacggcccagaccgagtcaagtacttgggccattctctggcgagccccgtcctactaaccggtgagttcccaggcgactacggtgggaactgctgggtttcgcagacccagaaccttncaagaaccgtganncnag

SEQ ID NO: 289902 - DNA, 286 bp, Glycine max
  unsure (1)..(286): unsure at all n locations
aaaaaaccaaagtaatctaacaaagtaagcacaatgaggganatattgcacgtgcaaggtgggcaatgcnggaaccaaatcggttccaagttctgggaagtgatatgcgacgagcatgggcatcgaccccaccggaaagtacaccggcgacgaggctccgatctccaactggagaggntcaacgtctactacaatgaangcntccggcggaaangtagnttcccccggnccgtcttcatggncctcgagcccggaacantggacannnncagatccggcccatacg

SEQ ID NO: 289903 - DNA, 281 bp, Glycine max
tctcttcagtccaaatccatggtcctctggtgcctttgaaaactggaccgtcataaaggacatgctgaatgtgccagttctctatattattggagccttattccagcaacaatgattgctgtgctttattattttgaccatagtgtggcatctcagcttgctcagcagaaagagttcaacttaagaaagcccccttccttccattatgatttgcttctattgggattcatggttataatatgcggtctaattggaattcccccgtcaaatggtgtcattcc

SEQ ID NO: 289904 - DNA, 282 bp, Glycine max
  unsure (1)..(282): unsure at all n locations
agagaagcattagcaaaagcaagaagaactagtctaagcagaaatggcctcttcagtgatggcatctgtggccctncaaacctgcccctttcactgttgagaagtcctcagttagaggccttccctccctctcaaggaactcctcttcattcagagttgtggccagtggtggcaagaagatcaagactgacaagccttatggaattaatggtggcatggctttgagggaaggngttgatgcatctggcaggaaaggaaagggaaagggcgtttaccagnttg

SEQ ID NO: 289905 - DNA, 283 bp, Glycine max
  unsure (1)..(283): unsure at all n locations
caacgctcggagcagctatttcgttgggtttgggaggccaatagggccaacccagttggagaaaatgccactttttcacttggcactgatgggaaccttgtgttggcagatgctgatggcagaattgcatggcaaactaacactggccaacaagggtgttgtgggccttcaggcttctttcaaatggtaacatggtcccttcttgatgcacaaggcgggttcgtttggcagagtttngatcaccccactcataccctttggttggtcaatatcttagagcaaa

SEQ ID NO: 289906 - DNA, 292 bp, Glycine max
  unsure (1)..(292): unsure at all n locations
atcttggcatagctcctgtactcttgatggnaccaagttgatagtttctggtggctgtgctgattctggggtattttgagtgannanttccntcctgatctgtnaatggagaaacctgtctggagaganataccagtggcatggactccaccttcgcgtctgggtcacacactatccgtttatggtggtaggaaaatactgatgtttgggggtttggccaagagtgggcccctgcgttttcgctccagtgatgtattcacgatggatttaagtgaggaggagccatgctggc

SEQ ID NO: 289907 - DNA, 282 bp, Glycine max
  unsure (1)..(282): unsure at all n locations
gaactggagacagccaggaccagctcgtctgtggagaagagctatgagttgcctgatgggcaggtcatcaccattggcgatgagcgtttcagatgtccagaggttctgttccaaccatccatgattggaatggaagcttcaggcattcacgagacaacatacaactccatnaatgaagtgcgatgttgatatcaggaaggacctctatggtaacattgttcctttcaggaggaacaaccatgttccctggtattgctgacagaatgagcaaggaattccggc

SEQ ID NO: 289908 - DNA, 293 bp, Glycine max
  unsure (1)..(293): unsure at all n locations
cacactttcaacccaatccaatcctngcacacatgcatgctgtntctgccaaagttggggccaagtcataactacattccattgttaacgattcctttctttcaatcccaaccacttattcaagcgtctgatccaatttctttctctcaccatggatcatcgcaaaccattgttacccacttcctctgacgatgctccaaatccacgcactcggaaggaccttgttctaatgatttgcggtttgtttttgctctcttcccttgttgcctttggagggtacagggctccaacgc

SEQ ID NO: 289909 - DNA, 289 bp, Glycine max
  unsure (1)..(289): unsure at all n locations
caacatcccagattacgatgctcctactcagcttgtgaagcctcttgagaggaacactaggtatgtggatgcattttgaccataccaaagggcatttgtttccatgtgtggaatgaacttggcctttgatcgcgatcttataggagcagcaatgtactttggtctcatgggtgatggtcnagcctattggacgctacgacgacaatntgggaaggntggtgttgcaaggtaaccggtgatcacttgggattgggaatccangantggnctgccnaaaatctatnanagg

SEQ ID NO: 289910 - DNA, 284 bp, Glycine max
  unsure (1)..(284): unsure at all n locations
gttgattcaatccaggtacagatatccagtgtggactccaaatttgcgagtgctgtatcagagagtggtcagatcagcattgaacggaagagtgaagtttggagaacccccacctgacatgtgtggggtctttcgatgtggatgtgagcttagaagggaatctaatccgtgccggcaggtgggatcagcccggcatgattggccgngttggaaaacatactggggtgaacaaacgtgaatgtgagcttatgagtgtggggagaacatcgcgtaaggaacaangc

SEQ ID NO: 289911 - DNA, 292 bp, Glycine max
  unsure (1)..(292): unsure at all n locations
ggagatattttgttggagatctcgtctttgaagtttctaagatgacttctccctacattaaatgtacagtcncntttcttcatagcattnggaatttggcngatganaccatcaatttggaggcctttcccnacaagntgntgcantttggagaaattcaggaaaaagttgtattgaaattttcacaagaggaattccttacagcttggtccaactcaggtgcgtcctgcaacaactccggttggctgatggntgcccatatttgtatgcnatggtgcatgatagtccagtg

SEQ ID NO: 289912 - DNA, 271 bp, Glycine max
  unsure (1)..(271): unsure at all n locations
cagaaagcaagctcatcctagagttttaaaaatggcagcagcctcctccatggctctctcttccccatccttggctggcaaggccgtgaagctgggcccatcagcccccgaagtcgggagggtcagcatgaggaagaccgtcaccaagcaggcctcttccggaagcccatggtacggccagaccggtcaagtattgggccattctctggcgagccccgtcctacttnactggcgagttcccagtgactacggctgggacntgctgggtttc

SEQ ID NO: 289913 - DNA, 286 bp, Glycine max
  unsure (1)..(286): unsure at all n locations
catcacattacattagattggtggtaatggcagcgtcactacaagcagcagctactttcatggcaacccaccaagttgagcaggagcaacactttgcagcaaaagtctactcagtccatttccaaggcttttggtttggaacctgttggagctnaaaagggtcacatgctcccntcaggntgatnttaaggacttggcctcacaagtgtgttgatgctaccaaaattgcaggattcgcccttgnccacctcctgccctcgttgtctctggggcaagtgcctgaagg

SEQ ID NO: 289914 - DNA, 283 bp, Glycine max
  unsure (1)..(283): unsure at all n locations
tcaagaaaaagcatgggaaaggatattagcaaggacagtagagcacttgggcaagctgaggagagangctgagcgtgcaaagagagctctcagcagccagcaccaggtccgtgtggaaattgaatcactttttgatggtgttgatttttctgagccactcacccgagctcggtttgaggagttgaacaatgacttgttccggaagaccatgggtccagtnaagaaggctatggaagatgctggattacagaggngtccagattgatgagattgtccttgttgg

SEQ ID NO: 289915 - DNA, 277 bp, Glycine max
  unsure (1)..(277): unsure at all n locations
tgggttttgntgaanatgatggggncgatgatataagagaggagtttctctgccccattttgttctgagtcttttgatatncgttggattatgctgccacattgatgaagagcatccaatggaggccaaaaatggggtatgtccagtttgtgcattgagggtgggggttgatatggtagcacatataaccctacaacatgggagtatatttangatgcagcgcaanaaggnatccncgnaaaggnggatcctttacnaccnatctnnctcgggganc

SEQ ID NO: 289916 - DNA, 273 bp, Glycine max
  unsure (1)..(273): unsure at all n locations
gtttgttgtgagctataagctagtttatcgtgaggagantatgaagttgtntgttttctttgttgctgcagtagttttggtagcatggccatgccatggcgcaggctaccaaaggttccctctccgaatganaactggctatggtgagcgttcttcggaggtaaaatgcgcaagttttaggcttgctgtggaagcacacaacatccgagcctttaaaaccattcctgaagagtgcgttgaaccaacaaaggactacattaatggcgaacaatt

SEQ ID NO: 289917 - DNA, 275 bp, Glycine max
  unsure (1)..(275): unsure at all n locations
ctcttagtcccaattttctagggttttattcattttccgatggcttctgcagatgttgagtaccgttgctttgtcggtgggctcgcttggnccactgacgaccatgccctcgagaganccttctctcagtacggcgaaatcgttgaaacgaagattatcaacgatcgtgagactggcagatccaggggttttggatttgtgaccttcgcctcggagcagtccatganagatgcgatcggagcgatgaatggacagaacttggacgggccgtaata

SEQ ID NO: 289918 - DNA, 278 bp, Glycine max
  unsure (1)..(278): unsure at all n locations
cttgcgacttgcgacttgcgacttgcgagtnagnctgaggttgggcttggaaggcaagggcttgtnttgtcacaatccaagagagaagtaatggcgaacatagacatcgaagggatcttgaagcagcagcagccttatgatgggcgcgttccgaagacgaagatagtgtgtactttgggccctgcttctcgatccgtagaaatgaccgagaagcttctgagggcagggatgaacgttgctcgtttcaatttcctctcatggcacccacgactatcacc

SEQ ID NO: 289919 - DNA, 288 bp, Glycine max
ccgaggcgaagagaagagaaaaattaagatggaggggaaggagcaggatgtgtcgctgggagcgaacaagttcccggagagacagccgattgggacggcggcgcagagccaagacgacggcaaggactaccaggagccggcgccggcgccactggttgacccgacggagtttacgtcatggtccttttacagagcagggatagcagagtttgtggccacttttctgtttctatacatcactgtcttaaccgtcatgggagtcgccggggctaagtctaagtgcagtac

SEQ ID NO: 289920 - DNA, 275 bp, Glycine max
  unsure (1)..(275): unsure at all n locations
gaagaacagagagagatcncatccatcaattccantngccgatcagctcaccgacgaacagatnctccgagttcaaggaagccttcagcctcttcgacnaggacggggatggttgtattaccnccaaggaacttggnacggtgatgccggtcacttggcanaaccccanntnaggcnanagctgcaggacatganaaattaaggttgannntgatgggaatggtacnatgattncccanattccngnaatcnnatgnnncgcaanatgaaagacc

SEQ ID NO: 289921 - DNA, 273 bp, Glycine max
  unsure (1)..(273): unsure at all n locations
gattgatcacggtggaaatgttccctactgggaaggacagagttatggtgttattccaccaggtgaaaatcctaagaaacctggggctcctcataatgttcgactatattcaattgcttccacaaggtatggggactttttttgatggaaaaactgccagcttgtgtgtgcgtcgtgctgtttattatgatcctgagacaggaaaggaagatccttccaagaatggcatttgtagcaattttttgtgtaactcaaagccangagncaaaattc

SEQ ID NO: 289922 - DNA, 282 bp, Glycine max
  unsure (1)..(282): unsure at all n locations
tctacactgggctttatctataatgagttcttttctgtcccattngcaatctttgctnccctctgcgtatgattgtngtgacctttctngcagggatgctacaacagtnggcctgataaanntncgtganacttatncttttggngtggatcctgtatggcatggnacacgangtgaaactaaccattgcctaaactcattganaatganaatgtcaattcttcttggagttggtcaaatgaaccttggaattgtgatgagcctatttcaatgccatattct

SEQ ID NO: 289923 - DNA, 278 bp, Glycine max
cagcaaagaaggtgtgtgtaacaggtgctggaggattcgtagcgtcttggcttgttaagcttcttctttccaaaggctacattgtccatggaactgtgagagaccctgaacctgctactcagaaatatgaacacttgctcaaactccacggagcttctgaaaacctcactctcttcaaggcagatctcttgaactacgaatctcttcgctcagcaatttctggatgcacttgcagtttccatcttgctgccctgtaacctcaattcagtgttcccacc

SEQ ID NO: 289924 - DNA, 285 bp, Glycine max
gtttctcaggtgatatcatcactgactgcttccctgaggtttgatggagccttgaatgttgatgtcaatgaattccagaccaaccttgtgccataccccaggattcattttatgctttcatcttatgctcctgtaatttcagccgagaaggctcaccatgagcagctatcagttggtgaaatcaccaacagtgcattcgagccatcatctatgatggccaagtgtgatccccgccatggcaaatacatggcgtgctgtctcatgtacagaggtgacgtagtgcct

SEQ ID NO: 289925 - DNA, 271 bp, Glycine max
  unsure (1)..(271): unsure at all n locations
caaaaaaccaaagtaatctaacaaagtaagcacaatgagggagatattgcacgtgcaaggtgggcaatgcgggaaccaaatcggttccaagttctgggaagtgatatgcgacgagcatggcatcgaccccaccggaaantacaccggcgacgaggcctccgatctcccaactggagangatcaacgtctactagantgaagcctcccggcgnaaggtacgttcccgggnggncctcatggtntcnacccnggnacnngnagannttcnncc

SEQ ID NO: 289926 - DNA, 267 bp, Glycine max
  unsure (1)..(267): unsure at all n locations
gtcagcgatggcacagaagagattcatcatcgaggtcgaganggcgaaggaggcgagcgaaggaaggccttcgagaggacctgtctatcgtagcctcttcgccaaggatggattccctgctcctatccaaggtctcaatagttgctgggacgtttttcgattgtctgttgagaaatatccatcaaatccaatgcttggtcgccgggaaattgtggatgggaagccgggcaagtacaagtggctaacatacaaagaagtatatgacca

SEQ ID NO: 289927 - DNA, 247 bp, Glycine max
  unsure (1)..(247): unsure at all n locations
tgtcaatgaattccagacccaaccttgtgccatacaccaggattcnntttatgctttcatcttatgctcctgtaatttcagccgagaaggctcaccatgagcagctatcagttggtgaaatcaccaacagtgcattcgagccatcatctatgatggccaagtgtgatccccgccatgggcaaatacatggcgtgctgtctcatgtacagaggtgacgtagtgcctaaagatgttaatgcagctgttg

SEQ ID NO: 289928 - DNA, 283 bp, Glycine max
  unsure (1)..(283): unsure at all n locations
gagagtggtttcagtgagtgatcggtgttcacttgatccttcataagtcgtcatcatcatgcatcatcatcaccgttgattgaagaagatgccgatcagaaacatcgccatcggaaggcctgaagaggctactcaccccgacacgttgaaggcggggttggctgagttcatctccaccttgatcttcgtgttcgccggttcaggttccggcatcgcctacaacaagcttcaccgacaacggcgccggccactcccggcggcctcatctccggtttccatcgnc

SEQ ID NO: 289929 - DNA, 281 bp, Glycine max
cctcactatcgtgacaccatgaacattaattcacttgcccgcaaatccttggtcaatgcagacggtattatagagaaaacattcttgtggggtaggtactctttggaaatgtctgctgttatttacaaggactgggttttcactgatcaagcattgcctaatgatcttgtcaagagaggagttgcggttaaggatccatctggctccccatggagttcggcttttgattgaggactatccttatgcttctgatgggctagagatatgggatgccatcaagt

SEQ ID NO: 289930 - DNA, 265 bp, Glycine max
ggatctgcttggaccgagtcttgaagatctttttaacttctgcagtagaaagctatcactaaagacagttctcatggcttgctgatcaaatgatcaaccgtgttgagttcattcattcaaaatcgtttctgcatcgggatatcaaaccggataattttctaatgggattaggaaggcgtgcaaaccaggtttatgctattgattttggtttggctaagaaatacagagatagttcaacacatcaacacattccttacagggaaaa

SEQ ID NO: 289931 - DNA, 269 bp, Glycine max
gccgaggtcacgaggagcactagctagtttcacaatttccaaatggctaggggattgaagaagcatctcaagaggctcaatgctcctaagcattggatgcttgacaaactgggtggtgcatttgcgcccaaaccctcatctggaccacacaaatctagggagtgccttcccctcatactcatcctacgaaaccggctaaagtatgctctgacttaccgtgaagtcatcgctattctgatgcagagacatgttcttgttgatggaaaagc

SEQ ID NO: 289932 - DNA, 270 bp, Glycine max
atgatttcaagtttctcaaggagttgttttgggcaaatggggatggtttgccttctgaattaatagataaattttcaactactgcaaggtctatccttccccttttcagaactgacacagagaccctcattgagcagttcaaacggttgaccatggagacatataaatcctctgccaggtccaaactcccattacctccaacttctggacagtggaatccatcagaaccaaacacattgttacgtgttttgtgctatagaaatgatgaat

SEQ ID NO: 289933 - DNA, 268 bp, Glycine max
  unsure (1)..(268): unsure at all n locations
ccgtaccagtttcactgcataaatttganaganaactctgcaaacatgttggtttatcaggacctccttacaggtgatgagcttctctcggactccttccgttacaatgaaattgagaatggaatgctgtgggaagttgaggggaagtgggttgttaagggagcagttgatgttgacattggtgcaaacccttctgctgagggtggagaagatgagggagtcgatgacgcagctgttaaggttgttgacattgttgatacattcagac

SEQ ID NO: 289934 - DNA, 277 bp, Glycine max
  unsure (1)..(277): unsure at all n locations
ggcttcaaggaagtcctctccaagagtgaccaacgaggctgttcagaaggctgctgctgcattgaagggttcagatcntcgccgtgcaacaaatgtcagtgccagactggatgctcaacaaaagaagctcaaccttccaatccttccaaccaccactattggntccttccctcagactgtagaactgaggagggaccgccgtgagttcaaggctaacaagatctccgaggaagagtatgttaagtcaattaaggaggaaattcgcaaagttgttgaa

SEQ ID NO: 289935 - DNA, 279 bp, Glycine max
  unsure (1)..(279): unsure at all n locations
tgttgtgatgctagttggcaacaaatcanaccttcgtcacctcgtagcggtgtcaactgaagatgggaagtcctatgctgagaaagnatcactttacttcatggaaacctcagctctggaggctactaatgtagagaatgcatttgctgaagttctgactcaaatctaccgcattgttagcaagaaagcagtagagggggctgaaaatggaactgcatctgtgcctgccaaaggagagaaaattgatctgaaaaatgatgtgtctgctttgaagagagt

SEQ ID NO: 289936 - DNA, 282 bp, Glycine max
  unsure (1)..(282): unsure at all n locations
cncagaatggctcccaagggtttaacctttctggctgtgttaatatgcgtttcagcactgtcactgagtccttctgttgcgggggaagggcaaaataatggccttgttatgaacttctacaaggaatcatgccctcaggctgaagacatcatcacagaacaagtcaagcttctctacaagcgccacaagaacactgctttctcctggctcaggaacatcttccatgactgtgctgttcagagttgtgatgcttcactgttgctggactccacaagaaggagt

SEQ ID NO: 289937 - DNA, 266 bp, Glycine max
  unsure (1)..(266): unsure at all n locations
ttcattgcaagantggcacttcgttgcttggtgatgtccctttctgttctcttcactcttggtcttgcgagagaaagccatgccaganacgaagatttttggcatgctgtttggccaaacactcccattccaagttcattgcgagatcttctaaagcctggccctgcaagtgttgaaatcgatgatcaccctatggcaaattgaagaaacacagtaccncgaaaanccttcttctataaagaagacttcatcgaggaaaacattgc

SEQ ID NO: 289938 - DNA, 253 bp, Glycine max
  unsure (1)..(253): unsure at all n locations
caaacaatgaggttactgttaggcagcttgctgaaataatgattaaggtttatncaaaggtaagtggcgaacaaactcctgaaacacctaccgttgatgtgagctcaaaagaattttatggtgagggatatgatgatagtgacaagagaatccctgacatgaccataataaacaggcagcttggatggaatcccaagacttcactttgggacctgcttgagtccactctgacatatcagcacaggacatatgc

SEQ ID NO: 289939 - DNA, 267 bp, Glycine max
  unsure (1)..(267): unsure at all n locations
cttttttctctctcttgcaaaacctaattttcatttcttccctcaantttcaaaatgcgtgagatccttcacatccagggtggccaatgcggcaaccagatcggcgccaagttctgggaggtggtttgcgcggagaacgggatcgaccctaccggaaggtacggtggggactcggagttgcagctcgagaggatcaatgtctactacaacgaggccagttgcggtcggttcgtgccgcgcgcggttctcatggacctcgaaccgggc

SEQ ID NO: 289940 - DNA, 267 bp, Glycine max
  unsure (1)..(267): unsure at all n locations
tcatgaaggcccagatttggaattattcctcaagagcctgtcctctttcaaggaacagtacgaagcaacattgacccccttggactgtattcagaggaagaaatttggaagagtcttgagcgctgccaactgaaagatgtggtggctgcaaagccagagaaacttgaggctccagtggttgatggtggagacaattggagtgtggggcaaagacagcttctntgcttgggaaggatcatgctaaaaagcagcaaaatattgttcatg

SEQ ID NO: 289941 - DNA, 233 bp, Glycine max
  unsure (1)..(233): unsure at all n locations
gatggcgttgttggttgagaaaacaagcagtggaagggagtacaaggtgaaggacatgacgcaagccgatttcggaagattggaaatcgagctggcggaggttgaaatgcccggcctcatgtcctcncgcaccgagttcggcccctctcaaccctttcaagggcgctaggatcacggctccctcccacatgaccatcccaaaccggcgtcttcatcgagaccctcancgcctc

SEQ ID NO: 289942 - DNA, 276 bp, Glycine max
cagactccaaaacagttaaccaacaagcttacttttatgccagagacctcgaagtccatcccaaggacacatttgtgttcagtatagatggcaccgtactctctaatattccatactacaaaaaacatggatatggggtggagaaatttaactcgaccttgtatgatgaatgggttaacaagggcaatgcaccggcactgcccgagactcttaagaattacaacaagctggtgtctcttggcttcaagattatattcttgtcaggaagaacactgg

SEQ ID NO: 289943 - DNA, 261 bp, Glycine max
  unsure (1)..(261): unsure at all n locations
acgacgcgaaactcttggcgaantctttcgatgtggttgctttcactcangtgatgcacctcgcngcgcangctggggttcgctacgccatggagaatccccactcgtacgtccacagcaacatcgcgggcctcgtcacgcttctcgaggcctgcaaaaccgcgaaccctcagcccgctatcgtctgggcctcgtccagctccgtctacgggctcaacgagaaggttcccttttccgaatcggaccagaccgaccagcccg

SEQ ID NO: 289944 - DNA, 264 bp, Glycine max
  unsure (1)..(264): unsure at all n locations
attggactcaggaagggttctcgttcctttgctgaagctcgtgcagctgggttttctgaggagaatgggactctaggtgatatatgggaaactgtctctggaagtgatcttgtgatgctgttaatttctgattctgcacaggctgataactatgagaagatattgtctcacatgaagccaaacagtatacttgggctttcccatggttttcttcttgggncatttacaatcattgggacttgactttccaaagaacattagtgt

SEQ ID NO: 289945 - DNA, 266 bp, Glycine max
  unsure (1)..(266): unsure at all n locations
ctcaagcctatggtgatcatacctgtataataacaaaagagcatttggnacctaacttaggtggtctcactgttgagcaggctatccaaaacaagaagttgttcatcttagatcaccatgactatctcattccancatttgaggaaaatnaatgcaaataccacaaagacttatgctncaaganccatatttttcttgaaaaatgatggaactttgacgccattggccattgagttaagtaagccgcatcctcagggtgaagaata

SEQ ID NO: 289946 - DNA, 266 bp, Glycine max
  unsure (1)..(266): unsure at all n locations
cgcaaggctagtcctgatcctgaattgaagaantatattgagaaggctaggagcatttctggtgtctccgttgatccaaagcttgccaaattacaagaaaaggatatcatagagatgatattctttcctgtggtgaatgaggcttgtcgggtccttgatgaaggtatcgcagtcaaagcagcagatcttgatatttctgctatcatgggcatgggttttcccccttacaggggaggcatcatattctgggctgattctcttggatc

SEQ ID NO: 289947 - DNA, 265 bp, Glycine max
ctgtgctacattgttattggggcatgcttcttcgtacaaagaacaccctttaataaccaagctgatgttactaacatcacacttaaaccagccactaatgcagttttaagcgcttaattagtaggctttggcctatttcttgtcctttcctgagatgaagaatggtggtatcgatccaaacccaaaatcagattcaaattcaatggattggttattgtttcattctgatcacattgtcatatccataaagaagggggggaaaaaa

SEQ ID NO: 289948 - DNA, 261 bp, Glycine max
gttttagcgcagttcttctagatttaaggaagatgggtaaggaaaaggttcacatcagtattgtggttattggccatgttgactctgggaagtccactaccactggccacctgatctacaagcttggaggcattgacaagcgtgttattgagagatttgagaaggaagctgctgagatgaacaagaggtcttcaagtatgcctgggtgctgataagcttaaggctgagcgtgaaagaggaatcacaattgatattgccttg

SEQ ID NO: 289949 - DNA, 263 bp, Glycine max
ctggggctagctgaggacccagagaacttgaggtggtacgttcaagccgagcttgtgaatggacgttgggccatgttgggtgttgcaggaatgttgcttcctgaggttttcaccaagtttggaatcatcaatgcccctcaatggtatgatgctgggaaatcagagtatttgcatcttcctcaaccctcttcgtgatcgagttcatcttgttccactacgtcgagatccgaagatggcaggacatcaagaaccctggctgtgtc

SEQ ID NO: 289950 - DNA, 208 bp, Glycine max
ccaggctgagatggcagcggcaccagcagctaccttcactattggaaccaccggttccctaggccaaagaggaaactcgcttcctcaattaaagtcttctgggttgaaattcaactcccagaatcatttgaagagcttctgcggccttcaaggccatgtcatccgtgagatgtgagtcagaatcgtctttcttgggttaacaaaactg

SEQ ID NO: 289951 - DNA, 259 bp, Glycine max
gctgctgttcttgcgcgtgaacaagcctcaggtaagccaaaaccatggttaagcataacaatgttatcccaaacggacacttccgtaagcactggcagaactatgtgaagacttggttcaatcagccagcacggaagacaaggagacgattggctcgtcagaagaaagctgtgaagatattccccagacctacggctggacctctcaggcccattgtacatggtcaaactttgaaatacaacatgaaagtgagaggtgg

SEQ ID NO: 289952 - DNA, 258 bp, Glycine max
cctcagtccatttcacagcaaactgtttggaatcaaatggcaacagtgagaacaccattgaattttgattctagcaagcagagcttttgtcaattttctattgaccttctcggtggaggaattttagtggacaaaactggagattggatcacacttatacaaaattctccaattagtaacttgttgagagttgctgcttggaagaaaggctgtttaatggtcaagattgtgatgtctgggaatgcagcagtcaaaagg

SEQ ID NO: 289953 - DNA, 258 bp, Glycine max
ctttgagagggttaacgggaagcttgtgaacattcttgaagggcttgagctgcacactgggattttcagtgctgctgagcagaagaggattgttaattatgtcgcctcgttgcaggaaatggggagaaagggggaattgaaagagcaaacgttttcagctccccaaaagtggatgaggggtaagggacgccaaaccatccaatttgggtgctgttacaattatgcagtggatagagatggtaacccacctggtattct

SEQ ID NO: 289954 - DNA, 259 bp, Glycine max
  unsure (1)..(259): unsure at all n locations
aganattaacgaaaaaggagaagaggtgatgtatgactatgaagacaaaatcaataganctgtgtttcctggactgcaaagtggtcctcacttccactctattactggtttagctgttgcattgaagcaggctacaactccaaactatagagcataccaagagcaggttctccgtaattgctcaaaatttgcacaggcactgagtgagaagggctatgagcttgtttctggtggaactgagaatcatctacttttggtg

SEQ ID NO: 289955 - DNA, 237 bp, Glycine max
  unsure (1)..(237): unsure at all n locations
agctcatcagtgccaccaaggcnngatggacatgggaaaggtaaagttggaaaggctacnaatttaagaggacaagtgtcgttgccaaccttgggagctggcgaagatgcatacgatgttaattttgaatgggacagtgacttcggaattcccggtgcattttacanaaagaacttcatgcaagttgagttctatctcaagtctctaactctcgaagacattccaaaccacggaacc

SEQ ID NO: 289956 - DNA, 258 bp, Glycine max
  unsure (1)..(258): unsure at all n locations
cncgngccgccttgctngnaagtgaaaataaagaggactacaaaaaattctgggagaactttggtaggttcataaaattaggttgcattgaagacactgcaaatcataagcgcattacaccactattgaggttttacacttccaaaagtgaggaggagcttaaaagcccagatgnttatgttgaaaatangggtgaaanccaaaaggctatcttttatctagcaactgacagcttgaagagtgcaaagactgctccat

SEQ ID NO: 289957 - DNA, 258 bp, Glycine max
gggaggaagagagaaaaaccatgggcaataacactcaacaatggcttcaagatgcctatcattggattgggcgtgtggcgcatggaaggaaacgaaatcagggacctaattctcaattccatcaaaattggttatcgccattttgattgtgctgctgactacaaaaacgaagcagaagttggagatgcgcttaaggaggcttttgatagtggccttgtgaagagagaggatctcttcattaccaccaagctttggaat

SEQ ID NO: 289958 - DNA, 258 bp, Glycine max
  unsure (1)..(258): unsure at all n locations
attgaagcanaaaatgaagtgaaggttaaanagcaagaggnaaaggatgtagttgcacaacagaacatgtatgctcaattgttgcctcttgctttgcctgcaccaccaatgcctggacatgggaggcccaggaggtatgggaggaggntttgctcctccccctccaatgggtggactggggatgcccccaatgcctccttatggcatgnctcccatgggcagcagtttttgacaagtttagcatgancttggcccctg

SEQ ID NO: 289959 - DNA, 261 bp, Glycine max
  unsure (1)..(261): unsure at all n locations
aaaaattttntntctttgtgtgtgtatggtgatgataacttaattagtgttcatgaatatgtcaagccttactttagtggttctaaattgaaaagctttctagctggtcataatatcaccattactgatggtattgacaaaactagtgcaactttgcaatttagaaagttagcagattgtgattttctcaagagaaactttaagcagatgtctaatgttttgtgggtggctcctgaggacaaggcgagtttgtggtcacaa

SEQ ID NO: 289960 - DNA, 194 bp, Glycine max
  unsure (1)..(194): unsure at all n locations
gngctataagctagtttatcgtgaggngaatatgaagttgtttgttttctttgttgctgcagtagttttggtagcatggccatgccatggcgcaggctaccaaaggttccctctccgaatganaactggctatggtgagcgttcttcggaggtaaaatgcgcaagttttaggcttgctgtggaagcacacaaca

SEQ ID NO: 289961 - DNA, 254 bp, Glycine max
caaacattgtttgttgtaggaagaggaatcttgagaaatggcaggggacagcaagagcaagattctgttcatcggagggactggttacatcggaaaattcatcgtggaagccagcgccaaagctggccacccaactttccttttggtgagggagtccactctctccaaccccgcaaaatcacccctcatcgacaatttcaaaggcctcggtgtcaatcttgttttaggagatctatacgatcaccaaagtttgg

SEQ ID NO: 289962 - DNA, 245 bp, Glycine max
  unsure (1)..(245): unsure at all n locations
ttttcccgcagtcatgggcaaggtcaagatcggaatcaacggatttggaagnnttggccgtttggtggccagggtggctctgcagagagacgatgttgaactcgttgccgttaacgatcctttcattaccaccgattacatgacatacatgtttaaatacgacagtgttcacgggcactggaagcatcacgatgtcaccgttaaggatgagaagnccttctcttnggtganangccagtcattnt

SEQ ID NO: 289963 - DNA, 255 bp, Glycine max
  unsure (1)..(255): unsure at all n locations
cacagccccagctggtgccatttccgttattgatgaatgggaattacacagcaagcaccattccttggaggctcccttccgacgatccaagcattcccacacccatcgagctancttggcttaatctcttcctcaacacaatccccaccttcaagaagcatgctgagagtgatacttctgttcctgatgctgtgaataaagctgaagaatttgctcaaaggtttgctagaataattgaagatttcaagaaagatc

SEQ ID NO: 289964 - DNA, 253 bp, Glycine max
  unsure (1)..(253): unsure at all n locations
gaagaaannggacaagcttagttgtcaagttggaatcaacccatactccatggaatggactggtttggccaatagattactgagtaagggcaacgatattctgtgttgcgattatgctagttttgatggtttgattaccaagcaagttatgagcaagatggcagaaatgataaacagtctttgtggtggtgatgaaaaattgatgcgtganaggacacacctgctgttggcttgttgttcaaggatggcaatt

SEQ ID NO: 289965 - DNA, 258 bp, Glycine max
cgcaagcaaaaagaaagaatcccaggcgaggagaaagatggaggggaaggagcaggatgtgtcgttgggagcgaacaagttccccgagagacagccgattgggacggcggcgcagagccaagacgacggcaaggactaccaggagccggcgccggcgccgctggttgacccgacggagtttacgtcatggtcgttttacagagcagggatagcagagtttgtggccacttttctgtttctctacatcaccgtcttaac

SEQ ID NO: 289966 - DNA, 199 bp, Glycine max
  unsure (1)..(199): unsure at all n locations
ggagagtagtgtgtggttgaaagttaagaagtagcaaagatgtttnnattcgggtataagggtnnaaagataaagngactatggtggttatgtagaagaatgtgttggatatnaatagcatcancagtgnngacgggatcgtcggnancggnttagacttctnaggtagtgcacncgatacagttacntttttagnntc

SEQ ID NO: 289967 - DNA, 255 bp, Glycine max
  unsure (1)..(255): unsure at all n locations
gtttatttganattaacaagtagcaaagatgtttggaatcatcggaggaaacaagggtcacaagataaaggggaacttggtgattatgcgaaagantgcnttggatatcaacagcattaccagtgttaagggtgtcatcggaaccggcattaacatcattggaggagtcgtcgacaccgntactgcttnggcgtcccacatctccatccagctcatnantgccaccnaggctgatggacatgggaaaggnaaanc

SEQ ID NO: 289968 - DNA, 254 bp, Glycine max
agtctcaacttctgctcttccaactcctacaacgcttttctctgcactcatgggcaaggtcaagatcggaatcaacggatttggaagaattggccgtttggttgccagagtcgctctgcaaagagacgatgttgaactcgttgccgttaacgaccctttcattaccaccgattacatgacatacatgtttaaatacgacagtgttcacggacactggaagcatcacgatgtcaccgttaaggacgagaagaccc

SEQ ID NO: 289969 - DNA, 251 bp, Glycine max
  unsure (1)..(251): unsure at all n locations
ggaacaggggaggtgttgaactgttccgcggagaataatggggatctctttcatggtgttctaggggggcttggccaatttggcattataacccgggcaagaattgtcctagaaccagcacctaccatggtaaaatggattagagtgctgtactcagatttcacagcattcacaagagaccaagagaggttaatatctgcagaaaagacttttgactacattgaaggatttgtgatantaaacagaactgg

SEQ ID NO: 289970 - DNA, 257 bp, Glycine max
  unsure (1)..(257): unsure at all n locations
gataactagaaacagtgtgatgaaaatgaaggtccttgttttcttcgttgctacaattttngtagcatggcaatgccatgcgtacgatatgttccctctccgaatgaacactggctatggtgcccgtactccggaggtgaaatgcgcaagttggaggcttgctgtggaagcacacaacatctttggctttgagaccattcctgaagagtgcgttgaagcaacaaaggaatacatccatggcgaacaatatagatcag

SEQ ID NO: 289971 - DNA, 258 bp, Glycine max
  unsure (1)..(258): unsure at all n locations
gttgatcgagataactagaaacagtgtgatgaaaatgaaggtccttgttttcttcgttgctacaattttngtagcatggcaatgccatgcgtacgatatgttccctctccgaatgaacactggctatggtgcccgtactccggaggtgaaatgcgcaagttggaggcttgctgtggaagcacacaacatctttggctttgagaccattcctgaagagtgcgttgaagcaacaaaggaatacatccatggcgaanaatt

SEQ ID NO: 289972 - DNA, 255 bp, Glycine max
tattaagagcttttgcttttctttctgcgcgcttttcccaattaagtagttcttccttttctcaaagcaaaaaaatgttcatcgagagtttcaaggttgagagtcctaacgtgaagtacacagagactgagattcagtccgtgtacaactatgaaaccactgaacttgttcacgagaacaataatggcacttatcagtgggttgtcaagcccaaaactgtcaaatatgaatttaaaaccaacacccatgtcccta

SEQ ID NO: 289973 - DNA, 253 bp, Glycine max
  unsure (1)..(253): unsure at all n locations
gcctcactacaagctgcagctaccttcatgcaacccaccaaggttggcatagcctctcgcaacctcaaatctacacaatgcatttctaaggcttttngcttggaacctgctgcagctaaactcacttgcncccttcancctgatctcaaagaatttgctcaaaaatgtgtcgacgctaccaaaattgcaggattcgcccttgccacctctgctctcgttgtttctggagcaagtgcagaaggtgttccaaaaa

SEQ ID NO: 289974 - DNA, 249 bp, Glycine max
  unsure (1)..(249): unsure at all n locations
cgatgggtcgcagctcgatttgctctctgttcatgaaacctcgcaggagccattgcctgagtcgaaggatgatattaactctgcccattcgttgagcgttgaggctgcttatatcaaccanaatttctctcagcaggtgcttattagggatgggaataaggttacttttgatgaggctaacccttttgctaatgaaggtgaggaggttgcttctgtcgcttataggtataggaggtggaagcttgatga

SEQ ID NO: 289975 - DNA, 217 bp, Glycine max
caacaactctgttggctgatgggtgcccatatttgtatgctatggtgcctgatagttcagtgtctacaataccaggtgattttgtcattggtgtcaagttgacaaccataaacaatatgtgtgcatatgggctcaatcctggtatttcaggttctcgtcttttgggcaccattcctcagtccatttcacagcaaactgtttggaatcaaatggcaac

SEQ ID NO: 289976 - DNA, 250 bp, Glycine max
  unsure (1)..(250): unsure at all n locations
gtgttaccaaagatagtgctggtgactatcaagactgtggtgcttcttcaatgcttctcatgggagaacctccctggtgtcctccttgccctgagagttctctgcattctgctaaccgaagcaatgctgtcatgcgctacaaggaaaaaaagaagacccggaagttcgagaagaaagtaagatatgcctctcgcaaggctagggctgatgtcaganagcgtgtgaagggccgatttgtcaaagctggtga

SEQ ID NO: 289977 - DNA, 257 bp, Glycine max
cagaagaagaatacaccaaattctaccactctcttgccaaggatttcagtgatgagaaacctttagcatggagtcatttcactgctgagggcgatgtcgagttcaaggcagtcctgtttgtaccacctaaggcacctcaagatttatacgagagctattataacgcaaacaaatccaacctgaagttgtatgttagacgtgtgttcatttcagatgaatttaatgaactgttgcctaagtacctaaactttttgctg

SEQ ID NO: 289978 - DNA, 252 bp, Glycine max
atctgcttcttatgagccatttgcaagacagtgttcagcatatggacatttcaacgcagatactttttaacagggccatgtcacagttaggtttatgtgcttttcgggttggactgatttctgaagcacatggctgtctgtctgaactctactctggtggaagggtgaaggagttgctggcacaaggcgtttcacaaagtcgttatcatgagaagactcctgaacaggaaaggttggaaagaagacgacagt

SEQ ID NO: 289979 - DNA, 248 bp, Glycine max
ctaacgcgtgcatagcagagtcagagacagagacgcagccatggggcggagacctgcgaggtgttataggcaaattaagaacaagccataccccaagtcacgtttctgccgtggtgttcctgatcccaagatcaggatttatgatgttggtatgaagaagaagggtgttgatgagtttcctttctgtgtccatctggttagttgggagaaggaaaatgtttcaagtgaggccctggaagctgctcgca

SEQ ID NO: 289980 - DNA, 248 bp, Glycine max
cagacagccctgatgtccttgtttgggatgttgaaagtcaacctaatcgccatgctgtccttggagctacaaactctcgtcctgatttgatattgaccggacaccaagataatgcggaatttgctcttgctatgtgcccaactgaaccctatgttctttcaggaggaaaggacaaaacagtggtgttgtggagtattgaagaccatataacatctgctgctacagactccaaatctggtgggtcaatt

SEQ ID NO: 289981 - DNA, 240 bp, Glycine max
agcgactagaaaagtctgataatcttctcgagggtggaggagaagaggacaattttgccatcgtgtttgcagctatgggagttaacatggagactgcacagtttttcaaacgtgactttgaggagaatggctcgatggagagagtgacccttttccttaatctggcaaatgatcctacaattgagcgtatcatcactcctcgtattgctcttactactgctgaatatttggcatatgaat

SEQ ID NO: 289982 - DNA, 251 bp, Glycine max
gtgagtttgttgatcgagataactagaaaacagtgtgatgaaaatgaaggtccttgttttcttcgttgctacaattttgcgtagcatgggcaatgccatgcgtacgatatgttccctctccgaatgaacactggctatggtgcccgtactccggaggtgaaatgcgcaagttggaggcttgctgtggaagcacacaacatctttggctttgagaccattcctgaagagtgcgttgaagcaacaaaggaata

SEQ ID NO: 289983 - DNA, 252 bp, Glycine max
  unsure (1)..(252): unsure at all n locations
gggcattgggctgagccatttnccctgatttcatacacatcgttggtttcccttaaacatttcttgcttaggcaatgaggtgaatttgtctgccctagagcgccttgttagtaggtgtcccaacctgcagactctccgcctcaaccgtgctgtgccgctagacaggcttgccaaccttcttcgcggagctcctcaattggttgagttaggcacgggaactacacgactgagatgcgaccggagtcttcacaa

SEQ ID NO: 289984 - DNA, 254 bp, Glycine max
  unsure (1)..(254): unsure at all n locations
tttgaagtttctaagatgactacctccctacattaaatgtacagtctctttcttcataccatnccggaaatttggctgatgacaccatcaattttgaggcctttccccacaagctggtgcagtttggagaaattcaggaaaaagttgtattgaaattttcacaagaggaatttcttacagcttggtcaactcaggtgcgtcctgcaacaactctgttggctgatgggtgcccatatttgtatgctatggtgcat

SEQ ID NO: 289985 - DNA, 274 bp, Glycine max
aaacactcataacacaaagcacaaagcaaagctcatccttgagttaaaaaatggcagcagcttcttccatggctctctcatccccatccttggctggcaaggccgtgaagctgggcccatcagacccagaagtgggaagggtgagcatgaggaagaccgtcaccaagcaggtctcctcaggaagcccatggtacggcccagaccgagtcaagtacttgggcccattctctggcgagcccccgtcctacctaaccggtgagttcccaggcgacta

SEQ ID NO: 289986 - DNA, 263 bp, Glycine max
  unsure (1)..(263): unsure at all n locations
tgttaattctacatgcttttgaagcaactttggaagagaggctgaaaaagcttattcccaagagcaaggangagatcctcagcttgtcttggatgactttggctatgcacccactttgtnagagccataatgacattaaaaccatcataacagagcttgagcttcctgtacatgattgggatgagaaatggatagacgtgtacttggacattagtgtgaagttgctagatatatgcattgcatttagctctgaattatcacgc

SEQ ID NO: 289987 - DNA, 260 bp, Glycine max
  unsure (1)..(260): unsure at all n locations
tgttaattctacatgcttttgaagcaactttggaaganaggctgaaaaagcttattcccatncgcaaggatgagatcctcagcttgtcttggatgactttggctatgcagtcactttgtgagagccataacgacattaaaaccatcataacagagcttgagcttcctgtacatgattgggatgagaaatggatagacgtgtacttggacantagtgtgaagttgctagatatatgcattgcatttagctctgaattatca

SEQ ID NO: 289988 - DNA, 270 bp, Glycine max
  unsure (1)..(270): unsure at all n locations
gcactgccaaggctgtgacatcatgcaaggctantgatttccactactacaaaattgaaggagttgagcattacatgagcaaatacactacaggggatagagtgagtgagagtacttgtggaaacaaatgcaccaaggattgcaagtgtgtgggttatttctaccacaaggagaattcaaggtgttgggtagcttatgatcttcaaacccttactagaggggccattcctcacatgtggggtatattaaggtgcctaataagtaaaatat

SEQ ID NO: 289989 - DNA, 271 bp, Glycine max
gcagtcgcagaggaaaaccctagctagtagtctcagttcgtttgagagagaaaaaatggcagagggtctcgttctccgcggaaccatgcgcgcccacaccgacgtcgtgacggcgattgccactcccatcgacaactccgacatgatcgtgacggcgtcgcgcgacaaatccatcattctctggcacctcaccaaggaggacaagacctacggtgtcccccgccgccgctcaccggacattctcacttcgtccaggacgtcgtctctcatc

SEQ ID NO: 289990 - DNA, 271 bp, Glycine max
tcctgatgaagctgttgcatatggtgctgctgttcaggctgcaattttaagtggtgagggcaatgagaaggttccaggatcttctcctccttgatgtcacccctctatctcttggtttggagactgctggcggtgtgatgactgtcttgatccctaggaacactacaattccaaccaagaaggaacaggttttctcaacatactctgacaaccagcctggtgtgttgatccaggtctttgaaggtgaaagagcaaggactaaagataacaa

SEQ ID NO: 289991 - DNA, 273 bp, Glycine max
  unsure (1)..(273): unsure at all n locations
tcagcaactgcgattttggatcggaacctcttctgcggcgtanaatgggacactccaacgtttggaattctcacccaaaaaactacggtcctggttctcgcacttgccgagtgtgtgggaatccacatggattgatcaggaagtatggccttatgtgctgcaggcagtgcttccgtagcaatgccaagganattggcttcatcaagtatcgctaaaagagctgttgtcacctacggaccaatattatgttctggcactaggatgttttgaaga

SEQ ID NO: 289992 - DNA, 269 bp, Glycine max
  unsure (1)..(269): unsure at all n locations
actttcgaaagantttatccaattganattttaaaaatgactgggataaacttaaganttcaattattganattgaataagtaaacaatttaattggattggncgaatggtatcaaaaaaatggagtactaactcccatttcttatttattattgaattaaccgatcaacttgcttngttatcgaacatttctttttgatttcaaaaattttccggaaaanatttgaatctatttttatatgcgaatcaatcctactacttctggnccg

SEQ ID NO: 289993 - DNA, 268 bp, Glycine max
  unsure (1)..(268): unsure at all n locations
ctcgctctatttctcagtctctgtgtttgcggctgaggattccgaacgagtgaccttcttcgtttctcgcaaagtttaagtaatcatgggtaaggaaaaggttcacatcaacattgtcgtcattggacatgtcgactctgggaagtcaactaccactggtcacttgatctacaagcttggaggtattgacaagcgtgtgattganaggttcgagaaggaggctgccgagatgaacaagaggtcattcaagtatgcctgggtgctcgac

SEQ ID NO: 289994 - DNA, 271 bp, Glycine max
caagattgtgatgtctgggaatgcagcagtcaaaaggagtgattgggcctcattggtacaagtgtttttaacaaacagcaacagtacagagcattttgatgcatgtaagtggacaaaatcagaaccacattcctgggaattgatcttcccaatagaggtatgtggtcccaataatggttttgaaatgtggagttctgagtgggcaaatcaaacttcatggcatttgagtttccttattgacaatcccaaacaatctacagtttttgatatt

SEQ ID NO: 289995 - DNA, 270 bp, Glycine max
gcacactctctgctcctagggtttctccttcgagtgagggaaatggctcccaaaccgcctagtacgggtctgtttgttggactgaacaagggtcacgtcgtcaccaagaaggaattgcccccacgcccctcagatcgtaaggggaaaacaagcaagagggtgcactttgtgaggaacctcataagagaggttgctggttttgcaccctatgaaaagcgtataactgagttgctgaaggttgggaaggataagagggcatgaaggttgcaa

SEQ ID NO: 289996 - DNA, 273 bp, Glycine max
  unsure (1)..(273): unsure at all n locations
gggaacaatgggcgggtagggtttcgacgtgcttcttcttcgtgtttgctctttctctccttcttccttttcagatctccgctgaggaatcatcggagaaagagttcgtactcacattggatcactctaactttcacgacactgtcagcaagcacgatttcatcgttgtcgagttctacgctccatggtgtggccactgtaagangcttgctcccgagtatgagaaagctgcttctatcttgagtagtcatgatcctccggttgtnttggcta

SEQ ID NO: 289997 - DNA, 252 bp, Glycine max
  unsure (1)..(252): unsure at all n locations
gtggttatgttgcctcgaactacaaaggatgatcctgcnnnggaggctgctaacttcactgcccaggttatcatcatgaaccatcctggtcagattggaaatggctatgcccctgttcttgactgccacacttcccacattgctgtcaagtttgctgaactcatgaccaagattgacaggcgatctggcaaagagcttgagaaggaacccaagtttttgaagaatggtgatgctggttttgttaagatgatt

SEQ ID NO: 289998 - DNA, 273 bp, Glycine max
  unsure (1)..(273): unsure at all n locations
attactgcagtccctgctgaggaagaggaaatctggggtgcatttttcaaggtggaaggatcaactgttcttgcagccacagncgtagaagattcattttcaaatagagtaccgtgtgatgcattaatggngtaatgcatttatgtgcttgtgacggtaaggcatgcatgaggggtcatgtaaataatgttaatgatgactatgacaagagtgcgactggtggaagagtttattatggtgttcattagttaggattttgtgtttctcatgtac

SEQ ID NO: 289999 - DNA, 270 bp, Glycine max
  unsure (1)..(270): unsure at all n locations
gcagaaccatctctatgttcaagagttttgcagccccatgacaaatttcttatatttgcatctgatggactttgggaatacatgacaaatcagcaagcagccgagattgttcagaagaacccacgaaatggggttgcaaganaacttgttaaggctgctctaaaggaggcagctaataaaaggaaaatgaaatataaagagcttcagaagattgagaaaggaaacagaaggatntttcatgatgatatcactgtgattgtngtcttcata

SEQ ID NO: 290000 - DNA, 268 bp, Glycine max
gttgagggtcgggttttacaagctccgcggttaaaatttggtaatggggaagacttcaatcctagaaatgggaggtggaacttcaataacaagaaaattgtcaagccaactaaaatagaaagatgggctgtggttaacttctctgcacgctgtgatacacgagggcttgtgagggatctcattaagtgtggtggaatgaaaggaattgtgatagatcagccatttgatgtgtttgaagaaaatggtcagtttaggcgtgcaccgcctg

SEQ ID NO: 290001 - DNA, 269 bp, Glycine max
  unsure (1)..(269): unsure at all n locations
tgaaagtnaagaagtagcaaagatgtttccattcgggcacaagggtcaaaagataaaggggactatggtggttatgcagaagaatgtgttggatatcaacagcatcaccagtgttgacgggatcgtcggcaccggcttagacttcttaggcagtgcactcgatacagttacttttttagcctcctccatctccatccaacttattagtnctaccaaggctgatggtgggaaangaaaagttggacaggctacaaatttganaggnaanc

SEQ ID NO: 290002 - DNA, 274 bp, Glycine max
  unsure (1)..(274): unsure at all n locations
ctgnattccttgctgagggaactgcaatccaagatcttttcaacccggatcgagtcctaattggaggcagggagaccccagaaggccaaaaagcaattcaaacattgaaaaatgtgtatgctcattgggttcctgagaagaaaattctaaccacaaacctctggtctgctgagctatccaagcttgctgctaatgcctttttggcacagagaatttcatctgtgaatgctatgtcagcactttgtgaggccactggggcaaatgtcacacaagt

SEQ ID NO: 290003 - DNA, 267 bp, Glycine max
cactttatgacatttgctttaggacattgaaactcagcacccctagctttggtgatctcaaccatctgatttctgcgaccatgagtggggttacctgttgtctgaggtttcctggacaactgaactctgacctcaggaagctggctgtcaatctgattccatttccccgtcttcacttctttatgggggggtttgcacctctcacttctcgtgggtctcagcaatatgtctcccttactgtcccagagctgactcaacaaatgtggg

SEQ ID NO: 290004 - DNA, 269 bp, Glycine max
agtgaccctctttctctttctctgccaacctgcacactcttcactcgatcaaacagaaaatggcaaagaatgtggggatccttgccattgacatctacttccctcccgcttgcgttcagcaggaagcattggagactcatgatggtgccagtaaagggaagtataccattggtcttggacaagattgcatgtcattctgtaccgaagtagaagatgtcatctcaatgagtttgacagtggttacttctcttcttgagaaatatgagatt

SEQ ID NO: 290005 - DNA, 269 bp, Glycine max
  unsure (1)..(269): unsure at all n locations
ctgcagttctgaaggcacagtctgaagcaaaagctaaaggctactctgatgttttataccttgactgtncgcacaaaagatatttggaggaggtttcttcatgcaacatttttgttgttaagggtaacattatttcaactccagctattaaagggacaatcctacctggcattactcgcaaaagtataattgatgtggctcgaagccaagggtttcaggttgaggagcgattagtttcagtggatgaattgctagatgctgatgaggtt

SEQ ID NO: 290006 - DNA, 269 bp, Glycine max
  unsure (1)..(269): unsure at all n locations
taaacaatatgtgtgcatatggggctcaatcctggtatttcaggttctcgtcttttgggcaccattcctcagtccatttcacagcaaactgtttggaatcaaatggcaacagtgagaacanccattgaattttgattctagcaagcagagcttttgtcaattttctattgaccttctcggtggaggaattttagtggacaaaactggagattggatcacacttatacaaaattctccaattagtaacttgttgagagttgctgcttgga

SEQ ID NO: 290007 - DNA, 269 bp, Glycine max
  unsure (1)..(269): unsure at all n locations
caggtagcacatnanttctatgactctatacgtgggaagacttcaataaanccaaggtcattgtttcatctcacaactatcagcttactccttcanttgaggatcttggnaaccttgtagcaagaatacaagcaacgggagcagacattgtgaagattgcaacaactgccttggacatcactgatgtggcacgcatgtttcaaataatggtgcattctcaagttccatttattggacttgttatgggtgatagggggttgatttctcgt

SEQ ID NO: 290008 - DNA, 271 bp, Glycine max
  unsure (1)..(271): unsure at all n locations
ggtgccttatcgctgtggttttcatcgtcttccttctcttatatttctcttttnttttngncttcgccgnangccgaaacaatggccggaaaaggagngggncctgctancggaatcgatctcggaacnacctatncttgtgtcggtgtgtggcaacatgnccganttgaaatcatcgccaangaccangggaacagaacgacgccgtcttacgtcggtttcactgataccgagcgtctnatgcggtnatgcggntaagaacnaagtcgcc

SEQ ID NO: 290009 - DNA, 273 bp, Glycine max
  unsure (1)..(273): unsure at all n locations
cttnactatttcactctcaattctcatttctcagcaaattgnatcgagcgaattcacaaaccctagttttcgacgatgggtcagatccagtactccgagaagtacttcgatgacacttatgaatatagacatgtggttcttcctcctgaagtcgcaaaactgcttcccaagaatcgtcttctctccgaaaatgagtggcgagctattggggttcagcagagccgtggctgggttcactatgcaattcatcgccctgagccacacataatgctt

SEQ ID NO: 290010 - DNA, 270 bp, Glycine max
cttttactcaacctcaatggactcctcctcatcgttttcgagcctccgcgcgtacctcaacgcactctctccacacccccacgcgcctcgcccaacgcgccctctccgtctccacctcctacgatgagatgagtcaggtccgctcccgctccggcaccagcatgcgcaagaccctccgctggttcgatctcgtcggcctcggcatcggcggaatggtcggcgccggcgtcttcgtcaccaccggccacgccacccgctacgccggcccgg

SEQ ID NO: 290011 - DNA, 269 bp, Glycine max
accaaatcatcacacacacatactaagaagcaacaattcttctacaatggatctcctccttctggaaaagaccctcataggtctcttcctcgctgcggtggtcgccatcgccgtctccaccctccgcggccggaaattcaagctcccaccgggcccactccccgtcccaatcttcggcaactggctccaagtcggcgacgacctcaaccaccgcaacctcaccgatttggccaaaaaattcggtgacatcttcctcctccgcatggggc

SEQ ID NO: 290012 - DNA, 268 bp, Glycine max
  unsure (1)..(268): unsure at all n locations
ggatattcctcacagcgacaagaggtttgctgggtttgataaggagaagaaggagcttgatgctgaggttcatcgcaaatatgtttttggtggacatgttgctgcctatatgaagatcttggcagaagatgaaccagagaaataccagtcacacttcagcgaatacatcaaacgtgngatagaggctgatggtattgaggcactttacaagaaggttcatgctgccatccgtgctgatcctactctcaggaaatctgataagcagccc

SEQ ID NO: 290013 - DNA, 259 bp, Glycine max
  unsure (1)..(259): unsure at all n locations
gtgaacttaccagtaatcatcanaaggcttatttgngancaattacagganagactnaggcccttgtgganctaacagtgatagagatattgtcaaggcnngcttctgatgaggtctaccttggacagagggacaatccnaattggactgatgacacaaaggcnattcaagcctttaagangtttggacacaagctgaaggaaattgnggacaanatctcagggaggancaagaangcaagccttnggaaccgtaatgg

SEQ ID NO: 290014 - DNA, 268 bp, Glycine max
  unsure (1)..(268): unsure at all n locations
ttggagtgagcgaagaatatgtattctagagattcatggggtggaccgttggagataaacgcgacggactcggcgacggaggacgagcggagccggaacctgcaggacgttgacagggcagcgctgtcgcgtcccttggatganacgcagcagagctggctccttggccccggcgnnnnnnnnnnnnnnnnnnncgtcgatctcggctgcatcatcgtcagccgcaagatcttcaagtggaccttcggcacaatcctcttcgccgctt

SEQ ID NO: 290015 - DNA, 273 bp, Glycine max
  unsure (1)..(273): unsure at all n locations
ctgatactttctgagtacaatacaacactgccatggctgcctcantctccactattggagctgtcaacagagctccactgagcttgaacagctctgaagctggagattcggttcccagttcagccttntttggcacaagcttgaagaaggttactgcctcaagggtccctaacgtcaagatttcttctggaagtttcaaaatcgttgcggcggaganagagattgatgagcaacaacagacaaacaaggacagatggaaaggtcttgcctatg

SEQ ID NO: 290016 - DNA, 226 bp, Glycine max
tcgccggcgatcaccgccaccccgacggcgtacgagatgctggagagctttcactttccggcgggtattctcaccaagggagtgaccggttacgagctggatccgtccagcggcaaattcagcgccgatctgaacggttcgtgcagtttctccctcgaaggttcgtaccagttgagctaccagaaaaccatcaccggctacgtatccgaaggcaggctcaccgaat

SEQ ID NO: 290017 - DNA, 266 bp, Glycine max
  unsure (1)..(266): unsure at all n locations
acaattcgnacgagggaagtgttcccgccatgggaatggagcgagtgcagtgtgcctatgcctctctggacgaagcgttcgaaatagggaaagaggcgtatcaggggcagcagtacagccagatttacttcgcgcgccttcatttgatgcgaacacttttatattccctcgttccncattggaaacccaattttcccgtgtgcacagtgctgggattggaagaggggaaggagtgtgtcattgttgganccctctataaacacatg

SEQ ID NO: 290018 - DNA, 268 bp, Glycine max
  unsure (1)..(268): unsure at all n locations
ggncaattgtncagtattntggaaggatgtcttacgttgctcataacgttaatcagccccaagagaaagntttgtnagaggnaaatttttcctttgatattaaatctcgctctagattggaaaaagtttcctctacaaaagcacaatttgttagtggaaaaaccttcaaatatgatatanttggtgctggttcacattcttcagaagattttcctgaanaggaagatcanganaaacccaaaaagattgatgcccgattgagacaaag

SEQ ID NO: 290019 - DNA, 273 bp, Glycine max
  unsure (1)..(273): unsure at all n locations
caaaaagattgatgccagattgagacaaagaatagatcctcaatacaatgaggttcaggctcagatggaaacaaatttgtttaaattgtctcttgatgatgttgaaactcctaaaggttccatgttggatcttaaaatttctcaatccnaaattgcacttcccaagaacacagttggaggaaccattctgcgtagtgatctattggcaaatttnttgacagagggcaattttagagcaagtgttgatttgcagcgcactcatcgtattaaagg

SEQ ID NO: 290020 - DNA, 273 bp, Glycine max
  unsure (1)..(273): unsure at all n locations
gaagncgctgatgtagctgctgctataagggctgggttctatgacattggtattggtgccggtttggaatctatgaccactaatccaatgggatgggatggatcagtgaatcctaaggtaaaaatgtttgaacaagcacaaaactgccttcttcctatgggaattacctctgaaaatgttgcacagcgctttggggtttcaaggaaggaacaagaccaggctgcagttgagtctcacaggcgagctgctgcagctactgctgctggtaaattt

SEQ ID NO: 290021 - DNA, 289 bp, Glycine max
  unsure (1)..(289): unsure at all n locations
atcaaggttgtagcaccacctgagagaaaatacagtgtctggatcggtggttctatcttggcatctcttagcaccttccagcagatgtggattgcaaaggcagaatatgacgaatctggtccatcaattgtgcacagaaagtgcttctaaactgtttccgatagatagggttattgaagggaaagactantatcatcacgntttgttctggaagcaangcattnnnngntggaacccnttggnttccaggttttgnnaaccttcaatnnattctcttgttggngtgatc

SEQ ID NO: 290022 - DNA, 283 bp, Glycine max
gctacttcctactccaaccgcacttctgctccgcaattatcatgggcaaggtcaagatcggaatcaacggatttggaagaattggccgtttggtagccagagtggctctgcagagagacgatgttgaactcgttgccgttaacgaccctttcatcaccaccgattacatgacatacatgtttaaatacgacagtgttcatggacactggaagcatcacgatgtcaccgttaaggacgagaagacccttctcttcggtgacaagccagtcactatttttggaca

SEQ ID NO: 290023 - DNA, 279 bp, Glycine max
cgaagatcagggaggagtacccggacagaatgatgctcacattctctgttttcccatccccaaaggtctctgacacggttgtggagccttacaatgctactttgtccgttcaccaactagtggagaatgcagatgagtgcatggttcttgacaatgaagcactctatgacatttgcttcaggaccttaaaactcaccactcctagttttggtgatctgaaccacctgatttctgcgacaatgagtggagtgacatgttgcttgaggttccccggacaac

SEQ ID NO: 290024 - DNA, 274 bp, Glycine max
  unsure (1)..(274): unsure at all n locations
ctttctttcaggttcattacttgatcagtgtcaaaagggtagttgcnaattgcaatggctaagcatgatgttgagggtggttccttctcagcaaaggactaccatgatcctcctccagcacctttgattgatgctgaggaactcacacagtggtccttctacagggctttgattgctganttcattgccacattacttttccttacatcacagtgctcactgtgattggttacaagagccagagtgatgtcaaggccgggggtgatgtgtgtgg

SEQ ID NO: 290025 - DNA, 287 bp, Glycine max
  unsure (1)..(287): unsure at all n locations
cctgactgtaacatagttggtgcaatgcttttggntgatacttatcataccaatcctgaaaatgcagttcgtagtatttttgttgcgcctttcagaggcggaaggcccattncggtggttacatttccgaataccattgtgcagattgaaccagacatgaattcaaggtttcagcttttgagtaccactaccaatggtgattttgttcaaggaaaagatctcgcgatggttaaagttaatgtagcatgtgctgctgttggctgacatcaagttacactccaactcca

SEQ ID NO: 290026 - DNA, 282 bp, Glycine max
ggcagcttgctgaaataatgattcaggtttactcaaaggtaagtggagaacaaactgctgaaacacctaccattgatgtgagctcaaaagaattttatggtgagggatatgatgacagtgacaagagaatccctgacatgaccataataaacaagcagcttggatggaatcctaagacttcactttgggacctgcttgaatccactctgacatatcagcacaggacatatgctgaagccgttaagaaagtcattgcaaaacccctcgcaagttaagctttta

SEQ ID NO: 290027 - DNA, 278 bp, Glycine max
  unsure (1)..(278): unsure at all n locations
cccgtgtgtcgccgccatggccaccgtcaccacccaagcctccgcngcaattttccggccatgtacctcgaaatcgaggtttttgaccggctcttccggtaaacttaaccgggaagtgactatgcggccaatggggtgccctccttctgcctctttcaaggttgaagccaagaagggagagtggttacctggcttngcctccccaacttacctcaatggcactcttcctggtgacaatggatttgaccctctggggctagctgaggacccagagaatt

SEQ ID NO: 290028 - DNA, 273 bp, Glycine max
  unsure (1)..(273): unsure at all n locations
caatgtttcanggaggggaaactcgggaatgcaagatgggaagtcttcagatcncctctgntgcgattaaggatctggtgngtgggtacnatgatnccggggntgctatcaagtttaactttcctgnttcnttttccattactatgttgagttggagtgtgattgagtatagtgcaanatacgangntgctggggagcttgancatgttaaggngatcnttnannngggtactgnttntnttctcaagnntttcantagtactgctgacacca

SEQ ID NO: 290029 - DNA, 273 bp, Glycine max
  unsure (1)..(273): unsure at all n locations
cgtattttcccctcttcttcccctctctcgtgttatccgctttagtnttctcgggaaaatcatggtgaaaggtccaggtctctactctgacatcggcaagagagctcgcgatcttctgttcanggattatcagaatgaccacaagttcaccatcaccacttacacttccactggagtggaaatcacttcaactggagtcaggaaaggtgaaatatatttggccgatgtcagcactaaggngaagaacaagaacatcacaatgatgtcaaagtg

SEQ ID NO: 290030 - DNA, 279 bp, Glycine max
  unsure (1)..(279): unsure at all n locations
tccaatatattccattctctctgtgtatttccctacctctcccttcaagatgcagatcttgcgtcaagacccttcaccggcaagaccatcacccttgaggtggaaagctctgacaccatcgacaacgtcaaggccaagatccaggacaaggaaggaatccccccggaccagcaacgtctcattttcgccggaaagcaacttgaggacggccgtacccttgctgactacaacattcagaaggagantactcttcaccttcgtcctccgtctncgtggtgg

SEQ ID NO: 290031 - DNA, 288 bp, Glycine max
gaaatgttatggacatgagagctggttttggaggatttgcagctgcactgattgatcagagtatggacagctgggttatgaatgttgttcctattagtggtccaaacaccttgcctgtcatatatgaccgtgggctgattggagttatgcatgactggtgtgaaccatttgacacctacccgagaacctatgatttactgcatgctgcaaacctgctttctgttgagaagaaaagatgcaatttgtcatcaattattgcttgagatggatcggatactaaggcccggt

SEQ ID NO: 290032 - DNA, 281 bp, Glycine max
  unsure (1)..(281): unsure at all n locations
tcctccacagaaggaaaacttcaatgatgtgtaccttgtttctganttaatggacacagatctgcatcaaatantacgttctaatcagcaattgactgatgntcattgtcggtattttctgtatcaattgttacgagggctcaaatatgtacattcagcanatgttttgcaccgtgatctaaagcctagtantttgcnattgantgccaatgtgaccttaagattgcggactntggtcnngctagaactacatctganactggcttnatgactgantatnt

SEQ ID NO: 290033 - DNA, 275 bp, Glycine max
  unsure (1)..(275): unsure at all n locations
gggagaactcggacgtgaagacgctggtgaagtacaagcacggncaagaagtactgcgacaaaggatgggaatgtaagggctggtcaatttactgttgtaacctcaccattaccgancatttccagacctaccagttcgagaatctgttctccaagcggaactcgccggtggcgcacgcggtcggattttgggactaccactccttcatcgccgccgccgcgctttttgagccggaagggttcggcaccaccgggaacaagacgatgcagatgat

SEQ ID NO: 290034 - DNA, 273 bp, Glycine max
  unsure (1)..(273): unsure at all n locations
ggnatggactgccaccccaatgcaggatgttcaggttacaattgattggtttatttcctctcaggaatgtgttcccagaacctattgtgttttaaatccacaaaatccttttgtgttaaataggtggatgggaaaactgactttcccccagggcacttcccgaagtgttaagagaatgcctctttctatagggggaggagctggtgcaaagaatgctattctcatgaacatgccaaatgctgttctttcaatgtggagatattntgttgnaga

SEQ ID NO: 290035 - DNA, 273 bp, Glycine max
agagtttgttgtgagctataagctagtttatcgtgaggagaatatgaagttgtttgttttctttgttgctgcagtagttttggtagcatggccatgccatggcgcaggctaccaaaggttccctctccgaatgaaaactggctatggtgagcgttcttcggaggtaaaatgcgcaagttttaggcttgctgtggaagcacacaacatccgagcctttaaaaccattcctgaagagtgcgttgaaccaacaaaggactacattaatggcgaaca

SEQ ID NO: 290036 - DNA, 280 bp, Glycine max
  unsure (1)..(280): unsure at all n locations
gtggtgatggaggtgccgaagctgggaaaacaagccgcaacgaaagcgattaaggagtggggtcaaccaaagtcnnagatcacacaccttgtgttctgcaccacttcaggcgtggncatgcccggngcagattaccagctcangnagnttctcggcctgangcactncgtnaagcgcctcatgatgtanncagcagggctgcttcgncggnggcaccgtactccggcctcgcgaaaggacctcgccgagaacaacaanggtgcgnnggtgctcgttgtct

SEQ ID NO: 290037 - DNA, 281 bp, Glycine max
tgcatatgggctcaatcctggtatttcaggttctcgtcttttgggcaccattcctgcagtccatttcacagcaaactgtttggaatcaaatggcaacagtgagaacaccattgaattttgattctagcaagcagagcttttgtcaattttctattgaccttctcggtggaggaattttagtggacaaaactggagattggatcacacttatacaaaattctccaattagtaacttgttgagagttgctgcttggaagaaaggctgtttaatggtcaagatt

SEQ ID NO: 290038 - DNA, 271 bp, Glycine max
  unsure (1)..(271): unsure at all n locations
cttttttctctttctctctttgaaactctgtgaganaccttaactntgtaattgcaatggctgatgcttctgtggccccaccacctccactgaaagatgagcttgacattgtgatccccaccataaggaaccttgactttcttgagatgtggaggccattctttcagccttaccatttgatcattgttcaagatggtgaccccaccaaaaccatcaaggttcctcctggctttgactatgagctctacaaccgtaatgacatcaacaagct

SEQ ID NO: 290039 - DNA, 272 bp, Glycine max
  unsure (1)..(272): unsure at all n locations
cgagataactagaaacagtgtgatgaaaatgaagntccttgttttcttcgttgctacaattttngtagcatggcaatgccatgnngtacgatatgttccctctccgaatgaacactggctatggtgcccgtactccggaggtgaaatgcgcaagttggaggcttgctgtggaagcacacaacatctttggctttgagaccattcctgaagagtgcgttgaagcaacaaaggaatacatccatggcgaacaatatagatcagactccaaaaca

SEQ ID NO: 290040 - DNA, 282 bp, Glycine max
  unsure (1)..(282): unsure at all n locations
ccccatttttgttggaagcagaagccatggaaaccaacacactcccaaaccagcagacaccaaaaaccaaaaggcaaatcttcatactctcaggtcaaagcaacatggccggnccgtggcggggttatcagggacgctaacaaccgtaagcggtgggacggcgtggttccgccggagagccgctccgatccatccatcctccgcctctccgccaccctccaatgggaacccgcgaacgagcccctccacgtcgacattgactccagaaaggcttgcggcgtg

SEQ ID NO: 290041 - DNA, 271 bp, Glycine max
  unsure (1)..(271): unsure at all n locations
ccctaacgcgtgcatagcagagtcagagacagagacgcagccatgnggcggagacctgcgaggtgttataggcaaattaagaacaagccataccccaagtcacgtttctgccgtggtgttcctgatcccaagatcaggatttatgatgttggtatgaagaagaagggtgttgatgagtttcctttctgtgtccatctggttagttgggagaaggaaaatgtttcaagtgaggccctggaagctgctcgcattgcttgcaacaagtacatgg

SEQ ID NO: 290042 - DNA, 269 bp, Glycine max
  unsure (1)..(269): unsure at all n locations
agtggtttcagtgagtgatcggtgttcacttgatccttcataagtgcgtcatcatgcatcatcatcatcaccgttgattgaagaagatgccgatcagaaacatcgccatcggaaggcctgaagaggctactcaccccgacacgttgaaggcggggttggctgagttcatctccaccttgatcttcgtgttcgccggttcaggttccggcatcgcctacaacaagctcnccgacaacggcgccgccactcacgncgnctcattgcgttcc

SEQ ID NO: 290043 - DNA, 282 bp, Glycine max
  unsure (1)..(282): unsure at all n locations
tctgctggagttttatgctccctggtgtggtcattgcaaacagttggctccaatattggatgaagttgctatctcatatcaaaatgaagctgatgttgttattgccaaactggatgcaactgccaacgatatcccaagtgaaacctttgatgtccaaggttatcctaccgtgtacttcaggtcagcaagtggaaagttatcacaatacgacggcggtangaccaaggaagacatcatagaattcatcgaaaagaaccgggataaacctgctcagcaagaaca

SEQ ID NO: 290044 - DNA, 267 bp, Glycine max
  unsure (1)..(267): unsure at all n locations
caagtccaagaagaaggccttcaccaagtactctaagcagtatgaaactgaggagggaaagaaaaacattgaggcgcantggagaaactgaagaagtatgctactgtggttcgtgttttggctcacactcagatcaggaaaatgaaagggttgaagcagaagaaagcccatatcatggaaattcaggttaatggtggtagtattgcacaaaaggtggactttgcatacagtttctttgagaaacaggttcctattgatgcagtgttc

SEQ ID NO: 290045 - DNA, 296 bp, Glycine max
  unsure (1)..(296): unsure at all n locations
ggcagaaagcaagctcatcctagagttttaaaaatggcagcagcctcctccatggctctctcttccccatccttggctggcaaggccgtgaagctgggcccatcagcccccgaagtcgggagggtcagcatgaggaagaccgtcaccaagcaggnntccttcggaagnnnatngcacggcccagaccgcgtcaagtacttgggcccattctctggcgagcccccgtcctacctcactggcgagttcccaggtgactacggctgggacactgctgggctttcggcgcccagaaacct

SEQ ID NO: 290046 - DNA, 289 bp, Glycine max
  unsure (1)..(289): unsure at all n locations
cgcctttctctctcttctttttactctctctctgtctctctctacgctttctcgttcganatccctcaagggatccactaactgaaggagaaatggggttgacattcaccaagcttttcagccggcttttcgccaagaaggaaatgcgaattctgatggtgggtctcgatgcagctggtaagaccaccatcctgtacaagctcaaacttggagagatcgttaccacaattcccaccattgggttcaatgtggagactgtggaatacaagaacattagtttctgtctggg

SEQ ID NO: 290047 - DNA, 294 bp, Glycine max
  unsure (1)..(294): unsure at all n locations
ctcgtcactagctctgtgcattcttctctcgctctctgccttccatcacactcggcattnccctttcccaagatagtagaagatggcagacactgaggatattcaacctcttgtntgtncacaatggaacaggaatggttaangctggattnncnggagatgatgcnccangtnntgtnnttncnagcattgtnggttgttcctcgtnacactggtgtgatggttggcatgggccaaaaagatgcatatgttggtgatgaggcacaatctaagaggggtatttggctctcaagt

SEQ ID NO: 290048 - DNA, 291 bp, Glycine max
  unsure (1)..(291): unsure at all n locations
ctgctgggagctttactgcctcgaacacggcattcagcctgangggcagatgccaagtgacaagaccgttggtggaggtgatgatgctttcaacaccttcttcagtgaaactggggcaggaaagcacgtgccccgcgcgatttttgtagatcttgagcccactgtgattgatgaggttaggactgggacataccgccaactattccatcctgagcagctccattagtggaaaggaggatgcagcaaacaactttgcccgtggccactataccattggaaagagattgttga

SEQ ID NO: 290049 - DNA, 289 bp, Glycine max
  unsure (1)..(289): unsure at all n locations
cctgactgtnacatagttggtgcaatgcttttggttgatacttatcataccaatcctgaaaatgcagttcgtagtatttttnttgcgcctttcagaggcggaaggcccattcgggtggttacatttccgaataccattgtgcagattgaaccagacatgaattcaaggtttcagcttttgagtaccactaccaatggtgattttgttcaaggaaaagatctcgcgatggttaaagttnatgtagcatgtgctgctgttggcttgacatcaagttacacncaactccatt

SEQ ID NO: 290050 - DNA, 292 bp, Glycine max
agagaagtgagatacactaagttatcctcataaatacactctaattaggtggcaagataagtgtctaaccttagtaacattgccacatattgtgttcattttggaattgtgccactaaaattctattcaattcatctatggctgcctcttcttatgctatgcaatcaatcctggcaaaccctttgatccgcatttccagcgggtctagggtgaaccaatttggcgttcctgctttgcacatgagaaggaatgttggcctgagagttaggtccatggctaagaagaacaacca

SEQ ID NO: 290051 - DNA, 298 bp, Glycine max
  unsure (1)..(298): unsure at all n locations
ggcaggcaagccccactcaancaccacacctgctcctgcgtncangctnacccgtnnngangnnatgactacctntcaagttntaaaagtatngnanatggcngagacattcctatttacctcagagtcggtgaacgagggacaccctgacaagctctgcgaccaaatctccgntgctgtcctcgacgcttgcctcgagcaggacccagacagcaaagttgcctgcgaaacatgcaccaccaccaagttggtcatggtcttcggagaaatcacgaccaaggcnaacgttactacgaga

SEQ ID NO: 290052 - DNA, 290 bp, Glycine max
  unsure (1)..(290): unsure at all n locations
ctcgcttgtgctgccttcgtttgcntttttatcacagaggaattaacatatatatagcaagcatggcagtcacactctacgaccttagctcttcctctgggttgaanaaacttgatgagtaccttctcccacgcagttacatcaccgggtaccaagctacaaaggatgatcttactgtttatgcagctttgccaactgctccatcagatgaatatggaaatgtttccaggtggtacaagcacattgatgctttgttgagaatctctggtgttactggcgaggatctggtc

SEQ ID NO: 290053 - DNA, 291 bp, Glycine max
  unsure (1)..(291): unsure at all n locations
cagagagtgatttcagtgagtgatcggtgttcacttgatctcatcataatcgtcagcgtcaattgaagaagatngccgatcaganacatcgncgtcggaaggcctgaagaggcgactcaccccgacacgttgaaggcggctttggctgagttcatctcaaccttcatcttcgtgttcgccggctcaggctccggcatcgcctacaacaagctccaccgacaacggcgctgccacccctgccgggcctcatctccgcctccatcggcccatgcattcgcctttcgtcgcngt

SEQ ID NO: 290054 - DNA, 287 bp, Glycine max
cttcaaaacactcataacacaaagcacaaagcaaagctcatccttgagttaaaaaatggcagcagcttcttccatggctctctcatccccatccttggctggcaaggccgtgaagctgggcccatcagccccagaagtgggaagggtgagcatgaggaagaccgtcaccaagcaggtctcctcaggaagcccatggtacggcccagaccgagtcaagtacttgggcccattctctggcgagccccgtcctacctaaccggtgagttcccaggcgactagctgggaca

SEQ ID NO: 290055 - DNA, 289 bp, Glycine max
  unsure (1)..(289): unsure at all n locations
atccaatttctttctctcaccatggatcatcgcaaaccattgttacccacttcctctgacgntgctccaaatccacgcactcggaaggatccttgttctaatgatttgcggtttgtttttgctctcttcccttgttgcctttggagggnacagggcctccaacgcgccacatgctgacgtgtcatcgccagcatcgaacgatgaacaacctagtcccacatcggtgccttctccgaaatggtacccggtttcacggggtgtgtcttctggggtgtcggaagtcatcaag

SEQ ID NO: 290056 - DNA, 294 bp, Glycine max
  unsure (1)..(294): unsure at all n locations
cactcggttctgccttcacaaaaaaattatcgagatcccctttttctcctaagaaaagccatggctaagggtcccggtctctactctgacatcggcaagaaagccagggatctgctgttcaaggactaccacagtgaccagaagttcaccatcaccacctactcacccactggagttgctataacagcatcaggaaccaggaaaagtgaactgtttgtggctgatgtcaacacccagttgaagnacaaaaacatcatactgntatcaaagttgatacagattcatctcttcacc

SEQ ID NO: 290057 - DNA, 294 bp, Glycine max
  unsure (1)..(294): unsure at all n locations
ctgcttctcctatggcaagccaactcaagtccaccttcactaaaactcttgtagctcccaagggcctctctgcctcttcaccantccacctcctgccttctaagaggcaatttagcttcactgttagggccatccaatcagaaaagccaacctatcaagtgattcaaccaatcaacggtgatcccttcattggaagccttgaaaccccagttacatccagccccttgattgcatggtacttatcgaacntccccgcatacaggaccgcagtggagccaactataaggagggatc

SEQ ID NO: 290058 - DNA, 288 bp, Glycine max
  unsure (1)..(288): unsure at all n locations
ctcactctcattcgcaatggccgcagcagcacgtcctctcgtcaccgtgcaggccctcgacagtgacatggccaccgacgcctccgccaccgtccctatccctgacgtcatgaagtcctccatccgcccggacatcgtcaacttcgtacactccaacatctccaagaacagccgacaaccctatgcagtcagccgcngcgctggccaccagacttccgccgagtcctggggaaccggtcgtggccgtctcccgtatcccccgtgttcccggcggcggacccatcgcgc

SEQ ID NO: 290059 - DNA, 284 bp, Glycine max
  unsure (1)..(284): unsure at all n locations
ttcaaatggttgaagcaggaaatatggtcatttccatacaagttcctgaagaacgtcaccgacaatttcagtgagacgaatgttctgggacaaggaggttttggaacggtttatagaggtgaactccatgatggtacaagaattgcggtgaaaagaatggagtgtggggcaatagctgggaagggtgcgacagaattcnagtccgaaattgctgtgttgactaaggttcgccaccggcatcttgttgcccttcttggttactgcttggatgggngagaagcttc

SEQ ID NO: 290060 - DNA, 283 bp, Glycine max
  unsure (1)..(283): unsure at all n locations
tgaggttgtcattaagcacttcaacaaggaacaggatgccaaccaaagcaattttcgggatcctgaaagcaatgctgattttgaggttcaggagaagttgtctctgcnggagtggtttgcaaatgaatacaaacggtttggttgcactcttgagtttgttaccaataaatcacaagaaggttcacagttttgcagaggtttcggtgggataggtgggatcttgcgttaccagcttgatatgcgatcattgatgatttttctgatgatggaggntgtatgatga

SEQ ID NO: 290061 - DNA, 286 bp, Glycine max
  unsure (1)..(286): unsure at all n locations
ggctgcaagacaaagtcttggaccaagatcactccaatctccatttggcttctccagaaaagcctcctttcttgttaaggcagctgctaccccccctgtcaagcaaggatcagacaganctttgtggtttgcatcaaagcaaagtctttcttacttggatggcagccttccgggtgactatggatttgaccctctgggactttcagaccctgaaggaacaggagggtntcattgngccgaaatggctagccatatggtgagatcaatcatggtcgtagcaatgtng

SEQ ID NO: 290062 - DNA, 285 bp, Glycine max
gcagatcatatatacttactgaggattcgtccactacaattttgtttgcttcttcattagtgcaacacgaatgcatccctcaagcaatcttaggaatggatgtcatttgccaagcgaaatctgggatgggaaagactgctgtttttgttttgtctacacttcagcaagttgatcctgttcctggtcaagttgcagctcttgttctttgccacacaagagaactggcttatcagatttgccacgaatttgagaggttcagcacatatcttcctgaataaaggctgc

SEQ ID NO: 290063 - DNA, 286 bp, Glycine max
  unsure (1)..(286): unsure at all n locations
tggcaactcaaggtcaagtcattacctgcaaagctgcggtggcctgggaacccaacaagcccttaactgtccaagacgttcaggtggctccgcctcaggccggcgaggtccgtgtccaaatcctcttcaccgctctctgccacaccgatgcttacacttggggcggcaaggatcccgaagtctcttcccctgtattcctggccatgaagctgcagggattgtggagagtgttggagaaggtgttactaatgttcagcctggggatcatgtcantccgttatcaggc

SEQ ID NO: 290064 - DNA, 291 bp, Glycine max
  unsure (1)..(291): unsure at all n locations
atcgagataactagaaacagtgtgatgaaaatgaaggtccttgttttcttcgttgctacaattttngtagcatggcaatgccatgcgtacgatatgttccctctccgaatgaacactggctatggtgcccgtactccggaggtgaaatgcgcaagttggaggcttgctgtggaagcacacaacatctttggctttgagaccattcctgaagagtgcgttgaagcaacaaaggaatacatccatggcgaacaatatagatcagactccaaaacagttaacaacaagcttact

SEQ ID NO: 290065 - DNA, 287 bp, Glycine max
  unsure (1)..(287): unsure at all n locations
ctctatcagatgcaggcgaatgggactcttctcttccctgctantaatgtcaatgactctgtcaccaagancaagtttgacaacttgtatgggtgccgtcactctctccctgatggtctcatgagggctaccgatgttatgattgctggaaaggtggctgttgtggctggatatggtgatgttggcaagggttgtgctgctgcaatgaagcaggctggtgctcgtgtcatcgtgaccgagattgatcccatctgtgcccttcaggctctcatggaagccttcaggtt

SEQ ID NO: 290066 - DNA, 284 bp, Glycine max
  unsure (1)..(284): unsure at all n locations
gcaattgggatgatatggaaaagatttggcatcataccttctataatgagcttcgtgttgccccagaagagcatccagttctcttaactgaggcccctcttaaccctaaggctaatcgtgagaagatgacccaaatcatgtttgagacctttaacacccctgctatgtatgtagccatccaggctgttctttcactttatgcaagtggtcgtacaactggtattgtgttggattctggtgatggtgtcagccacactgtccctatctatgagggtatgcccncc

SEQ ID NO: 290067 - DNA, 282 bp, Glycine max
  unsure (1)..(282): unsure at all n locations
aaaaagcatggtatttttagcatctgaagcagtcattaagcagattcctcgtcttttgggtcctggtctcaacaaagcaggaaagttccctacacttgttactcaccaggaaactcttgagtcaaaggttaatgagtctaaggccatggttaaatttcaacttaagaaagtgctctgcatgggagtagctgtgggcaatgttagtatggaggaaaagcaaatcttccnaaatgttcaactgagtgttaacttcctgtctctttgttgaaaagaactggcaaa

SEQ ID NO: 290068 - DNA, 288 bp, Glycine max
gagaatggctgcggaaaacgttgttgagttcacagacttacccgtcaagaggccaagagaagaagaagaaggaaccaatggcgtctccaacgacgccgtttcagcgctccccaatgaccctcaataccctggcatctctgcggttattcccggttggttctccgaaatcagcccaatgtggcccggggaggcacattccttgaagatggaaaagattttgtttcaagggaagtctgactatcagaatgtcatggtcttccagtcatcaacatatggcagttcttgttt

SEQ ID NO: 290069 - DNA, 280 bp, Glycine max
cataacctttgtgaacaccgagttcaaccacaagcgtttggtgaagtctcttggacaagaatttgtcaagggacaacctcattttcgatttgagaccataccagatgggttgcctccatctgacaaagatgcaacacaaagcattgcagcattgtgtgatgcaactagaaaacattgttatgagccactcaaagagcttgtgaagaagctcaatgcttcacatgaagtgcctttggttacctctatcatctatgatgggctaatgggtttggggaaagtg

SEQ ID NO: 290070 - DNA, 278 bp, Glycine max
  unsure (1)..(278): unsure at all n locations
ccacgactcacaagancttgcggggcccacgtgcggggatgatcttttaccggaagggcccaccgccgccgaagaaggggcagccggagaacgcggtttatgatttcgaggacaagattaacttcgcggtgttcccttcgctgcagggtgggccccacaaccaccagatcggtgctctcgccgtggcgctgaagcaggccgcgtcgcccgggtttaaggcctacgcgaacaggttaaggcnancgccgttgcgcttggaaaatattgagggaaagggt

SEQ ID NO: 290071 - DNA, 281 bp, Glycine max
  unsure (1)..(281): unsure at all n locations
ctaaaatatttgaacctagagcttggtatgatcttgacaaatgtcccaaattcaatggagagttcttacatgatataactcgtcagatattgaaagaaacacgactgaataanacattgacgaacgtggtaataccaactttcgacgagaggnaaaccaagccagtnatattctcaaactataagctcaagacggaaacttacttaaatgccaaactctcagatatatgcatcgggacttcggctgcaccgacttatctaccgccgcaccatttcagaatg

SEQ ID NO: 290072 - DNA, 270 bp, Glycine max
  unsure (1)..(270): unsure at all n locations
caaatccaatggcttcagagaagaaactttcgaacccaatgagggagataaaagtaccagaagctcgtcctcaatatctctgttggcgagagtggagatcgtctcaccagagccgccaaggtgttggaacaacttagtggccaaaccccagtgttttccaaagcaaggtacactgttcgttccttgggattagaagaaatgagaagattgcatgctatgtcactgtcagaggtgacaaggcaatgnaactnntggagagtnttgaaggtg

SEQ ID NO: 290073 - DNA, 282 bp, Glycine max
  unsure (1)..(282): unsure at all n locations
atgaactcattcaacactcatgatgacactcaaaagattgttgagaaatataaaaactcaaatattgagattcatacgtttaaccagagtcaatatcctcgtttggttgttgatgnctttttgccattcccatccaaggggcagacaggcagggacgggtggtaccctcctggccacggagacgtcttcccatcattagtgaatagtggaaagcttgatgtgctattatcacagggtaaggagtatgtgtttgttgccaattcagacaacctggtgctgtag

SEQ ID NO: 290074 - DNA, 277 bp, Glycine max
gcagagcagagagagacgcagccatggggcgaagacccgcgaggtgttataggcaaattaagaacaaaccataccccaagtcacggttttgccgtggtgttcctgatcccaagatcaggatttacgatgttggtatgaagaagaagggtgttgatgagtttcctttctgtgtccatctggttagttgggagaaggaaaacgtttctagtgaggccctggaagctgctcgtattgcttgcaacaagtacatgggccaatttgctggaaggatgctttc

SEQ ID NO: 290075 - DNA, 275 bp, Glycine max
  unsure (1)..(275): unsure at all n locations
gagtgatacaatacagagtgcgttgttgctccttcgccacaactccctgccaacatgggtatctccagagattctatgcacaagaggcgtgccactggtggcaagaagaaggcatggaggaagaacagaaagtatgagcttggtcgccagcctgctaacactaagctgtcaagcaacaagacagtcaggnggatccgggttagaggtggaaatgtgangtggagggcactgagattggatactggaaattatcctggggaagtgaatgtactcgc

SEQ ID NO: 290076 - DNA, 232 bp, Glycine max
  unsure (1)..(232): unsure at all n locations
aatggctgggcttcgtggcggccgtgtggattcaatgcatctccggcaacaactacactttctcaaactactccgacgccctcaaatcccncatgcacctcactcagctccaacttcaacaacctctccgtcgctaaagacgttggcaaagcctttgggcttctggcgggcctcgcctccgaccgcttccccacttgggctattctcctcattggctccgtgaaggccttat

SEQ ID NO: 290077 - DNA, 279 bp, Glycine max
gacaaaatggccgtaacagaagcaaacctaaagaaggctggcttccacacatgggagcagttaattctcaaggatccacatcttatcactccaaatgcactttcatacaaatcagcaatgagagagaatctgttgaggcagggatacagaattgttggaatcattggagaccaatggagcgatctgcttggagaccacagaggcgaaagcaggacctttaagcttcctaatcccatgtactacattgagtagtaccttcacctctctcaaatctagcta

SEQ ID NO: 290078 - DNA, 279 bp, Glycine max
ctcacactgtgtttggagcagaatcagatcgtgtgttccgtacgttcgttcgttcatttccagtgtcaaacatggcgtctcagatgagcaagaagagaaagtttgttgcggacggagtgttcttcgccgaactgaacgaggttctgactcgtgaattggcggaggacggttactccggcgtggaagttagggttacgccgatgcgcaccgagatcatcatcagagccaccagaacccaagctgttctaggtgagaagggaaggagaattagggaactta

SEQ ID NO: 290079 - DNA, 279 bp, Glycine max
  unsure (1)..(279): unsure at all n locations
catcaatgttcaattattcaatagtcttctgttgcgtcgggagtgttgttcgtttagcaatggagagtatgtaaaaacaggtctggctgaattagagcagtggtgcatcgaggcaacggaggagtatactggctctgcttgggaggaactgaaacatatcaggcaggctgttggattcttggtgatacatcaaaaacccaaaaagtccctgaatganattacaaaggagctttgcccagttctcagtatacaacagttatacaggataagtacaatgta

SEQ ID NO: 290080 - DNA, 281 bp, Glycine max
ttgtgatgtctgggaatgcagcagtcaaaaggagtgattgggcctcattggtacaagtgtttttaacaaacagcaacagtacagagcattttgatgcatgtaagtggacaaaatcagaaccacattcctgggaattgatcttcccaatagaggtatgtggtcccaataatggttttgaaatgtggagttctgagtgggcaaatcaaacttcatggcatttgagtttccttattgacaatcccaaacaatctacagtttttgatattctcttgggaatctct

SEQ ID NO: 290081 - DNA, 284 bp, Glycine max
  unsure (1)..(284): unsure at all n locations
cacctttgttcactcttcttctcttgcggctagggttttagcgcanttcttctagatttaaggaagatgggtaaggaaaaggttcacatcagtattgtggtcattggccatgtcgactctgggaaatccactaccactggtcacctgatttacaagcttggaggcattgacaagcgtgttattgagaggtttgagaaggaagctgctgagatgaacaagaggtctttcaagtatgcctgggtgctggacaaacttaaggctgagcgtgaaagaggaatcaccat

SEQ ID NO: 290082 - DNA, 276 bp, Glycine max
  unsure (1)..(276): unsure at all n locations
aaacaaatttgtttaaattgtctcttgatgatgttgaaactcctaaaggttccatgttggatcttaaaatttctcaatctaaaattgcacttcccaagaacacagttggagganccattctgcgtagtgatctattggcaaattttttgacagagggcaattttagagcaagtgttgatttgcagcgcactcatcgtattaaaggaatgattaanatggtggctacagttggtattcctgagaatacaggtatagcattggcctgtgctatgaata

SEQ ID NO: 290083 - DNA, 277 bp, Glycine max
  unsure (1)..(277): unsure at all n locations
gaccaagcataaggttgatattgatacagtggagaagtttcagacgttgaggttgcaggaacagaagtattttgatgacatggttcagaaatgcaaggatgtgggtgcaacccttgtcatttgccaatggggttttgacgatgaagcaaatcatctcttaatgcacaggaacttgcccgctgtcagatgggttggtggtgtagagttggaattgatagctatagcnactggtggaagaatttttcctaggttccaggagttatctccagaaaagttg

SEQ ID NO: 290084 - DNA, 278 bp, Glycine max
  unsure (1)..(278): unsure at all n locations
atttctccatttccattttctctctcacttttcaagaatcgtaagctatgggaaagtcttacccaactgtgagtgctgattaccagaaggccgttgagaaggcgaagaagaagctcagaggcttcatcgctgagaagagatgcgctcctctaatgctccgtttggcatggcactctgctggaacctttgacaaggncacgaagaccggtggacccttcggaaccatcaagcaccctgccgaactggctcacagcgctaacaacggtcttgacatcgct

SEQ ID NO: 290085 - DNA, 254 bp, Glycine max
  unsure (1)..(254): unsure at all n locations
ggcaacagaaacaaaagtggcaacattaggtggcatcacanaagtgcagggagctgccaacagcgtcgagatcaacaatctcgctcgctttgctgtagaggaacaaaacaaaagagagaattcagttctggagtttgtgagggtgattagtgcacagcagcaagtggtttctggagtgaattactacataacattggaagcaaaagatggtgagattaanaatgagtataaagcgaaggtttgggagagggaat

SEQ ID NO: 290086 - DNA, 278 bp, Glycine max
aacgcgatctctctctattctttgaaaccaaagttcaaactctgtcttccctgggttctatttcgaaatcaacgacgatgagttccacagaggcagcagccacagagaagaaaggtggaagagggaaaccgaagacttcaaagtccgtttcccgttcctccaaagctggccttcagtttcccgtcggccgtgtcgctcgctacctcaaggccggtcgctacgcccagcgcgttggctccggttcccctgtttatctctccgcggttctcgaatacctc

SEQ ID NO: 290087 - DNA, 277 bp, Glycine max
  unsure (1)..(277): unsure at all n locations
ctccaaatgttgtttataaaggaaagttggagaatcaaatgangattgctgttaagcggtttaataggaatgcttggcctgatgctcggcagtttttggaggaatcaagatcagttggtcagcttcgtaaccaaaggttggcaaatttgcttggttgttgctgtgaaggggaggagaggttgcttgtggcagaatatatgcccaatgaaacacttgcanagcacctttttcattgggaaacacaacctatgaaatgggcaatgcgactaagagttgt

SEQ ID NO: 290088 - DNA, 285 bp, Glycine max
  unsure (1)..(285): unsure at all n locations
gccttacattcctgactacaaactagcttttgagcacttttgtntgcatgctgcaagcaagaccattcttgatgagcttcaaaggaacttggaactgagtgacaagaacatcgaagcgtctagaatgacgctgcatcgctttggcaacacctctagcagcagcatttggtatgagttggcttacatggaagcaaaagagagtgttagaagaggagaccgtgtttggcaactcgcatttggctctggcttcaagtgcaacagtgtggtttggcgcgccatgcgccg

SEQ ID NO: 290089 - DNA, 273 bp, Glycine max
  unsure (1)..(273): unsure at all n locations
ggagttgctgttaaggatccatctgctccccatggagttcgacttttgatcgaggactatccttatgcttctgatgggctagagatatgggatgctatcaagtcttgggtggaagaatatgtctcattctactacaagtcagatgaggaacttcaaaaagaccccgagctccaagcttggtggaaagaacttgtagaggtgggtcatggggatttgaaggataagccatggtggcaaaagatgcaaactcgtgaagagttggttgangcttcc

SEQ ID NO: 290090 - DNA, 275 bp, Glycine max
gcaaagttgtcattggaatggatgttgcagcttctgaattctacaaggaagataaaacatacgatttgaacttcaaggaagataacaatgatggctcacagaagatctctggagatgctttgaaagatctatacaagtcatttgtgacagagtatccaattgtttcaattgaggatccttttgaccaggatgactgggagcactatgctaagcttactgctgaggttggaaccaatgtacaaattgttggtgatgatctcttggttaccaacccc

SEQ ID NO: 290091 - DNA, 276 bp, Glycine max
aacaacttctgctacttcctactccaaccgcacttctgctccgcaattatcatgggcaaggtcaagatcggaatcaacggatttggaagaattggccgtttggtagccagagtggctctgcagagagacgatgttgaactcgttgccgttaacgaccctttcatcaccaccgattacatgacatacatgtttaaatacgacagtgttcatggacactggaagcatcacgatgtcaccgttaaggacgagaagacccttctcttcggtgacaagcca

SEQ ID NO: 290092 - DNA, 267 bp, Glycine max
  unsure (1)..(267): unsure at all n locations
aaagtnttttcctttctctgctncttgccttctctgacacatttggtgccttgtagagcgtgttttggcaggaaggtggtatggcgaaggacgttgaggttgctgagcgtggctccttctctgggaaggactaccaggaccctccaccagcaccactcattgatgctgaggagctcacaaagtggtccttttacagggctctcattgctgaattcattgccactttgctcttcctctacattactgtgctcacagtcatagggtaca

SEQ ID NO: 290093 - DNA, 277 bp, Glycine max
gatatcacaatgcaggatgttcaggttacaattgattggtttatttcctctcaggaatgtgttcccagaacctattgtgttttaaatccacaaaatccttttgtgttaaataggtggatgggaaaactgactttcccccagggcacttcccgaagtgttaagagaatgcctctttctatagggggaggagctggtgcaaagaatgctattctcatgaacatgccaaatgctgttctttcaatgtggagatattttgttggagatctcgtctttgaag

SEQ ID NO: 290094 - DNA, 281 bp, Glycine max
  unsure (1)..(281): unsure at all n locations
cattatttnccggngctntggaaagaatttatggatgttgttnnnattcntccccttngttttagagtttatcacaggtgagcgactgaaaggtagcantggcgaacaggnacctggnaaagatggcatccatcgatgcacagcttaggcaattggctcctgccaaagtgagtgaggatgacaaactgattgagtatgatgctcttctnttggatcggntccttgatattcttcaagatttacatggggaggatctgaaggaaacagtccaagaagtatat

SEQ ID NO: 290095 - DNA, 271 bp, Glycine max
taaaaaatggcagatggtgaggatattcaaccactcgtctgcgataatgggacaggaatggtgaaagctggatttgctggggatgatgctccgagggctgtgtttcccagcattgttggtcgtccccgtcacacgggagtgatggttggcatgggccaaaaagatgcatatgttggggatgaagctcagtccaagagaggtatattaactctcaaatatcccattgagcatggtattgtgagtaactgggatgacatggagaagatctggc

SEQ ID NO: 290096 - DNA, 274 bp, Glycine max
  unsure (1)..(274): unsure at all n locations
aaaaaagcaaatccagccacagcacagcactctttgcnncacaacaaaaaaagncaacacagagagaagcgtcttaataaacgctcttctctgaaaaacctgatttcttctcttcttctcttctctttcgtttcgatcttcgatctctgaaaatgagagagtgcatttcaatccacatcggtcaggccgntattcaggtcggaaacgcctgctgggagctctactgcctcgaacacggcattcagcctgatgggcagatgccaagtgataagac

SEQ ID NO: 290097 - DNA, 264 bp, Glycine max
  unsure (1)..(264): unsure at all n locations
gcatattcctgtatctaatattagtgcaggggaaaatcatgtagttcaaatacccttaatggcacaggaggaaattctgtcttctagtgcaagtnatttcagaactgcaatggtgagtaaaaatagcaagcctcaagctactgcaatgcatgtgggagctataganattatcattgatagtttcgcaagtcctgactgtaacatagttggtgcaatgcttttggttgatacttatcataccaatcctgaaaatgcagttcgtag

SEQ ID NO: 290098 - DNA, 267 bp, Glycine max
aaaaactagccaaaaaatatcatgcctttttagcctctgaagcagtcatcaagacagattcctcgtctcttgggacctggtctcaacaaggcagggaagttccctacacttgtgactcaccaagaatctctcgagtcaaaggttaatgagaccaaggccatggtcaagttccagcttaagaaggttctctgcatgggagtagctgtggggaatgttagcatggaggaaaagcaaatcttccaaaatgtacaactgagtgttaacttc

SEQ ID NO: 290099 - DNA, 257 bp, Glycine max
  unsure (1)..(257): unsure at all n locations
cagaaagcaagctcatcctagagtnctaaaaatggcagcagcctcctccatggctctctcntccccatccttggctggcaaggccgtgaagctgggcccatcagcccccgaagtcgggagggtcagcatgaggaagaccgtcaccaagcaggcctcctccggaagcccatggtacggcccagaccgcgtcaagtacttgggcccattctctggcgagcccccgtcctacctcactggcgagttcccaggtgactacg

SEQ ID NO: 290100 - DNA, 273 bp, Glycine max
  unsure (1)..(273): unsure at all n locations
caacactgagcttaaccgancttcgcaaagatgaatcgggaaaagttaatgaagatggccggttcggntagaactggaggaaanggtactgtgagangaaagaaganggctgnccacaagacaacaaccacagatgacaaaaggcttcagagcaccctgaagagaataggggtgaatgccatccctgctattgaagaggtcaatatctttaaggatgacgtagttatccagtttctaaatcccaaagttcaagcntccattgctgcnaatact

SEQ ID NO: 290101 - DNA, 271 bp, Glycine max
  unsure (1)..(271): unsure at all n locations
caactccctgatcccctccttcatctactcctcttcctccaaaacgctccctntccaccacatgctcaacannnnnnnnnnnnnnnnnnnnnnnnnnnnnnnnccgccgccggccaatctcgacgccggatcgcgtggcctcatgattccctctcccagcgagtcacgcaagatcgagttgtactcccccgccttctacgccgcctgcaccgccggtggaatcctcagctgtggcctcactcacatgaccgtcactcctcttgacctagtc

SEQ ID NO: 290102 - DNA, 269 bp, Glycine max
agcgactacgactacgattgtgtgtacactgcatacgttagaaccggttcggtgttgaagggcggaacggactctaagatcgggctgaagctgtacgacaagtacggctactacatctacattaaaaacctcgaagcatggggcggcttgatgggcaagggctacgactacttcgagcgcggcaacctcgacatcttcagcggaaggggaccctgtcttgacggacccgtctgtgccgttaacgttacttctgacggatcgggttctcc

SEQ ID NO: 290103 - DNA, 271 bp, Glycine max
  unsure (1)..(271): unsure at all n locations
gganagcataatcaaatcaaccatggctaccctcattgctcccatcaccttttcgcctggtttagatgcagaagctcttagaaaagctttccaaggatgggggactgangagaagaccgttatagcaatattggntcacananatgttcatcagaggcaacaaatcagaaagatttatgaggaaatttaccaagaggacctcatcaaacgcctagagtctgagctctctggtgactttgagagagctgtgtaccgttggatgctggaacct

SEQ ID NO: 290104 - DNA, 276 bp, Glycine max
cccaaatacagcttggcacctcttgtgccccggctttctgagctcattggtatccaggttgtcaaggctgaagacagtattggtccagaagtagaaaagttggtggcttctcttccagatggaggtgttcttcttctagaaaatgtgaggttttacaaggaggaagaaaagaatgatcccgagcatgcaaaaaagcttgcctctctggcagatctgtttgtgaatgatgcatttggtactgctcacagggcacatgcatcaacagagggtgttact

SEQ ID NO: 290105 - DNA, 267 bp, Glycine max
gacaaaactagtgcaactttgcaatttagaaagttagcagattgtgattttctcaagagaaactttaagcagatgtctaatgttttgtgggtggctcctgaggacaaggcgagtttgtggtcacaacttcattatgtttcgtgtaataatctggaaatgcaagaagcttatcttgtcaatctcgtaaatgtgttacgagaattgtatttgcacagtccagaggaagctcgccaattgagaaggaaagctctttctcgtattgaatgg

SEQ ID NO: 290106 - DNA, 264 bp, Glycine max
  unsure (1)..(264): unsure at all n locations
tgatgacattcaaggtaatgacaacattcatgccgccgcctcctgcttctaccttcctagctttccatccccaggataacaacattattgccattgggatggaggattcaaccattcacatctataatgtcagagtcgatgaggtgaaatcaaaattgaaaggccaccagaagcgtattactggtttagctttttctaccaatcttaacatactggtctcatctggtgctgntgctcatcttngtgtgtggagtatagacacat

SEQ ID NO: 290107 - DNA, 265 bp, Glycine max
  unsure (1)..(265): unsure at all n locations
gcaagatggcaganatgataaacagtctttgtggtggtgatgaaaaattgatgcgtgaaaggacacacctgctgttggcttgttgttcaaggatggcaatttgtaagaaagatgtttggagagttgaatgtggaatcccttctggatttccgctcacagttatttgcaatagcatttttaatgagatgctcattagatatagctatgaaaaattactgcgccaggctaaagctccaagtatgtttttacaatccttcaaaaattt

SEQ ID NO: 290108 - DNA, 271 bp, Glycine max
  unsure (1)..(271): unsure at all n locations
tatctatccatctatcttttctaacatggctgctgggactggnctctttgcagagattttggatggagatgcgtacaagtactatgctgatggagagtggaaganatctgcttctgggaaaagtgtttccatcatcaaccccactncccagaaagactcaatacaaagttcaagcttgttcacaagaggaggttaataaggtcatggacttagcaaaatctgcacaaaagttatgggcaaagaccccactatggaaacgtgctgagcttct

SEQ ID NO: 290109 - DNA, 261 bp, Glycine max
ctccaacacagcttgtgaagcctctcgagagaaacactaggtatgtggacgctgttctgaccataccaaagggcactttattccccatgtgtggaatgaacttggcattcgaccgtgatctcattggaccagcaatgtactttggtctcatgggagatggtcaaccaattggacgctacgatgatatgtgggctggctggtgctcaaggtgatcactgatcatttggggctaggagtcaagactggtctgccctatatcta

SEQ ID NO: 290110 - DNA, 261 bp, Glycine max
cgtgctttcagctccggcaacctctcttccggcgccgccgctatctcggccgcgcaccagatcttcaatttgattacttgggtcaacgatttctgtcattctcaatcatggcaactagacttcagtttgaaaataattgtgaagttggagtcttctctaaacttaccaatgcctactgtttggttgccattggtggttctgaaacttctacagtgtatttgaagccgagttagcaggtgttatccctgtggtcaagacatt

SEQ ID NO: 290111 - DNA, 263 bp, Glycine max
cgaaccaggcagcttgatggtgcccatgtcgagtttctaagaggagttgctaatcccttgggaattaaggtaagtgacaagatggatccaaatgagcttgttagactcattgagatcttgaatccccaaaacaaaccagggagaataactgtgattacgaggatgggagctgaaaatatgagggtgaagcttccacatctcatcaggcagtgcgcagagcagggcaaattgtcacctgggtcagtgatcctatgcatggaaac

SEQ ID NO: 290112 - DNA, 270 bp, Glycine max
gcttgacatcaagttacactccaactccattgttggaatctggtttgcaaaaagacagagggttaattgtggagtattttggaaggatgtcttacgttgctcataacgttaatcagccccaagagaaagatttgttagagggaaatttttcctttgatattaaatctcgctctagattggaaaaagtttcctctacaaaagcacaatttgtagtggaaaaaccttcaaatatgatataattggtgctggttcacattcttcagaagattt

SEQ ID NO: 290113 - DNA, 269 bp, Glycine max
  unsure (1)..(269): unsure at all n locations
cggaaatcgttcctatcatcacttctcaaatctcgaaccctctcgttcgtgccgatcactaggtcacacttcatcaatggcgggtagaggcaaaaccctaggatccagcgccgctaagaaggccacctcaaggagcagcaaagccggcctccaattccccgtcggtcgtatcgccaggttcctcaaggccggaaagtacgccgagcgcgnggcgccggagcccccgtctacctcgccgccgttctcgaatatctcgctgctgaggtttt

SEQ ID NO: 290114 - DNA, 266 bp, Glycine max
  unsure (1)..(266): unsure at all n locations
ctttcttcttcttctcttaaaagagcctttgctttttctttcngcctttccgaattaagtacttgtttcattttctctcgaagcaagaaaaatgttcatcgagagtttcaaggttgagagtcctaacgtgaagtacacagagactgagattcagtccgtgtacaactatgaaaccactgancttgttcacgagaacaagaatggcactatcagtgggttgtcaagcccaaaactgtcaaatatgaatttaaaaccaacacccatgt

SEQ ID NO: 290115 - DNA, 242 bp, Glycine max
  unsure (1)..(242): unsure at all n locations
gttgaaanaccaaaacccttacncgagtgaagccctaccactcactagactacacacttcgcaatggcggttgttgctcaaacccctgacatcgccggcgagcggcagtccggccaagacgttcgcacccaaaacgttgtggcatgccaagccgttgccaacatcgtcaaaagctctttaggcccttggcctcgacaagatgctcgtcgacgacattggcgacgtcaccatcaccaacgacg

SEQ ID NO: 290116 - DNA, 260 bp, Glycine max
  unsure (1)..(260): unsure at all n locations
ctttcatgcagggctgttaaggtgtggcaaaagttgcaggcncaggtggacaaattatctgaggccagacttgaagagaggccttctatcagaatatgaagagaaaatggtcattgatctccatgctcaacttggcaatagatggtctaagnttgcttctcatctcccaggaagaactgataatgagatcaagaatcactggacacccacataaagaaaaagctcaagaaaatgggaattgatcctgttactcacaagcc

SEQ ID NO: 290117 - DNA, 261 bp, Glycine max
  unsure (1)..(261): unsure at all n locations
ccgagataactagaaacagtgtgatgaaaatgaaggtccttgttttcttcgttgctacaattttggtagcatggcaatgccatgcgtaacgatatgttccctctccgaatgaacactggctatggtgcccgtactccggaggtgaaatgcgcaagttggaggcttgctgtgnaagcacacaacatctttggctttganaccatcctgaagagtgcgttgaagcaacaaaggaatacatccatggcgaacaatatagatcag

SEQ ID NO: 290118 - DNA, 260 bp, Glycine max
  unsure (1)..(260): unsure at all n locations
cttgggctgcgtcttccccgaactattgtcccgcaacggggncaagtttggagaagctgtgtggttcaaggccgggtcccagatcttcagcgagggtgggctggactacttgggcaacccaagccttgtccacgcccagagcatcctcgccatctgggccacccaagttatcctaatgggtgctgttgagggttatcgtattgtggtgggcccctcggtgaggtcactgacccaatctaccctggtggcagctttgaccc

SEQ ID NO: 290119 - DNA, 266 bp, Glycine max
  unsure (1)..(266): unsure at all n locations
gtgttttggcaggaaggtggtatggcgaaggacgttgaggttgctgagcgtggctccttctctgggaaggactaccaggaccctccaccagcaccactcattgatgctgaggagctcacaaagtggtccttttacagggctctcattgctgaattcattgccactttgcncttcctctacattactgtgctcacagtcatagggtacatcaccagactgacctcaaggaaaatggtgaaatctgtggtggggttggcattcttggc

SEQ ID NO: 290120 - DNA, 265 bp, Glycine max
ggtaagacttatagattcaggatatcaaatgtggggctcacaacatcaatcaacttcagaatccaggggcacagtttgaaacttgtggaggtagaaggatctcataccctccaaaacacctattcttcccttgatgtccatctcggacagtcctattccgtgctggtcacagctgatcaacctgtcaaggattactatatggttgtgctacaagatttaccagacggatactcacaacaacttccgttcttcattatagctattc

SEQ ID NO: 290121 - DNA, 261 bp, Glycine max
  unsure (1)..(261): unsure at all n locations
ctntcagcnaatgtaatncggtggaatctgtataccttgttgatcnacattctcccatcttttctcactgctgaaattaantataagcngaatctgagtaatattcatatttccggcttattntacgacggcagatacaaattctggactaaacangaganaaaccttgctttgacagcagaagaaaagatggaagtgattagaatagaggcattcctgctgatgttctggcaaagcgagctcatgaatttgaaaaacatg

SEQ ID NO: 290122 - DNA, 261 bp, Glycine max
  unsure (1)..(261): unsure at all n locations
cctcagtagtgtcattnacgcttctcttctctgcagcaactatgcctaaccctaaggtcttcttcgacatgaccatcggcggtcaatctgctggccgcatcgtgatggagctctacgccgacgtcactccccgcaccgccgagaacttccgcgcgctntgcaccggcgagaagggcgtagggcggacgggcaagcccctccacacaagggctcgtccttccaccgcgtgatcccgagtttcatgtgtcagggtggcgactt

SEQ ID NO: 290123 - DNA, 260 bp, Glycine max
  unsure (1)..(260): unsure at all n locations
ctcgagcgtaactgcttcaccttctgctctagaaaattcagtgctgaaacatggctncngctactctctctgtagccaaaccagcccttcaggcaaatgggaaaggcttctctgaattctctggcctccgaagctcatcaggcttccttcccttttctagaaaatcttcagaggatttccattctgtcattgccttccagaccatgcagttggaagcngtggaggatacaagaagggtgtgacagaagcaaaactgaagg

SEQ ID NO: 290124 - DNA, 243 bp, Glycine max
  unsure (1)..(243): unsure at all n locations
ctacggaagtttgtagacaatgagnatctacaagtgcagtggngggaagcaangaggagtaacaaagttaaagttgcagcattcatcagagaaaaaacagggtattctntcagtcctgatgcaatgtttgacatccaggtgaagagaatccatgaatataagcgacaattaatgaacatatttggattgtttaccgatacaagaagatgaaaganatgagtgcggcagaaagggaagcaaatt

SEQ ID NO: 290125 - DNA, 261 bp, Glycine max
  unsure (1)..(261): unsure at all n locations
ccancaattcccttctcagttctaaagggaattgttcgtcannnngatctcangattcgaagtctggccatacttggaaacttacactgaggaacttgctcatgagcttgccaaagagttgcaaggcaagccagatctgattgtcggaaactacagtgatggaaacattgttgcctctttgttggcacataaattaggagtcatcagtgtaccattgctcatgcacttgagaagaccaaataccccgaatccgacatttat

SEQ ID NO: 290126 - DNA, 263 bp, Glycine max
  unsure (1)..(263): unsure at all n locations
ctttgtgtgtgtatggtgatgataacttaattagtgttcatnnatatgttaagccttactttagtggttctaaattgaaaagctttctagctggtcataatatcaccattactgatggtattgacaaaactagtgcaactttgcaatttagaaagttagcagattgtgattntctcaagagaaactttaagcagatgtctaatgtttgtgggtggctcctgaggacaaggcgagtttgtggtcacaacttcattatgtttcgt

SEQ ID NO: 290127 - DNA, 259 bp, Glycine max
  unsure (1)..(259): unsure at all n locations
ctcctgtggaggtggcaaggaatgccagtgaagatgcacgtncctatatgttgtcgtgaatatggaagtgcccctgatgtccatatttatggagatcctaattttacttttccgtatgttccagctcacttgcatcttatggtatttgagttggttaagaactcactgcgtgctgtacaagagcgtttnatgaattccgataagttgcacctcccattagaataatagttgcngatggaatagaggatgttaccataaa

SEQ ID NO: 290128 - DNA, 249 bp, Glycine max
cagaggcacatcctggtgacaatgtgggattcaatgttaagaatgttgctgttaaggatttgaagcgtggttatgttgcctcaaactcaaaggatgaccctgcaaaggaggctgctaacttcacagcccaagtcatcatcatgaaccaccctggtcagattggaaatggctatgcccctgtcctcgactgcccacttctcacattgctgtcaagtttgctgaactcatgaccaagattgacaggcgatt

SEQ ID NO: 290129 - DNA, 258 bp, Glycine max
  unsure (1)..(258): unsure at all n locations
gaggttcaggctcagatggaaacaaatttgtttaaattgtactcttgatgatgttgaaactcctaaaggttccatgttggatcttaaaatttctcaatctaaaattgcacttcccaagaacacagttggnggaaccattctgcgtagtgatctattggcaaattttttgacagagggcaattttagagcaagtgttgatttcagcgcactcatcgtattaaaggaatgattaanatggtggctacagttggtattcct

SEQ ID NO: 290130 - DNA, 258 bp, Glycine max
  unsure (1)..(258): unsure at all n locations
ctggacttcttccctgtgtccaaggagaatgagaatggattngatacttctattaatggggctgaggtgaagcatgtgatgaaggtgagcctggatgatgatagacatgattactattcaattgggacttatgatgagaagaatgttctgttcacaccagatgatgctaagaatgatgttggcgttggattgaggtatgacatgggatattctatgcatccaagacgttttatgatcagaataaggagaggagagttt

SEQ ID NO: 290131 - DNA, 258 bp, Glycine max
  unsure (1)..(258): unsure at all n locations
gtggcacatgccacncaaaacctactccttctccccctcctccatcagggaagtgccccaaggacacattgaagctaggggtgtgtgctgatgttctaggacttgttaatgttgttgttggttcccctgtctctagcaagtgttgtgcattgcttgaaggtttggctgattcggaggctgcactttgcctttgcactgctataaggccaatgttcttggaatcaacttgaatgtgcctatcacactcagtgtgctact

SEQ ID NO: 290132 - DNA, 257 bp, Glycine max
  unsure (1)..(257): unsure at all n locations
cntcttctganagtgtttggntganagtagcaaagatgtttcctttcgggcaaaagggtcaaaagataaaggggactatggtggttatgcagaagaatgtgttggatatcaacagcatcaccagtgttggagggatcgntgaccaaggcttaggcttcataggcagtgcagtcgatgcacttacttttgcagccaccaaaactccatccagttgattagtgctaccaaggctgatggtggganaggaaaaattggna

SEQ ID NO: 290133 - DNA, 264 bp, Glycine max
  unsure (1)..(264): unsure at all n locations
ctcagatggaaacaaatttgtttaaattgtctcttgatgatgttgaaactncctaaaggttccatgttggatcttaaaatttctcaatctaaaattgcacttcccaagaacacagttggaggaaccatttctggcgtagtgatctattggcaaattttttgacagagggcaatttgagagcaagtgttgtttttgcagcgcactgctcgtattaaaggaatgattaanatggtggctacagttggtattcctgagaatacaggt

SEQ ID NO: 290134 - DNA, 267 bp, Glycine max
  unsure (1)..(267): unsure at all n locations
ctcgtgactacgaacactgcaggaagagagaaaggcgatggacctcggaacctatgaagtgccagaaggagtggacattctaggaagatacgatgcagagtttncaaaaatcctcacaaaagacgctttgaaattcgttgctgagctgcaacgtgagtccaggagcgatatcaagcatgcattagagagcagaagagaggcaaagaagagtacaatgaagggactcttccggggtttgatcctgccaccagtcacattagagaccag

SEQ ID NO: 290135 - DNA, 262 bp, Glycine max
  unsure (1)..(262): unsure at all n locations
aaactgtgagtctatgttatttgtngcggagatgaactcctccaccaacacctcgaattctcagtcaatggctgcagcagccagtgatgggtctgggaagaaggtaagaaaaccttacaccataaccaagtccagggagagttggactgaggaagagcacgacaagtttctcgaagctcttcaattatttgacagggactggagaaaattgaagattttgtaggttcaaaaacagttattcagattcgaagccatgctcaga

SEQ ID NO: 290136 - DNA, 262 bp, Glycine max
  unsure (1)..(262): unsure at all n locations
cggtggtaactgtggttgcggaagncctgcaagtgcggcaacggctgcggaggctgcaagatgtacccagacttgagctacaccgagtcaaccaccaccgagaccttggtcatgggagtggcaccagttaaggctcaattcgagagtgctgaaatgggtgttcccgctgagaacgatggctgcaaatgtggagctaactgcactgcaacccctgcacttgcaagtgaggtgttggagagctaaagcttcaagcagaaatggc

SEQ ID NO: 290137 - DNA, 264 bp, Glycine max
cgtgaccaagaaacagtagatgcctctaccaataggattaaaagcttgcttttcaaggtgagatctcttcgaatgagtggctcctgcgctctgaatctttgtggaattgcatgtggaaggctggatgtattctttgaacttggctttggtggtccttgggatgtagcaggtggtgctgtcattgttagagaagctggaggtgttgatttgatccgtccggtgcagattttgacataacatctcagcgagtagcagcttcaaact

SEQ ID NO: 290138 - DNA, 255 bp, Glycine max
  unsure (1)..(255): unsure at all n locations
tcgagaggtccaagtgggccatttttggtaagcagaactggcgatgcnggatgaaccggaagctgggttacggtgcccaactgcgcgctaacctagaccccacaaagggtgttggtcgattaagacagcaggacggtggtcatggaagtcgaaatccgctaaggagtgtgtaacaactcacctgccgaatcaactagcccgaaaatggatggcgctaaagcncgcgacctatacccggccgtcggggcaaggacc

SEQ ID NO: 290139 - DNA, 258 bp, Glycine max
  unsure (1)..(258): unsure at all n locations
catactttgacagggacaacgtggctctcaagggatttgccaagttcttcaaggaatctagtgaggaagaaagagagcacgctgaaaagctcatgaaatatcagaacactcgcgggggnagagttgtacttcaccccatcaagaatgtcccctcagaatttgagcatgtggaaaagggggatgcattgtatgcaatggaatagctttgtctttggagaagttagtgaatgagaaacttctgaatgtgcacagtgtggc

SEQ ID NO: 290140 - DNA, 255 bp, Glycine max
gaaggacaaggactccaagttcaggttgattcttgttgagagcagaatccaccgacttgctcgctattacaagaagactaagaagctcccaccagtctggaagtacgaatcaacaactgctagcactctggttgcttagagaatgtatcaactttcatgggttttgcttccttgcagtcaccgttgagccagcaatttgcatatcattttgatgtttatttgaaggctggataggttatgtggctagttttgttc

SEQ ID NO: 290141 - DNA, 255 bp, Glycine max
  unsure (1)..(255): unsure at all n locations
ctcttcttctcttgcggccagggttttagcgcanttgcttctcgatttaaggaagatgggtaaggaaaaggttcacatcagtattgtggttattggccatgttgactctgggaantccactaccactggccacctgatctacaagcttggaggcattgacaagcgtgttattgagagatttgagaaggaagctgctgagtgaacaagaggtctttcaagtatgcctgggtgcttgataagcttaaggctgagcgt

SEQ ID NO: 290142 - DNA, 257 bp, Glycine max
  unsure (1)..(257): unsure at all n locations
cgcaagtcctgactgtancatagttggtgcaatgcttntggttgatacttatcataccaatcctgaaaatgcagttcgtagtattttnnttgcgcctttcagaggcggaaggcccattcgggtggttacatttccgaataccattgtgcagattgaaccagacatgaattcaaggtttcagcttttgagtaccactaccatggtgatttnnttcanggaanagatctcgcgatggttaaagttnatgtagcatgtgc

SEQ ID NO: 290143 - DNA, 265 bp, Glycine max
  unsure (1)..(265): unsure at all n locations
ctcacagccttgtaattgaaaaagagagctttcctcatgatgaacttgaggcaacagcatggacagaagatggtcttataatggctgctcgtcataaganatataagcatctacagggtgttcagtttcatccagagagcatcataaccccagaaggcaagacaattgtccgtaattttgtcaagcttatcgagaaaagggaggctgtggctcttgaaacaatgtttgatgtgtatagttaaaatngtggattgacgcagcatat

SEQ ID NO: 290144 - DNA, 256 bp, Glycine max
ggatgctgatgctgcttggaactgtgtatgcgagtttaggaaacccacgtgtgtagtagtaaagcatactaatccatgtggggtagcatcacgtgatgatattcttgaagcctacagactagctgttaaagctgatcccgtgagtgcatttggtggaattgtagctttcaatgtggaaattgatgaggcacttgctaaagaaattcgagaatttagaagccccacagatggggagacaaggatgttttatgaaata

SEQ ID NO: 290145 - DNA, 249 bp, Glycine max
ccaagaacacagttggaggaaccattctgcgtagtgatctattggcaaattttttgacagagggcaattttagagcaagtgttgatttgcagcgcactcatcgtattaaaggaatgattaaaatggtggctacagttggtattcctgagaatacaggtatagcattggcctgtgctatgaatagttcttttagggggcgcgccagttctgatatttacaccatctgctctcaagactgtgaattatgga

SEQ ID NO: 290146 - DNA, 253 bp, Glycine max
  unsure (1)..(253): unsure at all n locations
atcgagataactagaaacagtgtgatgaaaatgaaggtccttgttttcttcgttgctacaattttggtagcatggcaatgccatgcgtaacgatatgttccctctccgaatgaacactggctatggtgcccgtactccggaggtgaaatgcgcaagttggaggcttgctgtngaagcacacaacatctttggctttgagaccattcctgaagagtgcgttgaagcaacaaaggaatacatccatggcgaacaa

SEQ ID NO: 290147 - DNA, 243 bp, Glycine max
  unsure (1)..(243): unsure at all n locations
ctttnncgggccgaggcccctaactgctggncggcaaacggacgganggcgcacgcgtcgcttctagcccggattctgacttagaggcgttcagtcataatccaacgcacggtagcttcgcgccactggcttttcaaccaagcgcgatgaccaattgtgcgaatcaacggttcctctcgtactaggttgaattactattgcgacactgtcatcagtagggtaaaactaacctgtctcacgacg

SEQ ID NO: 290148 - DNA, 254 bp, Glycine max
gatggccatgagactgataagaacattgaggtgtggaaaatcaagaaattgatcaaagctcttgaggctgctagaggaaatgggacaagtatgatttcccttatcatgcctccacgtgatcaaatatctcgtgtcactaagatgcttggtgatgagtttggaactgcatcaaacatcaaaagcagggtgaatcgacagtgcagttcttggtgcaatcacttctgctcagcagaggcttaaactctataacaagg

SEQ ID NO: 290149 - DNA, 254 bp, Glycine max
  unsure (1)..(254): unsure at all n locations
aattgaagttcgtgatgggttgacatttctagatttaattgtgatccagattgagaatctcaattccaaatatggaagcaatgttcctttgcttttgatgaattcattcaacactcatgatgacactcaaaagattgttgaaaaataccaaaactccaatattgagattcatacttttaaccagagccagtatcctcgattggttgctgaggactttttgccattgccttccaaagggcatactgacaagnatg

SEQ ID NO: 290150 - DNA, 251 bp, Glycine max
  unsure (1)..(251): unsure at all n locations
ggcgagggtaatgagaaagtgcaggatcttcttttgttggatgntactcctctatccactggtttggagactgcaggaggagtcatgactgtgttgattcccagaaacacaaccattcccaccaagaaggagcaggtgttctcaacctactctgacaaccagcccggtgtgttgattcaggtctatgaaggtgaacgaacgaggactcgtgacaacaatttgcttggcaaatttgagttatctggaattcc

SEQ ID NO: 290151 - DNA, 250 bp, Glycine max
  unsure (1)..(250): unsure at all n locations
aggaattttagtggacaaaactggagattggatcacacttatacaaaattctccaattagtaacttgttgagagttgctgcttggaagaaaggctgtttaatggtcaagattgtgatgtctgggaatgcagcagtcaaaaggagtgattgggcctcattggtacaagtgtttttaacaaacagcnacagtacagagcattttgatgcatgtaagtggacaaaatcagaaccacattccgggaattgatct

SEQ ID NO: 290152 - DNA, 254 bp, Glycine max
  unsure (1)..(254): unsure at all n locations
catgaacagctctcagtggcagaaattaccaacagtgcttttganccatcgtgccatgatggccaagtgtgatcctncgtcacggaaagtacatggcgtgttgcctgatgtaccgtggtgatgttgtgcccaaagatgtaaacgctgctgttgccaccatcaagaccaagaggaccattcagtttgtggattggtgccctactggtttcaagtgtggtattaactaccagccacctaccgttgttcctggaggc

SEQ ID NO: 290153 - DNA, 253 bp, Glycine max
  unsure (1)..(253): unsure at all n locations
aagaaaatganagtccttgttttctttgttgctatagttctagcagcatggcattgccatggctgcanaccatgaccatgaccatggccacacctaccaaattttccctctgagaatgaaaactggccatggtggccactacattccggaggtatcatgccaaagttggaggcttggtgtggaagcacacaacgtcattgactggaaaaccgttcctgcaagattgcgagggatatattgggaatacatgctt

SEQ ID NO: 290154 - DNA, 254 bp, Glycine max
  unsure (1)..(254): unsure at all n locations
tttgtttatttgaaattaacaagtagcaaagatgtttggnatcatcggaggaaacaagggtcacaagataaaggggaacttggtgattatgcgaaacantgtgttggatatcaacagcattaccagtgttaagggtgtcatcggaaccggcattaacatcattggaggagtcgtcgacaccgttactgctttggcgtcccacatctccatccagctcattagtgccaccaaggctgatggacatgggaaaggaa

SEQ ID NO: 290155 - DNA, 259 bp, Glycine max
gcagaaagcaagctcatcctagagttttaaaaatggcagcagcctgcctccatggctctctcttcccccatccttggctggcaaggccgtgaagctgggcccatcagcccccgaagtcgggagggtcagcatgaggaagaccgtcaccaagcaggcctcctccggaagcccatggtacggcccagaccgcgtcaagtacttgggcccattctctggcgagcccccgtctaccttcactggcgagttcccaggtgactac

SEQ ID NO: 290156 - DNA, 254 bp, Glycine max
  unsure (1)..(254): unsure at all n locations
cctgggatctcaaatcgaagctttaccggttcgacaaggacgggaaccagtggaaggagcgtggcgccggcactgtgaagttcctgaagcataaggcttccggcaaggttaggcttctcatgaggcaatccaagacgctcaagatctgcgctaatcatctcattttgcctacgatgagtgtgcaagancacgctgggaacgagaaatcctggcgtttggcatgctagggattttgctgatggtgaactcaagga

SEQ ID NO: 290157 - DNA, 253 bp, Glycine max
  unsure (1)..(253): unsure at all n locations
cagccacagttggaaaaaaaaaaaaagttgtncgagatggcacgtacgaagcaaactgctcgtaagnccacaggnggaaaggcacctaggaagcagctccgcaaccaaggctgcacgtaagtctgcaccaactactggtggtgtgaagaagccacatccgttatcgtcctggtaccgttnctcttcgtgagnttaggaaataccagaagagtaccgngcttttgatcaggaagctccccttccagaggctggt

SEQ ID NO: 290158 - DNA, 256 bp, Glycine max
atgaagacaaccttctgatccgtcaagtggtgccggacgcggaggaccaccacctgctccaacgcggagcaaccacttctccgccttcaagacaaagttcgccaagacctacgccacgcaggaggagcacgaccaccgcttccgtatcttcaagaacaacttgctccgcgccaagtcgcaccagaaattggacccctccgccgtccacggcgttcaccaggttctccggatctcactccgtctgagtttcgcggcc

SEQ ID NO: 290159 - DNA, 249 bp, Glycine max
caaagttttttcctttctctgctctttgccttctctgacacatttggtgccttgtagagcgtgttttggcaggaaggtggtatggcgaaggacgttgaggttgctgagcgtggctccttctctgggaaggactaccaggaccctccaccagcaccactcattgatgctgaggagctcacaaagtggtccttttacagggctctcattgctgaattcattgccactttgctcttcctctacattactgtg

SEQ ID NO: 290160 - DNA, 253 bp, Glycine max
tgaagacaaacaaaatcccaaggcagatccctgagcaggcatggtacatgaatccggtcttctcagttctgatcggaggaatccttccatttggagctgttttcatcgagcttttctttatcctcacttctatctggttgaatcagttttactacatcttcggcttcctcttcttggtcttcgtcatcctcatcgtcacttgtgctgaaatcaccattgtgctttgctacttccagttgtgcagtgaggatta

SEQ ID NO: 290161 - DNA, 249 bp, Glycine max
agcacattgatatctaaggaaggaatggaaaagatgttagggagaaattgtgggaagttgaagaccaagattgtgtgcactttgggaccatcaagtaggtcagtggagatgctggagaagcttctgaaggcagggatgaacgtggctcgcttcaacttctctcatggcactcactcttaccaccaagagacccttgataatctcagaactgcaatgaacaacaccggcattctctgtgctgtcatgttg

SEQ ID NO: 290162 - DNA, 249 bp, Glycine max
gcaaaggtggtgcttatactggagaggttagtgctgaaatgcttgttaatttgggaattccttgggttattattggtcactctgaacggaggcagcttttgaatgaatcaaatgagtttgtgggagataaagttgcctatgcacttcaacaaggtctgaaagttatagcatgcattggggaaactcttgaacagcgtgaagctggtacaacaacggctgttgttgctgagcaaacaaaagcaattgcag

SEQ ID NO: 290163 - DNA, 250 bp, Glycine max
aaaaacacacacgacacactcccatacacacacgttgtctcgcacacattccttccattccgcagcaaacatctttaccttaaacgacaacaatggccgatgccgaggatattcaaccgctcgtttgcgataatggaaccggaatggtcaaggctggttttgccggagatgatgcgccgagggcggtgttccccagcattgtggggcgtccacgtcacacgggagtgatggttgggatggggcagaagga

SEQ ID NO: 290164 - DNA, 250 bp, Glycine max
gcagaaaggagaagttagtccgtacctggcagaattgttgcggttggaagaacaggctaaacaagaaggccttgggcggtggagcaaggttcccggtgctgcagaggcttcaatcagaaatttaccaccttctgcccttggtgaccctagtaactttgatgctatgacttttttaaatgcaaagaagggattgcccatggaggcagttgttgagcaggttcgtgatggcagtacactccgtatctatttg

SEQ ID NO: 290165 - DNA, 254 bp, Glycine max
atcgtgaatgcgtataaaaggaaaataaagaaattagcgtcaaaatgttgggtgtgttcagcagctccatagtgtcgccgccggaagcggttcgaggagaagaacccctccgccgtgtcggtggaggtcggagagcatgtccagctcgcttatacccaccacaacgagtcgccgtttcagcccagatcctttgctgtcaaggatgaggtgttctgcttgtttgagggagcccttgacaatttgggaaacttgag

SEQ ID NO: 290166 - DNA, 252 bp, Glycine max
  unsure (1)..(252): unsure at all n locations
gtcaagaatctgacaagaacattgagatatggaagatcaagaaattgatcaaggctctggaagctgctncgaggtaatggtaccagcatgatttctctgataatgcctccacgcgatcaaatttcccgggtcactaagatgttgggagatgaatttggaactgcttcaaacatcaaaagtagggtgaaccgacagtctgtgttgggagccattacttctgctcagcagaggttgaaactatataacaaggtc

SEQ ID NO: 290167 - DNA, 250 bp, Glycine max
aagaaacatttgagcaaaaatggttcaagcacagcctctacaacatgttggtaatggtgcagggaaagaagatcaagcttattttgatccaagtgctccaccacccttcaagattgcaaatatcagagcagcaattccaaaacattgctgggagaagaacacattgagatctctgagttatgttctgagggatgtgttggtagtgactgcattggtagctgcagcaatcggcttcaatagctggttcttc

SEQ ID NO: 290168 - DNA, 246 bp, Glycine max
ccaaaggccaacagagaaaaaatgacccaaatcatgtttgagaccttcaatgtgcctgccatgtatgtggccatccaagctgtcctctccctatatgcaagtggtcgcacaactggtattgttttggactctggcgatggtgttagtcacactgtgccaatctatgagggctatgcactccctcatgccattcttcgtttggatcttgctggccgtgatctgactgactctttgatgaagatcctc

SEQ ID NO: 290169 - DNA, 249 bp, Glycine max; identical to SEQ ID NO: 134634

SEQ ID NO: 290170 - DNA, 248 bp, Glycine max
cttcgggtgcaaagcagtatacttttgaaggtcacgaggctcctgtttattctgtctgcccacattataaagaaaacattcagttcatcttttcaacagcgttagatgggaaaataaaagcatggttgtatgacaatttgggatctcgtgttgattatgaagctcctggtcgttggtgcacaaccatggcttatagtgctgatggtacaaggctcttttcctgtgggacaagcaaagatggggaatca

SEQ ID NO: 290171 - DNA, 234 bp, Glycine max
gtcaagtttgctgaactcatacaccaagattgacaggcgatccggcaaagagcttgagaaggagcccaagtttttgaagaacggtgatgctggttttgttaagatgattccaaccaaacccatggttgttgaaactttctccgagtatcctccacttggtaggtttgctgttagggacatgcgtcaaactgttgctgtgggagtcatcaagaacgttgagaagaaggatcctac

SEQ ID NO: 290172 - DNA, 247 bp, Glycine max
  unsure (1)..(247): unsure at all n locations
gcnattgaagttgaagtcttgcccttctctcntcaactccaaacacaagacatcatcatcccatggctgcctccgtctccactgtcggagctgtcaacagagcncttttgaacctgaatgggtctggacctggggtttcagctcccagttcatccttctttgggagcagcttgaagaaggttattggctcaagggtccccancacaaagatttcctctggaagcttcaagattgttgctgtagaaga

SEQ ID NO: 290173 - DNA, 250 bp, Glycine max
  unsure (1)..(250): unsure at all n locations
cgnntctcttcgttccttcgattcgttccatttcttccaaaatggccaaagacccagttcgngnttctccgtcactggagctgcaggggaaattgggtangctcttgtccctatgattgcnangggngtgatgttgggncctgaccagcccgtgatnctccacatgcttgacattcctccggcagcagagtcattgaatggggttnaaatggaattngtggatncngcattccctcttcttaaagtgttg

SEQ ID NO: 290174 - DNA, 245 bp, Glycine max
  unsure (1)..(245): unsure at all n locations
cnaggagatggctctgggaagaggcagtgcagtggttctactactttgcttcttgctgcttcactctcagatggctcgtgctgccacctacacagttggagattctgggggtnggacctttaacactgttgcctggcccaaaggaaagctctttcgggctggtgacacacttgctttcaattatagccctgggactcacaatgtggtggccgtgaacaaggctggatatgatagctgcaagactc

SEQ ID NO: 290175 - DNA, 247 bp, Glycine max
  unsure (1)..(247): unsure at all n locations
gctggcatctcagggggacacataaacccggcggtgacatttgggctgtttttggcgaggaagttgtcgttgcccantccgattttctacatcgtgatgcaatgcttgggtgctatttgtggcgctggcgtggtgaagggtttcgaggggaaaacaaaatacggtgcgttgaatggtggtgccaactttgttgcccctggttacaccaagggtgatggtcttggtgctgagattgttggcactttca

SEQ ID NO: 290176 - DNA, 248 bp, Glycine max
  unsure (1)..(248): unsure at all n locations
aggcgtcaatcattcacatagtagaccacctaaatctcgaggcatggaacntgccagangtgttgcggccactttatgaatcatccaaggtggttgctcagaaaatgacaattgcagcncttcgctatatcaggcaaatagctcaggaaacaagtggtgaggttgtttatggattgggtaggcagcctgctgttctgcggactttcagccagagatgagcagaggcttcaatgacgctgtaaatggat

SEQ ID NO: 290177 - DNA, 246 bp, Glycine max
  unsure (1)..(246): unsure at all n locations
ggnttgcaagaatggaactccgttgcttactgttctccatttctgttcttttcgctcttggtcttgcaagagaaagccatgcccaatcatcaataccagacgaagatttttggcatgctgtttggccaaacacttccattcccagtgcattgcgagagcttctaaagcatggccgtgaaggtgttgaaattgataatctccccatgcaaattgatgatacgcataacccaaaaaccttcttctatg

SEQ ID NO: 290178 - DNA, 247 bp, Glycine max
  unsure (1)..(247): unsure at all n locations
gacgtggagaggctcttcagaagatacggcnaagttgatagagttgacatgaaatccgggtttgcttttgtctacatggaagatgaacgtgatgctgagtatgcaatcagaaggcttgatagaacagaatttggtagaaagggtcgccggattcgtgttgagtggactaagcaagaacgtgacagtagaagatcaggtggtgattccagaaaatcttcatctaattcaagaccanccaaaactttgt

SEQ ID NO: 290179 - DNA, 248 bp, Glycine max
  unsure (1)..(248): unsure at all n locations
cnctgtttctgtctctgtgtttgcggctgaggattccgaaanagcgaccttcttcgtttctcgcaaagtttaagtcatcatgggtaaggaaaagactcacatcaacattgtcgtcattggacatgtcgactctgggaagtcaactaccactggtcatttgatctacaagcttggaggtattgacaagcgtgtgattganaggttcgagaaggaggctgctgagatgaacaagaggtcattcaagtatg

SEQ ID NO: 290180 - DNA, 246 bp, Glycine max
  unsure (1)..(246): unsure at all n locations
gnagatggttactctccaactcttccacaccttanaggncggnaaatggggatactgcaactagtgccatcaagcaggttgantctggaaggtttggtgtcaccccaacattcttggcaaatgctgatcagttagaaattaagattgcacaaggcgnaaaacctggtgaaggtggacaattgcctggaaaaaaagttagcatgtatattgctaggttgagaaattctaaaccaggagttcctctta

SEQ ID NO: 290181 - DNA, 247 bp, Glycine max
  unsure (1)..(247): unsure at all n locations
cgcgccgtttctgtgcttttactctgctacctngtnacaatggtgagacncnagtgtgttgaatgatgctcttaagagcatgtacaatgctgagaaacgggggaagcgccaggtcatgattaggccatcctcaaaagtgattataaaattccttttggtgatgcaaaagcatgggtacattggagagtttgantacgttgatgatcacagagctggaaaaattgttgttgaattgaatggtagacga

SEQ ID NO: 290182 - DNA, 243 bp, Glycine max
  unsure (1)..(243): unsure at all n locations
ggcaacagaaacaaaagtgcaaganttaggtggcatcaccgatgtgcatggagctgccaacagcgtcgagatcaacaatctcgctcgctttgctgtagaggaacaaaacaaaagagagaattcagttctggagtttgtgagggtgattagtgcaaagcagcaagtggttgctggagtgaattactacatancacggaagcaaaagatggtttgattaanaatgagtatgaagcgangtttggg

SEQ ID NO: 290183 - DNA, 246 bp, Glycine max
  unsure (1)..(246): unsure at all n locations
cngcagccttagagccaaaagaaggtggtgcttatctggaantcctattcaaaatactattgatgatttgtatagctactttaggttcctaaagtatgatccttatgctgtatacaaatcattctacaatacaataaaagttccaatatccaaaagtactattcaaggttacaaganacttcaagcagttttaagggccataatgctacgtcgtncaaaaggaactttgcttncangggaagccaa

SEQ ID NO: 290184 - DNA, 248 bp, Glycine max
  unsure (1)..(248): unsure at all n locations
cgccaggtgttctcaacctactctgacaaccagcccggtgtgttgattcaggtctatgaaggtgaacgaacgaggactcgtgacaacaatttgcttggcaaatttgagttatctggaattcctcctgctcccagaggtgttcctcagatcactgtttgcttcgacattgatgccaacggtatattgaacgtgtctgcggaggacaaaaccactggacagaagaacaanttacattaccaacgacaagg

SEQ ID NO: 290185 - DNA, 240 bp, Glycine max
  unsure (1)..(240): unsure at all n locations
gaactgcgctcctctcatgcttcgattggactggcacgatgccggaacttaccgatgctaagaccaaganctggnggacctaacggttcgatccgtaangaggaagagtattctcacggcgccaacaatggcttgaagaaggctattgatttctgtgaggaagtgaaggaaaaacatcctaaaattacatatgcagatctctaccagcttgcgggtgttgttgcagttgaggttaccggg

SEQ ID NO: 290186 - DNA, 247 bp, Glycine max
  unsure (1)..(247): unsure at all n locations
cntcaaaagaactgagagtattgaccttgcaaaggacagncttgcactgcanaggcttcgtgaagccgctgagaaagctaagatcgagctgtcttcaacatctcaaactganatcaacctgcctttcatcactgctgatgcatctggtgcaaagcatctgaacataacattgacaagatcgaagtttgaggctttggtgaatcacttgattganaggnccaagggcaccatggtaaaagctgcttga

SEQ ID NO: 290187 - DNA, 245 bp, Glycine max
  unsure (1)..(245): unsure at all n locations
tctagcaagcagagcttttgtcaattttctattgaccttctcggtggaggaattttagtggacaaaactggagattggatcacacttatacaaaattctccaattagtaacttgttgagagttgctgcttggaagaaaggctgtttaatggtcaagattgtgatgtctgggaatgcagcagtcaaaaggagtgattgggcctcattggtacaagtgttttnnncaaacagcaacagtacagagca

SEQ ID NO: 290188 - DNA, 251 bp, Glycine max
  unsure (1)..(251): unsure at all n locations
ggacagcaaganagccatggatgagtacacttcagagatattcatgggtggaaagagcaccattgttttgcacaacacatgcgaggattccctcttagctgctcctattatcttggacttggtccttcttgctgagctcagcactagaatcgagtttaaagctgaaaatgagggaaaattccactcattccacccagttgctaccatcctcagctacctcaccaaggctcctctggttccaccgggtacac

SEQ ID NO: 290189 - DNA, 241 bp, Glycine max
  unsure (1)..(241): unsure at all n locations
ccagcagtcgtnaganagactccataacccaaaaatgncctnngaagaggtacgttgagattggaagggttgctcagatcaactatggcaaagagtacgggcggcncgtgntnattgtcgatgtcattgaccagaatagggcnttgttgatgctcccgncatggtgaggtcccaantgaacttnaagaagctctcgctcactgaacatcaagatggtattcnaggantnncaagaagnngg

SEQ ID NO: 290190 - DNA, 249 bp, Glycine max
gggcgacgcaccggcattgccagagactcttaaaaattacaacaagctgttgtctcttggcttcaagattgtattcttgtcaggaagatatcttgacaaaatggccgtaacagaagcaaacctaaagaaggctggcttccacacatgggagcagttaattctcaaggatccacatcttatcactccaaatgcactttcatacaaatcagcaatgagagagaatctgttgagggcagggatacagaattg

SEQ ID NO: 290191 - DNA, 244 bp, Glycine max
  unsure (1)..(244): unsure at all n locations
cgtttgctacctaaaccctagtctccatacatcaacttgggaggttaaagagacggcaacgttgtgctgtccgccttgaccgagccagagcttcgtcttggccctcgattttgccctgtaaaactaatcccagtcacaacagaaataatcaatggcaccgaaacagaccaaggctgagaagaagatcgcttacgatgcgaantgtgcgacctaatggaggagtacggccaaatcctcgttgtaa

SEQ ID NO: 290192 - DNA, 248 bp, Glycine max
  unsure (1)..(248): unsure at all n locations
gaaatgaaggtccttgttttcttcgttgctacaattttggtagcatggcaatgccatgcgtaacgatatgttccctctccgaatgaacactggctatggtgcccgtactccggaggtgaaaaccgcaagttggaggcttgctgtggaancacacaacatctttggctttgagaccattcctgaagagtgcgttgaagcaacaaaggaatacatccatggcgaacaatatangntcagacnccnaaaca

SEQ ID NO: 290193 - DNA, 245 bp, Glycine max
  unsure (1)..(245): unsure at all n locations
cgaattatggaatcctgcttgcacaaaagcaatggctatgtcatttaatccaaacccgtgttctgatgcatggagtttggaatttctgaagcgtacnggatttcattgtgatatcatttgtgtcactggatggactgccaccccaatgcaggatgttcaggttacaattgattggcnttattcctctcaggaatgtgttcccagaacctattgtgttttaaatccacaaaatccttttgtgttaa

SEQ ID NO: 290194 - DNA, 244 bp, Glycine max
  unsure (1)..(244): unsure at all n locations
gtgnaaagactatagaggttaataacacagatgcanagggtaggcttaccctggacagatgctctggtgtatgcttgtaaccagggtgctgaaaagatagttgacctggcaacattaactggggcctgcataattggtcttggatcctcaattgcaggtgtgtttacaccaagtgatgaccnggcaaaannngtttttgatgcttctgaagcgagtggggagaaactatggaggttgccgttag

SEQ ID NO: 290195 - DNA, 253 bp, Glycine max
  unsure (1)..(253): unsure at all n locations
tcgtttcactctcacaatggactccctctctctcttctgcaccggancccttctncgccggcggcctctactggttcgtctgtgttctgggtcccgccgagcagaagggcaaacgcgccaccgatctatccggcggctccatctccgccgagaaagtccaagacaactacaagcagtactggtccttttccgncgcnccaagganatcgagaccgccgacaaagttcccgacttcgtcgacaccttctacaat

SEQ ID NO: 290196 - DNA, 251 bp, Glycine max
  unsure (1)..(251): unsure at all n locations
cgtttgttcactcttcttctcttgcggctagggttttagcgcanttcttctagatttaaggaagatgggtaaggaaaaggttcacatcagtattgtgntcattggccatgtcgactctgggaaatccactaccactggtcacctgatttacaagcttggaggcattgacaagcgtgttattgagnggtttgagaaggaagctgctgagatgaacaagaggtctttcaagtatgcctgggtgctggacaaac

SEQ ID NO: 290197 - DNA, 250 bp, Glycine max
  unsure (1)..(250): unsure at all n locations
gnagcgcctttcgttgctcgacacagatatttctgggtatgcaaggtctcagggtagaacgcctgtnacctttngacctacggatctggtttgctgtagaaccttgcaggntcacacgggaaaggtgtattcattggattggacttctgaaaaaagtcagacngtnagtgcatctcaagatggggattaatagtgtggaatgctctaactaggcagaaaattcatgccataaagctaccttgtgcatggg

SEQ ID NO: 290198 - DNA, 248 bp, Glycine max
  unsure (1)..(248): unsure at all n locations
gtcctcttagtggaaggaaattgagggtgaaaaaggagagagcacccnattggaggacgcncgatnggcactanagtctncgcanttgctgagcctgacagacctctatggttcccaggcancacccctcntccatggnttgatggcantctanctggaganttcggctttgancctcttgnncttggatcnnacccggagagtctgagatggcatgttcnngcagngctagtntcactgcagatngg

SEQ ID NO: 290199 - DNA, 252 bp, Glycine max
  unsure (1)..(252): unsure at all n locations
gtcactcttcttctcttgcggctagggttttagcgcanttncttcctagatttaaggaagatgggtaaggnaaaggctcacatcagtatngnggtcattggccatgacgncctctgggaaatccactanccatggnncactgatttacaagcttggaggcattgancaagcgngtnattgagaagttgagcaggaagctgcagagatganncaggagtcctttcaagtntggccngggtgctggacnaactt

SEQ ID NO: 290200 - DNA, 252 bp, Glycine max
  unsure (1)..(252): unsure at all n locations
cgatctttgaagtaagaagagtgtgttgtgttgaagtatcanagatgttgattggttctctcttaaacaggcgtcctaanacncaaggggactgtggtgttgatgaccaagaatgtgttcgacgtcaacgacttcatggcgactactaggggcggaccagccgctgttgccggccgcatcttcggtgccgcccaggacattgttggtgcaatagttgatggtgctacggccatcttcagccgtaacattgcc

SEQ ID NO: 290201 - DNA, 256 bp, Glycine max
  unsure (1)..(256): unsure at all n locations
cgcagaagatatgggactctgttcctaaaccacaggcccacaaggaaaccccattaagtgaatttttccaatgttnaagttgttgcncnttctagttatgaagacaaggaagagcaatttnaagatcaggntgctagcttgcgggcaacggntccatcattctatcgctcctggtgggcttgcaggggatggcgtggagtagttcctgcttctggcttttcttttagtnctgagcatntntggaaagtcattaagg

SEQ ID NO: 290202 - DNA, 251 bp, Glycine max
  unsure (1)..(251): unsure at all n locations
cnctcgctcttgcaattagtcctcttccaacaatccgcacangaactctagggttctgacatggacactggtggaaagatcaagaagggcgccggaggaagaaagggcggcggcccaaagaagaagccggtttcaaggtccgtcaaggccggtctccaattccccgtcggaagaattggccgttattgaagaaaggaaggtacgcccagcgtgtcggtaccggtgctcccgtttacttggccgcagttctc

SEQ ID NO: 290203 - DNA, 249 bp, Glycine max
  unsure (1)..(249): unsure at all n locations
cgtagttggtgcaatgcttttggttganacttatcataccaatcctgaaaatgcagttccgtagtatttttgnngcgcctttcagaggcggaaggcccattcgggtggttacatntccgaataccattgtgcagattgaaccagacatgaattcaaggtttcagcttttgagtaccactaccaaggtgattttgttcaaggaaaanntctcgcgatggttaaagttaatgtagcatgtgctgctgttgg

SEQ ID NO: 290204 - DNA, 245 bp, Glycine max
  unsure (1)..(245): unsure at all n locations
ccctttctctgcactctgcaactccctccaatttagtttgagccttagaggcattgttctttggttggatagatctctgatctgaagatgagtgcgtcgaggttcattaagtgcgtcaccgtcggcgacgcgctgtcggcaaaacctgcttgttgatttcctacaccagcaacacttttnccacggactacgtgcccacggtttttgacaatttcagtgctaatgttgtggtggatggaagcacc

SEQ ID NO: 290205 - DNA, 243 bp, Glycine max
  unsure (1)..(243): unsure at all n locations
cncttcttcgtcncaaactgnttcgttccttcgattcattccatttcttccaaaatggccaaagacccagttcgcgttctcgtcactggagccgcagggcaaattggatatgctcttgtccctatgattgctaggggagtgatgctgggtcctgaccagcccgtgatcctccacatgctgacattcctccagcagcagagtcncttgaatggggttaaaatggaattggtggatgctgcattc

SEQ ID NO: 290206 - DNA, 249 bp, Glycine max
  unsure (1)..(249): unsure at all n locations
cggaaagtnnaagangtagcanagatgtttccattcnggcacaagggtcaaaagatanaggggactatggtggttatgcagaagantgtnttggatatcaacagcatcaccagtgttgacgggatcgtcggcaccggcttagacttcttaggcagtgcactcgatacagttacttttttagcctcctccatctccatccaacttattagtgctaccaaggctgatggtgggacaggaaaagttggaaag

SEQ ID NO: 290207 - DNA, 248 bp, Glycine max
  unsure (1)..(248): unsure at all n locations
cnttggaagggcacttcaacagagcacccttaaggcatgggacngaaaagaagagaatgtgaagnaggctcaggaagccctnntggtaagagccaaggctaactcanaggcaactctgggaacctacaagggtaactcacagcttgctgatggtgcctcagagagcctccatgtttcgaactaagctactgatcaatcgaagttggtgttgtttgaagagnctagtgcgagtaggaatcggtattatg

SEQ ID NO: 290208 - DNA, 240 bp, Glycine max
  unsure (1)..(240): unsure at all n locations
ttcttcgagtttcacagccaagtcgtaaaagggtttcaagggatggaaaacatgcagancttctggcaattgggtgatgaactccgtgggcactcaaaagcatcggaggatcacaagtggttaatggttgcctcgaaactggccgaacagacaagattgaagggggagcgtgtgancaaccttgatctttcaaagggacccattgaaacaaggtcaagggataaatttnggttccaggaa

SEQ ID NO: 290209 - DNA, 248 bp, Glycine max
ctaagaaccctttctggttcaaccgcgatcgcttcgttctctctgctgggcacgggtgcatgcttcagtacgcgcttctgcacctcgctgggttcgatagcgtcaaggaagaggatttgagggaatttcgccaatgggggagcagaactccgggacaccctgagaattttgagactccgggaattgaagttacaacaggtcctcttggtcagggattgccaatgctgttggtttggcccttgcagaga

SEQ ID NO: 290210 - DNA, 248 bp, Glycine max
  unsure (1)..(248): unsure at all n locations
cttgagcagacttaacaacagcacaaagcgggttactgtctgntcaagctaccannnnnnnnnnnnnnnnntagtgcctccttgccagaagttaaaatggcccaannaactttccnattcacatctgaatcagtgaacgaggggcaccctgacaagctctgtgaccagatctccgatgctgtgctcgangcatgcttggagcaggaccctgacagcaaggttgcctgtgaaacctgcaccaagaccaa

SEQ ID NO: 290211 - DNA, 242 bp, Glycine max
  unsure (1)..(242): unsure at all n locations
gnaacatattcattatgaagatgagactagtcgatacataaccattggttgtntggaaaaggttttatgtatgcttgcttgttgggtggaagatccaaacggagatgctttcaagaagcatcttgcaagggtcccagattacctatgggtttctgaagatggaatgaccatgcagagtttggtagccaagaatgggatgcggcttgctgttcagctttgcttgccaccaacataatnggggg

SEQ ID NO: 290212 - DNA, 267 bp, Glycine max
  unsure (1)..(267): unsure at all n locations
cgcgcgacaaatccatcattctctggcacctcaccaaggacgacaagacctanggtgtcccccgccgccgcctcaccggacattctcacttcgtccaggacgtcgtcctctcatccgacggtcagttcgccctctccggctcctgggacggcgagctccgcctctgggacctcgcggcnggcacctctgcccgccgcttcgttggccacaccaaggacgtgctctccgtggcgttctccatcgacaaccgtcagatcgtgtcggcct

SEQ ID NO: 290213 - DNA, 296 bp, Glycine max
  unsure (1)..(296): unsure at all n locations
gtgaatcaagaaccgctctgctatggctgctctgcaatacttggaatcgctgcgcaattcgcaccctgagctctccgattggtacaattcgctggcggatctgtaccagaagaagctctggcaccagctcactctcaagctcgagcagtttgtggctctcgccgtcttccaggctggtgatgctttaatacaattatatcacaatttcatcacagactttgagncgaaaatcaaccttctcaagcttgcacattttgctgttatagtttctcggcagtattctgaaaaagaagtgc

SEQ ID NO: 290214 - DNA, 297 bp, Glycine max
  unsure (1)..(297): unsure at all n locations
ggcaaatcaggcagtagagaggggagctggttcagatggtcagaagatatcttacacccttatcaagcatcgtatgggagatctgttctaccgattagtgtctcagaaatttgaggatccagcagaaggggaagctgctttggttgctaaatttcagaagttacacgaggacctgactaatggtttccgcaaccttgaggacgaaacccgatgattgaagatttggtatggtagtttgctcaataatgtgttatttccattgtaagaggcatcntagcatgcagggttacaccgtcc

SEQ ID NO: 290215 - DNA, 301 bp, Glycine max
gagaatggctcccaagggtttaacctttctggctgtgttaatatgcgtttcagcactgtcactgagtccttctgttgcgggggaagggcaaaataatggccttgttatgaacttctacaaggaatcatgccctcaggctgaagacatcatcacagaacaagtcaagcttctctacaagcgccacaagaacactgctttctcctgggctcaggaacatcttccatgactgtgctgttcagagttgtgatgcttcactgttgctggactccacaagaaggagcttgtctgagaaggaaacaga

SEQ ID NO: 290216 - DNA, 301 bp, Glycine max
cacgttctctcttccctctttcatccccccgataagaacaagcacccaccgtttaacgctaatttttgagtgtttttgttttttgcagcaacaaacaaacattctttaccttaaacaacaatggccgatgccgaggatattcaacccctcgtttgcgataatggaaccggaatggtcaaggctggttttgctggagatgatgcaccgagggctgtgttccctagcattgtggggcgtccacgtcacactggggtgatggttgggatggggcagaaggatgcgtatgttggggacgagccca

SEQ ID NO: 290217 - DNA, 292 bp, Glycine max
  unsure (1)..(292): unsure at all n locations
ctgctgttggcttgacatcaagttacactccaactccattgttngaatctggttngcaaaaagacagagggttaattgtggagtattttggaaggatgtcttacgttgctcataacgttaatcagccccaagagaaagatttgttagagggaaatttttcctttgatattaaatctcgctctagattggaaaaagtttcctctacaaaagcacaatttgttagtggaaaaaccttcaaatatgatataattggtgctggttcacattcttcagaagattttcctgaaaaggg

SEQ ID NO: 290218 - DNA, 295 bp, Glycine max
aaccgcagtcgttgaaccctacaacagcgtcctctccacccactccctcctggaacacaccgacgtggcggtcctcttggacaacgaagccatctacgacatctgcaggagatccctcgacatcgagagaccaacctacaccaacctcaacaggctcatttcccagatcatttcgtccctcaccacttccttgaggttcgatggtgccatcaatgtggatatcactgagttccagaccaaccttgtgccctaccctaggatccacttcatgctttcgtcctatgctccggttatc

SEQ ID NO: 290219 - DNA, 295 bp, Glycine max
gaagatctagctagaggcagagaacgttctccctaatcttctgccgatggcgatcttctacgctttggtggccagaggcacggtcgtcctggcggagttcagcgccgtcaccggcaacaccggcgccgtctcccgccgcatcctcgagaagcttccggcggagtccgactccaggctctgcttctctcaggatcgctacatcttccacatactccgatcggatggcatcacctacgtctgtatggccaacgacaccttcggaaggagaattcctttctcgtacttggaagatatc

SEQ ID NO: 290220 - DNA, 295 bp, Glycine max
  unsure (1)..(295): unsure at all n locations
caaggcagaaagcaagctcatcctagagttttaaaaatggcagcagcctcctccatgggctctctcttccccatncttggctggcaaggccgtgaagctgggcccatcagcccccgaagtcgggagggtcagcatgaggaagaccgtcaccaagcaggcctcctccggaagcccatggtacggcccagaccgcgtcaagtacttgggcccattctctggcgagcccccgtcctacctcatggcgagttccaggtgactaggntggganatgctgggntttgggcggaccaaaaaa

SEQ ID NO: 290221 - DNA, 295 bp, Glycine max
cctttgttcactcttcttctcttgcggctagggttttagcgcactttcttctagatttaaggaagatgggtaaggaaaaggttcacatcagtattgtggtcattggccatgtcgactctgggaaatccactaccactggtcacctgatttacaagcttggaggcattgacaagcgtgttattgagaggtttgagaaggaagctgctgagatgaacaagaggtctttcaagtatgcctgggtgctggacaaacttaaggctgagcgtgaaagaggaatcaccattgatattgcttt

SEQ ID NO: 290222 - DNA, 300 bp, Glycine max
  unsure (1)..(300): unsure at all n locations
gaagtgagatacactaagttatcctcataaatacactctaattaggtggcaagataagtgtctaaccttagtaacattgccacatattgtgttcattttggaattgtgccactaaaattctattcaattcatctatggctgcctcttcttatgctatgcaatcaatcctggcaaaccctttgatccgcatttccagcggggtctagggtgaaccaattgggcgttccggcttggcncatgagaggaattttggcntggagatngggncnatgggcaagggaagaacaacccaggggggnc

SEQ ID NO: 290223 - DNA, 288 bp, Glycine max
ctcaaggtcaagtcattacctgcaaagctgcggtggcctgggaacccaacaagcccttaactgtccaagacgttcaggtggctccgcctcaggccggcgaggtccgtgtccaaatcctcttcaccgctctctgccacaccgatgcttacacttggggcggcaaggatcccgaaggtctcttcccctgtattcttggccatgaagctgcagggattgtggagagtgttggagaaggtgttactaatgttcagcctggggatcatgtcatccctgttatcaggctgagtg

SEQ ID NO: 290224 - DNA, 295 bp, Glycine max
  unsure (1)..(295): unsure at all n locations
gagctaacaagagattcaagaccgggcatggctaatgaagaggaacagaaaaaccaccttcttcggcatcaaagatctcggtcacaagactctccttcagagtgatgcactctatcagtatatacttgaaaccagtgtctatccaagagagcacgagtgcttgaaagagatacgcaagatgactgcaaaacacccactgaacatcatggcaacaccagcagacgaggacaacttctgagcatgcttgttaagctcacgaattcaaagaacgccttggaattngtgtttcactggt

SEQ ID NO: 290225 - DNA, 289 bp, Glycine max
  unsure (1)..(289): unsure at all n locations
tgtcgtcnaacttgtggtgagggaattggaaacggatccgctgttcaattcgggccgtggatctgccctgacagaaaaaggaacggtggagatggaggctagcatcatggatggtccaaaacgacgatgcggcgccgtttcgggtcttaccaccgttaagaacccgatctcgcttgctcgtntggttatggacaaatccccgcattcctacctcgnttctccggcgccgaagaatttgctaggcaacagggtgtggaggttgtggacaagagtatttatcacaccccac

SEQ ID NO: 290226 - DNA, 295 bp, Glycine max
  unsure (1)..(295): unsure at all n locations
ctgcgactctctttccttccctctttttccgaatctgaatcgaaatggcttcggagactgagacgtttgcttttcaggccgagatcaaccagctcctcagtctaatcatcaacaccttctacagcaacaaggagatntttcttcgtgagctcatcagcaatgcctctgatgctttggacaagattcgatttgagagtcttacagacaagagcaagcttgatgctcagccaggagttgttcattcacattattcctgacaagaccaacaacacattgtctatcattgacagtggta

SEQ ID NO: 290227 - DNA, 295 bp, Glycine max
  unsure (1)..(295): unsure at all n locations
ttttggaaggatgtcttacgttgctcataacgttaatcagccccaagagaaagatttgttagagggaaatttttcctttgatattaaatctcgctctagattggaaaaagtttcctctacaaaagcacaatttgttagtggaaaaaccttcaaatatgatataattggtgctggttcacattcttcagaagatttcccggaaagggaggtcaggaaaacccnaaaagttggtgncnntttggnccnaangnangggtccccaataaaaggggttcgggcccagtggaaaaaattt

SEQ ID NO: 290228 - DNA, 297 bp, Glycine max
ggtggtatcagttggcgtcacactgaatcaggcattcccaatgagcaaattcgagaagttagatctgatgtgagtctaattgttagatcagttgttaccgttggcaactatgacaatgtaatagattgggagttcaagccaagtggttcaatcaagccttcgatatcactatcaggcattttggaaattaaggcagtggatattactcacacagatcaaataaaagatgaccaacatggcacattggtctcagaacacagcattggtgtttaccatgaccattactacatataccat

SEQ ID NO: 290229 - DNA, 288 bp, Glycine max
catggccgaaatcgaagctaccgttccagatccctctcaaatcgacgtcaaacttttcaaccgctggagcttccgacgacgttgaggttactgatatgtctctggctgattacattggagtgtccccgtcaaagcatgctacatatgttcctcacactgctggtaggtactcagtgaagaggttcaggaaggcgcagtgccccattgttgagagactcaccaactctctcatgatgcacggaaggaacaatggaaagaagctcatggctgtcaggatatcaagcatgc

SEQ ID NO: 290230 - DNA, 286 bp, Glycine max
gtgatttcagtgagtgatcggtgttcacttgatctcatcataatcgtcagcgtcaattgaagaagatgccgatcagaaacatcgccgtcggaaggcctgaagaggcgactcaccccgacacgttgaaggcggctttggctgagttcatctcaaccttcatcttcgtgttcgccggctcaggctccggcatcgcctacaacaagctcaccgacaacggcgctgccacccctgccggcctcatctccgcctccatcgcccatgcatcgccctcttcgtcgccgtctcc

SEQ ID NO: 290231 - DNA, 285 bp, Glycine max
gatattgtctaagaaaggagtcatcatattacccgacatatatgctaatgccggtggagtgactgtgagctactttgagtgggttcagaatattcagggatttatgtgggatgaagagaaagtgaaccgtgagctgaaaaagtatatgactaaagccttccgcaacataaaggcaatgtgtcaaattcataactgtgacttgcgaatgggagccttcagtctcggagtgaaccgtgttgctcgagctacacttctcagggttgggaagcttaatagaacacatgc

SEQ ID NO: 290232 - DNA, 289 bp, Glycine max
  unsure (1)..(289): unsure at all n locations
gtcaagtctgtggagatgcaccatgaatctcttacagaggcacatcctggtgacaatgtgggattcaatgttaagaatgttgctgttaaggatttgaagcgtgnttatgttgcctcaaactcaaaggatgaccctgcaaaggaggctgctaacttcacagcccaagtcatcatcatgaaccaccctggtcagattggaaatggctatgcccctgtcctcgactgccacacttctcacattgctgtcaagtttgctgaactcatgaccaagattgacaggcgatccggca

SEQ ID NO: 290233 - DNA, 291 bp, Glycine max
cttctagtatttttcaagtaacttaaggtttcaaacctaggaagttggaagtcatggcagcaacattgatggcagcaacaagttctggcactcttaaagcaactcctttcctaggccaaggcaagggtgccaatgccaatgctcttagggatgttgtttccatgggaactgggaagtacaccatgggcaatgatttgtggtatggaccagacagagtgaaatacttgggacccttttcagctcagaccccttcatacttgaaaggagattcccaggggattatggatggga

SEQ ID NO: 290234 - DNA, 292 bp, Glycine max
  unsure (1)..(292): unsure at all n locations
catggatcacttcttgccgatattgctcaggcaaccagaaaccctcatgaataccagatgatcatgtcagtaatctggaagcgaattaatgacactggcaagaattggcgacatgtctacaaggctttgacagtactagagtacttggtggctcatgggtcagagcgagtgatagatganatcagagaacatgcttatcaaatatcaacattgtccgattttcaatatattgattccagtggaaganatcaangaaacaatgtcaggaagaaatctcaaagtctggttatcc

SEQ ID NO: 290235 - DNA, 295 bp, Glycine max
  unsure (1)..(295): unsure at all n locations
acaaaaactaatttggtggaaactcccaaggaatggcaactggatctaccttgtgacaaaattcctagtgtcttgactacaactgatgagagattggtaggnacagaacatgagggatatgatccttttcttggtggaatncaaaaatatgccactcccatgatgcccctagatgaagaaattctttctaaggttgcacaagacatggttgaggaatggtttgattgtgttgatgaggaggattcctttgaggaagtctctttaagtgcagcactcaatggtgttgagggtttgg

SEQ ID NO: 290236 - DNA, 279 bp, Glycine max
gggattaacttgtttgcacagtcttttttcttgttattgtctaagaggaaggtggagaacagatggagtgagcttttggggctgcttgcgttctgggtttggtaccctttgttggtttccttcttgcccaattggtgggagagggttttgtttgtttttgtgagcttttctgttacgggtattcagcatgtgcagttctgtttgaaccattctcctcggaggtgtacctagggccacgagcggcggcgatggttcgagaagcagaccaaagggatcttg

SEQ ID NO: 290237 - DNA, 288 bp, Glycine max
cttgagcagcttaagacctctgcagctgataggtatacaaaggaaaggagcagcatcatggttattggactgagtgtgcatagtacacctgtggaaatgcgtgaaaaacttgccataccagaagcagaatggccaagagccattgcggagtttgtagtctgaatcatattgaggaagcagctgttctgagcacctgcaacagaatggagatatatgttgttgctctgtccaagcaccgcggtgtcaaagaagtcactgaatggatgtccaaaacaagtgggatcccgg

SEQ ID NO: 290238 - DNA, 288 bp, Glycine max
gaccagagtagcgagaagattcataggaagcagatcaagcatttgttccttgacctattcgttgcggggacggatacaacagcctacggcttagagagaacaatgacggaactaatgcacaatccagaagccatgagaaaagcgaagaaggagatagcagaaacaataggagtaggaaaaccggtggaggaatccgacgtggcaaggctgccatacctgcaatcagtgataaaagaatctctgcgaatgcacccaccagcaccactgtatgccacgagggccaaaacg

SEQ ID NO: 290239 - DNA, 290 bp, Glycine max
  unsure (1)..(290): unsure at all n locations
gcttcaacttgctccctcagaagcgaagaagaagccacagagaactagtctccttacttctcacccgcaaganaaaaatgggcatctcacatcgttggatacccccgtatgggtcccaaganagagctcaagttcgctctcgagtctttctgggatggcaagagcagcgccgaggatttgcagaaggtgtcttctgatctcagggcatccatctggaagcagatggctgatgctgggatcaatacatccccagcaacatttctctcatatgaccagttctcggacgccac

SEQ ID NO: 290240 - DNA, 293 bp, Glycine max
  unsure (1)..(293): unsure at all n locations
gatgaaaagtcaatccactggtcaatgtgggcattatgaaattatacctaccaagacttggatttgccccataccttcctccagttgaggagggtgcaaattctgcattgaagagagcatttgaggccttgaacactcatcttgcttccaatacatacccggttggcattctgttacccctgctgatatcataacgacgtgcaattggaatnaaggattcagccagctcttagttaagggcttcaacctccgagttccctaanntcggagnggaantttggaaattgggcaac

SEQ ID NO: 290241 - DNA, 287 bp, Glycine max
  unsure (1)..(287): unsure at all n locations
agttccctacctctcctttcaagatgcagatcttcgtcaagaccctcaccggaaagaccatcacccttgaggtgggaagctctgacaccatcgacaacgtcaaggccaagatccaggacaaggaaggaattcccccggatcagcaacgtctcatcttcgccggaaagcagctcgaggacggccgtaccctcgccgactacaacatccagaaggagtcaaccctttcaccttgtcntcgtcttccgtggtggcatgcagatcttcgtcaagactctcanggcaaaaca

SEQ ID NO: 290242 - DNA, 278 bp, Glycine max
  unsure (1)..(278): unsure at all n locations
tgactatngggattgcaattgtnagttggattgcactcccaacttccttcactatcttcaattttggagttcagaaagatgtcaagaattggcagctattcttgnntgttgctgttggtctttgggcaggtcttattattggatttgtaactgagtactatactagcaatgcatatagtccggtgcaagatgttgcagactcctgcaggactggtgctgcaactaatgttnatatttggccttgcctgggatacaagtctgttatatccaattttgct

SEQ ID NO: 290243 - DNA, 286 bp, Glycine max
  unsure (1)..(286): unsure at all n locations
cacacagaaaaaatgggttcttcttcttctatgtggacggtgtgtgtgattttggcatcactgggcctctgcagcactctgtgccaacccacgcaggccagtggatgtacaatttggccgaaactacgtgcccacatgggcctttgatcacatcaaatatttcaatggtggttctgacattcagcttcatcttgacaagtacactggtactggcttccagtccaaagggtctnacttgtttggtcacttcagcatgtacataaagatggttcctggagatctgctg

SEQ ID NO: 290244 - DNA, 286 bp, Glycine max
gataactagaaacagtgtgatgaaaatgaaggtccttgttttcttcgttgctacaattttggtagcatggcaatgccatgcgtacgatatgttccctctccgaatgaacactggctatggtgcccgtactccggaggtgaaatgcgcaagttggaggcttgctgtggaagcacacaacatctttggctttgagaccattcctgaagagtgcgttgaagcaacaaaggaatacatccatggcgaacaatatagatcagactccaaaacagttaaccaacaagcttac

SEQ ID NO: 290245 - DNA, 288 bp, Glycine max
agcgttgccattctcatcctcttctttctctctctaccattgccatggatccctacaagcaccggccatccagcgccttcaattctcccttctggactacaaattctggtgctcctatttggaacaacaactcctctttaaccgttggagctagaggtccaattctgctggaggattatcatcttgtggagaagcttgcaaattttgatagggaacgtatcccagaacgtgttgtccatgccaggggcgctagtgcaaagggtttctttgaggtcacccatgacattc

SEQ ID NO: 290246 - DNA, 285 bp, Glycine max
gtaagccacatcctcagggtgaagaatatggtcctgttagcgaagtctacgtgcctgccagcgaaggagtggaagcttatatttggttactggcaaaggcttatgttgttgtgaatgatgcatgctaccatcaaatcattagccattggctaagcactcatgcaattgttgagccatttgtcatagcaacaaacaggcaactgagtgtggttcaccctatttacaaacttctgtttcctcataccgtgacaccatgatattaattcattgcccggaaagccctgg

SEQ ID NO: 290247 - DNA, 293 bp, Glycine max
  unsure (1)..(293): unsure at all n locations
gaaaaccaggnaattagtgacgaaggttacnnatcccgaagcttggacgggaacganggcaacaagtgtaagaccntgctggccattgnccgttnggacanccttctccgaaggaagggtcggggaagcttacaattcgtggatgccatttcnagacnttggggngactaatgtangtcctcaanggcaattgcctcatgggtgtcttntcctaaagtttgctctctatggnatgtcgctatgttggtgatgtaggcctgntgagattgctagtgggtgcnatcattagagaa

SEQ ID NO: 290248 - DNA, 289 bp, Glycine max
  unsure (1)..(289): unsure at all n locations
gttcagtgtctacaataccaggtgattttgtcattggtgtcaagttgacaaccataaacaatatgtgtgcatatgggctcaatcctggtatttcaggttctcgtcttttgggcaccattcctcagtccatttcacagcaaactgtttggaatcaaatggcaacagtgagancaccattgaattttgantctagcaagcagagcttttgtcaattttctattgaccttctcggtggaggaattttagtggacaaaactggagattggatcacacttatacaaattccccc

SEQ ID NO: 290249 - DNA, 291 bp, Glycine max
aggacaactacctcaactaccacaagaggttgatagagcttgtaaaagttgggggcgtgatcgggtacgacaacaccctatggaacggatctgtggtggcaccccctgatgctcctcttaggaagtatgttaggtactacagggacttcgtgctggagctcaacaaagccctcgctgtggaccccaggatcgagatttgcatgctcccggttggtgatggaatcactatctgccgtcggatcaagtgatttctgatcatcataatcgtggaccaccgttgcttcttctgca

SEQ ID NO: 290250 - DNA, 271 bp, Glycine max
  unsure (1)..(271): unsure at all n locations
gaaacagtgtgatgaaaatgaaggtccttgttttcttcgttgctacaattttggtagcatggcaatgccatgcgtacgatatgttccctctccgaatgaacactggctatggtgcccgtactccggaggtgaaatgcgaagttggaggcttgctgtggaagcacacaacatctttggctttgagaccattcctgaagagtgcgttgaagcaacaaaggaatacatccatggcgaacaatatagatcagactccaaaacagttaantngggg

SEQ ID NO: 290251 - DNA, 267 bp, Glycine max
  unsure (1)..(267): unsure at all n locations
ggctaattccctcgctgatgggtacagcacaggtactggattgggtgctgagatcattggcacctttgttttggtgtacactgtcttctctgccactgaccctaagaggaatgctagagattcccatgttccggtttggctccacttcccattggatttgctgtgttcatggttcacttggccaccatcccagtcactggcactggtatcaaccctgctaggagtcttgganctgctgttatctacaaccaagataagccatgggat

SEQ ID NO: 290252 - DNA, 270 bp, Glycine max
  unsure (1)..(270): unsure at all n locations
ctccgagataaccgccgtgacgttccgcggcccctcggacacgcacctcgantcgctcgtgggacaggcactgttcggagatggcgccgcagcgttgatcatcggatcagaccccgacccagcagtggagcggccgaattcgagatgatatcggccgcccagacaatcctgcccgactctgacggtgctatancatgggcaccttcgggaggtgggactcacgttccacctcttgaaagatgtgcccgggatcatctcgaagaacattga

SEQ ID NO: 290253 - DNA, 271 bp, Glycine max
  unsure (1)..(271): unsure at all n locations
gtttggaatcaaatggcaacagtgagaacaccattgaattttgattctagcaagcagagcttttgtcaattttctattgaccttctcggtggaggaattttagtggacaaaactggagattggatcacacttatacaaattctccaattagtaacttgttgagagttgctgcttggaagaaaggctgtttaatggtcangattgtgatgtctgggaatgcagcagtcaaaaggagtgattgggcctcattggtacaagtgtttttnacaaa

SEQ ID NO: 290254 - DNA, 269 bp, Glycine max
  unsure (1)..(269): unsure at all n locations
gtcactgtgacatatctgtgcagggtggggaacgaatgacggattgataatatcaatcctgggtcatagaaatgcagctcagcgtaagttgattcgtgaagcttatagtgcaactcatggagaagatctttttaaagattagacaaagaacttncaagtgactttgagcgggctgtgttggtttggacattggatcctgctgagcgtgatgcctttttagctaatgaagccataagatgttgattcaaacattgggtcttttggaaatt

SEQ ID NO: 290255 - DNA, 268 bp, Glycine max
  unsure (1)..(268): unsure at all n locations
ggttgctccaccacctaatcacttcccctgtaaatcacgtttagttcgcacaaggttttaaaaaatggctgatgctgaggacattcaacctcttgttgttgntaatggaactggaatggtcaaggctggttttgcagtgatgacgctcctagggccgtgttccccagtattattgggcgaccacgccataccggtgtaatggttgggatgggtcaganggatgcttacgtgggtgatgaagctcaatcaaaaaggggtatatcncctt

SEQ ID NO: 290256 - DNA, 273 bp, Glycine max
  unsure (1)..(273): unsure at all n locations
tgcagccgccgcaagagccgaaaggctcaacttcacggcgccgtcgagcgtgcggagggtgctgatgagcgcccctctgtcggcggagctccggtcgaagtacaacgtgcggtcgatcccagtccgcaaggaggacgagggcaggtggtgcgcggaacatacaagggtcgcgaggggaaggtgacgcaggtgtaccgtcgcaagtgggtcatccacatcgagcgcataacccgcgaganggtgaatggctccaccgtcaacgttgggattcac

SEQ ID NO: 290257 - DNA, 273 bp, Glycine max
gctggttttgttaagatgattccaaccaaacccatggttgttgaaactttctccgagtatcctccacttggtaggtttgctgttagggacatgcgtcaaactgttgctgtgggagtcatcaagaacgttgagaagaaggacctaccggagccaaggtcaccaaggctgcccagaagaagaagtgaatcgtgcgggctggttcatcaggggatgttggttacaataaatgttggtttcttttctgtatcttgtgtctcttttctaggtagcttg

SEQ ID NO: 290258 - DNA, 263 bp, Glycine max
ccccaatcagtttgttctcggtatggtttggctattggtgcatcagtggctccctttgtccgtgtgcttgtatgcatatgtttcccagttgcctttccaattagtaagttgttggattttttgctgggccatcgcatgaagccctattccgtagagctgagttgaaaacactcgtaaatttgcatggtaatgaggctggaaaagggggggaactgacacatgatgaaacaacgatcatgctggggcattgaactcagtgagaa

SEQ ID NO: 290259 - DNA, 266 bp, Glycine max
  unsure (1)..(266): unsure at all n locations
gagagatttntggnacgatncgcacctactgcaaaggntcttgcatcaagagatgtagtntctaggtcaatgactatggaaatccgggaaggccgtngtgtaggacccctgaaagatcacatctatctccacttgatcacttacccccagatgttcttaaggagaggctacctggtatctctgaaacagctgctatttcngctggtgtggatgttactaaggaacctattcctgttttgccaacagtgcattataacatgggtggt

SEQ ID NO: 290260 - DNA, 264 bp, Glycine max
gggtaggaccatttattggggcagccattgcagccttctaccatcagttcatcttaagagcaggtgcagctaaggctcttggatcattcaggagtaacccccataattgagttgtctttctcttccttatgatgctctagtggaaagaagataattggagagatgggggttgatatggcaagtttaataataattgggaatgcttttggcttgtgttttgcaacgtttctttgaccctctcgattatgtcttcaagattgtgga

SEQ ID NO: 290261 - DNA, 274 bp, Glycine max
cgagagatggatccagacgcgttggcaaaggcattcgtggagcactactacagcaccttcgacaccaacaggaacggcttagcgaatctctaccaggagggttccatgctcactttcgaagggcagaagatccaaggcgttccaacatcgttgccaagctcacctccctcccttttcagcagtgccaccactcaatctccaccgtcgactgccagccctccggcgtcaacgcggccatgctcgtcttcgtcagcggaaaccttcagctcgccgg

SEQ ID NO: 290262 - DNA, 276 bp, Glycine max
  unsure (1)..(276): unsure at all n locations
gttaaagagtaaaagcaccgtctccgtctccactctcggcttcttcttcgttgcgctttttcccaaaaccaattgcatcactctcgtccgttaccgccgctgccctagaccaccgcaagcgacgtcgcacaccgccttcatcgttagggcaaaaatgagtcgaggaagtggaggtggatacgatcgtcacatcatattttctcccctgaaggacgtcnctttcaagtggagtatgctttcaaggctgtnaaggctgcaggatccctcgattggtgt

SEQ ID NO: 290263 - DNA, 266 bp, Glycine max
  unsure (1)..(266): unsure at all n locations
gtgtggttgacagtnaagaagtagcaaagatgtttccattcgggcacaagggtcaaaagataaaggggactatggtggttatgcagaagaatgtgttggatatcaacagcatcaccagtgttgacgggatcgtcgcaccggcttagacttcttaggcagtgcactcgatacagttacttttttagcctcctccatctccatccaacttattagtgctaccaaggctgatggtgggaaaggnaaagttggaaaggctacaaatttga

SEQ ID NO: 290264 - DNA, 263 bp, Glycine max
  unsure (1)..(263): unsure at all n locations
ctcttcttctcttgcggcnagggttttagcgcanttcttctagatttaaggnagatgggtaaggaaaaggttcacatcagtattgtggtcattggccatgtcgactctgggaaatccactaccactggtcaccgatttacaagcttggaggcattgacaagcgtgttattgagaggtttgagaaggaagctgctgagatgaacaagaggtctttcaagtatgcctgggtgctggacaaattaaggctgagcgtgaaagaggaa

SEQ ID NO: 290265 - DNA, 264 bp, Glycine max
  unsure (1)..(264): unsure at all n locations
ggacccaaaaactggtgaggagaaatctgtcaccatttctgttgatgatggaattcgacctggcacaacagtgtctgatctaggaaggctcaaacctgtgttcaaganagacggaagcaannctgctggtaatntagtcaggtgagtnatggtgctgcagctgttctgctgatgaanagaagtgttgcgttgcaaaaggggctacccattcttggtgtattcaggatttcgcagcantnngtgttnatcctgccataatgggtg

SEQ ID NO: 290266 - DNA, 264 bp, Glycine max
  unsure (1)..(264): unsure at all n locations
taactagaaacagtgtgatgaaaatgaaggtccttgttttcttcgttgctacaattttngtngcatggcaatgccatgcgtacgatatgttccctctccgaatgaacactggctatggtgcccgtactccggagtgaaatgcgcaagttggaggcttgctgtggaagcccacaacatctttggctttgagaccattcctgaagagtgcgttgaagcaacaaaggaatacatccatggcgaacaatatagatcagactccaaaac

SEQ ID NO: 290267 - DNA, 264 bp, Glycine max
  unsure (1)..(264): unsure at all n locations
tctaagtgagatacacagtagttaggtagcaagcataagtgtctaaccttagaaacatatctgctacatatcgtgtgcattttggaattgtgccactaaaattctattcatctatggctgcctcatcttatgcttgcaatcaatccttgcaaaccctatgatccgcatttccagcgggtctagggagaaccattttggtgttcctgcttatcacatgagaaggaatgttggctgagagtnaggtccaggctgaggaagagcaac

SEQ ID NO: 290268 - DNA, 269 bp, Glycine max
  unsure (1)..(269): unsure at all n locations
ggaacaggcaggaggacagtctttcacgggcaaggaacggggtttatgcgttgaaagatgtccatgaaccaaccatagaagatgtcctgcttcctgggaagaacatggtggcagctggttactgtatgtatggaantcttgcacgcttgtgttaagcactggagcaggtgttaatggtttcacccttgacccatctcttggtgagttcatcctaactcaccctaacattaagatcccaaagaaaggtaaaatttattcagtgaatgaag

SEQ ID NO: 290269 - DNA, 272 bp, Glycine max
  unsure (1)..(272): unsure at all n locations
ggctgcctcactacaagctgcagctaccttcatgcaacccaccaaggttggcatagcctactcgcaacctcaaatctacacaatgcatttctaaggcttttggcttggaacctgctgcagctaaactcacttgctccctnagcctgatctcaaagaatttgctcaaaaatgtgtcgacgctaccaaaattgcaggattcgcccttgccacctctgctctcgttgtttctggagcnagtgcagaaggtgttccaaaaaggtaaccttcgacga

SEQ ID NO: 290270 - DNA, 261 bp, Glycine max
  unsure (1)..(261): unsure at all n locations
cctcgctctgtttctgtctctgtgtttgcggctgaggattccgaacgagcgaccttcttcgtttctcgcaaagtttaagtcatcatgggtanngaaaagactcacatcaacattgtcgtcattggacatgtcactctgggaagtcaactaccactggtcatttgatctacaagcttggaggtattgacaagcgtgtgattganaggttcgagaaggaggctgctgagatgaacaagaggtcttcaagtatgcctgggtgtt

SEQ ID NO: 290271 - DNA, 265 bp, Glycine max
  unsure (1)..(265): unsure at all n locations
cgttgctctgcttcaaccttgcggaagaagaagacgccgcagccatggtgaagtactccagagaacccgacaatcccaccaagtcctgcaaggccagaggcgctgacctcagagtgcatttcaagaacactaggagactgcctttgccatcaggaagttgcccctggttaaagctaaaagatacctggaggatgttttggcccacaaacaggccatccctttccgacgcttctgtggtggtgttgggaggncagcccaggctaag

SEQ ID NO: 290272 - DNA, 266 bp, Glycine max
  unsure (1)..(266): unsure at all n locations
ctggagattggatcacacttatacaaaattctccaattagtaacttgttgagagttgctgcttggaagaaaggctgtttaatggtcaagattgtgatgtctgggaatgcagcagtcaaaaggagtgattgggctcattggtacaagtgtttttaacaaacagcnacagtacagagcattttgatgcatgtaagtggacaaaatcagaaccacattcctgggaattgatcttcccaatagaggtatgtggtnccaataatggttttg

SEQ ID NO: 290273 - DNA, 144 bp, Glycine max
  unsure (1)..(144): unsure at all n locations
gtgggttccccagattttagatagcttttgaatgtattttgctggacgtgacgatgattgggaagttgggttgttgtntttatttgtggttgatacttttgttaaataacattgttcagcgataatgatagtgactttcggacc

SEQ ID NO: 290274 - DNA, 270 bp, Glycine max
  unsure (1)..(270): unsure at all n locations
acaaaattgccgtggtcaagtattctctgttgggttctattctttcaaaccttcttctggttcttgggacctctctattatgtggtggcattgcaaacgttggagtggaacaaaaatatgatagaagacaagcagtgtgaactcacttatgctgttgttgggattgttgtgctacttgcttccaatgctgttcaaatacagtggtgcctcagctgctctcactgtagacccttcactacattgtccaaangcttctagcattgtgcagtt

SEQ ID NO: 290275 - DNA, 264 bp, Glycine max
  unsure (1)..(264): unsure at all n locations
atcgcagagaagaacagagagagatccatccatcaattccaatggccgatcagctcaccgacgaacagatctccgagttcaaggaagccttcagcctcttcgacaaggacggggatggttgtattaccaccaaggaacttggaccgtgatgcggtccacttgggccagaacccaactgaggcagagctgcaggacatgataaatnaggttgatgctgatgggaatggtcccattgtttcccannttcctgaatctcaaggcncc

SEQ ID NO: 290276 - DNA, 263 bp, Glycine max
gtgcttcaaacccctttttctcttctcatttcctttcatcactctcttgcttcttttcttcttctcgcaattttccattttcacacttttagcaacatcttttaatggcgtcccaaatccgtgagtggtctggatcaatacattcgcacctgctacccagactaagttgcttgaactcttgggaaatcttaaacaagagaatgtgaactccttgactatacttgtgatgggaaaaggaggtgttggaaaatcttcaatgtgaa

SEQ ID NO: 290277 - DNA, 262 bp, Glycine max
  unsure (1)..(262): unsure at all n locations
gattgaggaatatatggtcaaaatcgacatgagaggatgtcgagccacactatctctcttctcttctgattggnactgctgttgtttgttttgctattatttgtaaaaccatttgtttttaattgagatcgtgcatgtatggtttaatataatcttaggcaagtagcagcaaagatgcttctctgtgacatgttcaattattaatttatatgaattgcgctttaatttgttgaataaaaaaaaanaaanaaancnnaaagna

SEQ ID NO: 290278 - DNA, 265 bp, Glycine max
  unsure (1)..(265): unsure at all n locations
gccatgccagagacgaagatttttgggcatgctgtttggccaaacactcccattccaagttccattgcgagatcttctaaagcctggccctgcaantgttgaaatcgatgatcaccctatgcaaattgaagaanacagtacccgaaaaccttcttctataaagaagaccttcatccaggcaaaacaatgaaagtacaattcagcaagcctccctttcaacaaccatggggtgttggtacatggttaaaggnacttnnagacatac

SEQ ID NO: 290279 - DNA, 275 bp, Glycine max
cagaaagactccataacccaaaaatgcctttcaagaggtacgttgagattggaagggttgctcagatcaactatggcaaagagtacgggcggctcgtgatcattgtcgatgtcattgaccagaatagggctcttgttgagctcccgacatggtgaggtcccaagtgaacttcaagaggctctcgctcactgacatcaagattgatattaagaggattcccaagaagaaggatctcattcaagccatggaggctgctgatgttaagaacagatggg

SEQ ID NO: 290280 - DNA, 278 bp, Glycine max
  unsure (1)..(278): unsure at all n locations
caaaaaggtaaacttctgcaacaaccatggttgcaatggcagcagcaacagcatcctcccagttgattttctcaaagcctcgttcaccctcgcgtctctgcnccttccaactatntgtctttgacaccaaacaagtgctgtcagttcaagtggcaggagaaggcctgtggggggntctggagttnggtgcatggcggtgggagaagctgcaaccatgagactangnagagaagtggatatgagcttcaaacatcataactggttgctgaagcaggagc

SEQ ID NO: 290281 - DNA, 266 bp, Glycine max
  unsure (1)..(266): unsure at all n locations
gttgatcgagataactagaaacagtgtgatgaaaatgaaggtccttgttttcttcgttgctacaattttngtagcatggcaatgccatgcgtaacgatatgttccctctccgaatgaacactggctatggtgccgtactccggaggtgaaatgcgcaagttggaggcttgctgtggaagcacacaacatctttggctttgagaccattcctgaagagtgcgttgaagcaacaaaggaatacatccatggcgaacaatatagatcag

SEQ ID NO: 290282 - DNA, 258 bp, Glycine max
  unsure (1)..(258): unsure at all n locations
ccggatgtaaatgcaaaggcatttgtaatgacccaacaacctgtgcatgtgcactgcgtaatggctctgattttccatatgtntctcgggatggtggcaggttagttgaagccaaagatgttgtctttgatgtggtcccaaatgtggttgtgatccaggttgtgtgaaccgaacttctcaaaaaggacttagatatcgtctcgaggttttccgcactgcaaacaaaggatgggctgttagatcctgggattttatacc

SEQ ID NO: 290283 - DNA, 262 bp, Glycine max
cgaacactgggagatgcaagcaaagattctgatttgcccaggaatgcaaatgagagaatgaaggcaatggagcaaacattgatgaaaggaaggcaaattcaaaatgattgtgctgctgctgtgaagaagcttagggctatgctccactcaacagaggagcaccttcatgtgcacaagaagcagaccttgttcttaacacagttgacagcaaaaacattgcctaaaggtctccactgtcttccgttgcgccttacaactgagt

SEQ ID NO: 290284 - DNA, 260 bp, Glycine max
gtcttcatcctaggaaggatgggaaactcgaaacaagccctagctgttattataaacaaattgggggatatagaggaggccgtagagtttgtcaccatgcagcatgatgatgaactttgggaagaattaatcaagcaatgccttcacaaacctgaaatggtgggcatattattggagcacacagttggaaatcttgatcccctttacattgtaaataaggttcctaatgggttggaaatccctcggctccgggatcggct

SEQ ID NO: 290285 - DNA, 264 bp, Glycine max
  unsure (1)..(264): unsure at all n locations
cccggcaacaccaaaaccaccaccgcctctcctacctcccggagccatggccgccaccgactcctccgctgcttcgtcacgccagctttcgcagagggagacggacatccagatgatgctcgccgccgacgttaacctcggcaccaaaaactgnnactttnagatggaacgctacgtcttcnagcgccgcaccgatggtatttncataattnancttggaaagacatgggagangcttcagcttgctgctaggatatagtcgcc

SEQ ID NO: 290286 - DNA, 263 bp, Glycine max
  unsure (1)..(263): unsure at all n locations
gtgggtggctcctgaggacaaggcgagtttgtggtcacaacttcattatgtttcgtgtaataatctggaaatgcaagangcttatcttgtcaatctcgtaaatgtgttacgagaattgtatttgcacagtccgaggaagctcgccaattgagaaggaaagctctttctcgtattgaatggctgcaaaaagctgatgtgcctaccatagcacagattgaagagttccattcgatgcagaggatgatgaatgctcctgattcant

SEQ ID NO: 290287 - DNA, 261 bp, Glycine max
  unsure (1)..(261): unsure at all n locations
acaagctttcttttatgctagtgaacgcgaagtccatcacaacgacatatttatattcggcatagataacaccgtactctctaatatcccatactatgaaaaacatggatatggggtggaggaatttaatgaaaccttatatgatgaatgggttaacaagggcgacgcaccggcattgccagagactcttaaaaattacaacaagctgttgtctcttggctcaagattcgtatccttgtcaggagatatctngacaaacng

SEQ ID NO: 290288 - DNA, 259 bp, Glycine max
ccaacctctcaagtccaacctacccctttttcttctcccaccaacttcaccgtcttcttcctcgatcatgtctcacttcaagggcaagtaccatgatgagcttattgtcaatgctgcttacattggcactctggaaagggtattcttgctgctgatgagtcaacagggacaattggcaagcgtttggccagcatcagtgtagagaatgttgaatccaacaggcgtgctcttagggagctgcttttcaccgctcccggtg

SEQ ID NO: 290289 - DNA, 233 bp, Glycine max
  unsure (1)..(233): unsure at all n locations
gtgggtttctttttttaggggacnggtttgtggagatncttgggagtccttactatanggcgccagaggttttgaagcggaattacgggccggaggttgatgtgtggatgctggggtgattctttatattttgttgtgtggtgttcctccgttttgggcagagaccgagcaaggtgtggctttggcgatcttaagaggtgtgattgacttcaagagggaacttggccacagat

SEQ ID NO: 290290 - DNA, 260 bp, Glycine max
  unsure (1)..(260): unsure at all n locations
gtgaaggctaaggacttgccagcnaaggatgtcactggcagttgtgacccttatactgaagtcaagctggggaactacaaaggcactactcggcacttcgagaagaagtctaatcctgaatggaatcaggttttgctttctccaaagaccgcattcaggcctccatactggaagtacactgtgaaggncaaggatgtcgtgaaggatgacttcattggtcgtgtcttgtttgacctcaatgagatcccgaagcgtgttcc

SEQ ID NO: 290291 - DNA, 247 bp, Glycine max
gcttcacagttcatacttggccaatcaatccccatcactttgtggctgtcactggctcctgttgttattggtgtgtccatggcatctttgaccgagctctcattcaactgggtcggttcataagtgtatgtttcaaacatttccttcacgtaccgaagcatctattcaaagaaagccatgactgtatggaagtaccatatctatgcctacattccatcatgttaatgtgtgatacactgccgtattt

SEQ ID NO: 290292 - DNA, 263 bp, Glycine max
  unsure (1)..(263): unsure at all n locations
ctcaatctcgaactcatcagatctgcaaaagttttccattacggatcaatcagtttgatcgtggagccatgcagatcagcacacttgaaggcaatggaagtagccaaggaatctgggtgcttgctctcctatgaccccaaccttcgtctacccttgtggccttcggctgaggaagctcgtaagcaaatactgagcatttgggagaaggctgatttgatcaaggtcagtgatgcgganttgagttcctcacaggaagtgacaag

SEQ ID NO: 290293 - DNA, 258 bp, Glycine max
  unsure (1)..(258): unsure at all n locations
tcggcctcgacaatgccggcaaaaccactattctctatcggcttcagatgggcgaagttgtctccaccattccaacaattgggtttaatgtcgaaacagtgcagtataacaacattaaatttcaagtctgggatttaggtgggcaaacaagtatcaggccatattggaggtgttactttccaaatactcaagcaataatctatgttgttgattcaagtgacgttgncaggcntgtganagctnaggggngtnnctgcc

SEQ ID NO: 290294 - DNA, 257 bp, Glycine max
caaaaaaatgggttcttcttcttccatatggaccgtgtgtttgattttggcatcactggcctctgcagcactctgtgccaaccctcgtagaccagtggatgtacaatttggccgaaactacgtgcccactgggcctttgatcacatcaaatacttcaatggaggttctgacattcagcttcatcttgacaagtacactggtactggcttccagtccaaagggtcatacttgtttggtcacttcagcatgtacataag

SEQ ID NO: 290295 - DNA, 258 bp, Glycine max
ctcttcttcgtctcaaacctcttcgttccttcgattcattccatttcttccaaaatggccaaagacccagttcgcgttctcgtcactggagccgcagggcaaattggatatgctcttgtccctatgattgctaggggagtgatgctgggtcctgaccagcccgtgatcctccacatgcttgacattcctccagcagcagagtcgttgaatggggttaaaatggaattggtggatgctgcattccctcttcttaaaggt

SEQ ID NO: 290296 - DNA, 258 bp, Glycine max
tctcaaacctcttcgttccttcgattcattccatttcttccaaaatggccaaagacccagttcgcgttctcgtcactggagccgcagggcaaattggatatgctcttgtccctatgattgctaggggagtgatgctgggtcctgaccagcccgtgatcctccacatgcttgacattcctccagcagcagagtcgttgaatggggttaaaatggaattggtggatgctgcattccctcttcttaaaggtgttgttgcta

SEQ ID NO: 290297 - DNA, 255 bp, Glycine max
  unsure (1)..(255): unsure at all n locations
gttcggttgggacaaggatcttgccaagaaaatctggtgctttggccctgagacccttggacccaacatggtggttgatatgtgcaagggagtccagtatttgaatgaaatcaaggattctgtggttgtggattccagtgggcatcaaaagaaggtnctttggctgaagaaaacatgagagccatctgctttgnagtatgtgatgttgtgctgcacgctgatgctatccacagaggaggtggtcaaatcattcct

SEQ ID NO: 290298 - DNA, 258 bp, Glycine max
  unsure (1)..(258): unsure at all n locations
gtggacaaactcgtgaacatgtccagcttgcaaaaacgctgggtgtgtctaagcttcttgttgtcgtcaataaaatggatgagcctacagtgcaatggtcgaaagaaaggtatgatgaaattgagtcgagatggttccatttttaaagcaatctggatacaacgtaaaanaagatgtcttgtttttaccaatatctggtctaatgggtgcaaacatgaaaacaagagtggataanagcgtttgtccatggtggaatgg

SEQ ID NO: 290299 - DNA, 264 bp, Glycine max
  unsure (1)..(264): unsure at all n locations
agaaaaacaagtagttgagaactaagaagaaggaaatggcttcctcaatgatctcctccccagctgttaccaccgtcaaccgtgccggtgccggcatggttgctccattcaccggcctcaaatccatggctggttccccacgaggaagaccaacaatgacattacctccattgctagcaacggtggaagagtacaatgcatgcaggtgtgnccaccaattggcaagacgaagttcgagatctttcctattgccagacctcgatg

SEQ ID NO: 290300 - DNA, 212 bp, Glycine max
  unsure (1)..(212): unsure at all n locations
cgccgnacgccgaaacaatggccggaaaaggagagggtcctgntatcggaatcgatctcggaaccacctactcttgtgtcggttgtggnaacatgaccgagttgaaatcatcgccaacgaccaagggaacagaacgacgccgtcncacgtcggcttcacngataccgagcgtctcatcggtgatgnggctaagaaccaagtcgccatgaacc

SEQ ID NO: 290301 - DNA, 260 bp, Glycine max
  unsure (1)..(260): unsure at all n locations
ccataacacaaggcagaaagcaagctcatcctagagttttaaaaatggcagcagcctcctccatggctctctcttccccatccttggctggcaaggccgtgaagctgggcccatcagcccccgaagtcgggagggtcagcatgaggaagaccgtcaccaagcaggcctcctnccggaagcccatggtacggcccagaccgcgtcaagtacttgggcccattctctggcgagcccccgtcctaccttcactggcgagttcc

SEQ ID NO: 290302 - DNA, 261 bp, Glycine max
  unsure (1)..(261): unsure at all n locations
catggagttcgacttttgatcgaggactatccttatgcttctgatgggctagagatatgggatgctatcaagtcttgggtggaagaatatgtctcattctactacaagtcagatgaggaacttcaaaaagacccgagctccaagcttggtggaaagaacttgtagaggtgggtcatggggatttgaaggataagccatggtggcaaaagatgcaaactcgtgaagagttggttgangcttccgctaccctcatatggatgt

SEQ ID NO: 290303 - DNA, 264 bp, Glycine max
ctccttttgcctttttcaccatttttgcgtgaaagcacatgaggagatttgtttctggggatggtgaagagatgacattgattccgggaaccagtgttgaagaggcctacaacaagctaatagttgaacttgaagaagtgttcctacattggttggcattgaatgtcccaaggatgagaaacttcctcgtcgcaaaatttttgacaaacctaagacgcgctgcttcactattctccctatggagtttaatcttgtggttcgtca

SEQ ID NO: 290304 - DNA, 255 bp, Glycine max
  unsure (1)..(255): unsure at all n locations
gtgtggttganagttaagaagtagcaaagatgtttccattcgggcacaagggnccaaaagataaaggggactatggtggttatgcagaagaatgtgttggatatcaacancatcaccagtgttgacggatcgtcggcaccggcttagactncttaggcagtgcactcgatacagttacttttttagcctcctccatctccatccaacttattagtnctaccaaggctgatggtgggaaaggaaaagttggaaagg

SEQ ID NO: 290305 - DNA, 252 bp, Glycine max
  unsure (1)..(252): unsure at all n locations
gagcaagatggcagaaatgataaacagtctttgtggtggtgatgaaaaattgatgcgtgaaaggacacacctgctgttggctgttgttcaaggatggcaatttgtaagaaagatgtttggagagtgaatgtggaatcccttctggatttccgctcacagctatttgcaatagcatttttaatgngatgctcattagntnnagctatgaaaaattactgcgccaggctaaagctccaagtatgtttttacatc

SEQ ID NO: 290306 - DNA, 254 bp, Glycine max
ctatatatggggctcttggctgttttttgcacaaattccatcaatatacatgctggaataaatggccttgaagttgggcagacagtggttattgcatcagctatcctgatacacaatattatgcaaatggagcatcaacagatcctgaatataagcaagcacatgcattttctatttacttagctcagcccttgctagctacctctttggcttactttcttacaactggtatccctcttcagtttttgttggtg

SEQ ID NO: 290307 - DNA, 258 bp, Glycine max
  unsure (1)..(258): unsure at all n locations
tcaaaganggcgtcttcataaacgcctttcttctccgtttccgtttcctcgttcgaattcgctttttgatctgcgaaaatgagagagtgcatcncgatccacattggtcaggctggtatccaggtcggnaatgcttgctgggagctctactgcctcgagcacggcatcgggcccgatgggcaaatgccaagtgacaagacagttggcggtggtgatgatgctttcaatactttcttcagcgagactggtgctggaaac

SEQ ID NO: 290308 - DNA, 252 bp, Glycine max
  unsure (1)..(252): unsure at all n locations
gctgtctgcccgaaaggtatgggtccttctgtcaggaggctgtatgtccaaggcaaagagataaatggtgctggaattaattcgagttttgcagtccaccaggatgtggatggcagagctactgatgtgctttggcatggtctgttgcccttggttcgcctttacatttgcaacttcgttagagatggaatacaggagtgacatccttggggagagaggcatttacttggtgctgttcatggtattgnggna

SEQ ID NO: 290309 - DNA, 253 bp, Glycine max
  unsure (1)..(253): unsure at all n locations
caacaatattcttctcaagctgtggtattggctgggggacactcagctaatggtgctgtggcccaaggttcccattctgaaggggatatnaacaacactactatatttgttggagggcttgattctgtaccagngatgaggatctcagacaaccatttttgcaatttggtgaggttgtctctgtgaaaattccagttggtaaagggtgtggatttgttcaattgctgacagaaagaatgctgaggaagcantc

SEQ ID NO: 290310 - DNA, 255 bp, Glycine max
  unsure (1)..(255): unsure at all n locations
ccttctttctctgcgattttntcttcaatttccagatcacgaaactaaagaagatggagaaagcgatcagcagacagaagattttgcttcatcatctcaacccttcatcgtctacccacgtcaacgatcatcctccctctatgcttcagcatgtgtggcgggggacagcgctgcttatcaaaggacatcgacattcagggatgatgtngtgatcgtggctgcttatcggactgctcattgcaaaggtaaacgtgg

SEQ ID NO: 290311 - DNA, 255 bp, Glycine max
  unsure (1)..(255): unsure at all n locations
gttttagcgcanttcttctagatttaaggaagatgggtaaggaaaaggttcacatcagtattgtggtcattggccatgtcgactctgggaaatccactaccactggtcacctgatttacaagcttggaggcattgacaagcgtgttattgagaggtttgagaaggaagctgctgagatgaacaagaggtctttcaagtatgcctgggtgctggacaaacttaaggctgagcgtgaaagaggaatcaccattgatt

SEQ ID NO: 290312 - DNA, 262 bp, Glycine max
  unsure (1)..(262): unsure at all n locations
caaacaccaacaacgctttagctctctctcttctctccataaccgccacccgcgatctggcactaacagatcgccgctgctacatctgaatccgatccagccaacagatctctccaattcaaatggagaattaatctctttggtcaacaaaatccagagagcttgcaccgccttaggngaccacggcgaaaacagtgcactccccacactatgggactctctccccgccatcgncgtcgtcggaggccagagctcaggaaag

SEQ ID NO: 290313 - DNA, 264 bp, Glycine max
  unsure (1)..(264): unsure at all n locations
ggcaacgatattctgtgttgcgattatgctagttttgatggtttgattaccaagcaagtnatgagcaagatggcagaaatgataaacagtctttgtggtggtgatgaaaaattgatgcgtgaaaggacacacctgctgttggcttgttgttcaaggatggcaatttgtaaganagatgtttggagagttgaatgtggaatcccttctggatttccgctcacagttatttgcaatagcatttttaatgagatgctcattagatat

SEQ ID NO: 290314 - DNA, 264 bp, Glycine max
  unsure (1)..(264): unsure at all n locations
tgagtgaatagggatcagggatgtggaggctgaagatagcagatggaggaaatgatccatacatattcagcacaaacaatttcgtngggaggcagacatgggagtttgatcctgaagcaggcagtccagaggaacgggcccaggttgaagcagctcgtcagcatttctaccacaaccgcttcaaggtcaagccctgcgctgacctcctttggcgttttcaggttctcagagaaaataacttcaaacaaacaattcctcgtgtga

SEQ ID NO: 290315 - DNA, 268 bp, Glycine max
  unsure (1)..(268): unsure at all n locations
ttcttacaaggctctactctactgcttcaccttctgctctagaaaattcagtggtgatacatggctttcgggtaantctctctgtagccaaaccagcccttcaggcaaatgggaaaggcttctctgaattctctggcctccgcagctcatcaggcttccttcccttttctagaaaatcttcagaggatttccattctgtcattgccttccagaccncatgcagttggaagcagtggaggatacaagaagggtgtgacagaagcaaaac

SEQ ID NO: 290316 - DNA, 257 bp, Glycine max
  unsure (1)..(257): unsure at all n locations
caagatanccctggaaagggagtgaaacagcaattagaacttctttgtagcattnacgctttgtttcttcttcacaagcatttgggtgattttcttgcaactggctgcatcactcccaaacagggttcccttgcaaatgagctgctgaggtccttgtattcacaggttcgtcctaatgcaantgcacttgttgatgcgttnaactacactgatcactaccttggttcggttcttggtcgctatgatggagatgtgta

SEQ ID NO: 290317 - DNA, 267 bp, Glycine max
ctcataacacaaagcacaaagcaaagctcatccttgagttaaaaaatggcagcagcttcttccatggctctctcatccccatccttggctggcaaggccgtgaagctgggcccatcagccccagaagtgggaagggtgagcatgaggaagaccgtcaccaagcaggtctcctcaggaagcccatggtacgggcccagaccgagtcaagtacttgggcccattctctggcgagccccccgtcctacctaaccggtgagttcccaggcg

SEQ ID NO: 290318 - DNA, 261 bp, Glycine max
  unsure (1)..(261): unsure at all n locations
ccctgcttccaatggtgaaccctgatgatgttgtgtttgggggatgggatatcagtaacttgaacctggctgatgccatggccagggccaaggtgtttgatatcganctgcagaaacagttgaggccgtacatggaatccatggttccactccccggaatctatgacccggatttcattgctgccaancaaggagaccgtgccactaacgtaatcaggggcacaaagaaagaacaagttcaacaaatcatcaaagacatta

SEQ ID NO: 290319 - DNA, 202 bp, Glycine max
  unsure (1)..(202): unsure at all n locations
tagtgcctccttgccagaagttaaaatgggcccaagaaactttcctattcacatntgaatcagtgaacgaggggcaccctgacaagctctgtgaccagatctccgatgctgtgcttcgatgcatgcttggagcaggaccctgacagcaaggttgcctgtgaaacctgcaccaagaccaacatggtgatggttttcggagaga

SEQ ID NO: 290320 - DNA, 264 bp, Glycine max
  unsure (1)..(264): unsure at all n locations
caaccttctttctttcaggttcttgatcagtgtcaaaaccaaaagggtggttgcaaattgcaanggctaagcatgatgttgagggtggttccctcgcngcaaaggactancangatcctcctccagcaccantgattgatgctgaggaactcacacagtggtccttctacagggctttgattgctgagttcantgccacaangctcttcctttacatcacagtgctcacngtgattggttacaagagccagagtgatgtaaagg

SEQ ID NO: 290321 - DNA, 263 bp, Glycine max
  unsure (1)..(263): unsure at all n locations
gttttgatgcaacgctgtcactgagaaaggatctctatctacgaaggagcggaataaaacccttctctctgtgatnaagagaatggcttcagatcggaaacttcacacttttgaggaggtggcaaagcacaaccagaccaaggattgctggctcatcatttctggcaaggtgtatgatgtcacccctttcatggaggatcatcccggaggtgatgaggttttgttatctgcaacagggaaagatgcaaccaatgactttgaag

SEQ ID NO: 290322 - DNA, 268 bp, Glycine max
  unsure (1)..(268): unsure at all n locations
ctctcaagtttttgaagtatagagatggcagagacattcctatttacctcagagtcagtgaacgagggacaccctgacaagcttctgtgaccnaaatctctgatgctgtcctcgacgcttgcctcgaacaggacccagacagcaaggttgcctgcgaaacatgcaccaaaaccaacttggtcatggtcttcggagaaatcacgaccaaggccaatgttgactacgagaagatagtgcgtgacacctgcaggaacatcggctttgtctt

SEQ ID NO: 290323 - DNA, 257 bp, Glycine max
  unsure (1)..(257): unsure at all n locations
cgcttttgagtaccactaccaatggtgattttnttcaaggaaaagatctcgcgatggttaaagttaatgtagcatgtgctgctgttggcttgacatcaagttacactccaactccattgttggaatctggtttgcaaaaagacagagggttaattgtggagtattttggaaggatgtcttacgttgctcataacgttaatcagccccaagagaaagatttgttagagggaaatttttcctttgatattaaatctcgc

SEQ ID NO: 290324 - DNA, 261 bp, Glycine max
  unsure (1)..(261): unsure at all n locations
cagagaaccgtgcctgctgcagttcctgctatcgttttcttgtctngtgggcagagtgaggaggaggcatccgttaacctcaatgccattaaccaggtcaatggaaagaagccatggtcactctctttctcctttggaagggcacttcaacagagcacccttaaggcatggagtggaaaagaggagaatgtgaagaaggctcaggaagcccttttggtaagagccaaggctaactcagaggcaactctgggaactacaagg

SEQ ID NO: 290325 - DNA, 259 bp, Glycine max
ccggcgcgtaccggcagctcttccacccggagcagctgatcagcggcaaggaagacgccgccaacaacttcgcgcgtgggccactacaccatcggaaaggagatcgtcgatctctgcctcgacaggatccgaaaactcgccgacaactgcatggtctccagggcttccttgtcttcaacgccgtcggtggcggcaccggttccggcttgggctcgcttctcttggagcgtctctccgttgatacgggaaaaagtcaaag

SEQ ID NO: 290326 - DNA, 259 bp, Glycine max
  unsure (1)..(259): unsure at all n locations
aaactgttcgggcaaccgtcggcngctttggtgccgagtnattcccacgcgccgcatgcaaatcggaagctgaagattggcgtggttctntccggtggccaggctcccggcggtcacaatgttatttctggaatcttcgattacctgcaagaccttgcagaaggaagcacattgtatggtttcaggggtggtccagctggcatcatgaagtgcaaatacgttgaacttacctcagactatattnatccttacagaaatc

SEQ ID NO: 290327 - DNA, 254 bp, Glycine max
  unsure (1)..(254): unsure at all n locations
caaatggcaacagtgagaacaccattgaattttgattctagcaagcagagcttttgtcaattttctattgaccttctcggtggaggaattttagtggacaaaactggagattggatcacacttatacaaaattctccaattagtaacttgttgagagttgctgcttggaagaaaggctgtttaatggtcaagattgtgatgtctgggaatgcagcagtcaaaaggngtgattgggcctcattggtacaagtgtt

SEQ ID NO: 290328 - DNA, 252 bp, Glycine max
  unsure (1)..(252): unsure at all n locations
ctttgttgtgagctataagctagtttatcgtgaggagaatatgaagttgtttgtnttctttgttgctgcagtagttttggtagcatggccatgccatggcgcaggctaccaaaggttccctctccgaatgaaaactggctatggtgagcgttcttcggaggtaaaatgcgcaagttttaggcttgctgtggaagcacacaacatccgagcctttaaaaccattcctgaagagtgcgttgaaccaacaaagga

SEQ ID NO: 290329 - DNA, 253 bp, Glycine max
  unsure (1)..(253): unsure at all n locations
ctagaaacagtgtgatgaaaatgaaggtccttgttttcttcgttgctacaattttngtagcatggcaatgccatgcgtacgatatgttccctctccgaatgaacactggctatggtgcccgtactccggaggtgaaatgcgcaagttggaggcttgctgtggangcacacaacatctttggctttgagaccattcctgaagagtgcgttgaagcaacaaaggaatacatccatggcgaacaatatagatcaga

SEQ ID NO: 290330 - DNA, 259 bp, Glycine max
agccgcagcagcctcaggaggagaataaggatgtctcacaggaagttcgagcacccaaggcacgggtcactgggatttctccccaggaagcgtgctgctcgtcacaggggaaaagtgaaggcattccccaaggatgacccatccaaggcacccaagctcactgcattcttgggttacaaggctggtatgactcacattgttagagaggtcgagaagccaggatcaaagcttcacaagaaggaaacatgtgagcctgtta

SEQ ID NO: 290331 - DNA, 265 bp, Glycine max
  unsure (1)..(265): unsure at all n locations
ctcctctccgaaccctcgatcactctcacgcgctcctatattcgctncctccaccgtcgcttctctcgaacaaccanaacaccancttcatcanatgggcaaacggcagcatctggtatggcagtccatgatgactgcaagttgaggtttttggagctgaaggcaaaaaggacacaccgtttcatagtttttaagattgaggagcagcagaagcaggtcattgtggagaagcttggtgagcctgcccagggctatgaagatttca

SEQ ID NO: 290332 - DNA, 252 bp, Glycine max
  unsure (1)..(252): unsure at all n locations
gagttgttttcttcgttgctacaattttngtagcatggcaatgccatgcgtacgatatgttccctctccgaatgaacactggctatggtgcccgtactccggaggtgaaatgccgcaagttggaggcttgctgtggaagcacacaacatctttggctttgagaccattcctgaagagtgcgttgaagcaacaaaggaatacatccatggcgaacaatatagatcagactccaaaacagttaaccaacaagct

SEQ ID NO: 290333 - DNA, 250 bp, Glycine max
  unsure (1)..(250): unsure at all n locations
ctcttcttcgtctcaaacctcttcgttccttcgattcattccattncttccaaaatggccaaagacccagttcgcgttctcgtcactggagccgcagggcaaattggatatgctcttgtccctatgattgctaggggagtgatgctgggtcctgaccagcccgtgatcctccacatgcttgacattcctccagcagcagagtcgttgaatggggttannatggaattggtggatgctgcattccctcttc

SEQ ID NO: 290334 - DNA, 254 bp, Glycine max
  unsure (1)..(254): unsure at all n locations
cacagttggaggaaccattctgcgtagtgatctattggcaaattttttgacagagggcaattttagagcaagtgttgatttgcagcgcactcatcgtattaaaggaatgattaanatggtggctacagttggtattcctgagaatacaggtatagcattggcctgtgctatgaatagttcttttagggggcgcgccagttctgatatttacaccatctgctctcaagactgtgaattatggaatcctgcttgca

SEQ ID NO: 290335 - DNA, 248 bp, Glycine max
  unsure (1)..(248): unsure at all n locations
tgggaaaatcacttgttccgaaaggcaactgtccctttatcatgggctacaagantgatgattgctcttggagcagccaaaggacttgcctttctccanaatgctgaaaggcctgtaatctatcgtgacttcaaaacgtctaatatattattggactccgactatacagccaaactttctgattttcgactagctaaagcaggaccacaaggtgatgaaacccatgtatccacccgagtgatgggtac

SEQ ID NO: 290336 - DNA, 259 bp, Glycine max
  unsure (1)..(259): unsure at all n locations
cgaaaagcaaaagggaaggattggnatcctcttggattttntttggtatgagcctcttacaagatcaaaggctgacaattttgcagctccaaagagcccagagactttcatattggatggttcattcatccccttgtttatggagagtatccaaaaaccattcaaaatattgttgggaatagactccccaaattcactagtgaagaagttaaaatcgtgaagggttcgattgattttgttggaatcaaccagtatacta

SEQ ID NO: 290337 - DNA, 254 bp, Glycine max
tgacttctccctacattaaatgtacagtctctttcttcatagcatttggaaatttggctgatgacaccatcaataccaggtgattttgtcattggtgtcaagttgacaaccataaaacaatatgtgtgcatatgggctcaatcctggtatttcaggttctcgtcttttgggcaccattcctcagtccatttcacagcaaactgtttggaatcaaatggcaacagtgagaacaccattgaattttgattctagca

SEQ ID NO: 290338 - DNA, 248 bp, Glycine max
  unsure (1)..(248): unsure at all n locations
gcagaaatgataaacagtctttgtggtggtgatgaaaaattgatgcgtgaaaggacacacctgctgttggcttgttgttcaaggatggcaatttgtaaganagatgtttggagagttgaatgtggaatcccttctggatttccgctcacagttatttgcaatagcatttttaatgagatgctcattagatatagctatgaaaaattactgcgccaggctaaagctccaagtatgtttttacaatcctt

SEQ ID NO: 290339 - DNA, 248 bp, Glycine max
  unsure (1)..(248): unsure at all n locations
caattagtaacttgttgagagttgctgcttggaagaaaggctgtttaatggtcaagattgtgatgtctgggaatgcagcagtcaaaaggagtgattgggcctcantggtacaagtgtttttaacaaacagcaacagtacagagcattttgatgcatgtaagtggacaaaatcagaaccacattcctgggaattgatcttcccaatagaggtatgtggtcccaataatggttttgaaatgtggagttct

SEQ ID NO: 290340 - DNA, 248 bp, Glycine max
  unsure (1)..(248): unsure at all n locations
gaacagggactcactctcttcgcagcggcactctcggtggctttcatcttctcggggtganttgtcaagatgtacacatcgaggaagaaaattcacaagganaaggatgctgagccaactgaatttgaggaatcagttggacaggcattgtttgatctanaaaataccaacaatgagctgaaaagtgatctgaaagatttanacataaactcagctgtccaaattgatgtttctggcaaccgaaaggc

SEQ ID NO: 290341 - DNA, 249 bp, Glycine max
  unsure (1)..(249): unsure at all n locations
cccaattganattttaaaaatgactgggataaacttaaganttcaattattgaaattgaataagtaaacaatttaattggattggtcgaatggtatcaaaaaaatggagtactaactcccatttcttatttattattgaattaaccnatcaacttgctttgtnatcgaacatttctttttgatttcaaaaattttccggaaaanatttgaatctattttnatatgcggatcaatcctactaacttctgg

SEQ ID NO: 290342 - DNA, 254 bp, Glycine max
  unsure (1)..(254): unsure at all n locations
cactacttgtctcttccctttttctttccagaacaacagaacaacagagcaaaaagctccaccaatggcgggttacagagccgacgacgacnacgacnacctcttcaaggtggtcctcatcggcgactccggcgtgggcaagtccaacctcctctcgcgcttcaccaagaacgagttcaacctggagtccaagtccaccattggcgtcgagttcgccacccgcaccttgaacgtcgattccaaagtcatcaagg

SEQ ID NO: 290343 - DNA, 255 bp, Glycine max
  unsure (1)..(255): unsure at all n locations
cagcattcacaacttcaagtgtgcttgaggcccaaagtagaaagcccaacagatatgaagtttcccaatacagatatcgcaatgtgccaataaagcgcagagcatgggttgaaggtcagatgtctttcgatcagtctgtagtagcaattatgtctaaatgcaaagccagcatgagaatgggaaacactgatgctcaaatttngatggttccagggcgcagattcatagctcatggacattttttcaaaaatctga

SEQ ID NO: 290344 - DNA, 254 bp, Glycine max
  unsure (1)..(254): unsure at all n locations
agtattnatacagncgtacnagaccaacttgttgaagtctacaaacaagtcaaaattgggaaccccttggagaaggggactctagttggggccctgcatactcgtacttcagtagaaaactttcagaagggtatttcagtcanaaaatctcagggagggaaaatcctaaccggtggatctgtattagagtcgggaggaaattttgtacaaccaacaattgttgagatttctccagatgctcctgtagttaaaga

SEQ ID NO: 290345 - DNA, 255 bp, Glycine max
  unsure (1)..(255): unsure at all n locations
gagagcgtcctagtcgcaaccctaataagaagaaccanagcttcaagcgagtgacatncaccagccatgggtcgtatgcacagccgcggtaagggtatatcctcttctgctttgcccnacaaaaggacaccccctagctggctcaagatctcttcgcaagatgtggaagaaaatatctgcaagtttgcgaagaagggtttgaccccgtctcagattggtgtcattcttcgagattctcacggtattgctcaggtc

SEQ ID NO: 290346 - DNA, 297 bp, Glycine max
cgcctctatatgatcagaaggtacaaccaactactctgattccaaagcaagttggaaacatgtacacggcgtctctttatgcagcatttgcctcccttattcacaacaaaaatagcacattggcaggtaagagggtgatattattctcatacggtagtggcttaactgccaccatgttttcgttgcaattacgagacagtcaacatccgtttagcttgtcaaacattgctagagtgatggatgtcgatggaaaattgaagtcaagacatgagtttcccccagaggagtttgttgaac

SEQ ID NO: 290347 - DNA, 289 bp, Glycine max
gtctgagatcaaaggagactttgagaaagccgtgtaccgatggatactggaacctgcagatcgtgatgctgttttggccaatgttgccatcaagagtggcaaaaactacaatgtcattgtggaaattgccactatcctctccccggaagagcttttggcggttagacgcgcctatctcaaccgctacaagcactccttggaagaagatgttgcagctcatacctctggccatctacgccagcttttagtggggttggtgaccgcattcaggcatgttggtgatgagatc

SEQ ID NO: 290348 - DNA, 289 bp, Glycine max
  unsure (1)..(289): unsure at all n locations
acggagaaacggttattcggtttctccgtgaaagcctccgccanagagattgcctttgaccagcattcccgctcctngctatgcaggccggacttnacaagctcgccgacgctgttgggctcactcttgggcccagagggaggaatgttgtgttggatgantttggaagtcctaaagtggtcaacgatggtgtcaccattgctcgcgcaatcgagcttcccgatcctatggagaatgctggtgcagctcttatcagagaggttgctagcaagactaacgactctgcggg

SEQ ID NO: 290349 - DNA, 285 bp, Glycine max
  unsure (1)..(285): unsure at all n locations
gcaaaaagcaagctcatcctaaagttttaaaaatngcagcagcctcctacaatngntctctcttnaccatccttggctggcacaggcncnnaagctgggacacatcanccccgaagtcggganggtcagcatgaggnagnccgtcaacaagcaggcctcctcnggaagcccatggtaaggcccagaccgngtcaagtacttgggcccattctctggcgaggccccgtcctacctncantggcgagttcccaggtgactacggctnggacaatgctgggtttcngc

SEQ ID NO: 290350 - DNA, 283 bp, Glycine max
  unsure (1)..(283): unsure at all n locations
tcaaatcgangctttaccggttcgancaaggacgggaaccagtggaaggaacgtggcgccgggcanngnaaantncctgaagcataaggcttccggcaagtttangcttctcatgaggcaatccaanacgctcaagatctgcgctaatcatctcattttgcntacgatgagtgtgcaagagcacgctgggaacgagaaatcctgcgtttggcatgctanggattttgctgatggtgaatcaaggacgagctcttctgcatccgttttcctctattgaaaattc

SEQ ID NO: 290351 - DNA, 290 bp, Glycine max
  unsure (1)..(290): unsure at all n locations
ctgcaanggattctacccnccgctcnatgggcattncgcttcaaggcgtntcgtagggctaatccgcctacacgagggtcaacaacggccacgtgcctntcgggggccgaggaccncctantgctgcgtcngcaaacggacggcgggngcacgcgtcgcttctagcccggattctgacttagaggcgttcagtcataatccaancgcacggtagcttcgcgcnactggcttttacaaccaagcgcgatgacnaattgtgcgatcaacggttnctctcgtactaggttgaa

SEQ ID NO: 290352 - DNA, 280 bp, Glycine max
  unsure (1)..(280): unsure at all n locations
cttcgtcaccgaggacaagcttgtcgccgttcgcgaccccttcggattcagacctttggttatgggaaggngaagtaacgggtctgtngttttcgcttctgaaactgcgctcntgaccttattgaagcgacttatgagagacaggtttaccctggtgaggttcttgttgtggataaaaacggtattcagagtctatgcctcatgtctcatcctcaacccaaacaatggcatttttgaacatatttactttgcacttcccaattcggttgtttttgggagg

SEQ ID NO: 290353 - DNA, 291 bp, Glycine max
  unsure (1)..(291): unsure at all n locations
caatgatgaagtcgatggnacaaccangtgttggcgcactcttcgngaaggtcannatggatggtgctcngtatcttacgaaggtaggntctaanaagttataccaacntatcaggaactatcttctgccnttgagaagatgttcctaagcctgttttaccctaggcnagtgtggttcccatggnnttcaggaanagaaatgttgagtgancancnagctgagggatctctgcatggntctgagtatgttcntcattatgaagataaagcaggagattggatgcttgtang

SEQ ID NO: 290354 - DNA, 289 bp, Glycine max
  unsure (1)..(289): unsure at all n locations
gatcgagataactagaaacagtgtgatgaaaatgaaggtccttgttttcttcgttgctacaattttngtagcatggcaatgccatgcgtacgatatgttccctctccgaatgaacactggctatggtgcccgtactccggaggtgaaatgcgcaagttggaggcttgctgtggaagcacacaacatctttggctttgagaccattcctgaagagtgcgttgaagcaacaaaggaatacatccatggcgaacaatatagatcagactccaaaacagttaaccaacaagct

SEQ ID NO: 290355 - DNA, 281 bp, Glycine max
  unsure (1)..(281): unsure at all n locations
gttcttcttctttgtnttccatttccaattctctgtgtagaagccatgtctaagggtcctggtctctactctgacattggcaagaaagccagagatctcctgttcaaggactaccacagtgaccagaagtttaccatcactacctactcacccactggagttgctataacatcctcggggaccaagaaaggtgacctttttgtggcggatgttaaccacccagttgaagaacaagaacatcaccactgatatcaaagtggacaccggttccaatcttttcc

SEQ ID NO: 290356 - DNA, 293 bp, Glycine max
  unsure (1)..(293): unsure at all n locations
gccaccaatcatctatggtgatgtgagccgcccaaagccaatgactgtcttctggtcatctctggctcagagctttaccaagcncccaatgaagggaatgcttaccggtcctgttaccattctcaactggtcctttgttagaaatgaccaacctagatctgagaccacctaccagattgctttggctatcaaggacgaagtggaggaccttgaaaaggctggcatcactgttatccaaattgatgaagctgctttgagagagggtctgccactgaggaaatcagaacaagctc

SEQ ID NO: 290357 - DNA, 235 bp, Glycine max
  unsure (1)..(235): unsure at all n locations
gcaatggctggnatggttcccctttgcattgcatcattggtcactctttttgttgcaacaagtgctagaattcctggggttttcaatggtggtgcatggcagggtgcccacgccactttctacggtggaaatgatgcctctggaacaatgggtggggcatgtgggtacgggaacctatacagccaagggtatggcgtgaacaccgcggccttgagcacggcgctgttcaacaagg

SEQ ID NO: 290358 - DNA, 288 bp, Glycine max
caaaacaaacccactaagatggcttcctttgtatccttcctagtgctgcttcttgcagcccttatcctcatgcctcaagggcttgctacttactacaaaccaattaagaagccaccagtgtacaagcctccagtgtacaagccaccagtgtacaaaccaccggtttataagccaaaaccaccggtttacaagccgaaaccaccggtttacaagccaccatataagaagccaccatacaagaaaccaccttatggaaagtaccctccagtagaggacaacacccatgcc

SEQ ID NO: 290359 - DNA, 278 bp, Glycine max
  unsure (1)..(278): unsure at all n locations
ctgcttcaacttgctacctcagaagcgaagaagaagccacagagaaccagtcncctactctctctcacccacaagaanaatgggatctcacatcgttggatacccccgcatgggtcccaagagagagntcnagttcgctctcgagtctttctgggatggcaagngcngcgccgaggatttgcagaaggtggctgctgatctcaggtcatccatctggaagccagatggctggtgctgggatcaagtacatccccagcaacactttctcgtttatgncc

SEQ ID NO: 290360 - DNA, 277 bp, Glycine max
agaatggctcccaagggtttaacctttctggctgtgttaatatgcgtttcagcactgtcactgagtccttctgttgcgggggaagggcaaaataatggccttgttatgaacttctacaaggaatcatgccctcaggctgaagacatcatcacagaacaagtcaagcttctctacaagcgccacaagaacactgctttctcctggctcaggaacatcttccatgactgtgctgttcagagttgtgatgcttcactgttgctggactccacaagaagga

SEQ ID NO: 290361 - DNA, 279 bp, Glycine max
  unsure (1)..(279): unsure at all n locations
ctacgattctcttacgcctcccttcccttcgactccacggcgcagatccgaggagnttgggaaaccctaattcattcctctttgcttctatctctattaccctaacaccagtgatggcaggtttggctccagaaggatcgcagttngatgctccgcaatatgactctaagatgaatgaattgctttccgctgatggacaagaatttttcacttcatatgatgaagtctatgatagttttgatgcaatgggcctcaagaaaatctctcagaggcatatat

SEQ ID NO: 290362 - DNA, 283 bp, Glycine max
tgtaaatatcagaactgtgaattatggaatcctgcttgcacaaaagcaatggctatgtcatttaatccaaacccgtgttctgatgcatggagtttggaatttctgaagcgtaccggatttcattgtgatatcatttgtgtcactggatggactgccaccccaatgcaggatgttcaggttacaattgattggtttatttcctctcaggaatgtgttcccagaacctattgtgttttaaatccacaaaatcctttgtgttaaataggtggatgggaaaactgcc

SEQ ID NO: 290363 - DNA, 283 bp, Glycine max
gtaactatgatggaaaggagcttccaaaggttttaggtgtcaatgttgttgatagagtattattggatgctccttgcagtggaactggggttatatccaaagatgagtcagttaaaacctctaaaagtctggaagatatacagaaatgtgcgcatctacaaaaggagctcattcttgcagcaattgacatggtggatgctaattcaaaatctgggggatatattgtttattctaacatgctccaattatggttgccgagatgaagcagttattgactagcacc

SEQ ID NO: 290364 - DNA, 282 bp, Glycine max
  unsure (1)..(282): unsure at all n locations
gagagtttgttaaagaactgtgaagaagagggtaactgcaaacaaagcaagcaaaacaaaagacgcagtgatggagaggatgaagagggtgcttctgcngcttctggccttcactgttcttctcatgttgccagaagcttctgctacaaagtttactgttggaaacaaccagttttggaaccccaatattaactacactgagtgggctaaaggcaaacatttctaccttggtgactggctctattttgtgtacgataggaaccaagcgagcgtgttggaagt

SEQ ID NO: 290365 - DNA, 280 bp, Glycine max
  unsure (1)..(280): unsure at all n locations
accaaaccaaagcaagaatagtgttctaagagtgagcaacaacttcaaacaccattgtgaganatggcttccaagggtgcacttctcttgtgtctcaacattctcttcttcactgtggtaagctccacatatgtcccatgcaacccaccccctaaaactcctaaacacacacctgtcccaaagccaccttccccaaagcaaccaagttgccccaaagacaccattaagtttggtgtgtgtgctgatgtgttaggtttgattaacgtgcaattgggaagcc

SEQ ID NO: 290366 - DNA, 272 bp, Glycine max
  unsure (1)..(272): unsure at all n locations
aagacctctttcgtcgccctaagtcatggcaggacttgcacccganggatcacagtttgatgctcgtcaatatgataccangatgaatgagttgcttacatctgatggacaggattttttcacatcttatgatgaggtttatgacagttttgatgctatgggcttgcaagagnatctcctgngaggcatttatgcatatggttttgagaagccatcagctattcagcagagaggaatagttcctttctgcaagggattgatgttatacaaca

SEQ ID NO: 290367 - DNA, 273 bp, Glycine max
  unsure (1)..(273): unsure at all n locations
ccagcatctnataaggggagattttttgcctttggccgtgtattctctggcagggtttcaactggtttnaaggtgaggnttatgggacctaattatgtccctgggganaaaaaggatttgtatgttaaaagtgtgcaacgaactgtcatttggatgggaaagaggcaagaaactgtagaggatgtcccctgtggtaatacagtggctatggttggtctgaccagttcatcacaaagaatgcaacattgacaaatgagaaggaagtcgatgccc

SEQ ID NO: 290368 - DNA, 285 bp, Glycine max
  unsure (1)..(285): unsure at all n locations
gngagattgaaaagttaaagcttgctgatatgacatgtcgacaaggggttattgaagtggctaaaattatatatggagttcatgatgaggcaaaggacaaagattttnagctagaaatgagctgggtgtgtgatgagtcaaaccgccaacatgagaaggtcccggatgagcctctagaagaagcaaaggcagctgccaaagcagctcttgaagaaatggatgcagattaatagactagaaatgtttatttcaaagttgcatttcataacttgtaattgagcattg

SEQ ID NO: 290369 - DNA, 285 bp, Glycine max
cgctcatggcactctcttctcgtctcttttccaaatccaaattgatctatggcagtccaaatacttctacaaaaggagcatgctattccagttcgtcactttgctaaagagtctgcccctcctgcccttaagggagacgagatgctgaagaacatttttgtggaggtgaagaacaaatttgagaccgccataggaatattaaagaaggagaaaatcaccattgacccagaagatccagctgctgtttctcatatgcaaaggtcatgaaaacaattagagagaggc

SEQ ID NO: 290370 - DNA, 285 bp, Glycine max
caaaaagctctgttctttttcccacccaattcagtttctcaaatggctcgtacgaagcaaacggctcgcaagtcccaccggcggcaaggcgccacgtaagcagctggccaccaaggcggctcgtaagtctgctccggctaccggcggcgtgaagaagccgcacagattccgtccgggaaccgtagcgcttccgcgagatccggaagtaccagaagagcacggaacttcttatccggaagctcccgttcccagcgattggttcgcgagatcgcgcaggattcaaga

SEQ ID NO: 290371 - DNA, 271 bp, Glycine max
tcctgttatttctcagcgcgtaaagcatggctttgttggtggagaaaaccacgagtggtccgcgagtacaaggtcaaggacctttcccaggccgacttcggccgcctcgagatcgagctggccgaggttgagatgcccggcctcatggcctgtcggaccgagttcggcccctcccagcccttcaagggggcccgcatcaccggctccctccacatgaccatccagaccgccgttctcattgagacctcaccgccttggcgccgaggtcgct

SEQ ID NO: 290372 - DNA, 276 bp, Glycine max
cgcattcaaactatggcctcttcttcgtccctctcattggacacagccaaagacctttccgaactcatctggtgaggttcatgtcatcgtcggtcccatgttcgctggcaagaccactgcccttctttgtcgcatcgaatccgaactcaacgctgccaagaatgtggtgttgttaaaatccgagcaaggatacaagatatgcaattgactcggttgtgacgcacgatgggattaaatttccttgcagggcgttaccggatctgttgtcgttcaggg

SEQ ID NO: 290373 - DNA, 271 bp, Glycine max
  unsure (1)..(271): unsure at all n locations
tcaaatctcttcgttccttcgattcgttccatttcttccaaaatggccaaanacccagttcgcgttctcgtcactggagctgcagggcaaattgggtatgctcttgtccctatgattgctaggggagtgatgttnngtcctgaccagcccgtgatcctccacatgcttgacattcctccgggcagcagagtcattgaatggggttaaaatggantggtggatgctgcatccctcttcttaaaggtgttgttgccacaatgatgtggttgag

SEQ ID NO: 290374 - DNA, 289 bp, Glycine max
  unsure (1)..(289): unsure at all n locations
gtctcaaacttctgctctntccaacttcctacaacgctttttctctgcactcatgggcaaggtcaagatncggaattcaacggatttggaagaattggccgtttggttgccagagtcgtctgcaaagagacgatgttgaactcgttgccgttaacgaccctttcattaccaccgattacatgacatacatgtttaaatacgacagtgttcacggacactggaagcatcacgatgtcaccgttaaggacgagaagaccctctcttcggtgacaaggcagtcactgttttt

SEQ ID NO: 290375 - DNA, 279 bp, Glycine max
  unsure (1)..(279): unsure at all n locations
agaagatcaggcaagaatacgaacgcaaagagcgccaagttgaaattcgcaagaagattgagtactcaatgcagctgaatgcttctcggattaaagttcttcaagctcaagatgacgtgatcagttccatgaaagaagctgcatccaaggaacttttgactgtgagtcatcatcatgatgatcatgtgtacagaaaccttctgaaagatctcattgttcagtgtttgctaagactgaaagaaccttctgtcttattgagatgtcggaaagatgacctnc

SEQ ID NO: 290376 - DNA, 278 bp, Glycine max
  unsure (1)..(278): unsure at all n locations
ggagttcccaccacgtagcaagctagattctcaagcctacggtgatcatacctctataataacaaaacaacacttggagcctaacttgggtgggctcaccgttgagcaggctatccagagcnagaagttgttcatcttagatcaccatgactatctcattccatatttgaggaaaataaatgcaactaccacaaagacttacgctacaagaaccatatttttcttgaaaagtgatggaaccttgacgcccattggccattgagttaagtaagccgccc

SEQ ID NO: 290377 - DNA, 273 bp, Glycine max
  unsure (1)..(273): unsure at all n locations
acgacattcattcatctatggctacccttatngctcccagcaaccactctccccaagaagacgctgaggctctcagaaaggcttttgaaggatgggggactgatgagaaaactgtcatagtaatattgggtcatagaactgtttatcagaggcagcaaatcagaagagtctatgaggaaattttccaggaggatcttgtgaaacgctagagtctgagatcaaaggagactttgagaaagccgtgtaccgatggatactagaacctgcagatcg

SEQ ID NO: 290378 - DNA, 270 bp, Glycine max
  unsure (1)..(270): unsure at all n locations
gggggacacataaacccggcggtgacatttgggctgtttttggcgaggaagttgtcgntgcccagggcgattttctacatcgtgatngcaatgcttgggtgctatttgtggcgctggcgtggtgaagggtttcgaggggaaaacaaaatacggtgcgttgaatggtggtgccaactttgttgcccctggttacaccaagggtgatngtcttggtgctgagattgttggcactttcatccttgtttacaccgttttctccgccaccgatgc

SEQ ID NO: 290379 - DNA, 271 bp, Glycine max
  unsure (1)..(271): unsure at all n locations
gtgtttttaacaaacagcaacagtacagagcnttttgatgcatgtaagtggacaaaatcagaaccacattcctgggaattgatcttcccaatagaggtatgtggtcccaatantggttttgaaatgtggagttctgagtgggcaaatcaaacttcatggcatttgagtttccttattgacaatcccaaacaatctacagtttttgatattctcttgggaatctctcaagattntgaaattgctggtaatactctatgccagcttnttctgt

SEQ ID NO: 290380 - DNA, 278 bp, Glycine max
ctgttgatggactagagatatggagtgctatccagacatgggttaaggactacgtctccttgtactatgccacggatgatgcagttaagaaagactcagaactccaagcttggtggaaggaagctgttgagaagggtcacggtgacttgaaagacaagccatggtggcctaagttgaacactcttcaagatctgattcacatttgctgcattattatatggactgcttcagcactccatgcagctgtgaatttcggacaatacccttatggcggtttc

SEQ ID NO: 290381 - DNA, 268 bp, Glycine max
cttctcttgcggctagggttttagcgcacttcttctagatttaaggaagatgggtaaggaaaaggttcacatcagtattgtggtcattggccatgtcgactctgggaaatccactaccactggtcacctgatttacaagcttggaggcattgacaagcgtgttattgagaggtttgagaaggaagctgctgagatgaacaagaggtcttcaagtatgcctgggtgctggacaaacttaaggctgagcgtgaaagaggaatcaccattg

SEQ ID NO: 290382 - DNA, 268 bp, Glycine max
agattgcagagaaggcctacaacgacgaggacctgatcaggattttgtcaacaaggagtaaagcacagttaacagcgacactaaatcagtacaacaatgagttcgggaatgccataaacaaggatctgaaaactgatccaaaagatgaatatctgcaattattgagggcagccattaagtgcttgacttaccctgagaaatattttgcaaaagtcttgaggctggctataaacaagctaggaactgatgaaggggcccttactagagt

SEQ ID NO: 290383 - DNA, 264 bp, Glycine max
  unsure (1)..(264): unsure at all n locations
ggtgaaccctgatgatgttgtgtttgggggatgggatatcagtaacttgaacctggctgatgccatggccagggccaaggtgtttgatatcgacctgcagaaacagttgaggccgtacatggaatccatggttccactccccggaatctatgacccggatttcattgctgccaaccaaggngaccgtgccactaacgtaatcaggggcacaaagaanganctccttcaacaaatcatcaaagacattaaggagttcaaagaaag

SEQ ID NO: 290384 - DNA, 262 bp, Glycine max
  unsure (1)..(262): unsure at all n locations
atcgagataactagaaacagtgtgatgaaaatgaaggtccttgttttcttcgttgctacaantttggtagcatggcaatgccatgcgtaacgatatgttccctctccgaatgaacactggctatggtgcccgtactccggaggtgaaatgcgcaagttggaggcttgctgtggaagcacacaacatctttggctttgagaccattcctgaagagtgcgttgaagcaacaaaggaatacatccatggcgaacaatatagatca

SEQ ID NO: 290385 - DNA, 267 bp, Glycine max
  unsure (1)..(267): unsure at all n locations
cccacctgattttgaattaagttaagggatgtattaagtatatgctaaataagaggtgtatctacaaccattgactttgtcatgctcaaaaatttagtttaatttacaaattatggcaagggttacacctggctagcttccgcgtttagatcatttgtttatagtgctatggccacgacaagagtgtnatgggtgcatgantgtaaaacgnaaaanaaaaaaattgtgtttaatttngnacttcccgttnngaataaanganttccc

SEQ ID NO: 290386 - DNA, 267 bp, Glycine max
  unsure (1)..(267): unsure at all n locations
gtttcttacaaggctctactctactgcttcaccttctgctctagaaaattcagtggtgatacatggcttcggctactctctctgtagccaaaccagcccttcaggcaaatgggaaaggcttctctgaattctctggcctccgcagctcatcaggcttccttcccttttctagaaaatcttcagaggntttccattctgtcattgccttcnaganctnngcagtnggaagcantggnggntacaanaagggtntnacagaagcanacc

SEQ ID NO: 290387 - DNA, 257 bp, Glycine max
  unsure (1)..(257): unsure at all n locations
ttttctcaagagaaactttaagcagatgtctaatgttttgtnggtggctcctnnggacaaggcgagtttgtggtcacaanctcattatgtttcgtgtaataatctggaaatgcaagaagcttatcttgtcaatctcgtaaatgtgttacgagaattgtatttgcacagtccagaggaagctcgccaattgagaaggaaagctctttctcgtattgaatggctgcaaaaagctgatgtgcctaccatagcacagattg

SEQ ID NO: 290388 - DNA, 266 bp, Glycine max
  unsure (1)..(266): unsure at all n locations
cggcgccggggagtccatggtggagcacgccgatttgaaggacggcggcggagacgcctgagctggnanattgggcggtgtaagacggagattctgcagcacccgctgtacgagcagctgctgtcggcgcacgtngcgtgcctccggatcgccacgccggtggaccagctgccgangatcgaacgcgcactggcgcagtcgcagaatgtggtcgcgaaatacgcagtnttcgganacaacaacatcgtcgccgatgtacaaannnc

SEQ ID NO: 290389 - DNA, 264 bp, Glycine max
  unsure (1)..(264): unsure at all n locations
cttcatttcaaatcccaacaaaaaaccaaagtaatctaacaaagtnagcacaatgagggagatattgcacgtgcaaggtgggcaatgcgggaaccaaatcggttccaagttctgggaagtgatatgcgacgagcatggcatcgaccccaccggaaagtacaccggcgacgaggcctccgatctccaactggagaggatcaacgtctactacaatgangcctccggcggaaggtacgttccccgggccgtcctcatggatctcga

SEQ ID NO: 290390 - DNA, 261 bp, Glycine max
  unsure (1)..(261): unsure at all n locations
gactagagatatggagtgctatccagacatgggttaaggactacgtctccttgtactatgccacggatgatgcagttaagaaagactcagaactccaagcttggtggaaggaagctgttgagaagggtcacggtgacttgaaagacaagccatggtggcctaagttgnacactcttcaagatctgattcacatttgctgcattattatatggactgcttcagcactccatgcagctgtgatttcggncaatacccttatgg

SEQ ID NO: 290391 - DNA, 265 bp, Glycine max
  unsure (1)..(265): unsure at all n locations
ggtagccagagagtgatacaatacagagtgcgttgttgctccttcgccacaactccctgccaacatgggtatctccagagattctatgcacaagaggcgtgccactggtggcaagaagaaggcatggaggaagaagagaaagtatnagcttggtcgccagcctgctaacactaagctgtcaagcaacaagacagtcaggaggatccgggttagaggtggaaatgtgaagtggagggcactgagattggatactggaaattacncc

SEQ ID NO: 290392 - DNA, 260 bp, Glycine max
  unsure (1)..(260): unsure at all n locations
ttaaccaacaagcttatttctatgctaaaaccctcaatatcactgccaaaaccgcatgggtgttcgacatagatgagactacactctctaatctcccttactatgctgaccatggatttngggtngagttatataatgaaacatcgtttaataaatgggttgaccttggcgaggcaccggcactgccagagagtctcaaattgtacaaganacncnantnctcttggcatcaagattgtattcataacaggaagaccact

SEQ ID NO: 290393 - DNA, 267 bp, Glycine max
  unsure (1)..(267): unsure at all n locations
gtcaagaaaggaggaatgatcatcttacctgccggaatttatcatcgctttacgctagatgagagcaactacattaaggctttgcgtttttttgttggtgagccagtttggaactccatacaatcgtccaaatgaccatctgccctggcaagacaacaatatgtcaaggattttgtggaaaaggatgttagcaaccatggctgttgatgccggccggcgtaagattctggttctgcctaatcatagtaccacatgaaaaggaccang

SEQ ID NO: 290394 - DNA, 260 bp, Glycine max
aattgaaaagctttctagctggtcataatatcaccattactgatggtattgacaaaactagtgcaactttgcaatttagaaagttagcagattgtgattttctcaaggaaactttaagcagatgtctaatgttttgtgggtggctcctgaggacaaggcgagtttgtggtcacaacttcattatgtttcgtgtaataatctggaaatgcaagaagcttatcttgtcaatctcgtaaatgtgttacgagaattgtatttgc

SEQ ID NO: 290395 - DNA, 264 bp, Glycine max
  unsure (1)..(264): unsure at all n locations
ccaaaaagctctgttctttttcccacccaattcagtttctcaaatggctcgtacgaagcaaacggctcgcaagtcccaccggcggcaangcgccacgtaagcagctggccaccaaggcggctcgtaagtctgctccggctaccggcggcgtgaagaagccgcacagattccgtccgggaaccgtagcgctccgcgagatccggaagtaccagaagagcacggaacttcttatccggaagctcccgttccagcgattggttcgcg

SEQ ID NO: 290396 - DNA, 262 bp, Glycine max
  unsure (1)..(262): unsure at all n locations
tgggtttctcttcctcccttggagaaaaagaagagccaccgctgcgacgccgttcgtgcatttttgangtgccgctgtcatgtttgggcgtggtggaccaaggaggagtgataactccaaatattatgatattctcgggatttccaaaaatgccagtnaagatgaaatcaagaaggcctatagaaaggcggctatgaagaaccatccagataagggaggagatcctganaagtttaaggagttaggtcaagcatgaagtttt

SEQ ID NO: 290397 - DNA, 256 bp, Glycine max
  unsure (1)..(256): unsure at all n locations
aagaccccttttgtcaacattcctaatccagatgggaacaccggacctgctccctatttcttcaagtttgataggttaggggttcgggtgccaactattatggtctctccttggatcaagaaagggactgtgataagtggcgccaaaggaccggctgaaaactcagaatttgagcactcttctattcctgcnaccataaagatgatttccaacctntcnctaanttctgactcacangatgctgggngggnnantt

SEQ ID NO: 290398 - DNA, 261 bp, Glycine max
  unsure (1)..(261): unsure at all n locations
gggccccggcggcggccccgacctcatcgtcgacgacggaggcgacgccancctcctcatccacgagggcgtcaaggccgaggagctctatgagnagaccggggaantccncgnncctaantccactnacaacgccgagttccagattgtgcttaccatcatcagngatgggtnnaanaangatcccannaggtaccgnaanntgaaggancgtctcgttggggtttctgangaacccacgatggtgttaagatgtananc

SEQ ID NO: 290399 - DNA, 260 bp, Glycine max
  unsure (1)..(260): unsure at all n locations
ggcagtcaaggccgttgccctatgacaccggaagaggttggattgttgctagcagctatgggatttgacaatagcactcgtttatatcttgcctctcacaaggnctatggtggagaggcaaggatttcaactttgagggaattatttcctctgatggaagacaagaagagccttgcttcatctgaagagcgttctcagatcaagggaaaagcttctctattagctgcacttgactactatgtnggcttgcatagtgacat

SEQ ID NO: 290400 - DNA, 257 bp, Glycine max
  unsure (1)..(257): unsure at all n locations
tgatggtcatcttccttactggattggtgtcaatgatattgatgcgaactctganaaatgantatgcaaagtatgctcgggaagatgatgatttggaaagtctggagagagatgttagtgaagaatctggctggaaacttgtgcatggtgatgtttttcgaccgcctcgnaacttagttacnctttcagctgttgttggcacaggtgctcagcttgcgttgctggttcttcttgncgtcttgttggctattgttggg

SEQ ID NO: 290401 - DNA, 266 bp, Glycine max
cttttgctcccagagatggagaccaggataatgaggagaaggttccagactttgttgaaggaatgatttatacaccaacagaaggtgtgatgatgacaggaagatatgcttcaaaggaagaggccaagaagaaggggaataagatcaacagtgtaggatggtggtttaaaccctggttctatcagcatgcacagacggcactgaagaaaggagagtttgtagaatacattcctaccagagaatattatcacaggcacacgagatgc

SEQ ID NO: 290402 - DNA, 256 bp, Glycine max
  unsure (1)..(256): unsure at all n locations
gttgttggagtgagcgaagaatatgtattctagagattcatggggtggaccgttggagataaacgcgacggactcggcgacggaggacgagcggagccggaacctgcaggacgttgacagggcagcgctgtcgcgtcccttggatganacgcagcagagctggctccttggccccggcgancagaagangaagaattacgtcgatctcggctgcatcntcgtnanccgcaattttcaatggcccntnggcaaancc

SEQ ID NO: 290403 - DNA, 259 bp, Glycine max
  unsure (1)..(259): unsure at all n locations
gtcattggtgagccaccctcagccttggaagcagttgcaacactagtgaacatagctgcacttgatcgtcccgaagatggtatttcctctctcccatcaatactagctgagactgttggaagaagcattgaggnagtttatagagggagtgacaaaggaatactaaaggatgtagagcttcttcggcagataactgaagttcgcgtggngcaattacttcctttgtgcagaggactnccaataagacggntcantttnc

SEQ ID NO: 290404 - DNA, 262 bp, Glycine max
gcaaaatggtgatggagattgtgaggaacaagaaagttaagttttggaagaaagtgtatgttatatacagctttttctttgttcgcaaaatcatcgcccacatggtcaccttcttcttctactgtgttgtgattccccttacaatcctggtccctgaggttcatgttccaatctggggagctgtttatatccttctgtcatcaccattctcaattcagttggaacaccaaggtccattcaccttctgttctattggatcctc

SEQ ID NO: 290405 - DNA, 259 bp, Glycine max
ttctcattctcccttaggagtcaacgttagcgtcccaactttctttcccttctccagcagagtcagcatctctccctccaacgactccgacgaccaagccaattggtgcgactcgccgccacgtggatccacctcattggtgaacggtgcagcagcagcagccaactacaacacttccgtcacggcgctttcggaggacaacgagagactcagaagaagcaacaacatgctcatgtcagaactcgcacacatgaagaag

SEQ ID NO: 290406 - DNA, 262 bp, Glycine max
tccgggaagacgcagcccaaggctccgagcatggcccacctggagtggatcacttcgagttcacggttcttggccgggtcccagatcttcagcgagggtgggctcgactacttgggcaacccaagcctgatccacgcccagagcatcctcgccatctgggccacacaagttatcctaatgggtgccgttgaaggttaccgtattgctggtggccccctcggtgaggtcactgacccaatctacccaggtggcagttcgaccc

SEQ ID NO: 290407 - DNA, 260 bp, Glycine max
  unsure (1)..(260): unsure at all n locations
tctacccgccgctcgatgggaattgcgcttcaaggcgtctcgtagggctaatccgcctcacgagggtcaccaacggcacgtgcctttngggggccgaggcaccctactgctggtcggcaaacggacggcgggngcacgcntcncttctagcccggntnntgactcngaggagttcnngtcntaatcccancaaacggnanttcgggncactggctcctcnggcacngngctgaccaattcnncanccnaacgnntcnnnc

SEQ ID NO: 290408 - DNA, 260 bp, Glycine max
  unsure (1)..(260): unsure at all n locations
ggctgttgagaactccccattcttggagaagttgaagaagaaaggncatgaggttcttttcatggttgatgccattgatgaatgccctgttggccagctcaaggaatttganggcaagaagcttgtctctgccaccaaggngggtctcaaacttgacgagagtnacgatgagaagaagaagcaagangagttgaaggagaagtttgacaacctatgccaggtgatcaaggatgttttgggtganaggttgagaaggtgta

SEQ ID NO: 290409 - DNA, 258 bp, Glycine max
  unsure (1)..(258): unsure at all n locations
tttctcancatactctgacaaccagcctggtgtgcttatccaggtctttgagggtgaaagagcaaggaccagagataacaatttgttgggcaaatttnanctatctggcattcctcctgcacccaggggngttcctcagatnacagtgtgctttgacattgatgccaatggtatcttgaatgtctctgccgaagataagaccactggccagaaaantaagatcactatcaccaatgacaagggnagattgtcaaagga

SEQ ID NO: 290410 - DNA, 272 bp, Glycine max
  unsure (1)..(272): unsure at all n locations
gaggcnttgacacatggctacacagtcccaatagttgcacccaccataacattcatgttctcaggcatgaacgtgaccctgccagaggacaacattctcatacacagcactgcgggcagcaccacatgcttggccatggcttcggctccagataacgtgaactcagtggtcaatgtcatagccaanatgcagcaacaanaccaccgtgtgctctatgacgtgcccaattcaaggttggagtgctcgtgaactttgcntagtaaaatggttac

SEQ ID NO: 290411 - DNA, 302 bp, Glycine max
  unsure (1)..(302): unsure at all n locations
ctccttcctgttctgctaagtggcaaagaaaganagaaagaaaatntcaagggctgaaacatctatctttaactgtattctccctttgtttcctcaccagttgattcaggttgcaaacatggcttttccagacccatccatgtcagtttctccacagaggaagatgggaagggggaagattgagatcaagaggattgagaacactaccaatcggcaagtcacttctgcaagcgcaggaacggcttgctcaagaaagcatatgaattatctgtgctttgtgatgcagaggttgctctcattgt

SEQ ID NO: 290412 - DNA, 301 bp, Glycine max
  unsure (1)..(301): unsure at all n locations
gtgggccatgctcggagccttgggctgcgtcttcccggagttgctgtcccgcaacggggtgaagttcggagaagccgtgtggttcaaggccgggtcccagatcttcagcgagggtgggctcgactacttgggcaacccaagctgatccacgcccagagcatcctcgccatctgggccacacaagttatcctaatgggtnccgttgaaaggtaccgtattgcnngtggcccctcngtgangtcaatganccaatctaaccaaggtggnaagttcnnaccaatggggcttgctgannaaccag

SEQ ID NO: 290413 - DNA, 291 bp, Glycine max
  unsure (1)..(291): unsure at all n locations
tacaagggaccaactctccttgaggctcttgaccaaatcaatgagcccaagaggccctcagacaagccacttcaggttccattgcaggatgtctacaaaattggtggtattggtaccgtgccagtgggacgtgttgagactggtgtcgtgaagcccggtatggtggtgacttttggtcccactgggctgacaactgaggntaagtctgttganntgcancatgaggctctcacagaggctcttccaggtgncaatgttggcttaatgtgnagaatgttgcagtcaaggatc

SEQ ID NO: 290414 - DNA, 285 bp, Glycine max
  unsure (1)..(285): unsure at all n locations
tantnctananngcgagcngccgctcgcgatctagaaccttcccttntccaacatgccaaacgacagcgttncgggtcttttcttcttcgttangctcttanaatgcctnctntctgntaatttccacgntgnccatattttcctaacgagtcaactccatgacgntgactcagtganttggaatggtaccggcccaaaccttaantanaagccggtgatngggatcttgaccaacccngcganggtgncttngncggtcnnaangganggngtttttaatngcg

SEQ ID NO: 290415 - DNA, 302 bp, Glycine max
  unsure (1)..(302): unsure at all n locations
tgaaagagaatccgaggcgaagagaagagaaaaattaagatggaggggaaggagcaggatgtntcgctgggagcgaacaagttcccggagagacagccgattgggacggcggcgcanagccaagacgacggcaaggactaccaggagccggcgccggcgccactggttnacccgacggagtttacgtcatggtccttttacagagcngggntagcngagtttgtnggcacttttctggttctatacatcactgtctaaccggcatnggagttccccggggctnaatcnaaagtncngtaccc

SEQ ID NO: 290416 - DNA, 287 bp, Glycine max
  unsure (1)..(287): unsure at all n locations
tgccaacaggaagtcagaggttgaccctttgaagcngggtgccatttgaaaaaactccatttagttctcagccaaattcaagaaggtcattccacctcactgtttccagcgttctgntttccgntcattctcctatngtgnttacnacctcaccatagccttctgnctctattatgttgccacccattacttccacctccttcccagccctctctctttcttggcatngccaatctactnggctgtncaaaggtgcatccttactggagtttgggnnattgcccatt

SEQ ID NO: 290417 - DNA, 289 bp, Glycine max
  unsure (1)..(289): unsure at all n locations
tccaagagcattagtaatgacacccttgcaaggctggctaagacagtcttgacgctgaaagaagataaaaaacagaggctgcacaagtccaagaattagcttctcagttaattgatcnttggaatctaatggntactcatcccgaggaaaggngactatttgaccatgttacctgtaatatgtcagnttcngntgntgnagtcatgttcctggtgccctgctcngggatctgnttgancangnnnaagttggnagttgaggggcttgancagctnaaagccagcaaggt

SEQ ID NO: 290418 - DNA, 293 bp, Glycine max
  unsure (1)..(293): unsure at all n locations
caattaccattccataacctaaatctcctctttgtttccgagtcagagagcaatggcacgtaccaagcaaaccgctcgcaagtccaccggcggaaaggcgccgaggaagcaattggcgactaaagccgntcgcaagtcagctccggccaccggcggagtgaagaagccccaccgnttcaggcccggaacgtggctctgagggagntcagaaagtaccagnagagcactgnacttctgatccgnaaacttccattccagaggtcgtcagagaaatcggtcaggnttcaaaacag

SEQ ID NO: 290419 - DNA, 293 bp, Glycine max
  unsure (1)..(293): unsure at all n locations
agaaggcacatttctgtggtaccacaggagccttgtttgtttgccactactatttatgaaaacattgcttatggacatgagtcaaccactgaagctgaganaattgaagctgcaactcttgccaatgcacacaagttcatatctggtttgccagatggatacaaaacatttgtgggggagagaggtgttcaactgtccgggggacaaaagcaaagaatagcagttgctcgggttttgtgaagaaggctgaacttatgcntcttgangagggccacaagtgcacctgatgctga

SEQ ID NO: 290420 - DNA, 292 bp, Glycine max
  unsure (1)..(292): unsure at all n locations
atgaaggaaacagtgctggtgaagagagtgcaaatcttttcctcagggccattggacttagggagtactcacgctatctttgtttcaactttcccttcacccatgagagagcancttctggggcacttaaagttttttccttggaatcctgatcctgatatctttaagacttggagacaaggtaggactggctttcctttggttgatgcaggaatgagagaactttgggcaacaggatggatacacaacagaataagngtaatagtttccagttttgctgtgaaaatgttgc

SEQ ID NO: 290421 - DNA, 293 bp, Glycine max
  unsure (1)..(293): unsure at all n locations
gcctgcgtccttgtcctggagtcgttaattccggtcgtcgtcgaccccgtcatcggaaaatcgaggttgttngttacccctaccgtgaaggagcatgccacggagatcgcggagacttggaagagcagcctggaggatcntggcggcgtggaaaacctgaagacacctgacgtccacactttcttgcagcncgttgttanttcgggattgtcaagaacgntgactccgntttgtaccggaagcttgttattgcttccgcttggaggaaacagntgccgaagctcgcgctttcg

SEQ ID NO: 290422 - DNA, 296 bp, Glycine max
  unsure (1)..(296): unsure at all n locations
cgagaagtgttcctacattggttggcattgaatgtcccaaggatgagaaacttcctcgtcgcaaaatttttgacaaacctaagacgcgctgcttcactattctccctatggagtttaatcttgtggttcgtcagaagtttttaaattttgtgaggttcattatgaagaaaagggncaagttagttgtcnagttggnatcaacccatactccatggnatggactggtttggccaatagnttactgagtaagggcaacgatattctgtgttgcnattatgccagttttganggtntga

SEQ ID NO: 290423 - DNA, 297 bp, Glycine max
  unsure (1)..(297): unsure at all n locations
tctatcttttctaacatgggctgctgggactggactctttgcagagattttggatggagatgcgtacaagtactatgctgatggagagtggaagaaatctgcttctgggaaaagtgtttccatcatcaaccccactaccagaaagactcaatacaaagttcaagcttgttcacaagaggaggttaataaggtcatggacttagcaaaatctgcacaaaagttatnggcaaagaccccactatggnaacgtgctgagcttcttcacaaggcagctgctatccttaaagagcacaaaac

SEQ ID NO: 290424 - DNA, 286 bp, Glycine max
cacaaggcagaaagcaagctcatcctagagttttaaaaatggcagcagcctcctccatggctctcttcttccccatcttggctggcaaaggcgtgaagtgggcccatcagcccccgaagtcgggagggtcagcatgaggaagaccgtcaccaagcaggcctcctccggaagcccatggtacggcccagaccgcgtcaagtacttgggcccattctctggcgagcccccgtcctacctcactggcgagttcccaggtgactacggtgggacactgctgggtttcggc

SEQ ID NO: 290425 - DNA, 290 bp, Glycine max
  unsure (1)..(290): unsure at all n locations
ccggcactgcccgagactcttaagaattacaacaagctggtgtctcttggcttcaagattatattcttgtcnngaagaacactggacaaacaggccgtaacagaagcaaacttaaagaaggctggctaccacacatgggaaaaattaattctcaaggatccacaagatccttccactccaaatgcagtttcatacaaaacagcagcgagagagaaactgataaggcagggatacaacattgttgggatcattggagaccaatggagcgatctcctcggaggccacagagg

SEQ ID NO: 290426 - DNA, 296 bp, Glycine max
  unsure (1)..(296): unsure at all n locations
aaaatgaaagtccttgttttctttgttgctatagttctagcagcatggcattgccatgggctcagaccatgaccntgacccatggccacacctancaaattttccctctgagnatggaaactggncatggtggccactaacattccggaggtatcatggccaaagttnngaggccttgtgtggaagnncacaacgtcctttgactgggaaaccgttcctnaagatgcncagggatatatgggaactacatgcttngcggacnatntnnntccggctncaanatagttaacccacca

SEQ ID NO: 290427 - DNA, 292 bp, Glycine max
  unsure (1)..(292): unsure at all n locations
aganacgcttcgcaaatctcaatcgaatctcagaaaaatgagaganatcatcagcattcacataggtcaggccgggatccaggtcggaaactcctgctgggaactctactgcctcgaacatggcatccagcccgacggcatgatgccttctgactccacttcggtgtagcccacgacgccttcaacaccttcttcagcgaaaccggatctggcaagcacgtcccccgtgctgtcttcgtcgacctcgaacccaccgtcatcgacgaggnccgctgcggcacctaccgtcaat

SEQ ID NO: 290428 - DNA, 293 bp, Glycine max
  unsure (1)..(293): unsure at all n locations
ggatcgagataactagaaacagtgtgatgnaaatgaaggtccttgttttcttcgttgctacaatnttngtagcatggcaatgccatgcgtacgatatgttccctctccgaatgaaacactggctatggtgcccgtactccggaagtgaaatgcgcaagttggaggcttgcngtggaagcacacaacatcnttggcttgagaccattcctgaagagngcgttgaagcaacaaaggaatacatccatggcgaacnatatagatcagactccaaaacagntaaccaacaagcttac

SEQ ID NO: 290429 - DNA, 275 bp, Glycine max
  unsure (1)..(275): unsure at all n locations
ccagccanacgcttcagaagacatggcctcattgggtgggttacaaaatgtgagcggcatcaattttcttatcaaagagggtccaaaagtcaatgcaaagttcgagctgaagccgccaccatatccactgnatggtttggaagccgtgatgagccagcagacacntgagtttcnngggggaagcnacaccagncnttttggggaaatcctnaaaaaccanntgtttgggcagacnttnntgggagtncnnnggagggttntgnncacacnnacat

SEQ ID NO: 290430 - DNA, 292 bp, Glycine max
  unsure (1)..(292): unsure at all n locations
ggcagaaagcaagctcatcctagagttttaaaaatggcagcagcntcctgccatggctctctctttcccccatccttggctggcaanggccgtgaaagtggggcccatcagcccccgaagtcgggaaggtcagcattaaggaagaacgnaacaagnanggcttcctcgggaaggccaatggtacggcccaagaccgcgtnangtacttgggcccattcttctggcgagccccggtcttacctnatggcngagttcccaaggtgantacggntgggnnaatgctgggtttcgg

SEQ ID NO: 290431 - DNA, 283 bp, Glycine max
  unsure (1)..(283): unsure at all n locations
ctcttcttctcttgcggcnagggttttagcgcanttcttctagatttaaggaagatgggtaaggaaaaggttcacatcagtattgtggttattggccatgttgactctgggaagtccactaccactggccacctgatctacaagcttggaggcattgacaagcgtgttattgagagatttgagaaggaagctgctgagatgaacaagaggtctttcaagtatgcctgggtgcttgataagcttaaggctgagcgtgaaagaggaatcacaattgatattgcct

SEQ ID NO: 290432 - DNA, 289 bp, Glycine max
  unsure (1)..(289): unsure at all n locations
gatcgagataactagaaacagtgtgatgaaaatgaaggtccttgttttcttcgttgctacaattttngnagcatggcaatgccatgcgtacgatatgttncctctccgaatgaacactggctatgggtgccngtactccggagtgaaatgcgnaatttggaggcttgctgtggaagcacanaacatctttgggctttgagaccattcccngaangagcgctttgaaggaancanaggtttacgtccatgggggaaaattntggancaggctccaanaccggttaccaac

SEQ ID NO: 290433 - DNA, 281 bp, Glycine max
  unsure (1)..(281): unsure at all n locations
tgcgtgtatattcattttagcatcaaggttgaatctctcagaanaacaaacatcgacaagcatgtctggaagaggaaagggaagcaagggtctcggaaaggganngagncaaacgacaccgtaagttcttgagggataacattcagggaattcaccaagcccgcgattcggcgtctngccanacgtggtggcntcaagcgtatcagtggtctatctatgaagaaactcgcggtgttctcaagntctttctagngaacgtcattcgcgacgctgtcantaca

SEQ ID NO: 290434 - DNA, 284 bp, Glycine max
  unsure (1)..(284): unsure at all n locations
tgattccagaccttaatttttctctcattcgcttcaaatttcaggaaatcaattatggctcaaccctcaacaagaataggccttgctggactggctgttatgggccaaaatctagcactcnatattgctgagaaaggctttcccatttctgnttataaccgnaccacttccaaggntgatgagactgtagnacgagcnaaacaggaaggaaatcttccagtttatggctaccatgaccccgnagctttgttcattccattcaaaagctagggtgataataatgc

SEQ ID NO: 290435 - DNA, 278 bp, Glycine max
  unsure (1)..(278): unsure at all n locations
actcctcttggccaaatccctcgaagatctcctccgattcaccgacatgtccaacctcgatgcgtctctctcgtctcttaacctcgggccacggntccatcgtcttcttggcctacgagggcgagcngcgcgtggcgggccccggcttcaaccccgccggctccttcggccgcaagatgaccatggacgacctcatcgccaagcagatgcgcgtcacgcgccaggagaatccacactgcgagtcgtctccttcgaccgcgatgcgccaacggttccag

SEQ ID NO: 290436 - DNA, 277 bp, Glycine max
  unsure (1)..(277): unsure at all n locations
agaaaagggacaagcttagttgtcaagttggaatcaacccatactccatggaatggactggtttggccaatagattactgagtaagggcaacgatattctgtgttgcgattatgctagttttgatggtttgattaccaagcaagtnatgagcaagatggcaganatgataaacagtcttgtggtggtgatgaaaattgatgcgtganagggcacacctgctgttggctgttgtccaaggatngccatttgtaagaaagatgtttggagagttgatgt

SEQ ID NO: 290437 - DNA, 283 bp, Glycine max
  unsure (1)..(283): unsure at all n locations
attttgcagatgccaaaaagagtgatacggccaagtttgctaggcccttttggggaatgctggcggaaggtgtctatttggcaccttcccagnttgangcnggcttcaccagcttggcacatacttctgntgacataaaaaagacgatanccgctgntgagaaggttttcanggagntctgatggttaaattttgntttgttgcaaatttaattntcggagggtgaatttttaggtcaatttngattattgttatggcagttgctttcgntatgatctgtatc

SEQ ID NO: 290438 - DNA, 275 bp, Glycine max
  unsure (1)..(275): unsure at all n locations
gtttgttgtgagctataagctagtttatcgtgagggagaatatgaagttgtttgtnttctttgttgctggnagtagttttggtagcatgggcatgccatggcgcangctancaaangntccctctccggatgaaaactggctatggtgagcgttcttcggangtaaaatncgcaagttttaggcttgctgtggaagcacacaacatccgngccttaaaaccattcctgnagagtncgttgaaccaacaaaaggnacacattaatgggggncaatt

SEQ ID NO: 290439 - DNA, 259 bp, Glycine max
  unsure (1)..(259): unsure at all n locations
ctcttcatgctgctgttaactttggacagtatccntatggaggtttaatcctgaataggccaactattagcaggagattcatgcctganaaanggtctcctgaatatgatgcnttggnnnaagacccnggagnaggagttttggaggnnattactnggcaaggaagaggcccncattggccttacnattatnggaatttatnnangnangnctntnatgagttcnancctgggcacanagncgngtganaangggcttc

SEQ ID NO: 290440 - DNA, 274 bp, Glycine max
  unsure (1)..(274): unsure at all n locations
cacaacttccagaaggtggtgttttgcttctagagaatgtgaggttctataaggaggaagagaagaatgaccctgagtttgcnaagnagtggcttctcttgctgtctctacgtggattgatgctttccggnactgccnanngagctcatgcttctacaganggagtggccaaatncttgancccctctgttgcaggattccttatgcagaaggaacttgactanctagttggagctgtgtcaaaccccaagagaccatttgctgctatcgttgg

SEQ ID NO: 290441 - DNA, 285 bp, Glycine max
tcagatgtggacatagagggtgtaacttgtgctcctacccatggtattagcattggaagcctaggagtgcacaattctcaggcatgtgtctcaaacttaaccgttcgcaacaccatcataaaggaatcagacaatggcctgaggatcaagacatggcaaggaggaacgggctcagtgacaggcctgagatttgagaatatccaaatggagaatgtgaggaactgcatcatcattgaccagtactattgcatgtccaaggagtgtctcacccagacatcagctgtg

SEQ ID NO: 290442 - DNA, 282 bp, Glycine max
agagagaaaaaccatggcaataacactcaacaatggcttcaagatgcctatcattggattgggcgtgtggcgcatggaaggaaacgaaatcagggacctaattctcaattccatcaaaattggttatcgccattttgattgtgctgctgactacaaaaacgaagcagaagttggagatgcgcttaaggaggcttttgatagtggccttgtgaagagagaggatctcttcattaccaccaagctttggaattctgatcaaggccacgttcttgaggcgtgtaa

SEQ ID NO: 290443 - DNA, 284 bp, Glycine max
  unsure (1)..(284): unsure at all n locations
cngggatcgatctcaaggccggaggtaaaagcaaaaaaaccaaaagaacagcacccaagtccaatgatatctatcttaagcncttggtcaagctttatcgcttccttgttcggagaactggcagcaaattcaatgccgttatactcaagagattgttcatgagcaaggttaacaagcccccattgtctttgtcaaggttgattaagtataccaaggggaaggaagataagattgctgtggtggtgggcaatataaccgatgatattcgtgtttatgaagttcca

SEQ ID NO: 290444 - DNA, 283 bp, Glycine max
  unsure (1)..(283): unsure at all n locations
cnnngnnanctanaaacagtgtgatnaaaatgaaggtccttgttttcttcgttgctacaattttggtagcatggcaatgccatgcgtacgatatgttccctctccgaatgaacactggctatggtgcccgtactccggaggtgaaatgcgcaagttggaggcttgctgtggaagcacacaacatctttggctttgagaccattcctgaagagtgcgttgaagcaacaaaggaatacatccatgggcgaacaatatagatcagatccaaaaccagttaaccacc

SEQ ID NO: 290445 - DNA, 279 bp, Glycine max
  unsure (1)..(279): unsure at all n locations
ganactttaagcagatgtctaatgttttgtgggtggctcctgaggacaaggcgagtttgtggtcacaacttcattatgtntcgtgtaataatctggaaatgcaagaagcttatcttgtcaatctcgtaaatgtgttacgagaattgtatttgcacagtccagaggaagctcgccaattgagaaggaaagctctttctcgtattgaatggctgcaaaaagctgatgtgcctaccatagcacagattgaagagttccattcgatgcagaggatgatgaatg

SEQ ID NO: 290446 - DNA, 282 bp, Glycine max
  unsure (1)..(282): unsure at all n locations
cccacatcacctttgttaacacagaatacaaccacaaacgccttctcaaatcaagaggttctgattccctcaatagtgtcccatcatttcaatttgaaaccatccctgatggtctctctgataaccctgatgttgatgccacacaagacgtagtttctttaagtgagtctactagaaggacttgtttaactcccttcaaaaatctccnttcaaaactcaatagtgcctcggntactcntcctgtgacttgcatagttncngacagtggcnagtccttcactt

SEQ ID NO: 290447 - DNA, 280 bp, Glycine max
  unsure (1)..(280): unsure at all n locations
ctaacctaaaccctactcattctccatacctcaacgaagaggtnaaagagacggcaacactttgctgtccgccttgaccgagcagagcttcgtcttggccctcgattttgccctaaagtactctcagtcacaacagacacnnnnnnnnnnnnnnnnnnnnnnaatggcaccgaagcagaccaaggctgagaagaagatcgcttacgatgcgaantgtgcnacctaatggaggagtacggccagatcctcgttgtgaatccgataacgtgggatcgaacca

SEQ ID NO: 290448 - DNA, 281 bp, Glycine max
cctgtgcagtacttgttcgacttggagaacaccaatcaggatctgaaaagtgacttgaaagatctctacataaaccaagctattcaaatggatgtggctggtaatcgcaaggctgtagtcatctatgtgcctttcagattgaggaaggcattccgcaagattcatcttcgacttgtcagagagttggagaagaagtttagtgggaaggatgttgtcttgattgccacaaggaggatcgtgcgaccgccaaagaaaggctctgctgttcagcgaccccgaac

SEQ ID NO: 290449 - DNA, 280 bp, Glycine max
  unsure (1)..(280): unsure at all n locations
ccctctaatcactctagctgttgcaaatttctactatttttcaatggcntctgcagatgttgagttccgttgctttgttggtgggcttgcttgggtcaccggcaacgatgccctcgagaaagccttttcaatctacggcgacatcgttgaatngaaggttatcaacgaccgtgagactggaaggnccagaggattcggatttgtgaccttcgnctcagagcagttaatgaacnangcgatcgcaggantgancggccacgccccttgagggccgtaacat

SEQ ID NO: 290450 - DNA, 274 bp, Glycine max
  unsure (1)..(274): unsure at all n locations
tctttgaagtaagangagtntgtngtgttgaagtancaangatgttgattggttctctcttaaacaggcgtcctaagatcaangggactgtggtgttgatgaccaagaatgtgttcgacgtcaacgacttcatggcgactactaggngcggaccagccgctgttgccggcggcatcttcggtgccgcccaggacattgttggtggaatanttgatggtgctacggncatcttcagccgtaacattgccatacagttnatcagtgccaccacntc

SEQ ID NO: 290451 - DNA, 276 bp, Glycine max
  unsure (1)..(276): unsure at all n locations
agcaataagatgaaaatgaaagtgcttgnnttgtttgttgctacagttttggtagcatatgaatgccatggctcagactaccagaagttccctctccaaatgaaaactgggtttggtgggcaatacagcaatgaggtggcatgtgccagttggaggcttggcgtggaagcaaacaacgtagtcaagtggcaaactgttcctgcagcttgcggagagtacatagctgactacgttctaggagaccaatatagatcagattccaaaacagttaaccaa

SEQ ID NO: 290452 - DNA, 278 bp, Glycine max
  unsure (1)..(278): unsure at all n locations
cncgaagtccatcccaaggacacatttgtgttcagtatagatggccaccgtactctcnaatattccatactacaaaaaacatggatatggggtggagaaatttaactcgaccttgtatgatgaatgggttaacaagggcaatgcaccggcactgcccganactcttaagaattacaacaagctggtgtctcttggcttcaagattatattcttgtcaggnagaacactggacaaacaggccgtaacagaagcaaacttaaagaaggctggctaccaca

SEQ ID NO: 290453 - DNA, 268 bp, Glycine max
  unsure (1)..(268): unsure at all n locations
aaacaaggctaattcctacagtgttcatnggagtncattaggtgctaaagaagncgatgctacaaggnagaatcttggatggccatacgagcctttccatgtgccagangatgtcaagaagcattggagtcgccatacacctgagggtgctaaacttgaagctgagtggaatgccaagtttgtggaatatgagaagcaatacagtgaggnagctgcagagtgaaggctattattactggcgaattaccagctggttggnananancct

SEQ ID NO: 290454 - DNA, 279 bp, Glycine max
  unsure (1)..(279): unsure at all n locations
cgcaagtnggaggcttgctgtggaagcacacaacatctttggctttgagaccattcctgaagagtgcgttgaagcaacaaaggaatacatccatggcgaacaatatagatcagactccaaaacagttaaccaacaagcttacttttatgccaganacctcgaagtccatcccaaggacacatttgtgttcagtatagatggcaccgtactctctaatattccatactacaaaaaacatggatatggggtggagaaatttaactcgaccttgtatgatga

SEQ ID NO: 290455 - DNA, 277 bp, Glycine max
agaatatcaaatgcttatcttgtggtgcaaatgtcttgattactcttggtgataagggttggagagaatccggggcccatgttgtactagagctgtttgaccacaatgagtggagactttctgtgaaacttctaggaattactaggtattcatacaaagcacatcagtttctgcagcttggatcaacaaatcggtacacacatgcaatgatgtggaaaggagggaaggattggatcttggaatttcctgataggagtcagtgggctcttttcaagga

SEQ ID NO: 290456 - DNA, 271 bp, Glycine max
aaataatctttctagctctatatatagcccaccaagccttagcaatttgagacccaaaacaagtgtttcgaatagattatcctaagtctttgggaatagtgctgcaatggcttcaagtcaggaggaggtgacccttttgggagctactggaagcccatttgtgtgcagggttcatattgccctcaagttgaagggagttcaatacaaatatgtcgaagaaaatttgaggaacaagagtgaactgcttctcaaatccaacccagttcacaag

SEQ ID NO: 290457 - DNA, 278 bp, Glycine max
  unsure (1)..(278): unsure at all n locations
gataactagaaacagtgtgatgaaaatgaaggtccttgtttncttcgttgctacaattttngtagcatggcaatgccatgcgtacgatatgttccctctccgaatgaacactggctatggtgcccgtactccggaggtgaaatgcgcaagttggaggcttgctgtggaagcacacaacatctttggctttgagaccattcctgaagagtgcgttgaagcaacaaaggaatacatccatggcgaacaatatagatcagactccaaaacagttaaccaac

SEQ ID NO: 290458 - DNA, 275 bp, Glycine max
tttagccttggcaacccgtgatgttattgaactggccggtgggcctttctacgaggttgaattgggaagatttgatgggctaagatctaaagattcagatgtaaacgggaggctgcctcatccagagttcaacttgaaccagctcaattcactgtttgcggccaacggtctcacccaaacggaaatgatagctctatcaggtgctcacactgttggattctcccattgcaacaaattcacgaacagagtatacaatttcaagagcaaaagtcgag

SEQ ID NO: 290459 - DNA, 278 bp, Glycine max
  unsure (1)..(278): unsure at all n locations
cccagtcatggcagcaacattgatggcagcnacaacaagttctggtactcttaaagcaactcctttccttggccaaggcaagggtgccaatgccaatgctcttagggatgttgtctccatgggaactgggaagtacaccatgggcaatgatttgtggtatggaccagacagagtgaaatacttgggacccttctcagctcagaccccttcatacttgaaaggagaattccctggggattatggatgggacactgctggcttatctgctgacccagaag

SEQ ID NO: 290460 - DNA, 277 bp, Glycine max
ctccccaaacgcccctctctctcctccaatggccgaccagctcaccgacgaccagatcgccgagttcaaggaggccttcagcctcttcgacaaggacggcgatggttgcattactaccaaggaacttgggactgttatgaggtcacttggtcaaaacccaactgaggcagaactgcaggatatgataaacgaggttgatgctgatggcaacggaaccatcgatttcccagagttcctcaacctgatggctcgcaagatgaaagacaccgactcagag

SEQ ID NO: 290461 - DNA, 279 bp, Glycine max
  unsure (1)..(279): unsure at all n locations
ttgcaattgaggctatctccatattagagaagatgcattctagaggatatgtgcacngtgatgtaaaacctgagaactttttgctgggaccccctgntnactcctgatgaaaagaagttgtttctggttgatcttggattagcaactcggtggcgtgatagttctactggccttcatgttgactatgatcaacgtccagatgtttttaggggcacagttcgttatgctagtgtgcatgctcatcttggtcgaacaggtagcaggagagatgacttggaa

SEQ ID NO: 290462 - DNA, 276 bp, Glycine max
ggagagtcttctatgcttcccagattactgccaaacccaggcttcttgagcctgtctacctggttgaaatccaggctcctgagcaagctcttggtggaatctacagtgttcttaaccagaaacgtggacatgtgttcgaggaaatgcagaggcctggtaccccactttacaacatcaaagcatacctccctgtcattgagtcctttggtttctcgagcacattgagggctgcaacatcaggccaggctttcccacaatgtgtctttgatcactggg

SEQ ID NO: 290463 - DNA, 275 bp, Glycine max
  unsure (1)..(275): unsure at all n locations
acgcttgtccgcatcactggtggaatgaaggttaaggctgacagagatgaatcatctccttatgctgctatgcttgcagctcaggatgttgctgccagatgcaaggaacttggcataactgctcttcatatcaagctccgtgccactggtggaaacaagacaaagacacctggtcctggtgctcaatcagctcttcgtgcccttgctcnttcaggaatgaaaattggtcgtatagaggatgtgactcccattccttcggatagcactcgtagaaa

SEQ ID NO: 290464 - DNA, 272 bp, Glycine max
  unsure (1)..(272): unsure at all n locations
ccactattttngttgggaatttggatcctaacgtcacggatgatcatctgagacaagtttttgggcagtatggggagttagttcatgtgaagattccagctggcaagagatgtggatttgtccaatttgcggacaggagctgtgcagaagaggcactgcgggttttgaatggcacacttttaggcggacaaaatgttcggctttcatggggccgaagtccttcaaacaaacaggctcaaccagatgcaaaccagtggaatggtagtggtggt

SEQ ID NO: 290465 - DNA, 274 bp, Glycine max
  unsure (1)..(274): unsure at all n locations
cagtcnaagaatgtgtgtgtaattggngctggaccctcggggctattggcagcgagggagctgagaaaagaaggtcacaaggtggttgtgttggagcagnaccatgatattggaggtcaatggctatatgacccaaatgtacaagaggacgatcccttaggaagagacccttggctaaaggtgcatagcagcatctatgagtctttaaggttcatgtctcccagagagatcatggggtcaactgatttcccctttttagtcaagaaaggtagag

SEQ ID NO: 290466 - DNA, 272 bp, Glycine max
  unsure (1)..(272): unsure at all n locations
cnccgagttcctgtctattctggaaatccaaggaatattattgggcttctactggtcaccnagtcttcttactgtacgaccagaaacagagacacctgtcagtgctgtatccatccggagaattccacgggttccatcagatatgcctctctatgatatactaaatgagttccaaaagggaagtagtcatatgnctgctgttgttaaggctaggggaaaaggcaaagaaactccacaaatcattgatgaagagaaaaatgaagaaaacaaaa

SEQ ID NO: 290467 - DNA, 141 bp, Glycine max
  unsure (1)..(141): unsure at all n locations
atgatgttgtccttgttggtggttctaccagaattcccaaggttcaacaactgctgcaggacntctttaatggaaaananctttgcaanancattaatcccgatgnggctgttgcatatggtgcggctgttcaggctncaa

SEQ ID NO: 290468 - DNA, 270 bp, Glycine max
  unsure (1)..(270): unsure at all n locations
ccaaactgagcatgagttgcttaggtacttgtataagcnacaatcaaaagatctctcactatgccacagtatgattccacttggatcttgtacaatgaagttgaatgcaacaactgaaatgatgcctgtgacatggcccagctttactgatattcacccttttgcaccagttgaccaggctcaaggttatcaggaaatgttcaataatttgggtgaactgttgtgcaccatcactgggtttgactccttctcctgcnaccaaatgctggt

SEQ ID NO: 290469 - DNA, 273 bp, Glycine max
  unsure (1)..(273): unsure at all n locations
ccaatctactttgcattncnaaacaggnnnaannangnttntngacccctgtctanctggttgaaatccaggctcctnagcaagctcttggtggaatctacagtgttcttaaccagaaacgtggacatgtgttcgaggaaatgcagaggcctggtaccccactttacaacatcaaagcatacctccctgtcattgagtcctttggtttctcgagcacattgagggctgcaacatcaggccaggctttcccacaatgtgtctttgatcactggg

SEQ ID NO: 290470 - DNA, 269 bp, Glycine max
  unsure (1)..(269): unsure at all n locations
cngatcttaaacgtctttcgctgttccaagatgggtgtngctgagaacattcccgatatggaggagggtaccttggagattggaatggaatacagaactgtatctggagtcgctggaccattggtcattcttgacaaagttaagggncccaaatttcaagagattgtnaatattcgtttaggagatggaactactcggcgtggacaagttctagaggttgatggtgaaaaagctgttgttcaggtatttgaaggtacatctggaatcga

SEQ ID NO: 290471 - DNA, 270 bp, Glycine max
  unsure (1)..(270): unsure at all n locations
cgatactatagctacacttaccactgtgtctcagagggtctgtgacacacagactcacttccaagttccaagctttggccatttattcccactgtttattgagaacaactgcagaacatggcacagattttggcnccctctacgcaatggcngatgagaatctcaaaatcctctcccaatgcaagtcccattacatcaaacatgtggagttctttattgtggaaacaaaataagaaagtttcacccacaagttctgctaaatttagagtg

SEQ ID NO: 290472 - DNA, 268 bp, Glycine max
  unsure (1)..(268): unsure at all n locations
taccnaagagaatggctcccaagggnttaatctttttggctgtnttatgcttctcagcactgtcactgagtcgttgtcttgcggaggataatggactngttatgaacttctacaaggantcatgcgtcacgctgnagacatcatcaaanancaantcangcttctctacaagcgcnacangaacactgctttctcctggctcananacatnttccatgnttnnncngttcatagntgnganncttacnngttgctggnctccacaagc

SEQ ID NO: 290473 - DNA, 259 bp, Glycine max
  unsure (1)..(259): unsure at all n locations
cntgtgtctaaccttgaccgccgtgagagccgccgctatctcgagatgttctatgctctcaagtaccgcaaattggccgagtctgtgccccttgctgttgagtaaactgaggatgaagagttggataaagaaatggaggaaccggctttttgtttctcatttggagtttgtcttacttgagttctataaataatatgtccctgatgattttaattttgtgattaagctttcgataagagacagagagagaaaaaaaagg

SEQ ID NO: 290474 - DNA, 272 bp, Glycine max
  unsure (1)..(272): unsure at all n locations
ggcggaacggactctaagatcgggctgaagctgtacgacaagtacggctactacatctacattaaaaacctcgaagcatggggcggcttgatgggcaagggctacgactacttcgagcgcggcaacctcgacatcttcagcggaaggggaccctgtcttgacggacccgtctgtgccgttaacgttacttctgacgganccggttctcaccacggctggtaccttaactacgtccaggtcacctccactnggccccacctttcctgcgctca

SEQ ID NO: 290475 - DNA, 267 bp, Glycine max
ggggatttgtggcaccatattttatggcgatgatccatgttgctgcagcagtaagattttactataaaggattctcacctgaagaaatggcctatacttctggtggtgagaacaatacttttcctttctagggttatcattggtggccttcctagccatatgcactcttgttgagcttctttcaatgtggaacttgacacggatagaagtccaactgtgcaacatgttatctcccgaggcaccacaactctttctcgcttcttataa

SEQ ID NO: 290476 - DNA, 264 bp, Glycine max
gaaatgagacaaaagtgtctggagtggataaaaaggccagatttggtaatgggtgagtccacacaattgccacaagacttcttagatgaggttaaagatagaggatacataacaagttggtgcccccaagagcaagtgctgtctcatccatcagttggggttttcctaactcattgtggctggaattctacactagaaggtataagtgggggtgtccctatgataggttggccttctttgctgaacaacaaacaaattgcaggt

SEQ ID NO: 290477 - DNA, 270 bp, Glycine max
  unsure (1)..(270): unsure at all n locations
tagaaattatcattgatagtntcgcaagtcctgactgtaacatagtnggtgcaatgcttttggttgatacttatcataccaatncctgaaantgcagttcgtagtatttttgttgcgcctttcagaggcggaaggcccattcgggtggttacatttccgaataccattgtgcagattgaaccagacatgaattcaaggtttcagcntttgagtaccactaccaatggtgattttgttcaagnaaaagatctcgcgatngttaaagttaag

SEQ ID NO: 290478 - DNA, 272 bp, Glycine max
  unsure (1)..(272): unsure at all n locations
gggagtctgaatatggaggtggtcagtctgttcctgttggtggtattgcatactacatcactgcaccttccagcttagctgatatggcagccaatcctttccatgcattattctaccttgggtttatgttgtcagcctgtgccttgttctctaaaacttggattgaagtctctggttcatctgctagagatgttggcaaagcagctgaaggaacaacaaatggtaatgcctggacatcgggaatcaaacttgcagaaagantgaaccgatac

SEQ ID NO: 290479 - DNA, 271 bp, Glycine max
acaacttctgctacttcctactccaaccgcacttctgctccgcaattatcatgggcaaggtcaagatcggaatcaacggatttggaagaattggccgtttggtagccagagtggctctgcagagagacgatgttgaactcgttgccgttaacgaccctttcatcaccaccgattacatgacatacatgtttaaatacgacagtgttcatggacactggaagcatcacgatgtcaccgttaaggacgagaagacccttctcttcggtgacaa

SEQ ID NO: 290480 - DNA, 265 bp, Glycine max
cccagatcgtgtcaagtacttgggcccattctctggtgagcccccatcctacctcactggtgaattcccaggtgactatggttgggacactgctgggctttctgctgacccagagacctttgccaaaaaccgtgaactggaagtcatccactccagatgggccatgttgggagccttgggctgtgttttccctgaactcttgtcccgcaacggagtcaagtttggtgaggccgtgtggttcaaggccgggtctcagatattcagt

SEQ ID NO: 290481 - DNA, 262 bp, Glycine max
  unsure (1)..(262): unsure at all n locations
ggagtctgacatgtgtgcgagtcaacgggcgagtaaacccgtaaggcgcaaggaagctgattggtgggatccccctgtgggttgcaccgccgaccgaccctgatcttctgtgaagggttcgagtgagagcatacctgtcgggacccgaaagatggtgaactatgcctgagcggggcgaacagaggaaactctggtggaggcccgcagcgntactgacgtgcaaatcgttcgtctgacttgggtataggggcgaaagactaat

SEQ ID NO: 290482 - DNA, 263 bp, Glycine max
  unsure (1)..(263): unsure at all n locations
gatcagactccaaaacagttaaccaacaagcttacttttatgccaganacctcgaagtccatcccaaggacacatttgtgttcagtatagatggcaccgtactctctaatattccatactacaaaaaacatggatatggggtggagaaatttaactcgaccttgtatgatgaatgggttaacaagggcaatgcaccggcactgcccgagactcttaagaattacaacaagctggtgtctcttggcttcaagattatattcttg

SEQ ID NO: 290483 - DNA, 264 bp, Glycine max
cagctggaagtcaaagaaagccctgcagctgcccgaatacccgagccaggaggagctggagtccgtcctcaaaaccctcgaggcttttcctccaatcgtcttcgccggtgaggccaggacattggaggagcatctcgccgaggccgccatgggaaatgccttcctcctccagggcggagactgtgctgagagcttcaaggagttcaatgccaacaacatccgtgacaccttccgcatcatcctccagatgagcgtcgtcatgat

SEQ ID NO: 290484 - DNA, 268 bp, Glycine max
ctccatcatcgacatggacgctgatgttatcaccattgagaactctcgctccgatgagaagctcctgtcagtcttccgtgaaggtgtgaagtatggtgctggaattggccctggtgtctatgacatccactccccaagaataccaccaactgaagaaatcgctgacagaatcaataagatgcttgcagtgctcgagaagaacatcttgtgggtcaaccctgactgtggtctcaagacccgcaagtacactgaagtgaagccagccctc

SEQ ID NO: 290485 - DNA, 272 bp, Glycine max
  unsure (1)..(272): unsure at all n locations
caccacgctcacctaagtttcaatttcaatcccttttctttttccgttacaaaataattcaaaattccctccctcatttacccttgtttgtgtaaagtagtagcagagtgagactaggtatcatcgatggcagggtacaagggcgatgacgaatacgattacctcntcaagctggttctcatcggcgattccggtgtcggcaagtccaacctgctttcgcgcttcacgaggaacgagttcaatttggagtccaagtccaccataggggttga

SEQ ID NO: 290486 - DNA, 276 bp, Glycine max
  unsure (1)..(276): unsure at all n locations
gacttcttccctgtggaggttgatagtcaagagggagttgctcacattggtgaattgaaatctggtgtctatgttccactgcctacaaaaacnccatttggtggaaactcccaaggaatggcaactggatctaccttgtgacaaaattcctagtgtcttgactacaactgatgagagattggtaggcacagaacatgagggatatgatccttttcttggtggaattcaaaaatatgccactcccatgatgcccctagatgaagaaattctttctaa

SEQ ID NO: 290487 - DNA, 267 bp, Glycine max
  unsure (1)..(267): unsure at all n locations
tagtgtgtggttganagtnaagangtagcaaagatgtttccattcgggcacaagggtcaaaagataaaggggactatggtggttatgcagaagaatgtgttggatatcaacagcatcaccagtgttgacgggatcgtcggcaccggcttagacttcttaggcagtgcactcgatacagttacttttttagcctcctccatctccatccaacttattagtgctaccaaggctgatggtgggaaaggaaaagttggaaaggctacaatt

SEQ ID NO: 290488 - DNA, 264 bp, Glycine max
  unsure (1)..(264): unsure at all n locations
gtcttcttgttcctctcgcccagaatccgagatcaaccccgacgaaggcaaggggtttttctcggcttcttcagatttctgaaatggcgcctgtttcagctttagccaagtacaagctcgtcttcctgggtgaccaatccgtgggaaaaaccagcatcatcactcgcttcatgtatgataaattcgataacacctatcaggctacnattggtattgattttctatcaaanactatgtatcttgaagatcgaactgttcgactgc

SEQ ID NO: 290489 - DNA, 266 bp, Glycine max
cggacacaatttttgatggggatatacctcagcactcccaaaacagagaaggcctctgaagatggtgagaacgacaagcttcgcttcggtttgtcttccatgcagggctggcgtgcttccatggaagatgctcatgcagctcatccatatttggacgagtctacgtcatactttggtgtttatgacggccatggaggcaaagcagtttcaaaattctgtgccaagtatctacaccagcaggtgcttaagagtgaagcttacttagc

SEQ ID NO: 290490 - DNA, 268 bp, Glycine max
  unsure (1)..(268): unsure at all n locations
agaagaacaagtagttgagaactaagaaggagaagcaaatggcttcctcaatgatctcttccccagctgttaccactgtcaaccgtgccggtgccggcatggttgctccattcactggcctcaagtccatggctggcttccccaccaggaagaccaacaatgacattacctccattgctagcaacggtggaagagtgcaatgcatgcaggtgtggccaccagttggcaagaagaagtntgagactctttcctacctgccagaccttga

SEQ ID NO: 290491 - DNA, 272 bp, Glycine max
caaaaactcacactttggtggccacagcaacaataacaatgggcagcctcactacaagctgcagctaccttcatgcaacccaccaaggtgggcatggccactcgcaacctcaaatctacacaatgcatttctaaggcttttggcttggaacccgctgcagctaaactcatttgctcccttaagcccgatctcaaagattttgctcaaaaatgtgtcgacgccaccaaaattgcaggattcgcccttgccacctcagctctcgttgtttctgg

SEQ ID NO: 290492 - DNA, 270 bp, Glycine max
catttctaatctcattctccttctgttcaaacactctctctcatgggcatcagataagaagattaggatcggcatcaacgggtttggaaggattggccgtttggtggccagggttgcccttcaaaggaatgatgttgaacttgttgctgtcaacgatcctttcatcaccactgattacatgacatacatgttcaagtacgacaccgttcatggccagtggaagcattttgatgtgaaggtgaaggactctaagaccttctctttggtgag

SEQ ID NO: 290493 - DNA, 260 bp, Glycine max
  unsure (1)..(260): unsure at all n locations
gtacntctacattcagtgaatacactgttgtncatgctggatgtgttgccaaagtcaaccctgctgccccacttgacaaaatctgngttctcagttgtggaatttgcacaggtcttggggccactatcaatgttgcaaaaccaaaacctggttcttctgttgccatttttggacttggagctgttggcctgtcgctgctgaaggggcaaggatttctggtgcatcaagaatcattggggttgatttagtttctagcanat

SEQ ID NO: 290494 - DNA, 264 bp, Glycine max
ctctactctctggtctaaatcctcgtccattgagtttggttctccatttcttcgccgtcgctatatatggtgttggccgcttgctcataccatttccttctccaaaacggatgtggattggagctagattgatttcaggtgcatcaggcatcattttccccattattaaggctgaaggggtgagacaaatgttcttcccagcaactgtgccagcatattacagaacccctcctgtccatccattgaacacacatgaaggaaata

SEQ ID NO: 290495 - DNA, 244 bp, Glycine max
tggatttggaccagtggatctccacaggtgaaggatggccaccaccttctcgaagaggagactcaacttctttgcgaatatgttaaagagatccttattgaggagtcaaatgtgcagcctgtcaacagtccagtgacggtttgtggtgatattcatggtcagtttcatgatctaatgaaacttttccagactgggggtcatgtgccggagacaaattacatttttatgggagactttgttgatc

SEQ ID NO: 290496 - DNA, 266 bp, Glycine max
caaagcacaaagcaaagctcatccttgagttaaaaaatggcagcagcttcttccatggctctctcatccccatccttggctggcaaggccgtgaagctgggcccatcagccccagaagtgggaagggtgagcatgaggaagaccgtcaccaagcaggtctcctcaggaagcccatggtacggcccagaccgagtccagtattggggccattctctggcgagccccgtcctacctaaccggtgagttcccaggcgactacggtggga

SEQ ID NO: 290497 - DNA, 272 bp, Glycine max
  unsure (1)..(272): unsure at all n locations
ttccattctctttgcctgcctagtttcaattctgtccaatttccaaaaccaaaacaagccacacaagttcatggcaactcccaataacagactctctcttgccatggagagaactgggcaatgggttttctctcaagacataccaactgatgttatagtggaagttggagaaacaactttctctctgcacaagttcatgctagtggcaaaaagcaactacataaganaactgatattggaatcagatgagagcgaactcaccagaatcgacc

SEQ ID NO: 290498 - DNA, 259 bp, Glycine max
ctgcgtttttgacaccgtgtttgttgttgtgtgtgttttccgcggaaaatcaaaatgggtatcattgaaaagatcaaagaaattgaagccgagatggctcggacccagaaaaacaaagccacagagtatcatctcgggcagctcaaggcaaaaatagcaaaactgaggacacaattattggagcctccaaaaggttctagtggaggtggagaaggatttgaagttacaaaatttggtcatggacgtgttgcactgattg

SEQ ID NO: 290499 - DNA, 257 bp, Glycine max
  unsure (1)..(257): unsure at all n locations
gaggtctatcaaccagaggcagttgttctacaatgtggagctgattcattgtctggggacaggttgggttgcttcaacttgtctgtgagaggtcatgcagattgccttcgttttcncagatcgttcaatgttcctttaatggtcttgggtgggggtggatatacaattcggaatgttgcccgttgttggtgttatgngacagcagtggcagtaggagtggagcctgataataagttgccttataatgaatattatga

SEQ ID NO: 290500 - DNA, 266 bp, Glycine max
  unsure (1)..(266): unsure at all n locations
tcgaccccaggagagcggntgganaccaaaggaatttgacaacgaatctccatattctatcatgtttggtcctgataagtgtggtgctacaaacaaggttcacttcattttcaagcataagaacccaaagagtggggagtatgttgagcatcatctcaagtatcccccttctgtcccatcggacaaactaactcatgtgtacactgcaattctgaagcctgataatgaattgcaaatcttgattgatggggnggngaagaaaaagg

SEQ ID NO: 290501 - DNA, 263 bp, Glycine max
gacatagatgccaatgggattgttactgtctctgccaaagacaagtctactgggaaagaacaacaaatcaccatccgttcatctggaggactctcagaagatgagattgataagatggtcaaagaagcagagttgcacgctcagaaagaccaggaaagaaaggctctcattgacatcagaaacagtgcagatacaagcatctacagcattgagaagagtttaggtgagtacagagataagatccccagtgaagtggccaaaga

SEQ ID NO: 290502 - DNA, 250 bp, Glycine max
  unsure (1)..(250): unsure at all n locations
ttcagaggaaaatggcgggtacggtttcgacttgtttcttcttcgtgtttctacctttctctccttcttccttttcagatctccgctgaggaatcctcggagaaggagttcgtactcacattggatcactctaactttcacgacactgtcagcaagcacgatttcatcgtcgtcgagttctacgccccatggtgtggtcactgtaagaagcttgctccggagtatgagaaagctgcttctntcttgagta

SEQ ID NO: 290503 - DNA, 256 bp, Glycine max
  unsure (1)..(256): unsure at all n locations
ccatcacttctcgttacttggccaacacaaaggctgctgagcagtggggatcaaagttacattcattctgtgtaggccttgagggctcaccagatttgaaggctgcaaaagaggttgctgactatctaggcactgtccaccatgagtttaccttcactgttcnggatggaatagatgccattgaagatgttatctaccatattgaaacatatgatgtgactacaattagagcaagcacacctatgtttctcatgtc

SEQ ID NO: 290504 - DNA, 283 bp, Glycine max
cagagggtattggcatgtttcctcccaactgagttttctgttgcagttcatgtggatggtgcaagcaagtcgtttgagcagacctgctttctggatgttaagggatactgtcgtgaagagaggagccacgaagggcttggaatgggtggttctgttgtctaccaaaaattcgggaagactagtgactgtggttcacctagatcaactctaaagtgctggaatgaggaagatgaggaagagtagtttccttaagtgtctttattattctgtccttgtgaaaata

SEQ ID NO: 290505 - DNA, 284 bp, Glycine max
  unsure (1)..(284): unsure at all n locations
gtggattagcatctcgaggttctttgatgggcataaagnaatcgtcttggtagcaaccgccaaaccaatagancaagggttagctctgcagctggtccacaagcaaggtaantaggtccattaccggccggctccggaccgaaaagacctaacggagtaatcccttatctcggatcggagatgctatgctaacggggctggaatcgaagtgggggacctattctaccgcctgtgtctatctcctgtcaagtatgctccccagacatagactacgtacagggtng

SEQ ID NO: 290506 - DNA, 280 bp, Glycine max
  unsure (1)..(280): unsure at all n locations
gtgtggtttggtttggtttttcacttttcttcatctttttgcgagangacacacacacagagagagatggctacgacgaggattgaggcagagaagaagccgaagacgaagatcgtgtgcactctgggccccgcatcacggtcggtcccaatgatcgagaagcttctgcgagcaggcatgaacgtggcgcgcttcaacttctcccatgggtcccacgagtaccaccaggaaaccctcgacaacctccgcgccgccatggagaacaccggtattctctgcg

SEQ ID NO: 290507 - DNA, 278 bp, Glycine max
tttcactcataccattaaagctcttgaaccattcttcaatgctgctgcttcacagttcatacttggtcaatcaatccccatcactttgtggctgtcactggctcctgttgttattggtgtgtccatggcatctttgactgagctctcgttcaactgggtcggcttcataagtgctatgatttcaaacatctccttcacataccgaagcatctattcaaagaaagccatgactgatatggacagtaccaatatctatgcctacatttccatcattgctc

SEQ ID NO: 290508 - DNA, 283 bp, Glycine max
  unsure (1)..(283): unsure at all n locations
cccctatggctcgtcactccttgctcttagccctcctcctcttcgccgcngtnnccaccgccgcgatggcggtggccgcgtaccgacgccgacgacatcctgatcccgtcaggtggtgccagatgttggcgaagcgaagaggaggacaacctgctgaacgccgagcaccacttcgagagntnccaaggccaagttcgctaagacctacgccacnaaggaggagcangatnnatcgcttcaggcgtnttcaagttccaactncgnagagccaggntgnatgnca

SEQ ID NO: 290509 - DNA, 282 bp, Glycine max
  unsure (1)..(282): unsure at all n locations
ggccaagaagccacggctcgaattagggtagaacatattataaganaggagaacatgatggctgctcaagaaatcattgaactcttttgcgaacttattgcggtccgccttccaataattgaatctcaaagggaatgcccccttgacttgaaggaagccatatccagtgtatgttttnctgcaccaaggtgtgcagatttgcctgagttgttgcaggttcagatgctatttgctgccaaatatgggaaggnttttnatctgctgcaatgagctcaggccaga

SEQ ID NO: 290510 - DNA, 280 bp, Glycine max
  unsure (1)..(280): unsure at all n locations
tggagtttggnatttctgaagcgtaccggatttcattgtgatatcatttgtgtcactggatggactgccaccccaatgcaggatgttcaggttacaattgattggtttatttcctctcaggaatgtgttcccagaacctattgtgttttaaatccacaaaatccttttgtgttaaataggtggatgggaaaactgactttcccccagggcacttcccgaagtgttaagagaatgcctctttctatagggggaggagctggtgcaaagaatgctattctca

SEQ ID NO: 290511 - DNA, 279 bp, Glycine max
  unsure (1)..(279): unsure at all n locations
ggctccacttcccatcggatttgctgtgttcttggtccacttggctaccattcccatcacaggaactggcattaanccagctaggagtctcggagctgccatcatctacaacagagaccatgcatgggatgaccaatggattttctgggttggacctttcattggagctgcccttgctgctgtgtatcaccagatagtcatccgagccatccctttcaagacaagggcttaggctcttgtttttgtatgtgcttgcttgtattagttgttatttatgta

SEQ ID NO: 290512 - DNA, 279 bp, Glycine max
  unsure (1)..(279): unsure at all n locations
gggattataacagattaagacctttgagttaccgtggtgccgatgttttcatactggctttctctctcataagcnaggccagttatgaaaatgtctctaaaaagtggattccggagttgaagcattatgctcctggtgtccccattattctggttggcacaaagcttgaccttcgggatgataagcagttctgcattgaccatcctggtgccgtacctattaccacagctcagttcaaaaacacaggagaacgtgaaggcagtctttgatgcagccata

SEQ ID NO: 290513 - DNA, 275 bp, Glycine max
cgagaattagggtttgtagtgcagcaggaagaagcaataatggcgccgaagataacacgtaaggttagcagaaaccccgaattgataaggggaatcggaaagtactcgaggtctcaaatgtaccacaagaggggcatttgggctatcaaggccaaaaacggtggcgttttacctcgccacggccctaaacccaaacctgaaactcccgctgaaaaaccacccaaattttaccctgctgacgatgtcaagaaaccccttgtcaacaagcacaaacc

SEQ ID NO: 290514 - DNA, 279 bp, Glycine max
  unsure (1)..(279): unsure at all n locations
cnccggcgagtccatctcgcgccagntncgacgccgctccggcaaccgctccggccaccgcctttggttccctcactttctcgnccttcttcttctcagcagaaatatgccttctcagaaagttgaaacgggtcatcaagacacggtccatgatgttgcaatggattactatggtaagaggctggccacggcttcatcagatcacacaattaagataattggggtgagtaatacggcctctcagcatctcgcaacattgactggtcaccaaggacctgt

SEQ ID NO: 290515 - DNA, 261 bp, Glycine max
aagactgcgacgacgatccaagtgatagacactcgtcgcgatggaacgtgtagctgaatccgagcgaactctgtacccatacgtgactggatcctctgtagtcgctatcaaatacaaagatgggattctaatggccgctgacatgggaggttcgtatggatctaccctgcggtacaagagtgttgagcgtatcaagcctattggaaagcattctcttcttggtgctagcggggagataagtgactttcaggagattctgcg

SEQ ID NO: 290516 - DNA, 279 bp, Glycine max
  unsure (1)..(279): unsure at all n locations
cgnganaactagnaacagtgtgatgaaaatgaaggtccttgtnatcttcgttgctacaaanttggtagcatggcaatgccatgcgtacgatatgttcccnctccgaatgaacactggctatggtgcccgtactccggaggtgaaatgcgcaanttggaggcttgctgtggaagcacacaacatctttggctttnagaccattcctgaagagtgcgttgaagcaacaaaggaatacatccatggcgaacaatatagatcagactccaaaacagttaacca

SEQ ID NO: 290517 - DNA, 274 bp, Glycine max
  unsure (1)..(274): unsure at all n locations
gttgnaagttaagaagtagcaaagatgtttccattcgggcacaagggccaaaagataaaggggcctatggtggttatgcagaagaatgtgttggatatcaacagcatcaccagtgttgacgggatcgtcggcaccggcttagacttcttaggcagtgcactcgatacagttacttttttagcctcctccatctccatccaacttattagtgctaccaaggctgatggtgggaaaggnaaagttggaaaggctacaaatttgagaggnaagataa

SEQ ID NO: 290518 - DNA, 274 bp, Glycine max
  unsure (1)..(274): unsure at all n locations
gttttnncctttctctgctctttgccttctctgacacatttggtgccttgtagagcgtgttttngcaggaaggtggtatggcgaaggacgttgaggttgctgagcgtngctccttctctgggaaggactaccaggaccctccaccagcaccactcattgatgctgaggagctcacaaagtggtccttttacagggctctcattgctgaattcattgccactttgctcttcctctacattactgtgctccacagtcatagggtacaatcaccagt

SEQ ID NO: 290519 - DNA, 283 bp, Glycine max
  unsure (1)..(283): unsure at all n locations
aggaaagacaacctttgtgaaaaggcatctcaccggagaattcgagaagaaatatgagccaaccatcggtgtggaggttcacccattggattttttcacaaactgtggaaagattcgattttncctcctgtaccagcagtatcccagcngnaaaatcgnatctttccncagtttgtgaaaagattcgnttttactgntgggatactgctggacaggagaaatttggtggcctcanagatggatacnatatccatggacnatgngtattatcctgtttggtggt

SEQ ID NO: 290520 - DNA, 281 bp, Glycine max
  unsure (1)..(281): unsure at all n locations
gcgagcgattaaggtctatgtttgaagaaaccaagagccttctcctccaggttgctggacacaaagatctccttgaaggagacccctacttgaagcaaagacttcgacttcgcgattcatacatcacaaccctcaatgtcctgcaagcctacacattgaagcgaattcgtgatcctgactaccatgtgaagttgaggccacatttgtccaaagactacatggatcaaacaagccagcagctgagcttgtgaaactcaanccnacangtgattctgctccng

SEQ ID NO: 290521 - DNA, 279 bp, Glycine max
  unsure (1)..(279): unsure at all n locations
ttcttctcttaaaagttattaagagcttttgcttttctttctgcgcgcttttcccaattaagtagttcttccttttctcaaagcaaaaaanatgttcatcgagagtttcaaggttgagngtcctaacgtgaagtacacagagactgagattcagtccgtgtacaactatgaaaccactgaacttgttcacgagaacaataatggcacttatcagtgggttgtcaagcccaaaactgtcaaatatgaatttaaaaccaacacccatgtccctaaactagg

SEQ ID NO: 290522 - DNA, 273 bp, Glycine max
  unsure (1)..(273): unsure at all n locations
ctttgtatgaagacatttttctacccttgtggaacattttcaaagattgcttctgttgcnagaaacaggcccatatcctctggagaagcatgtaatgacttgatggcatattctttaattttgtcttgttgttgctatacttgctgcgtaaggaggaagcttcggaagatgttgaacatcacagggggatttattgatgatttcctctctcatttgatgtgttgctgctgtgcccttgtgcaagaatggagagaagtggagatccgtgggctt

SEQ ID NO: 290523 - DNA, 273 bp, Glycine max
  unsure (1)..(273): unsure at all n locations
attgtgttttaaatccacaaaatccttttgtgttaaataggtggatgggaaaactgactttcccccagggcacttcccgaagtgttaagagaatgcctctttctatngggggannagctggtgcaaagaatgctattctcatgaacatgccaaatgctgttctttcantgtggagatattttgtnggagatctcgtctttgangtttctaagatgacttctccctacattanatgtacagtcctctttcttcatagcatttggaanttggctg

SEQ ID NO: 290524 - DNA, 271 bp, Glycine max
  unsure (1)..(271): unsure at all n locations
gggattcatgtgggtttgacaacttccctagctttggtttgacactatttaagaacacattctattttgacttcagtccaacctatgttggatgtggtcttatctgtcctcacctagtcaattgttctgttctccttggagctattatatcatggggctttctgtggccttttgtctctgagcatgctggcgactggtatccagctgaccttggtagcaatgattcaaaggtctttatggatacnaggtattcatatctattgccctgatt

SEQ ID NO: 290525 - DNA, 277 bp, Glycine max
  unsure (1)..(277): unsure at all n locations
gaccgcgaaaacagtggcttcaccagggaggggtattttggccatgtcatgagtccaatgctacctgtgggaagcgtttggcttcaattgggctagagaacactgaagctaaccgccaggcataccgtaccctcctcgtgacagttccaggccttggtcagtacatctctggtgccattctctttgaggaaacactctaccaatccacaactgatggcaggaagattgttgacgtgctgcttgagcaaaacattgttcctggtattaaagtcgacna

SEQ ID NO: 290526 - DNA, 278 bp, Glycine max
  unsure (1)..(278): unsure at all n locations
cctcgcatcgcaccttcaacttaacctattccacttgtaatcgtaaacgctttgctagaagaagagacaaagtgtgtctgtgtgtgtgaganagagagcaatggctggctcgtgggcacgccgttctctgattgttctagccatcatttccttcggatgtctatttgcnatttccattgctaaggaggaanccaccaagttagggacggtcntcggcattgatcttggaacaacctattcatgtgtcggtgtttacaagantgggcatgttgnactct

SEQ ID NO: 290527 - DNA, 278 bp, Glycine max
  unsure (1)..(278): unsure at all n locations
gggtagccagctttggaggctatctgtttgaaaaagacgttctgaccatgtcatttgctccaaaagatgtacacgaggcacaagtgnantttgcactggaacggggaattcctgccacattaggtgtcatgggcactgtaagattaccctaccccggttctgtctttgatcttctccactgtgctcgttgtagagtcccttggcacgtagaaggtggcaagctgctcttggagcttaatcgtgtattacgccctggaggttatttgtatggtctgcnc

SEQ ID NO: 290528 - DNA, 278 bp, Glycine max
  unsure (1)..(278): unsure at all n locations
gagtttgttgtgagctataagctagtttatcgtgaggagaatatgaagttgtttgtnttctttgttgctgcagtagttttggtagcatggccatgccatggcgcaggctaccaaaggttccctctccgaatgaaaactggctatggtgagcgttcttcggaggtaaaatgcgcaagttttaggcttgctgtggaagcacacaacatccgagcctttaaaaccattcctgaagagtgcgttgaaccnacaaaggactacattaatggcgaacaatttag

SEQ ID NO: 290529 - DNA, 281 bp, Glycine max
  unsure (1)..(281): unsure at all n locations
cttttgtccggttctcagagaagcacaggaagctactaaatgctntcataaggcaaaaccctggtttgcttganaaatctttctcactcatgctaaaggttccaagatttattgattttgataacaagcgtgcccacttccgatcaaaaattaagcatcagcatgaccatcaccatagtcccttgagaatatcagtaagaagggcatatgttctagaagattcttacaaccagcttcgcatgagatcaactcaagatttgaagggaaggttgactgtccac

SEQ ID NO: 290530 - DNA, 276 bp, Glycine max
  unsure (1)..(276): unsure at all n locations
ggcaatccctctccttgtaccacacatgaacctccacgacgcaaagcttgggggctatgatatcccagctganagcaagatcttggtgaatgcatggtggctggccaacaaccctgcacactggaagaagccagaggagttccggcctgagaggttcttcgaggaggagtcgcttgttgaagccaatggcaatgactttaggtaccttccctttggtgttggcagaagaagctgccctggaatcattcttgcattgccaattcttggcatcatttg

SEQ ID NO: 290531 - DNA, 275 bp, Glycine max
  unsure (1)..(275): unsure at all n locations
ttgcgatttgggccaatttagaagattgatactatcaccactgtangtgaaggaattgnactggaacttgccaggtggatttttgagttcaattactcatggggcaaatgaaatancatcatcagttcgggcaagtattaggaaccagagcaaaaagtacanacntggaaatgaaccatctgttgaatctgggaacagtgagngcattggtgangtgtccaccgaaagcnctggtgattctcatcaaatacataatggtcatcatgnngtgggtg

SEQ ID NO: 290532 - DNA, 271 bp, Glycine max
gtgagtacagcaattgctggagcaataataggtgctgcagtgggtggatggatgaacgaccgatttggaagaagaaaatcaatccttgtagctgatgtcctctttatagttgggtcagcagtaatggctgcagcacctgtccctgctgttctcatcataggtcgagtttttgttggccttggtgttggaatggcttcaatggcatctcctctctacatttctgaggcttcccccaccaaagttcggggagcccttgtagctctcaacagtt

SEQ ID NO: 290533 - DNA, 273 bp, Glycine max
  unsure (1)..(273): unsure at all n locations
gatgacaccatcaattttgaggcctttccccacaagctggtgcagtttggagaaattcaggaaaaagttgtattgaaattttcacaagaggaatttcttacagcttggtcaactcaggtgcgtcctgcaacaactctgttggctgatgggtgcccatatttgtatgctatggtgcatgatagttcagtgtctacaataccaggtgattttntcattggtgtcaagttgacaaccataaacnatatgtgtgcatatgggctcaatcctggtatt

SEQ ID NO: 290534 - DNA, 281 bp, Glycine max
  unsure (1)..(281): unsure at all n locations
gcttgagaaatggcacaaganacctttctattcacatctgaatctgtaaacgagggtcaccccgacaagctgtgcgaaccagatctctgatgcagtgctcgatgcgtgccttgaacaggaccctgacagcaaggttgcctgtgagacatgcaccaagaccaacatggtcatggtctttggagngatcacanccaagggccnnacgtagnctatgagaagattgtccgtgacacctgccgcgaaattggattcatctctgatgtgttcggtcnngatgcgcc

SEQ ID NO: 290535 - DNA, 229 bp, Glycine max
  unsure (1)..(229): unsure at all n locations
tggaaatggagggacacttctaagccaaacccaaatacaattgttggtngccatggttgctggtcctgacaagcatgatggcttccatgatgttcgtacaaactacaattacacagagccaactcttgctggaaatgctggtttagttgcagcactagtggcattgtcaggcgacaaaagcacatcgattgacaaaaataccattttctctgctgttcccccaatgttt

SEQ ID NO: 290536 - DNA, 271 bp, Glycine max
gcagctgatctccggtgtccatttctgtcataccatgcaaatatgccacagagatttgaagctagaaaatacccttctagatggaagtcctgctcctcggttgaaaatttgtgacttcggttattccaagtcatctttgctgcattcgcgaccgaaatcaactgttggaacaccagcttatatagcaccggaagttctttctaggcgagagtatgatggaaagttggctgatgtatggtcatgtgcggtgactctttatgtcatgctggtt

SEQ ID NO: 290537 - DNA, 269 bp, Glycine max
  unsure (1)..(269): unsure at all n locations
gcaanagatggtattgattggnttgagtacaagaggcaattgnngaaggcagagcaatggaatgtcgaagtctactaattaatatcacttgcacttgctcagatatcatgccctactttgtgcagcagcaaatctattttgctgtcatgcgctgtgtagatagattacggccctgtaatttttctatgatgggatttnttaccttcctatgaacgtacaagcttcattgcaacagccttgcatgaaataattttgaggatcnatcaata

SEQ ID NO: 290538 - DNA, 271 bp, Glycine max
caacattttacactcttttcttcttctcgttgttgcttcggtgttgaatcatggatcagaaagtcgatttcagtgctccgcattccatgggaaccactatcatcggcgttacttacaacggcggtgtcgttctcggagccgactctcgaaccagcactggagtgtatgttgccaaccgagcatcggacaaaatcacacagctcactgataatgtttacgtgtgtcgctctggatcggctgctgattctcagattgtctctgactatgtgcg

SEQ ID NO: 290539 - DNA, 282 bp, Glycine max
ccggatttcattgtgatatcatttgtgtcactggatggactgccaccccaatgcaggatgttcaggttacaattgattggtttatttcctctcaggaatgtgttcccagaacctattgtgttttaaatccacaaaatccttttgtgttaaataggtggatgggaaaactgactttcccccagggcacttcccgaagtgttaagagaatgcctctttctatagggggaggagctggtgcaaagaatgctattctcatgaacatgccaaatgctgttctttcaa

SEQ ID NO: 290540 - DNA, 272 bp, Glycine max
gatttttgctttgctttagtgaggatatatttgaagatggaaatcacttgtatcggtttttggatgatgacccaactgtggtatcacaatgtcacaacattactaggggcataattaccttgaagctcaagcctttagcagaaattgcatcaagattgaggtttctgtctcgtgctatgtttgaagcctatgtttatgaagatggacgtcgtattgattatacaagtatacatggaagtgaggagttcgcaaggtatctgagaatagttgaa

SEQ ID NO: 290541 - DNA, 271 bp, Glycine max
gtcctgttagcgaagtctacgtgccttcgagtgaaggagttgaagcttacatttggttactggcaaaggcttatgttgttgtgaatgatgcatgctaccatcaaatcattagccattggctaaacactcatgcggttgttgagccattcgtcatagcgacaaacaggcatctgagcgtggttcaccctatttacaaacttctgtttcctcactatcgtgacaccatgaacattaattcacttgcccgcaaatccttggtcaatgcagacgg

SEQ ID NO: 290542 - DNA, 269 bp, Glycine max
  unsure (1)..(269): unsure at all n locations
cttgatagtggatcaccaactagccaatgacaagaggaccaagccttatgtgaagaaaatggccaagagccaagactatttcttcaaggagttctctagagccattaccttgctctcagagaacaaccctctcactggcacaaagggtgaggtcagaaagcagtgcaatgttgccaacaagcaccatgatcaggacccttgaattttcctccccttgtctatgatcgaggaagaaaatctgtaatatattatgcanaanataattaagg

SEQ ID NO: 290543 - DNA, 269 bp, Glycine max
  unsure (1)..(269): unsure at all n locations
cttcaattcattctagttctggattccgactagccgcgttgactcggttccgtttttcattctcgcggatgctaatatnaaggaatagcttaagggcacattacaatgaaggcattgattctggttgggggatttggaacaaggctgaggccactgacactcagtttccctaagcctcttgttgattttgctaacaagcctatgattttgcatcagatagaagcccttaaggccattggagtgactgangtagtgctagccatcantta

SEQ ID NO: 290544 - DNA, 269 bp, Glycine max
  unsure (1)..(269): unsure at all n locations
gcagagctcaaaaccctagagaggaggaagagagagcgtgcaagttccggccaccaccgaccatgacattcaancgcaggaatggaggtcgcaacaaacacggccgcggccacgtcaaattcatccggtgctccaactgtggcaaatgctgtcccaaggacaaggccatcaagaggtttctggtgaggaacattgttgaacaggctgcagtcagagatgtgcaggaagcttgtgtctatgaacaatatactcttccgaaactctatgtg

SEQ ID NO: 290545 - DNA, 269 bp, Glycine max
ctttgcaacacaacaaaaaaagacaacacagagagaagcgtcttaataaacgctcttctctgaaaaacctgatttcttctcttcttctcttctctttcgtttcgatcttcgatctctgaaaatgagagagtgcatttcaatccacatcggtcaggccggtattcaggtcggaaacgcctgctgggagctctactgcctcgaacacggcattcagcctgatgggcagatgccaagtgataagactgttggtggaggtgatgatgctttca

SEQ ID NO: 290546 - DNA, 265 bp, Glycine max
  unsure (1)..(265): unsure at all n locations
gtgtatctctgtctaccttaccttacctcacctcacaagggacaaagataaaaaatgaagatcattgagaaaattcacgcagcctcggctgatccaaacagggtggtgttctcatttganttcttcccgcccaagactgaggatggggtggacaatctgtttganaggatggaccgcatggtggtgcacaacccctcgttttgcgacatcacttggggtgctggagggacaacggctgatcttacattggaaattgccaacaaga

SEQ ID NO: 290547 - DNA, 278 bp, Glycine max
  unsure (1)..(278): unsure at all n locations
ggttcttctgcttaccaggcagaaggagcagcaagtgtagatgggagaggaccaagcatatgggacacctacactagacagcatactgaanagatttgggatcatagcaccggtgacatgggagctgatttttatcatcgatacaagggtgacataaaaatagcgaaagaaattgggctggactctttcagattctctatctcatggtcaagaatattcccaaagggcaagggagcagttaacccccttggggttaaattctacaacaatgtcatcga

SEQ ID NO: 290548 - DNA, 274 bp, Glycine max
  unsure (1)..(274): unsure at all n locations
ctcaaagacatggaaggaagtttgccttgcttgtnttgatgcagaangagtttcgtttgggcccaaatttgtggantaaacattattattcaggtggatgacttggaagaagtcagtgaatattaccaaaacanaggttgcttcaatgagctcatatctctcatggagagtggtttagggttagaacgggcacatatgggcatctttactgagttaggagttctgtacgctagataccgccctgagaagcttatggagcatatcnaactattcc

SEQ ID NO: 290549 - DNA, 270 bp, Glycine max
  unsure (1)..(270): unsure at all n locations
aacaagctttcttttatgctagtgaacgcgaagtccatcacaacgacatatttatattgcggcatagataacaccgtactctctaatatcccatactatgaaaaacatggatatggggtggaggaatttaatgaaaccttatatgatgaatgggttaacaagggcgacgcaccggcattgccaganactcttaaaaattacaacaagctgttgtctcttggcttcaagnttgtattcttgtcaggaagatatcttgacaaaatggccgta

SEQ ID NO: 290550 - DNA, 200 bp, Glycine max
  unsure (1)..(200): unsure at all n locations
ccccgnangccgaaanaatggccggaaaaggnnagggtcctgntatcggaatcgatctcggaaccacctactcttgtgtcggtgtgtggcaacatgaccgntttgaaatcatcgccaacgaccaagggaacaaaacgacgcngtnttacgtnggcttcactgataccgggngtctcatcggnnatgnggctaaaaaccat

SEQ ID NO: 290551 - DNA, 265 bp, Glycine max
gtgagggtgttcctcgggttcttgcttgctttagcaataatcttctccgaggagagcccctcaagcttgtggacggtggccagtcccagagaaccttcatttacattaaagatgctattgaagctgtcttgttgatgattgaaaaccctgccagggccaatggccacatatttaatgtgggcaaccctaacaatgaggtcactgttaggcagcttgctgaaataatgattcaggtttactcaaaggtaagtggagaacaaactgc

SEQ ID NO: 290552 - DNA, 255 bp, Glycine max
  unsure (1)..(255): unsure at all n locations
ctgcaatgcatgtgggatctatagaaattatcattgatagtntcgcaagtccctgactgtaacatagttggtgcaatgcttttggttgatacttatcataccaatcctgaaaatgcagttcgtagtatttttnttgcgcctttcagaggcggaaggcccattcgggtggttacatttccgaataccattgtgcagattgaaccagacatgaattcaaggtttcagcttttgagtaccactaccaatggtgatttt

SEQ ID NO: 290553 - DNA, 266 bp, Glycine max
  unsure (1)..(266): unsure at all n locations
atttgangcctttccccacaagctggtgcntnttggagaaattcaggaaaaagttgtattgaaattttcacaagaggaatttcttacagcttggtcaactcaggtgcgtcctgcaacaactctgttggctgatgggtgcccatatttgtatgctatggtgcatgatagttcagtgtctacaataccaggtgattttntcattggtgtcaagttgacaaccataaacaatatgtgtgcatatgggctcaatcctggtatttcaggtt

SEQ ID NO: 290554 - DNA, 269 bp, Glycine max
ctcaatcctggtatttcaggttctcgtcttttgggcaccattcctcagtccatttcacagcaaactgtttggaatcaaatggcaacagtgagaacaccattgaattttgattctagcaagcagagcttttgtcaattttctattgaccttctcggtggaggaattttagtggacaaaactggagattggatcacacttatacaaaattctccaattagtaacttgttgagagttgctgcttggaagaaaggctgtttaatggtcaagat

SEQ ID NO: 290555 - DNA, 273 bp, Glycine max
  unsure (1)..(273): unsure at all n locations
gagataactagaaacagtgtgatgaaaatgaaggtccttgttttcttcgttgctacaattttngtagcatggcaatgccatgcgtacgatatgttccctctccgaatgaacactggctatggtgcccgtactccggaggtgaaatgcgcaagttggaggcttgctgtggaagcacacaacatctttggctttgagaccattcctgaagagtgcgttgaagcaacaaaggaatacatccatggcgaacaatatagatcagactccaaaacagtt

SEQ ID NO: 290556 - DNA, 260 bp, Glycine max
  unsure (1)..(260): unsure at all n locations
ctgtcattctcaaggcataatgcatagagatgtcaagcctcataatgttatgatagatcatgaattacggaaacttcgcttgatagattggggtcttgctgaattttatcatcctggaaaggaatacaatgttcgtgtggcttcaagatactttaagggccctgaacttctagttgatttacaagactatgactactcattagacatgtggagtctggctgcatgtttgctggaatgatattcgcaaggaacctttttnt

SEQ ID NO: 290557 - DNA, 266 bp, Glycine max
  unsure (1)..(266): unsure at all n locations
ggatcgagataactagaaacagtgtgatgaaaatgaaggtccttgttttcttcgttgctacaattttggtagcatggcaatgccatgcgtacgatatgttccctctccgaatgaacactggctatggtgcccgtactccggaggtgaaatgcgcaagttggaggcttgctgtggaagcacacaacatnctttggctttgagaccattcctgaagagtgcgttgaagcaacaaaggaatacatccatggcgaacaatatagatcaga

SEQ ID NO: 290558 - DNA, 265 bp, Glycine max
gccagtggctgctcgtgaagcttcaatttatacaggaatcacattagctgagtatttcagagatatgggttataatgtcagtatgatggcagattctacatctagatgggcagaagcattgcgtgaaatctctggacgactggcagaaatgcctgcagatagtggatatcctgcataccttgctgcacgtttagcctcgttctatgaacgtgctgggaaggtaaaatgtcttggaggccctgaacgtacaggtagcgtaactatt

SEQ ID NO: 290559 - DNA, 263 bp, Glycine max
  unsure (1)..(263): unsure at all n locations
gaagaagcagaacagcttcatccgcgactcgctggtgagcctagcgaaatcgcgaggnattgagctcgtgcgcgtggactccgacaagcccctcgcggatcagggccccntcgactgcgtcctccacaagctctacggcgacgactggaagcgccagtnccaggaattccacaccctctacccaancgccgtcatcctcgacgcccccgaggcgatcgagcgcctccacaaccgaatctcgatgctgcaggtcgtgtcggagt

SEQ ID NO: 290560 - DNA, 264 bp, Glycine max
ccttagccgaggtcacgaggagcactagctagtttcacaatttccaaatggctaggggattgaagaagcatctcaagaggctcaatgctcctaagcattggatgcttgacaaactgggtggtgcatttgcgcccaaaccctcatctggaccacacaaatctagggagtgccttcccctcatactcatcctacgaaaccggctaaagtatgctctgacttaccgtgaagtcatcgctattctgatgcagagacatgttcttgttg

SEQ ID NO: 290561 - DNA, 267 bp, Glycine max
aacactcataacacaaagcacaaagcaaagctcatccttgagttaaaaaatggcagcagcttcttccatggctctctcatccccatccttggctggcaaggccgtgaagctgggcccatcagccccagaagtgggaagggtgagcatgaggaagaccgtcaccaagcaggtctcctcaggaagcccatggtacggcccagaccgagtcaagtacttgggcccattctctggcgagcccccgtcctacctaaccggtgagttcccagg

SEQ ID NO: 290562 - DNA, 266 bp, Glycine max
  unsure (1)..(266): unsure at all n locations
gggaagccagatagctttagtggggagtttctagtcccatcctaccgtggaagctctttcttggaccccaagggaagaggtgcttccacaggttatgacaatgcagttgctttgcctgctggtggaagaggagatgaggaagaacttgccaaggaaaacaataaaagtgcctcatcatccaagggcaaaatcaccttgantgtcaccaagaccaagcctgagacgggtgaggttatcggtgtgttcgagagtgttcaaccatctga

SEQ ID NO: 290563 - DNA, 266 bp, Glycine max
  unsure (1)..(266): unsure at all n locations
ctctgcttcaacttgctccctcagaagcgaagaagaagccacagagaactagtctcctacttcttcacccgcaaganaaaaatggcatctcacatcgttggatacccccgtatgggtcccaaganagagctcaacttcgctctcgagtctttctgggatggcaagagcagcgccgaggatttgcagaaggtgtcttctgatctcagggcatccatctggaagcagatggctgatgctgggatcaagtacatccccagcaacacttt

SEQ ID NO: 290564 - DNA, 263 bp, Glycine max
ccatgttgcatcctggctatggttttcttgcggagaatgcagtgtttgttgaaatgtgcagagaacatggaatcaactttattgggcctaaccctgacagtattcgggttatgggtgacaaagcaactgccagagagacaatgaagaaagcaggtgttcccaccgttccgggaagtgatggccttttacagagcacagaagaagctatcagactggcaaatgagattggtttccctgtgatgatcaaggcaacagctggtggt

SEQ ID NO: 290565 - DNA, 263 bp, Glycine max
  unsure (1)..(263): unsure at all n locations
agcgaagagaatggntcccaagggtttaatctttttggctgtgttatgcttctcagcactgttcactgagtcgttgtcttgcggaggataatggacttgttatgaacttctacaaggaatcatgccctcaggctgaagacatcatcaaagaacaagtcaagcttctctacaagcgccacaagaacactgctttctcctggctcagaaacatcttccatgactgtgctgttcagagttgtgatgcttcactgttgctggactcc

SEQ ID NO: 290566 - DNA, 259 bp, Glycine max
aagttttttcctttctctgctctttgccttctctgacacatttggtgccttgtagagcgtgttttggcaggaaggtggtatggcgaaggacgttgaggttgctgagcgtggctccttctctgggaaggactaccaggaccctccaccagcaccactcattgatgctgaggagctcacaaagtggtccttttacagggctctcattgctgaattcattgccactttgctcttcctctacatactgtgctcacagtcatag

SEQ ID NO: 290567 - DNA, 260 bp, Glycine max
  unsure (1)..(260): unsure at all n locations
tacccagttgccaagcatgcttctattgtgaganancttagaccgggggattttgatcctaaggagaagttctggacgaggtttccgccggaagggtctaagtttacaccccagcaccattcagtggacttcaggtggaaagactactgtcccatggtgttcagacatctaagggaattatttgccatagatcctgcggattacatgcttgctatttgtggaagtgacacacttagggagatgtcttccccgggcaaaag

SEQ ID NO: 290568 - DNA, 263 bp, Glycine max; identical to SEQ ID NO: 160766

SEQ ID NO: 290569 - DNA, 264 bp, Glycine max
ggactatatggaaagaattcctcttgccacatctgagggttttcctcatgtgctttcacgcaaaaatggtgaaaaaggcaaaaggagatttgtttctggggatggtgaagagatgacattgattccgggaaccagtgttgaagaggcctacaacaagctaatagttgaacttgagagaagtgttcctacattggttggcattgaatgtcccaaggatgagaaacttcctcgtcgcaaaatttttgacaaacctaagacgcgctg

SEQ ID NO: 290570 - DNA, 272 bp, Glycine max
  unsure (1)..(272): unsure at all n locations
agattttatccaattgaaattttaaaaatgactgggataaacttaaganttcaattattgaaattgaataagtaaacaatttaattggattggtcgaatggtatcnaaaaaatggagtactaactcccatttcntatttattattganttaaccgatcaacttgctttgttatcgaacatttctttttgatttcaaaaattttccggaaaanatttgaatctatngntatatgcgaatcaatcctactacttctggtcctgaggtttctgcg

SEQ ID NO: 290571 - DNA, 273 bp, Glycine max
  unsure (1)..(273): unsure at all n locations
tatgaagtttacaatggtttctcagaaaatatcatctcatttgttccccccacagcctatacttttggagcataagattaagctctctggaaacagtcctgctggtactgcttgttatgatgtgatggttgatgttccttttcctattcagagggagttgtctgctttattggctaacgtggaaaagaacaaagatattgagacatgtgatgaagcaatatgtggaatcattancaaaaatccacgagcaccgtaggagacgggcattctttc

SEQ ID NO: 290572 - DNA, 275 bp, Glycine max
  unsure (1)..(275): unsure at all n locations
aaagaaggatgttccttgtgagactgaccaacttactcatgtttacacatttatcctcccgtccggatgcaacctacagcatcntgattgataatgtggagaagcaaactggtagtctctactctgattgggatcttctccctccnaagacaatcaaggatcctgaggctaaaaaaccagaagattgggatgacagcgaatatattcctgatcctgaggataagaaaccagaggggtatgatgacatcccaaaagagctcccagaccccgaagcc

SEQ ID NO: 290573 - DNA, 273 bp, Glycine max
gaatcctgcttgcacaaaagcaatggctatgtcatttaatccaaacccgtgttctgatgcatggagtttggaatttctgaagcgtaccggatttcattgtgatatcatttgtgtcactggatggactgccaccccaatgcaggatgttcaggttacaattgattggtttatttcctctcaggaatgtgttcccagaacctattgtgttttaaatccacaaaatccttttgtgttaaataggtggatgggaaaactgactttcccccagggcac

SEQ ID NO: 290574 - DNA, 274 bp, Glycine max
atagaggattacccaatagggtcaattcgcgcttgagagcttcaactggggctcagatgagctttagactagggaaagttccagaaatggtgggaaaaggggcttcaacccaacatgaaggaggtgacttcggcacaagactttgtggattcactgttaagcgcaggggacaagttggtggtggttgatttcttctctcccggttgtggtggctgcaaagcccttcatcctaagatatgtcaatttgcagagatgaatcctgatgttcagttcc

SEQ ID NO: 290575 - DNA, 272 bp, Glycine max
gccacctccaacttctctattgttctctccgtctccctagccttctttttggtgctacttaccaaggcacactcgaccgataccgtttctttcaccttcaacaagttcaacccagtccaaccaaacattatgctccaaaaagatgctagtatttcatcctctggggtgttacaactcaccaaagttggcagcaacggcgtgcccacctcgggatctctcggtcgtgccctttacgctgccccaatccagatttgggacagcgaaaccggcaa

SEQ ID NO: 290576 - DNA, 272 bp, Glycine max
gtcaagcttctctacaagcgccacaagaacactgctttctcctggctcaggaacatcttccatgactgtgctgttcagagttgtgatgcttcactgttgctggactccacaagaaggagcttgtctgagaaggaaacagatagaagctttgggttgagaaatttcaggtacattgagaccatcaaagaagctttggaaagagaatgccctggagttgtttcatgtgctgatatcctcgttctctctgccagagatggcattgtttcgctagg

SEQ ID NO: 290577 - DNA, 274 bp, Glycine max
  unsure (1)..(274): unsure at all n locations
cacctttctcctaaaacatctccagtgggttcttcttcttctattacaacaacgtcgncccaagaccatgaccatggccatgggccacgatcctgctcctgttcacggtcttcgcggtttcatcggccctagacatgtcgataatctcgtacgacaacgcccacgccgccacgtcgcgcagganangtgagctgatgtccatgtacgagcagtggctagtaaagcacggcaaggtgtacaacgcgctcggagagaaggagaagaggttccagat

SEQ ID NO: 290578 - DNA, 274 bp, Glycine max
  unsure (1)..(274): unsure at all n locations
aaaactttcgaaagattttatccaattgaaattttaaaaatgactgggataaacttaagaatttcaattattgaaattgaataagtaaacaatttaattggattggtcgaatggtatcaaaaaaatggagtactaactcccatttcttatttattattgaattaaccgatcaacttgctttgtnatcnnacatttctttttgatttcaaaaattttccggaananatttgaatctatttttatatgcgaatcaatcctactacttctggtcctg

SEQ ID NO: 290579 - DNA, 270 bp, Glycine max
cagttcacaaccaccatatactgagtatgtctccacacggtggtatcgtgctcctgaagtcctgcttcagtcccatctatatagctctaaagttgatatgtgggcaatgggtgctataatggctgagttgttcactctgcgtcctctattccctggttccagtgaagcagatgagatctacaaaatatgcagtgtgataggtagtccaaccactgaatcttgggcagatggactcaaacttgccagggatatcaactatcagtttccaca

SEQ ID NO: 290580 - DNA, 270 bp, Glycine max
  unsure (1)..(270): unsure at all n locations
ctcactttctcgctccccaaacgcccctctctctcctccaatggccgaccagctcaccgacgaccagntcgccgagttcaaggaggccttcagcctcttcgacaaggacggcgatggttgcattactaccaaggaacttgggactgttatgaggtcacttggtcaaaacccaactgaggcagaactgcaggatatgataaacgaggttgatgctgatggcaacggaaccatcgatttcccagagttcctcaacctgatggctcgcaagat

SEQ ID NO: 290581 - DNA, 269 bp, Glycine max
gacattgttgcacaaataatatctgctagcattgccggcgatttagttcttgctacagcatattcacatgagctgccacgatatggtcttgaagtaggacttacaaattatgcagcagcttattgcactggtctcctgttggcccgaagagtcctcaaaacacttgaaatggatgaggagtatgaaggaaatgttgaggctactggagaggattattcagtggaacctgccgagagcaggaggccattccgtgcactccttgatgttgg

SEQ ID NO: 290582 - DNA, 270 bp, Glycine max
  unsure (1)..(270): unsure at all n locations
ttcactttctcgggaaaatcacagcgacgctcaggaaaaactctaaactgtganaaaaccactgcgatcaatgggcaacgatcaangccgtgaaagctcgccagatcttcgacagccgtggaaatccaaccgtcgaagttgacgttattctcagcgatggaagcttccacagagccgccgtgcctagcggtgcttcaacaggtgtttatgaggctttggaattaagggatggaggctcagactacctcgggaaaggtgttctcaaggctg

SEQ ID NO: 290583 - DNA, 268 bp, Glycine max
  unsure (1)..(268): unsure at all n locations
ctttcgaaagantttntccaattgaaattttaaaaatgactgggatacacttaaganttcaattattganattgantaagtanncaatttaattggattggtcgantggtatcacaaaaatggagtactaactcccatttcttatttattattgaattaaccgatcaacttgctttgttatcgaacatttctntttgatttcaaaaattntccggaaaanatttgaatctattttctatatgcgantcaatcctactacttctggnct

SEQ ID NO: 290584 - DNA, 269 bp, Glycine max
gacaaaactagtgcaactttgcaatttagaaagttagcagattgtgattttctcaagagaaactttaagcagatgtctaatgttttgtgggtggctcctgaggacaaggcgagtttgtggtcacaacttcattatgtttcgtgtaataatctggaaatgcaagaagcttatcttgtcaatctcgtaaatgtgttacgagaattgtatttgcacagtccagaggaagctcgccaattgagaaggaaagctctttctcgtattgaatggct

SEQ ID NO: 290585 - DNA, 270 bp, Glycine max
  unsure (1)..(270): unsure at all n locations
cgtcaccatgactttcaagcgcaggaatggaggtngcaacaaacacggcngngggcacgtcaagttcattcgatgctncnaactgnantaaatgctgccctaagganaaggctatnaagaggtttctggtgaggaacattgttgaacaggctgcagtnagagatgtgcaggaggcncgtgtctacgaacaatacacgcttccgaagctgtatgtgaagatgcagtattgtgtttcctgtgctatccactctccatgttgtgagggttcga

SEQ ID NO: 290586 - DNA, 272 bp, Glycine max
  unsure (1)..(272): unsure at all n locations
ggagcttctaaagcctctccctgcaggtgttgaaatcgatgaactccctaagcaaattgatgatacacagtacccaaancacattcttctataaagaagaccttcatccaggcaaaacaatgaaagtncaattcaccaagcgnccncatgcacaaccttatggtgtatatacatggttaacggatattaaagacacctctaaagaaggatatagttttgaagagatatgcatcaagaaagaagcgtttgagggagaagagaagttttgtgcc

SEQ ID NO: 290587 - DNA, 269 bp, Glycine max
  unsure (1)..(269): unsure at all n locations
aggnaattctgtcttctagtgcaagtnatttcagaactgcaatggtgagtaaaaatagcaagcctcaagctactgncaatgcatgtgggagctatagaaattatcattgatagtttcgcaagtcctgactgtaacatagttggtgcaatgcttttggttgatacttatcataccaatcctgaaaatgcagttcgtagtatttttgttgcgcctttcagaggcggaaggcccattcgggtggttacatttccgaataccattgtgcagat

SEQ ID NO: 290588 - DNA, 268 bp, Glycine max
  unsure (1)..(268): unsure at all n locations
ctcagaagaaaagaaaagcatccaaaaatggttctcacatccactgccacacacccagatgaanaagaccagagcctaaactatacttttgcttccagatatgtgcgtgaacctattccaaagttcaagatgccagagaaatccataccaaaagatgccgcttatcagataataaacgatgagttgatggnggatggtgcaccaaggctcaacttggcctcgtttgtgaccacttggatggagcctgagtgtgacaagctcataatgg

SEQ ID NO: 290589 - DNA, 266 bp, Glycine max
  unsure (1)..(266): unsure at all n locations
gctgaagccgccaccatatccactgaatggtttggagccggtgatgagccagcagacacttgagtttcactgggggaagctgttccaccaccacaacaaatccctgtacctccctctggaattgatactgtccaaccatctggctgggattaaactagtgttttttgatgctatgattttgccccgtccctcaatttnagtttacctgtctttctttgaagtaaaatatggattttnttttgtagcaaaggaattgtttttctatt

SEQ ID NO: 290590 - DNA, 268 bp, Glycine max
caagatcttcctaatgcaatgaatgctgctgagattactgacaagttgggtctccactctctgagacagcgtcactggtacattcagagcacctgtgcaacctctggggagggcctttacgaaggtctggactggctttccaacaacattgccaataaggcttaatgcctttgggagacgggagtcttgcggattggtatttctggatgcagggttgaacattatctagcttttatttcttggtcctcttccaagacaactcgaattt

SEQ ID NO: 290591 - DNA, 254 bp, Glycine max
  unsure (1)..(254): unsure at all n locations
ccggtgcagctcttattagagangttgctagtaagactaacgactctggccggnnatgngacgaccacggcttcggttcttgctcgcnaganaattaagctggggcttcttagtgtgactcctggggctaatcctgtntctcttaaganacggattgataaaactgtgcagggtttggtggaggagttgnagaagaaggccaggcctgtnaaangtggagatgatatcananctnnngcttccattctgctggg

SEQ ID NO: 290592 - DNA, 264 bp, Glycine max
  unsure (1)..(264): unsure at all n locations
atcgagataactagaaacagtgtgatgaaaatgaaggtccttgttttcttcgttgctacaattttggtagcatggcaatgccatgcgtacgatatgttccctctccgaatgaacactggctatggtgcccgtactccggaggtgaaatgcgcaagttggaggcttgctgtggaagcacacaacatctntggctttgagaccattcctgnagagtgcgttgaagcaacaaaggaatacatccatggcgaacaatatagatcagat

SEQ ID NO: 290593 - DNA, 264 bp, Glycine max
  unsure (1)..(264): unsure at all n locations
gcttcatccctaacgcgtgcatagcagagtcagagacagagacgcagccatgnggcggagacctgcgaggtgttataggcaaattaagaacaagccataccccaagtcacgtttctgccgtggtgttcctgatcccaagatcaggatttatgatgttggtatgaagaagaagggtgttgatgagtttcctttctgtgtccatctggttagttgggagaaggaaaatgtttcaagtgaggccctggaagctgctcgcattgcttg

SEQ ID NO: 290594 - DNA, 264 bp, Glycine max
  unsure (1)..(264): unsure at all n locations
tggatacgcaccggtgcttgattgccacacttctcacattgctgtcaagttttctgaaatcttgaccaagattgacaggcgatctggtaaggagcttgagaaggagcccaaatttttgaagaatggtgatgcaggtatggttaagatgattccaaccaagcccatggtggttgaaactttctctgagtatcctccccttggtcgttttgctgtgagggacatgcgtcaaactgtggctgtcggagtcatcangagtgttgagaa

SEQ ID NO: 290595 - DNA, 264 bp, Glycine max
  unsure (1)..(264): unsure at all n locations
tgttgatcgagataactagaaacagtgtgatgaaaatgaaggtccttgttttcttcgttgctacaattttcgtagcatgggcaatgccatgcgtacgatatgttccctctccgaatgaacactggctatggtgcccgtactccggaggtgaaatgcgcaagttggaggcttgctgtggaagcacacaacatctttggcttgagaccattcctgaagagtgcgttgnagcaacaaaggaatacatccatggcgaacaatatagat

SEQ ID NO: 290596 - DNA, 264 bp, Glycine max
  unsure (1)..(264): unsure at all n locations
tggtggtcgcggtcgtcgtggaggttttaccaacggtgaagttggtgaagaaggacgcccaagaagagcatttgaacaccacagtgggactggacgangaaatgaattcaaacgggatggctctggacgtggganctggggtacacagaatgatgacattgctgtggttactgaggaagtggtgtatgaaactgaaaagaattttgctgatgagaagcctgcaggcgaggaagatgcacctgaaggaaacaaggactgtcctgc

SEQ ID NO: 290597 - DNA, 246 bp, Glycine max
catcgtgatggagctctacgccgacgtcactccccgcaccgccacgaacttccagcgcgctttgcaccggcgagaagggcgtagggcggagcggcaagcccctccactacaagggctcgtccttccaccgcgtgatcccgagtttcatgtgtcagggtggcgacttcaccgccggaaacggaaccggcggcgagtcgatttatggcgccaagttcgccgacgagaacttcgtgaagaagcacaccg

SEQ ID NO: 290598 - DNA, 264 bp, Glycine max
  unsure (1)..(264): unsure at all n locations
tttcagatatgtcgacatctgataagccagaagtggtggaaaggggtagcaaggatgaaaaacacaaggaagatgatcaagaggangggaagggtggattcattgagaaggtgaaggatttcattcatgacattggtgagaagattgaggaagctattgggtttgggaagccaactgctgacgttactgcgattcacattccatcgattaatcttcacnaggcagatcttgttgttgatgtgcncatcaagaanccgaatccgg

SEQ ID NO: 290599 - DNA, 265 bp, Glycine max
  unsure (1)..(265): unsure at all n locations
gtttttgtgatctgcaagctacgatgggtaagggaacggggagtttcggtaagagaaggaacaagacccacaccctctgtgtgaggtgtggccgccgcagtttccacctccagaagagtcgttgcgccgcgtgcgctttccccgctgcgcgcaccaggaaatataactggagcgtgaaggccattaggagaaagaccaccggaactggaaggatgaggnacttgcgtaacgtgccccgtagatttaagagtggcttcagagacgg

SEQ ID NO: 290600 - DNA, 279 bp, Glycine max
ctggtgctgaagttaacctggattcccaggtttattggtggcatgacaaatacagacctaggaagccgaagtatttcaaccgtgttcacactggatatgagtggaacaaatataatcagactcactatgatcatgacaacccacctccaaagattgtccaaggttacaaatttaatattttctatcctgatcttgtagacaagacaaaagctccaacctacaccattgagaaggatggcagcaacggggagacttgcattataagattccatgctgggc

SEQ ID NO: 290601 - DNA, 278 bp, Glycine max
atgttattaagaaggatccaaagaatctccaaatgcttcaagatatgtataatcaatggcctttcttcagggtcagccttgacttggttgagatggtgttcgccaagggagaccctgggattgcggctctttatgacaaactcctagtgtcagaggaactgtggccatttggcgagcgattaaggtctatgtttgaagaaaccaagagccttctcctccaggttgctggacacaaagatctccttgaaggagacccctacttgaagcaaagacttcga

SEQ ID NO: 290602 - DNA, 278 bp, Glycine max
  unsure (1)..(278): unsure at all n locations
atcgagataactagaaacagtgtgatgaaaatgaaggtccttgttttcttcgttgctacaantttggtagcatggcaatgccatgcgtaacgatatgttccctctccgaatgaacactggctatggtgcccgtactccggaggtgaaatgcgcaagttggaggcttgctgtggaagcacacaacnctctttggctttgagaccattcctgaagantgcgttgaagcaacaaaggaatacatccatggcgaacaatatagntcancccccaaancnntc

SEQ ID NO: 290603 - DNA, 277 bp, Glycine max
ccctgtgctatgaatagttcttttagggggcgcgccagttctgatatttacaccatctgctctcaagactgtgaattatggaatcctgcttgcacaaaagcaatggctatgtcatttaatccaaacccgtgttctgatgcatggagtttggaatttctgaagcgtaccggatttcattgtgatatcatttgtgtcactggatggactgccaccccaatgcaggatgttcaggttacaattgattggtttatttcctctcaggaatgtgttcccagac

SEQ ID NO: 290604 - DNA, 277 bp, Glycine max
caaagtgtttggcagaacctcggagagcacagtatggaggaggcattatagtaaatccaggatttgatcacaacatagagggttggacagtatttggaaaaggagcaatcaaggagcgaatatcgaatggaggcaatagattcattgttgctcacaacagaacacatccattggatagtttctctcagaaggtccaacttaagaaaggaatgctatacaccttttctgcttggcttcaggttagtgaaggaagtgacactgtgtcagttatgtttaa

SEQ ID NO: 290605 - DNA, 278 bp, Glycine max
  unsure (1)..(278): unsure at all n locations
ggaggtttgctgggtttgataaggagaagaaggagcttgatgctggtcttattaggactacaactggccaaccgtgtctttggtgcccttaagggagcttcnggatgggggtttggatattcctcatagtgacaagaggtttgctgggtttgataaggagaagaaggagcttgatgctgaggtgcatcgcaaatatgtttttggtggacatgttgctgcctatatgaagatcttggcggaagatgaacctgagaaatatcagtcacacttcagtgaat

SEQ ID NO: 290606 - DNA, 274 bp, Glycine max
  unsure (1)..(274): unsure at all n locations
aaatttctcgattcagcttaacttcaattaccgggttgaataacaatgagtaccagataacaagaggaaaggaactcaatcgcattgctggagtggacaagacttgcaattttgtcaaggctgacttcatgaaaatgccattaccagacaacagttttgatgcagtgtatgcgattgaagccacttgccatgcaccagatgcttatggatgctataaggggttttaagggtgtaaaccngggccatttttccccctaaganacggggcangccc

SEQ ID NO: 290607 - DNA, 277 bp, Glycine max
atttgttgttgtgaacaagcatcttcttcatgacttgactgaaatgggactgtggtctcctacattaaagaataagattatctatgaagatggctcagttcagaaaattccagaaatacctgctgacctgaagaatatatacaaaactgtttgggagattaaacaaaggacattggtagatatggctgctgatcgaggatgctacatagatcagagccaaagcttaaatattcacatggatcaacccaactttggaaaactgacttccttgcatttt

SEQ ID NO: 290608 - DNA, 274 bp, Glycine max
  unsure (1)..(274): unsure at all n locations
tgagtttgttgatcgagataactagaaacagtgtgatgaaaatgaaggtccttgttttcttcgtngctacaattntggtagcntggcaatgccatgngtacgatatgttccctctccgaatgaacactggctatggtgcccgtactccggaggtgaantgcgcaagttggangcttgctgtggaagcacacaacatctttggcttacgagaccattcctgaagagtgcgtcgaagctacaaaggaatacatccatggcgaacaatatagatcag

SEQ ID NO: 290609 - DNA, 276 bp, Glycine max
tatctccatttccatttcctctctctcagtttccaagaatcttaagctatgggaaagtcttacccaaccgtgagcgctgattaccagaaggccgttgagaaggcgaagaagaagctcagaggcttcatcgctgagaagagatgcgctcctctaatgctccgtttggcatggcactctgctggaacttacgacgtgagctcgaagaccggtggtcccttcggaaccataaagcacccctccgaactcgctcacggcgctaacaacggtcttgacatc

SEQ ID NO: 290610 - DNA, 271 bp, Glycine max
  unsure (1)..(271): unsure at all n locations
ttgaatgtggaatcccttctggatttccgctcacagttatttgcaatagcatttttaatgagatgctcattagatatagctatgaaaaattactgcgccaggctaaagctccaagtatgtttttacaatcctcaaaaattttgtttcttgtgtgtgtatggtgatgataacttaattagtgttcangactatgtcaagccttactttagtggntctaaattgaaaagctttctagctggtcataatatcaccattactgatggtattgaca

SEQ ID NO: 290611 - DNA, 277 bp, Glycine max
gaccgtcgtgagacaggttagttttaccctactgatgacagtgtcgcaatagtaattcaacctagtacgagaggaaccgttgattcgcacaattggtcatcgcgcttggttgaaaagccagtggcgcgaactaaccgtgcgttggattatgactgaacgcctctaagtcagaatccgggctagaagcgacgcgtgcgcccgccgtccgtttgccgaccagcagtagggggcctcggccccccaaaggcacgtgccgttggtgaccctcgtgaggcgg

SEQ ID NO: 290612 - DNA, 275 bp, Glycine max
gtggatgctttatcaaacaattatgtgaggtatagaaagtacacaattgaggatttgaagctgcaacaaatttttttaccgagtcacagaagattggagaagggggttatggtccagtttataagtgccatctggaccatacacctgtggcagtgaaggttctacgtcctgacgcagcacaaggaaggtcacagtttcaaagagaggttgaggtattgagttgcattaggcatccaaacatggttctcctcctaggagcctgccctgagtacggc

SEQ ID NO: 290613 - DNA, 276 bp, Glycine max
  unsure (1)..(276): unsure at all n locations
cgagccaaccataggcgaagaacggaagaagccaccatagtcgncgtcgtgagcgaagatccataacaatacagttacaaattgcaacaacacactcctcgttcgatcgtagccagaagaatgggaagtttgggagcgattctgaagaatccagatgacttttaccctctgctgaagctgaaaatggcggcgagaaacgccgagaagcagatcccgccggagccacattgggcgttctgctacacaatgctccacaaggtttctcgaagtttcgcc

SEQ ID NO: 290614 - DNA, 273 bp, Glycine max
  unsure (1)..(273): unsure at all n locations
acatttcagcgatgcatgctggtatagcagaagttgctgctgcaaaggctcgcatgtttgttaacaagccagatggaatggttagaganaagagaggcccatatagtgatccacagcatccttacttttatgaagaagaggatgtgtggatggcacctggcttcattaaccagttttatgaagttcctgattactggaaagtatatgtgcatgangtagatcaagaaagagaaatgtggttaaactctttttataaagctcctcttaggttac

SEQ ID NO: 290615 - DNA, 272 bp, Glycine max
  unsure (1)..(272): unsure at all n locations
ctaataacaaggagcatggtgcccctgaggatgagaatcgtcatgcnggtgatcttgggaatgttaatgtcggtgatgatggtactgtcagcttcactattactgacagccagattcctctcactggaccaaacaacatcataggaagggcggttgttgtccatgctgatcctgatgatcttgggaaaggtggtcatgagcttagcaaaactactggaaatgctggtggcagagtagcttgtggtatcattggtctgcaaggataaactaat

SEQ ID NO: 290616 - DNA, 271 bp, Glycine max
  unsure (1)..(271): unsure at all n locations
ctcaggagtgtataatctgagcgatgtcagatcttgaggctcccttngcgccctaagaggaanaaggtttnggtggactatttcgntcagtttcgatggatccttgttacnttngtggtccttcccatctccttcaccatttatttccttacataccttggggatgtaagatctgagtggaagtcctataagacgcgtcaganggaacatnangagatgttnagaaggttannaaacgtcccanaccgggggatccnancaaaangnnggt

SEQ ID NO: 290617 - DNA, 273 bp, Glycine max
  unsure (1)..(273): unsure at all n locations
gttgtgttgtgttggtaattaagaaaagagcaaaaatnccgctcaagttggcgggagtagccactgtcggttcccttcttctatgtgttgctatntctctcttcacatcggctggggccgaagatccctaccgcttcttcaactggaatattacttanggtgatatttaccctcttggtgttcgccaaacgggaatattgatcaacgggcaattcccaggtccagatattcattctgttaccaacgacaacctcatcatcaatgtcttcaaca

SEQ ID NO: 290618 - DNA, 274 bp, Glycine max
gtaaagaggaagatgttaacgttggagcaaacaagttctcagaaaggcaaccaattggtacagcagctcagggtggtggtgacaaggactacaaggaggcacccccagctcctttgtttgaacctggtgagctcaaatcatggtccttctacagagctggaattgctgagtttgtggcaactttcttgttcctctacattaccatcttaactgtcatgggtgtcaacaggtcaccctccaagtgtgcctctgttggcattcaaggcattgcttg

SEQ ID NO: 290619 - DNA, 275 bp, Glycine max
gaaacagtgtgatgaaaatgaaggtccttgttttcttcgttgctacaattttggtagcatggcaatgccatgcgtacgatatgttccctctccgaatgaacactgggctatggtgcccgtactccggaggtgaaatgcgcaagttggaggcttgctgtggaagcacacaacatctttggctttgagaccattcctgaagagtgcgttgaagcaacaaaggaatacatccatggcgaacaatatagatcagactccaaaacagttaaccaacaagc

SEQ ID NO: 290620 - DNA, 271 bp, Glycine max
  unsure (1)..(271): unsure at all n locations
tgtcttccaaaacaacgagaaaatcgttcagagctaccatcttgatggctactctttctttgtcgttggtatggacgggggacagtggacacctgctagcaggaaccagtacaatctccgagatgcagttgcacgttgcaccanacaggtatacnccttttcatggactgctatttatattgcccttgacaatgtgggaatgtggaacttgaggtctgagttttgggnacgacaataccttgggcaacagttatntttacgcgtttataca

SEQ ID NO: 290621 - DNA, 191 bp, Glycine max
  unsure (1)..(191): unsure at all n locations
ctttgcgcagttccctacctctcctttcaagatgcagatcttcgtcaagaccctcaccggaaagaccatcacccttgaggtggaaagctctgacaccatcgacaacgtcaaggccaagatccaggacaaggaaggaattcccccggatcagcaacgtctcatcttcgcccggaaagnanctcgaggncncc

SEQ ID NO: 290622 - DNA, 272 bp, Glycine max
cgatcagggacaacatgttgaagaagaaataatggacatgattgacagagaagcagatggcagtgacagtcttgagggttttgttctatgtcattcaattgcaggaggaacaggctcaggtatgggctcatacttgttggagactctgaatgaccgctacagcaaaaaactggttcagacatacagtgtgtttcctaaccaaatggagactagtgatgtggtggtccaaccatacaattcacttttaacactcaagagattgacacttaatc

SEQ ID NO: 290623 - DNA, 273 bp, Glycine max
  unsure (1)..(273): unsure at all n locations
ccgaagtgttaagagaatgcctctttctatagggggaggagctggtgcnnagaatgacattctcattaacntgccanatgcngttgctctcaatgcnggagatatttngttggagatcncgtctttgaagtttctaagatgacttctcccnacattaaatgnacagtctctntcttcatagcatttggaaatttggccgatgacaccatcaattttgaggcctttccccacaagctggngcagtntggagaaattcangaaaaagtggnatng

SEQ ID NO: 290624 - DNA, 262 bp, Glycine max
  unsure (1)..(262): unsure at all n locations
actcaacccaaaggccaacagagaaaaaatgacccaaatcatgtttgagaccttcaatgtgcctgccatgtatgtggccatccaagctgtcctctccctatatgcaagtggtcgcacaactggtattgttttggactctggcgatggtgttagtcacactgtgccaatctatgagggtatgcactccctcatgcattcttcgttggatcttgtggccgtgatctgactgacctttgatgaagancncatgggagggggaant

SEQ ID NO: 290625 - DNA, 276 bp, Glycine max
  unsure (1)..(276): unsure at all n locations
gagtaaaccactctctcctactatcttttaaatccttttgtaccctcaactccctaagccnataagaacctccacaatgcccattgtagcaacctctcttctcttctttcttcttaatttatgcctcagaggcacttatgctgactatgaggtggttggcaaggtggtcatgccacattttatggtggaggtgatgcatctggcacaatgggaggggcttgtggatatggaaatttgtacagccaagggtatggcactaacactgcagcactcagc

SEQ ID NO: 290626 - DNA, 271 bp, Glycine max
  unsure (1)..(271): unsure at all n locations
ctcttcttctcttgcggcnagggttttagcgcantttctttctagatttaaggangangggnnanggaaaaggttcacatccagtattgtggtcattggccatgtcgactctgggaaatccactaccactggtcacctgatttacaagttggaggcattgacaagcgtgttattgagaggtttgagaaggaagctgctgagatgaacaagaggtctttcaagtatgcctgggtgctggacaaacttaaggctgagcgtgaaagaggaatca

SEQ ID NO: 290627 - DNA, 271 bp, Glycine max
  unsure (1)..(271): unsure at all n locations
ccaagggaganagggtgtgagaatggagagcaaagaggaagatgtaaggggtnggaannanngaanttcntcagaaaggcaaccaatnggtacagcagctcagggtgacaaggactacanagaaccacccccagcacctttgtttgagctggtgagctaaagtcatggtccttctacagagctgganttgctgagtttgtggccactttctngttcctctacattaccatcttaactgtcatgggtgtcaacaggtcaccctccaagtgtg

SEQ ID NO: 290628 - DNA, 275 bp, Glycine max
  unsure (1)..(275): unsure at all n locations
ccagaattcccaaggttcaacaactgctgcaggacttctttaatggaaaagagcttcccagagccattaatcccgatgaggctgttgcatatggtgcggctgttcaggctgcaatcttaagtggtgagggcaatgagaaggttcagganttctcctcctggatgtcacccctctgtctcttggtttggagactgccggtggtgtgntgactgtcctgatccctaggaacactacaattccaacaaagaaggaacaagttttcncaacatactctg

SEQ ID NO: 290629 - DNA, 261 bp, Glycine max
  unsure (1)..(261): unsure at all n locations
gaaaagatcccaacagtgagaagcccagtgattttgnttaccttccgngagatnaaancntttggtcacttgaagtcatcagattttctcgtttatggaancnaatcagtggctcaagacgtcttgcccgtgttgacgatgcgtttgatggcaatcttttgagccttgagtttgataactttgctgaagtgcgcaaactctatgaaggtggagttacactacctacaaactttcttagcaagatcgcccctataccagtgg

SEQ ID NO: 290630 - DNA, 272 bp, Glycine max
  unsure (1)..(272): unsure at all n locations
canaaccctctctttctctctcttccaaaacctaattttcattttttctcttcaaacnaattttccaaaatgngtgananccttcacatccagggtggccaatgcggcaaccagatcggcgccaagttctgggaggtggtttgcgcgagcacgggatcgaccccactggaaggtacggtggggactcagagcttcagctcgagaggatcaatgtctactacaacgaagccagctgcggccggttcgtgccgcgcgcggttctcatggacctc

SEQ ID NO: 290631 - DNA, 272 bp, Glycine max
  unsure (1)..(272): unsure at all n locations
ccaggngaaaganagaagatggcaggcnaganaatcccagatgtgttgcttgaattcngggccaaaaantgccanttataggcatgggaacttcagtggagaatcgtccatcaaatgagacccttgcttctatctatgttgaagccatgaggtgggttaccgtcattntgacactgctgcagtgtatggaccagaggaagccataggcctagccgtggccaaagccatagacaaaggccttataaagagtagagatgaagttttcatcactt

SEQ ID NO: 290632 - DNA, 267 bp, Glycine max
  unsure (1)..(267): unsure at all n locations
gnattttgcncactccanggcacaaganacatctnctagggganngangnagattctncccgtnggnngcgaacaagtntccccgagnnacagccgattgggncggcggcgcagagccaagacgacggcaaggactaccaggaccggcgncggcgccgctggttnacccgacggagtttacgtcatggtcgttttacagagcagggatagcagagtttgtggccacttttctgtttctctacatcancgtcttaaccgntatgggag

SEQ ID NO: 290633 - DNA, 272 bp, Glycine max
gccgccccagccaaactccccacctgacaatgtcttccgcccggatcgaccggccgaaggccgaccttgggtccaaaaagaggggcagtgccccgcttccgattcacggaataagtaaaataacgttaaaagtagtggtatttcacttcgctgtttccagctcccacttatcctacacctctcaagtcatttcacaaagtcggactagagtcaagctcaacagggtcttctttccccgctgattccgccaagcccgttcccttggctgtggt

SEQ ID NO: 290634 - DNA, 273 bp, Glycine max
  unsure (1)..(273): unsure at all n locations
ataatctcttcctcttgtctttgaaatccttttctaattcaaatattatataacgattgaaatggcanncccaagccgaaattgagcatctaggaaagcattcggatgggcagctagggattcttccggtcttctctcccctttcaattctgcagaagggaacccggtgagaaagatgtggcattcagagtgttgtactgtgggatatgccactcggacctccacagcataaagaacgaatggggtacttccatctatccaatggttcctggg

SEQ ID NO: 290635 - DNA, 268 bp, Glycine max
  unsure (1)..(268): unsure at all n locations
gatcgagataactagaaacagtgtgatgaaaatgaaggtccttgttttcttcgttgctaanatttttggtagnatggcaatgccatgcgtacgatatgttccctctccgaatgaacactggctatggtgcccgtactccggagggaaatgcgcaagttggaggcttgctgtggaagcacacaacatcnttggctttgagaccattcctgaagagtgcgttgaagcaacaaaggaatacatccatggcgaacaatatagatcagactcc

SEQ ID NO: 290636 - DNA, 264 bp, Glycine max
  unsure (1)..(264): unsure at all n locations
aagctttctgagcttgggtttgctgaagcctaagcaacgttttggggattgttggaaaaggnanggtgcccataatatttctctcataaattctatggtcatggtttctaatgcgccactgtgggttcctcaaatttttagtagcttttgaatgtattttgctggacgtggtgatgatgattggagttgggttgtttttatttgtggtcgatccttttgttaaataacattgttcagcgattgcnatattattaccctttgtag

SEQ ID NO: 290637 - DNA, 269 bp, Glycine max
  unsure (1)..(269): unsure at all n locations
ctggctggncccacacctgtggactagtagatgaaacaggaaacccanctggtgggcngtttggcacagctgtggcaacaatgggaatgcttagcactgctgcctatattcttaccatggatatgtttggcccaatagctgataagctggagganttgtagagatgagtcagcagcctgaaagtgtccgagagataactgatgtccttgatgccgtaggaaacacaaccaaagctaccaccaaagggtttgctattggttctgctgctc

SEQ ID NO: 290638 - DNA, 260 bp, Glycine max
  unsure (1)..(260): unsure at all n locations
ggagagatccatcgatcaattaattacccaatggccgatcagcncnnccggacgaacagatctctgnccttcnaaggaaagccnttaagcntnttcggaaaaggacgggaatggtngtaataacnacnaaggaattgggantgtgaatgcggtcgcttgggcagaacccaactgaggntgagctgcaggacatgataaatgaggttgatgctgatgggaatggtaccattgatttcccagaattcctcaatctcatggcg

SEQ ID NO: 290639 - DNA, 259 bp, Glycine max
  unsure (1)..(259): unsure at all n locations
cgttctttgtctcgcaatcttcactattttcaccgagcntttgcattccaaantccnatatggctgaggctacacaatctaatgctgagttattggagtggcctaagaaagataagcgccgcttcctgcatgttggtatcgtgttggtgatcttgatcgcaccattaagttttatactgaatgttttgggatgaagcttttgaggaaaagagatattccagaagagaaatatgccaatgcttttcttggatttggccct

SEQ ID NO: 290640 - DNA, 269 bp, Glycine max
  unsure (1)..(269): unsure at all n locations
cgnctcgtgaacatgctctgctttcattcacccttggtgtgnnncagatgnattgtttgcctntaaccaaaagggntgcnactacacccaagtattccaaggccaggnatgatgaaattgtgaaggaantctctcctacttgaagaagtaggatacaaccctgacnagattccttttgttcctatctctggttttgagggagacaacatgattganaggtccacaaaccttgactggtacaagggtccaactctgcttgatgcacttga

SEQ ID NO: 290641 - DNA, 270 bp, Glycine max
  unsure (1)..(270): unsure at all n locations
gacttaacaacagcacaaagcgggttactgtctgttcaagctaccatctctctctcncntttcctnagtgcctccttgccagaagttaaaatggcccaagaaactttcctattcacatctgaatcagtgaacgaggggcaccctgaaagctctgtgaccagatctccgatgctgtgctcgatgcatgcttggagcaggaccctgacagcaaggttgcctgtgaaacctgcaccaagaccaacatggtgatggttttcggagagatcacaa

SEQ ID NO: 290642 - DNA, 267 bp, Glycine max
  unsure (1)..(267): unsure at all n locations
cgcaagcaaaaagaaagaatcccaggcgaggagaaagatggangggaaggaagaaggtttntcgttgggagcgaacaagttccccgagagacagccgattgggacggcggcgcagagccaagacgacggcaaggactaccaggaccggcgccggcgccgctggttgacccgacggagtttacgtcatggtcgttttacagagcagggatagcagagtttgtggccacttttctgtttctctacatcacgtcttaaccgttatgggag

SEQ ID NO: 290643 - DNA, 269 bp, Glycine max
gcaaaaatggtgaaaaaggcaaaaggagatttgtttctggggatggtgaagagatgacattggattccgggaaccagtgttgaagaggcctacaacaagctaatagttgaacttgagagaagtgttcctacattggttggcattgatgtcccaaggatgagaaacttcctcgtcgcaaaatttttgacaaacctaagacgcgctgcttcactattctccctatggagtttaatcttgtggttcgtcagaagtttttaaattttgtgagg

SEQ ID NO: 290644 - DNA, 271 bp, Glycine max
  unsure (1)..(271): unsure at all n locations
agcaaactgcggtcctgaggctgtttggttcaagactggagctctgcttcttgatgggggtacttgaaataatttcgggaaacccatccccatcantcttattgtggctgtcattgctgagattgttcttgtgggaggtgcagagactacagaattattaatggcctgaatttcgaagacaaacttcatccaggtggtccatttgacccattggggcttgcaaatgatccagaccaagctgcactgctaaaggtgaaggaaattaaaaatg

SEQ ID NO: 290645 - DNA, 264 bp, Glycine max
  unsure (1)..(264): unsure at all n locations
cttcttcgctcattcctctgcactgccatcatccccaacttcctcaaaagggtaanaggnannaaagagttgtgccaccatgtcggacgatgaaagggaggagnaagagttggatctctcttctgccgaagttgtcaccaatacaaaaccgctgctgagatcgttaacaaggccttgaagctagttatttcagaatgtaaaccaaaggcgaagattgtggatatttgtgagaaaggggattcatacattagagagcaaactgga

SEQ ID NO: 290646 - DNA, 268 bp, Glycine max
  unsure (1)..(268): unsure at all n locations
cngcattctgctatttaattccactacgtacacgcacnttctcctcaaagacaaanatggnnacnacnagnccaagactctgacttacctggcccaggagaaaaccctagaatcgagcttcgttcgggacgaggaggagcgtccaaggttgcctacaacgaattcagcgacgagatcccagtgatttctcttgccggaatcgacgaggtggatggacgcagaagagagatttgtgagaagatcgtggaggcttgcgagaattggggta

SEQ ID NO: 290647 - DNA, 261 bp, Glycine max
  unsure (1)..(261): unsure at all n locations
gncggtttcatcctaaatcgtccaactctaaccagaagattgnctcccagnggcaaggnaacnaangatnnggttgacgttcngcagtnatcatcananggctnatttgagcaacaattacaggngngnctgnngcccttgtggactaacagtgatagngntattgtcaaggcatgcttctgatgaggtctaccttgganagagggncaatccanatgggactgntggnacanaggnnattcaagcctttaagnngnttgg

SEQ ID NO: 290648 - DNA, 267 bp, Glycine max
  unsure (1)..(267): unsure at all n locations
cncttttttcactcttcagttctcgttgttgttcttcgctttcctgaaactagggntttcnattttcgattcattcgttaataattaaagatgtttggnagggcaccgaagaagagcgataatacgaggtactacgaaatcctggcgtctcgaagaacgcttcgcaggatgatctgaaganggcttacaagaaagccgccatcaagaatcaccctgacaagggcggtgatccngagaaagtttaaagagngggnccagcntanngag

SEQ ID NO: 290649 - DNA, 272 bp, Glycine max
  unsure (1)..(272): unsure at all n locations
ctcacattgctgtcaagttttctgaaatcttgaccaagattgacaggcgatctggtaaaggngcntgnngaagnngcccaaatttttgaagaatggtgatgcaggtatggacnagatgnttccaaccaanccccatggtggntgaactttcnctgngtatccnccccntggtcgttttgctgtgagggacatgccgtcanactgtggcngtcggagtcatcaagagtgttnagaaganagaccccaccggngcnaaggtcacnanggccgct

SEQ ID NO: 290650 - DNA, 272 bp, Glycine max
  unsure (1)..(272): unsure at all n locations
gcagcttcatccctaacgcgtgcatagcagagtcagagacagagacgcagccatgngggcggaagaacttgcgaggtgtgataggcaaattaagaacaagccataccccaagtcacgtttctgccgtggtgttcctgatcccaagataggatttatgatgttggtatgaagaagaagggtgttgatgagtttcctttctgtgtccatctggttagttgggagaaggaaaatgtttcaagtgaggccctggaagctgctcgcattgcttgcaa

SEQ ID NO: 290651 - DNA, 268 bp, Glycine max
  unsure (1)..(268): unsure at all n locations
cttgcagtcgcagaggaaaaccctagctagtagtctcagttcgtttgccgagagnanaaatgggnanagggtctcnttctcccgnggaaccatgcgcgcccacaccgacgtcgtgacggcgattgccactcccatcgacaactcgacatgatcgtgacggcgtcgcgcgacaaatccatcattctctggnncctcaccaaggaggacaagacctacggtgtcccccgccgccgcctcaccggacattctcacttcgtccaggacgtcg

SEQ ID NO: 290652 - DNA, 270 bp, Glycine max
  unsure (1)..(270): unsure at all n locations
cngccactaacgtaatcaggggnacaaagnnatcacaagttcaancnacttntcnnnttcttaangggcgtccntnccagncgttaaaatggcccaagaaactttcctatncacatctgaatcagtgaacgangggcaccctgacagctctgtgaccagatctccgatgctgtgctcgntgcntgcntggagcaggaccctgacagcnaggntgcctgtgaaacctgcaccaagacnnacatggtganggttttcgganganatcacaac

SEQ ID NO: 290653 - DNA, 272 bp, Glycine max
gcgccgcaccgatggtatttacataattaaccttggaaagacatgggagaagcttcagcttgctgctaggattatagtcgccattgagaacccacaggatatcatcgttcagtccgccaggccttatggccagagggcagttctaaagtttgctcaatacactggagctcatgcaattgcaggaaggcacactcccggaacattcactaatcagatgcagcaatcctacaatgagcctcgtcttctgattctaactgatccaagaacagatc

SEQ ID NO: 290654 - DNA, 261 bp, Glycine max
  unsure (1)..(261): unsure at all n locations
ttcaaaacactacaagactgatcgcattttctttgccaacaatacatatcttncnagcgagacaccggcncccacttgtcaagtacagagaagaagaattgaagaatgtaagaggggatggaactggtgagcgcaaggnatgggataggatctatgattangntgtcctacaatgacttgggcgatcccagataagggggaaaggtatgcngccccggnncttggaggtccggtttaacttaaccncncaaggaaaaccgg

SEQ ID NO: 290655 - DNA, 267 bp, Glycine max
  unsure (1)..(267): unsure at all n locations
cctganatggaatgtccaagcagagcttgtgcactgcagatgggccatgttgggagctgctggcattttcatcccagaattcctcacaaagattggtatcctgaacaccccttcatggtacactgctggagagttggagtattcacagacactaccacactcttcgtagttgagctctttttcattggttgggccgagggtagaaggtgggctgatatcatcaagccaggctgtgtcaacactgaccctatctttcccaacaacaag

SEQ ID NO: 290656 - DNA, 272 bp, Glycine max
  unsure (1)..(272): unsure at all n locations
tattgagtttccccactatttcttcagttggctcaaatgcagctataattcactattttccaaaggcagaaacatgtgctgaacttgatccagacaaaatttatctttttgattctggagcccagtatctagatggaacaacagaattacacgaacagttcattttggtaaaccttcgactcacgaaaaagcgtgttatacagcagtcctaangggtcacattgctcttggaaatgctagatttcccaatgggacaaatgggcattctcttg

SEQ ID NO: 290657 - DNA, 271 bp, Glycine max
ctctcatccctgctattccagctgccatcgttgctgagtgctttggctttggaagaccttgggatttttatattaagcttacttggacttacaccacttgctgaacgtgtgagcttcattacagaacaagttgccttttacactgtcccacagttggaggacttctgaatgctacatgtgggaatgttactgagctcataatagcaatatttgcccttagcagtaacaaaattgccgtggtcaagtattctccgttgggttctattctttc

SEQ ID NO: 290658 - DNA, 269 bp, Glycine max
  unsure (1)..(269): unsure at all n locations
gngataactagaaacagtgtgatgaaaatgaaggtccttgttttcttcgttgctacaattttggtagcatggcaatgccatgcgtacgatatgttccctctccgaatgaacactggctatggtgcccgtactccggaggtgaatgcgcaagtnggaggcttgctgtggaagcacacccccatctttggctttgagaccattcctgangagtgcgttgaagcaacaanggatacatcaatggcgacaatataggtccgcctcccaaaatt

SEQ ID NO: 290659 - DNA, 270 bp, Glycine max
  unsure (1)..(270): unsure at all n locations
tttttaacaaacagcaacagtacagagcattttgatgcatgtaagtggacaaaatcaganccacattcctgggaattgatcttcccaatagaggtatgtggtcccaataatggttttgaaatgtggngttctgagtgggcaaatcaaacttcatggcatttgagtttccttattgacaatcccaaacaatctacagtttttgatattctcttggggaatctcnccaagattttganattgctggtaatatcttatgccagctttttctgt

SEQ ID NO: 290660 - DNA, 263 bp, Glycine max
  unsure (1)..(263): unsure at all n locations
tatttttntngcgcctttcagaggcggaaggcccattcgggtggttacatttccgaataccattgtgcagattgaaccagacatgaattcaaggtttcancttttnagtaccactaccaatggtgattttnttcaaggnaaagatctcgcgatggttanagttaatgtagcatgtgctgctgttggntnaacatcaagttncaccccaactccattgtnggaatcnggtttgcaaaaagaacagagggttaattgtggantat

SEQ ID NO: 290661 - DNA, 261 bp, Glycine max
  unsure (1)..(261): unsure at all n locations
cnaggttcaagaaccagatggcaacccatgtcaaggaattgggggnntcacaccatccaccattgtagtcactgccactaatttctgcccccctggtggatggtgtgaccctcccaatcaccatttanatcnttctcaacctgtgtttcagcaaattgcccaatacagagctggtattgtgcctgtagtttacagaagggtacggtgcatgagangcggtggaatcaggttcaccatcaatggtcattcatacttcaattt

SEQ ID NO: 290662 - DNA, 174 bp, Glycine max
  unsure (1)..(174): unsure at all n locations
ggnaaggctacaaatttaagangacaagtgtcgttaccaaccttgggagctggcgaagatgcatacgatgttcattttgaatgggacagtgacttcggaattcccggtgcattttacattaagaacttcatgcaagtngagtttatctcaagtctctaactctcgaagacattc

SEQ ID NO: 290663 - DNA, 273 bp, Glycine max
  unsure (1)..(273): unsure at all n locations
gnaaagcattcaaagagtcggattgagattatggtaaaagctaggagtcaatttaagggcacgtagcactgccacaaacgttgagattgagttgcctgtgcctgttgatgcaaccaatcctaatgttcgaacttcaatgggatctgcatcatatgcacccgaaaaagatgcgttaatctggaaaattagatccttccccggaggcaaggagtatatgttaagagcagagtttcatcttcccagtataacagatgaggaagcaactcctgagag

SEQ ID NO: 290664 - DNA, 268 bp, Glycine max
  unsure (1)..(268): unsure at all n locations
caatggaccccctctctctcttctgcaccggagccctcctcgccggcggcctctactggttcgtgtgcgttctggggccccgccgagnagaagggcaaacgcgccaccgatctttccggcggctccatctccgncganaaagtccaagacaactacaaacagtatggtccttcttccgccgcccaaaggagatcgaaacngccgacaaagtccccganttcgtcgacaccttctaaaatctagtcacagacntctacgagngggggng

SEQ ID NO: 290665 - DNA, 159 bp, Glycine max
  unsure (1)..(159): unsure at all n locations
ccacttcagctttctccaaatgtggcatcagggcttccattgccgttgagcaacaaacttcccagactaaggttgctctcctcagaattggtaccagaggaagtccactagctctggctcaggcatatgngaccagagacaagntcatggcatcacang

SEQ ID NO: 290666 - DNA, 263 bp, Glycine max
  unsure (1)..(263): unsure at all n locations
caaccataaacaatatgtgtgcatatgggctcaatcctggtatttcaggttctcgtcttttgggcaccattcctcagtccatttcancagcaaactgtttggaatcaaatggcaacagtgagaacaccattgaattttgatctagcaagcagagcttttgtcaattttctattgaccttctcggtggaggaattttagtggacaaaactggagattggatcacacttatacaaaattctccaattagtaacttgttgagagtt

SEQ ID NO: 290667 - DNA, 269 bp, Glycine max
  unsure (1)..(269): unsure at all n locations
cccggcggcgaaggtaaggtggtgcaaacaagcaaaaccnaattctcgaaaatcagatcggcgatcggaggaagaacctgaagctgagcgaagatggttctcgcggagttaggtggtagcatttcgcgtgctcttcagcagtgagcaatgcgacgatcatcgacgagaaagtcctcaacgattgcctcaacgacatcactcgcgcgcttctccaatccgatgttcaattcaagctcgttcgcgacntgcagaccaacatcaagagcatc

SEQ ID NO: 290668 - DNA, 173 bp, Glycine max
  unsure (1)..(173): unsure at all n locations
ctacagttggtattcctgngaatacaggtatagcattggcctgtgctatgaatagttctttagggggcgcgccagttctgatatttacaccatctgctctcaagactgtgaattatggaatcctgcttgcacaaaagcatggctatgtcatttaatccaaacccgtgttctga

SEQ ID NO: 290669 - DNA, 262 bp, Glycine max
  unsure (1)..(262): unsure at all n locations
ctgattgacatcattggtgtgaccaagggtaaaggttatgagggtgttgtcactncgttggggtgttacccgccttccccgtaagactcacagaggtttgaggaaggttgcttgtattggtgcctggcatcctgcaagantttcattcactgttgccagggctggtcagaatggataccaccaccgaactgagttgaacaagaaggtttacaagcttggcaaagctggagatgaatctcactctgctcnnactgagtntgat

SEQ ID NO: 290670 - DNA, 261 bp, Glycine max
  unsure (1)..(261): unsure at all n locations
ggcaacagaaacaaaagtggcagtattaggtggcatcaccgaagtgcagggagctgccaacagcgtcgagatcaacaatctcgctcgctttgctgtagaggaacaaaacaaaagagagaattcagttctggagtttgtgagggtgattagtgcacagcagcaagtggtttctggagtgaattactacataacattggaagcnaaagntggtgagattanaaatgagtataaagcgaaggtttgggagagggaatcccaaga

SEQ ID NO: 290671 - DNA, 264 bp, Glycine max
  unsure (1)..(264): unsure at all n locations
tgcaggggaaaatcatgtagttcaaatacccttaatggcacaggaggnaattctgtcttctagtgcaagtgatttcagaactgcaatggtgagtaaaaatagcaagcctcaagctactgcaatgcatgtgggagctatgaaattatcattgatagtttcgcaagtcctgactgtaacatagtnggngcaatgctttnggttgatacttatcataccaatccngaaaatgcagtncgnantatttnngcccccccctnggngngg

SEQ ID NO: 290672 - DNA, 264 bp, Glycine max
  unsure (1)..(264): unsure at all n locations
gactcttgggcgaatgttcgaatttttgcatggatcagctctggatactcccattatcactccagcaaactgccaacagattattactgtgctgcttcagagcatgaaagatgttccaaatgttgctgagaaggcttgtggtgctctttattttcttgcccaaggctatgaggatgctggatctgcatcctctccgttgacccccttnttccaagaaatngtncatgctctcctcacggtaactcacaganaggatgcnggana

SEQ ID NO: 290673 - DNA, 167 bp, Glycine max
  unsure (1)..(167): unsure at all n locations
tttgttgatcgagataactagaaacagtgtgatgaaaatgaaggtccttgttttcttcgttgctnacaattntggtagcatggcaatgccatgcgtacgatatgttccctctccgaatgaacactggctatggtgcccgtactccggaggtgaaatgcgcaagtngg

SEQ ID NO: 290674 - DNA, 266 bp, Glycine max
  unsure (1)..(266): unsure at all n locations
ctgaacttgttcacgagaacaataatggcacttatcagtgggttgncaagcccaaaactgtcaaatatgaatttaaaaccaacacccatgtccctaaactaggggtaatgcttgtngggtgggggggaaacaatggctcaacctcactggtggtgttattgctaaccgagagggtatttcatgggcaacaaaggacaagattcaacaagccaattactttgggtcgctgacccaggcatcagctatcagagtggggtcttnccagg

SEQ ID NO: 290675 - DNA, 260 bp, Glycine max
  unsure (1)..(260): unsure at all n locations
tattacccaacaaatgcagcaattcaacaagacactgaacttcaagcatggtggaagggnagttgtggagaagggtcatggtgacttaaaagataagccttggtggcctaaactgcagactgtggaggatctcattcatcctgctctattatcatatggacagcttcggctctccatgcagctgttaattttgggcaatacccttatggaggttatatcgtgaaccgtccaactctagccagaggntttccccaanaagg

SEQ ID NO: 290676 - DNA, 254 bp, Glycine max
ccataacacaaggcagaaagcaagctcatcctagagttttaaaaatggcagcagcctcctccatggctctctcttccccatccttggctggcaaggccgtgaagctgggcccatcagcccccgaagtcgggagggtagcatgaggaagaccgtcaccaagcaggcctcctccggaagcccatggtacggcccagaccgcgtcaagtattgggcccattctctggcgagcccccgtcctacctcatggcgattcc

SEQ ID NO: 290677 - DNA, 267 bp, Glycine max
  unsure (1)..(267): unsure at all n locations
gataactagaaacagtgtgatgaaaatgaaggtccttgttttcttcgttgctacaaattttggtagcatggcaatgccatgcgtacgatatgttccctctccgaatgaacactggctatggtgcccgtactccggaggtgaaatgcgcaagttggaggcttgctgtggaagcacacaacancctttggctttgagaccattcctgaagantgcgttgaagcaacaaaggaatacatccatggcgaacaatatagatcngactccaaa

SEQ ID NO: 290678 - DNA, 263 bp, Glycine max
  unsure (1)..(263): unsure at all n locations
tcgcggtttcggaaacgggttggccttctgctggggactctaacgagattggagccagccccgacaatgcggcgtcgtataacggaaacttggttaaacgcgtgatgagtgggagtgggacccccttgaagcaaaatggtcactcgatgttttcctcttcgcgcttttcaatgagaaccagaaaacgggtcccacgtcggagagaaactacgggctgttctaccccatnagaagaaggtttacgatattccgctcacggngga

SEQ ID NO: 290679 - DNA, 125 bp, Glycine max
  unsure (1)..(125): unsure at all n locations
tttttaacaaacagcaacagtacagagcattttgatgcatgtaagtggacaaaatcaganccacattcctgggaattgatcttcccaatagaggtatgtggtcccaataatggttttgaaatgtg

SEQ ID NO: 290680 - DNA, 263 bp, Glycine max
  unsure (1)..(263): unsure at all n locations
cctcgtgccaganttgaggagctcaacatggatctcttcaggaaatgtatggagccggtggagaaatgtttgagggatgctaagatggacaaaagaagtgttgatgatgttgtccttgttggtggttctaccagaattcccaaggttcaacaactgctgcaggacttctttaatggaaaagagctttgcaagagcattaatcccgatgaggctgttgcatatggtgcggctgttcaggctgcaatcttaagtggtgagggcaa

SEQ ID NO: 290681 - DNA, 260 bp, Glycine max
  unsure (1)..(260): unsure at all n locations
gagcgtggttcaccctatttacaaacttttgtntcctcactatcgtgacaccatgaacattaattcacttgccccgcaaatccttggtcaatgcagacggtattatagagaaaacattcttgtggggtaggtactcttggaaatgtctgctgttatttncnaggactgggttttcactgatcaagcattgcctaatgatcttgtcaagagaggagttgcggttaaggatccatttgctccccatggagttcggctttnna

SEQ ID NO: 290682 - DNA, 256 bp, Glycine max
  unsure (1)..(256): unsure at all n locations
cttaattgcaagantggcacttcgttgcttggtgatgtccctttctgttctcttcactcttggtcttgcgagagaaagccatgccagagacgaagatttttggcatgctgtttggccaaacactcccattccaattcattgcgagatcttctaaagcctggccctgcaagtgttgaaatcgatgatccccctatgcaattgaagaacacacagtaccggaaaactttcttctanaaangaagcccccctcggggaa

SEQ ID NO: 290683 - DNA, 256 bp, Glycine max
  unsure (1)..(256): unsure at all n locations
ttctctttcctctctctctctctacgctttctcgtttgancatccctcaagggatccactaactgaaggngcaatggggttgacatttaccaagctttttagccggcttttcgccaagaaggaaatgcgaattctaatggttggtcttgatgccgctggtaagaccaccatcctgtacaagctcaaacttggagagatcgttaccacaattcccaccattgggttcancgtgggagatgtggaatacaagacnttt

SEQ ID NO: 290684 - DNA, 255 bp, Glycine max
  unsure (1)..(255): unsure at all n locations
gcatctcgatccacattggtcaggctggtatccaggtcggaaatgcttgctgggagctctactgcctcgagcacggcatcgggcccgatgggcaaatgccaagtgacaagacagttggcggtggtgatgangcttcaatactttcttcagcgagactggtgctggaaagcacgtgccacgtgcagtgtttgtagatcttgagcccactgttattgatgaggtgagaaccggaacttaccgccagcttttccaccc

SEQ ID NO: 290685 - DNA, 290 bp, Glycine max
ctggatccccaacaatgtgaaatccactgtctgtgatatccctccaactggtttgaaaatggcatcaaccttcattggcaactctacctctattcaagaaatgttcaggagggtgagtgagcaattcacagctatgttccgcagaaaggccttcttgcattggtacactggagaaggtatggatgaaatggagtttactgaagcctgagagcaacatgaatgaccttgtgtccgagtaccagcataccaagatgcaactgctgatgatgagggctatgagtatgaagatg

SEQ ID NO: 290686 - DNA, 278 bp, Glycine max
tcaaggaacacgacactcccaatttcaccggatccttctactccaagaccaaagccatggtggaggatctggttgggaactacgagaacgtgtgcacgttgcgtgtgaggatgccgatttcgtcggatttgtcgaacccgcggaatttcatcactaagatcactcgatacgacaaggttgtcgacattcccaactccatgaccatattggacgagcttctcccaatctcgctggagatggccaagcggaacctcactgggatctggaatttcaccaac

SEQ ID NO: 290687 - DNA, 279 bp, Glycine max
  unsure (1)..(279): unsure at all n locations
ccatttatcaaggtgttccctagggagtataaacgtgttcttgcaagtntgaagtctgaggnaacctccaaagatgcattggtgcatgctgctaaagacgaccaagatgatgaagcacaagcagtggagaaggatgcttttgaagagcttaaganactggtgatggcatctttgaatgaggaaccgagtcaggctgaatcacccaagaggccaagtcgagtcatggtgccattaaacatagagggtttgtngcttatgagcgggagggtgttcagtata

SEQ ID NO: 290688 - DNA, 276 bp, Glycine max
  unsure (1)..(276): unsure at all n locations
ctcgagacttaaaaagcagcaacattcttcttgacaaacacatgagagccaaggtttcagattttggtctctcaaaacttgctgtggatggagcttcccatgtgtcaagcatagttcgtgggacggtaggatatttggatcctgagtactatatttcccagcagcttactgacaagagtgatatttatagttttggtgtaattcttcntgaactcatatctggtcaagaagcaatatctaatgacagctttggtgctaattgccgaaacatagtcc

SEQ ID NO: 290689 - DNA, 265 bp, Glycine max
catttgcattgcaaagcaaaaaccttgcaaattgcaatggcttccaacaaggttattgccaccatcttggttctttctctccttgcctactcaacatcattcaccaatgcatgtggcacatgccacccaaaacctactccttctccccctcctccatcagggaagtgccccaaggacacattgaagctaggggtgtgtgctgatgttctaggacttgttaatgttgttgttggttcccctgtctctagcaagtgttgtgcattgc

SEQ ID NO: 290690 - DNA, 285 bp, Glycine max
  unsure (1)..(285): unsure at all n locations
cggntctctctgtcngcttcttcactttctctcgtttcaatcgaaaccaaaacaaaaacatgggcagaaaattcttcgtcggtggcaactggaaatgcaatgggaccactgaggaggtaaagaagattgttactactttgaatgaggctaaagtccctggngaagatgtcgtagaagttgttgtgagccctcctttgtgttccttcctgttgtaaaangtttgcngcgccctgatttccatgtttcggcacaaaactgttgggttcgcaaaggtggtgcttatac

SEQ ID NO: 290691 - DNA, 283 bp, Glycine max
  unsure (1)..(283): unsure at all n locations
cgtaaccaggctctggttttgcggttagggtagctctttctactcaaaacanaacaaaacatcaatttctgtttcagttcgcggagatcaatatttgtcgctgaggtcgatcgtcgataaaaggcaatgtttttgtgggattggttttatgggattctagcgtcgcttggcctgtggcagaaggaggccaagatcttattcttgggcctcgataacgctggcaaaaccaccttgcttcacatgctcaaagatgagagattagtccagcatcagctacccaata

SEQ ID NO: 290692 - DNA, 279 bp, Glycine max
  unsure (1)..(279): unsure at all n locations
cncttatacaaaattctccaattagtaacttgttgagagtngctgcttggaagaaaggctgtttaatggtcaagattgtgatgtctgggaatgcagcagtcaaaaggagtgattgggcctcattggtacaagnntttttaacaaacagcaacagtacagagcattttgatgcatgtaagtggacaaaatcagaaccacattcctgggaattgatcttcccaatagaggtatgtggtcccaataatggttttgaangtggagttctgagtgggcaaatca

SEQ ID NO: 290693 - DNA, 279 bp, Glycine max
  unsure (1)..(279): unsure at all n locations
cnnnttgctcatgaaagcctcaaggatcaaattcctgctgttgacaagttgtattctactaaggttaataagtttgcaaaaattatgaaccttancacaaagtgttgttggtgatcttaaacttcttactgatgggaagttgtatgagggtaagcatattcctgtatctaatattagtgcaggggaaaatcatgtagttcaaatacccttaatggcacaggaggnaattctgtcttctagtgcaagtgatttcagaactgcaatggtgagtntgngggt

SEQ ID NO: 290694 - DNA, 275 bp, Glycine max
  unsure (1)..(275): unsure at all n locations
ccttaaagccattggccatcgaattaagtttgccacatcctaggggagatgagtttggtgccgttagtagagtcgtcttgcccgcagaccaaggtgctgaaagtacaatttggctaattgccaaggcatatgttgttgtcaatgactcctgctatcatcaactcatgagccactggttaaatactcatgctgtgattgaaccatttgtcatagcaacaaacaggcatcttagtgtgctccaccctatttataaacttttgtngcctcactatcgt

SEQ ID NO: 290695 - DNA, 275 bp, Glycine max
  unsure (1)..(275): unsure at all n locations
gcgcggtgagtgagtgagagacggaaagnncaaagccaccgnccttctcttctcagagcttggctttgcttatcgattctctctcctctcatctttctcattcaaggtttgtaaaagatggccgatgctgaggatattcaaccccttgtttgtgacaatggnactggaatggtcaaggctggatttgctggtgatgatgctcccagggctgtctttcccagtattgttggccgacctcgacacactggtgttatggttgggatgggtcaaaagga

SEQ ID NO: 290696 - DNA, 283 bp, Glycine max
  unsure (1)..(283): unsure at all n locations
gctacttcctaactccaaccgcacttctgntccgcaattatcatgggcaaggtcaagatcggaatcancggatttggaagaattngncgtttggtagccagagtggctctgcagagagacgatgttgaactcgttgccgttaacgaccctttcatcaccaccgattacatgacatacatgtttaaatacgacagtgttcatgganactgnnngcatcacgatgtcaccgttancgnnnagangacncttctcttcggtgncaagcccgtcactntttttngag

SEQ ID NO: 290697 - DNA, 276 bp, Glycine max
  unsure (1)..(276): unsure at all n locations
ctttctcctacctcgtccttcttacccaacctcaacctgtttctccgagaatcacatccaacgcttctgtcatggaggaagttaacgttgtggaaactaaggatggaactgtctcagtagctgctgcgtttgctggtcatcaggaagccgtgcaggatagagaccacaaatttttaagaaaagctgttgaagaagcatataaaggggtagattgcaaagatggaggcccttttggtgctgttatagttcataatgatgaaatagttgcnagttgtc

SEQ ID NO: 290698 - DNA, 276 bp, Glycine max
  unsure (1)..(276): unsure at all n locations
ggaatttcagtggttgaacaagtcactggaagagatctcgtgctcaatcatttaagcatcccagctgcttgtttcactcatcctgaaatcagcatggntggnttgacagagcctcaagcaagggagaaaggtgaaaaagaggggtttgaagtannnnntgccaaaacaagttttaaagctaacacaaaggctctagcagaaaacgaaggagagggactagccaagttgatatatagacctgacaatggagagatactaggagttcatatttttggt

SEQ ID NO: 290699 - DNA, 273 bp, Glycine max
  unsure (1)..(273): unsure at all n locations
ccttaaagccattggccatcgaattaagtttgccacatcctaggggagatgagtttggtgccgttagtagagtcgtcttgcccgcagaccaaggtgctgaaagtacaatttggctaattgccaaggcatatgttgttgtcaatgactcctgctatcatcaactcatgagccactggttaaatnctcatgctgtgattgaaccatttgtcatagcaacaaacaggcatcttagtgtgctccaccctatttataaacttttgtngcctcactatc

SEQ ID NO: 290700 - DNA, 273 bp, Glycine max
  unsure (1)..(273): unsure at all n locations
gcgcggtgagtgagtgagagacggaaagnnccaaagccaccgtcttctcttctcagagcttggctttgcttatcgattctctctcctctcatctttctcattcaaggtttgtaaaagatggccgatgctgaggatattcaaccccttgtttgtgacaatggnactggaatggtcaaggctggatttgctggtgatgatgctcccagggctgtctttcccagtattgttggccgacctcgacacactggtgttatggttgggatgggtcaaaag

SEQ ID NO: 290701 - DNA, 280 bp, Glycine max; identical to SEQ ID NO: 178468

SEQ ID NO: 290702 - DNA, 282 bp, Glycine max
  unsure (1)..(282): unsure at all n locations
cnagtttgttgtgagctataagctagtttatcgtgaggngaatatgaagttgtttgtcttctntgttgctgcagtagttttggtagcatggccatgccatggcgcaggctaccaaaggttccctctccgaatgaaaactggctatggtgagcgttcttcggaggtaaaatgcgcaagttttnngcttgctgtggaagcacacaacatccgagcctttaaaaccattccngaagagtgcgttgaaccaacnnaggactacattaatggcgaacaatttagatc

SEQ ID NO: 290703 - DNA, 279 bp, Glycine max
  unsure (1)..(279): unsure at all n locations
ctggaagcaaaggaagactgggatatgcttcattgataccatatgttgagccanttgtgcaagctcaaagtgctgaagtttattttgacttcttccctgtggaggttgatagtcaagagggagttgctcacattggtgaattgaaatctggtgtctatgttccattgcctacaaaaactaatttggtggaaactcccaagggcatgggcaactggatctaccttgtgacaaaattcctagtgtcttgactacaactgatgagagattngtnggcacaga

SEQ ID NO: 290704 - DNA, 274 bp, Glycine max
  unsure (1)..(274): unsure at all n locations
cnatgagcttgctcgttggggtgtttctcatggtggcggtgaagaaagcagtgatcttggtggcgctcggancggttattgtgcccgtcgttgttttgatcgcgtggaactgcgtttgggggagacgagggcttttagggtttgtgaaaaggtaccctgatgctgaacttagaggcgccattgatggacagtacgtcaaggttaccggggttgtaacctgtggcagtattcctttggagtcatcctaccaaagagtacctagatgtgtatatgt

SEQ ID NO: 290705 - DNA, 269 bp, Glycine max
ctaccacatccaaggaaggcagcaggcgcgcaaattacccaatcctgacacggggaggtagtgacaataaataacaataccgggctcattgagtctggtaattggaatgagtacaatctaaatcccttaacgaggatccattggagggcaagtctggtgccagcagccgcggtaattccagctccaatagcgtatatttaagttgttgcagttaaaaagctcgtagttggaccttgggttgggtcgatcggtccgcctccggtgtgcac

SEQ ID NO: 290706 - DNA, 272 bp, Glycine max
cttttgatgcatgtaagtggacaaaatcagaaccacattcctgggaattgatcttcccaatagaggtatgtggtcccaataatggttttgaaatgtggagttctgagtgggcaaatcaaacttcatggcatttgagtttccttattgacaatcccaaacaatctacagtttttgatattctcttgggaatctctcaagattttgaaattgctggtaatactcttatgccagctttttctgttccacaggctactgccagatcttctgaaaat

SEQ ID NO: 290707 - DNA, 274 bp, Glycine max
ctcagattcgtggggtttgtctgtgagctttctcagcataatcttgctaccaatagttggaaatgcagctgaacatgcaggagcaatcatatttgctttcaagaacaagctggacatttcattgggtgttgcattgggttcagcaactcagattgccatgtttgtggtcccattatgtgtaatcgttgcttggataatgggtatcgatatggacctgaacttcaacctcctagagacaggttcccttgcgttggcaataatagtcacaggcttc

SEQ ID NO: 290708 - DNA, 278 bp, Glycine max
  unsure (1)..(278): unsure at all n locations
gaaatcatcagcattcacataggtcagggccggngatcccaggttgggcaactcctgctggggaactctactgcctggaacatggcatccagcccgatggcatgatgncaagtgactcctccttcggtgtagcccacgacgccttcaacaccttcttcagcgaaaccggatccggcaagcacgtccctcgcgccgtcttcgtcgatctcgagcccaccgtcatcgacgaatccgttgtngcattaccgtcaactcttcaacccgaacaactcatctcg

SEQ ID NO: 290709 - DNA, 275 bp, Glycine max
  unsure (1)..(275): unsure at all n locations
ggccacctctgctattcagcaatcagcattcgcaggtcaaactgctctgaagcagctcaatgagttggtccgcaagaccggtggcgccggcaaaggtcgcaccaacatgcgccgtaccgtcaagagtnctcctcagagcatttggtatggccctgatcgtcccaagtacctgggtccattctcagagcagattccgtcatacctgaccggagaattccccggtgactacggatgggacactgtggactatcgctgacccggaaacttcgccagga

SEQ ID NO: 290710 - DNA, 272 bp, Glycine max
  unsure (1)..(272): unsure at all n locations
cnttgttgtaactttttgattcctaaattctctaaaattcgaaattctaacttcgttaggggaaagagatngtttgtgtgtgagtnagtatggctggaaaaggcgagggtcctgctatcggaatcgatttgggaacgacgtactcttgcgtcggcgtgtggcaacacgatcgtgctgaaatcatagccaacgatcagggtaacagaactaccccatcctacgtggctttcaccgacacagaacggttgatcggcgatgcggcgaagaancaa

SEQ ID NO: 290711 - DNA, 262 bp, Glycine max
  unsure (1)..(262): unsure at all n locations
cactgttgctatggttggnttggatcagttcataacanagaatgctactttgaccaatgaaaaggaagttgatgcccatcccattcgagctatgaagttttctgtctcacctgtngttcgtgttgctgttcaatgtaaggttgcatcagatcttcccaagcttgttgaaggtcttaagcggttggccaagtcagatcctatggttgtttgtaccattgaggagtctggtgaacacattgttgctggtgcaggagagcttcat

SEQ ID NO: 290712 - DNA, 268 bp, Glycine max
  unsure (1)..(268): unsure at all n locations
ctttcacagcaaactgtttggaatcaaatggcaacagtgagaacaccattgaattttgattctagcaagcagagcttttgtcaattttctattgaccttctcggtggaggaattttagtggacaaaactggagattggatcacacttntacaaaattctccaattagtaacttgttgagagttgctgcttggaagaaaggctgtttaatggtcaagattgtgatgtctgggaangcagcagtcaaaaggagtgattgggcctcattgg

SEQ ID NO: 290713 - DNA, 268 bp, Glycine max
  unsure (1)..(268): unsure at all n locations
gcaaagactctgctatagtcggttgnttgctatcctttctaaagcaattttatggatctgtgacaaaatcagatnnngtgacattgcgacatggtttcattatgacccactgcaggacaaatccgaagtttaattttcacaagtacatgattcgtgccctcgaagatgatttcaagcaagttgttggtataagttggtatctttggctctttgtggttatcttcttgttacttaatatcaatggttggcatacgtatttctggattgc

SEQ ID NO: 290714 - DNA, 267 bp, Glycine max
  unsure (1)..(267): unsure at all n locations
cntttatcaactcactcatcaatctcgtttgttctcactaactattacttcatcatgtcgtcgagcacagttggtcaagtcatcaaatgcaaagctgcggtttcatgggaggcagggaagccacttgtgattgaagaagtagaggtggcaccaccacaagctggtgaagtgcgtttgnagatcctctacacctctctttgccacactgatgtttacttctgggaagccaagggccanacttccatgtttccncgtatatttggtcag

SEQ ID NO: 290715 - DNA, 267 bp, Glycine max
  unsure (1)..(267): unsure at all n locations
ctgcactcgatcaaacacaaaatggaaaagaatgtggggattctcgccattgacatctacttccctcccgcttgcgttcagcaggaagcattggagactcatgatggtgccagtaaagggaagtataccattggacttggccaagactgcatgtcattctgtaccgaagtagaagatgtcatctcaatgagtttgacagtggttacttctcttcttgagaagtatgggattgatcctaaacaaatcgntcgtctggnagttggaagc

SEQ ID NO: 290716 - DNA, 227 bp, Glycine max
  unsure (1)..(227): unsure at all n locations
gagatacgctagaaacagtgtgacnnaaatgaaggtccttgttaccttcgttgctacaattttggtagcatggcaatgccatgcgtacgatatgttccctctccgaatgaacactggctttggtgcccgtactccggaggtgaaatgcgcaagttggaggcttgctgtggaagcacacaacatctttggctttgagaccattcctgaagagtgcgttgaagcaacaa

SEQ ID NO: 290717 - DNA, 266 bp, Glycine max
  unsure (1)..(266): unsure at all n locations
gtggctggtgcaaccctcctttgcaacactttgatcttgctgagcctgctttcttgcaaattgctcaatacaaagctggnattgttccagtttccttcagaagagtctcctgtgtgaagaaaggagggatcaggttcaccatcaatggtcactcttacttcaacttggttctcatcacaaatgttggtggagctggagatgttcattctgtgtccatcaaagggtctagaactgggtggcaaaccagtctagaaactgggggcaga

SEQ ID NO: 290718 - DNA, 268 bp, Glycine max
  unsure (1)..(268): unsure at all n locations
cncaccatgaagctctcacagagggctcttcccggtnataatgntggattcaatgttaagaatgttgctgttaaggatctcaagcgtggttatgttgcctcgaactcaaaggatgatcctgccaaggaggctgctaacttcactgcccaggttatcatcatgaaccatcctggtcagattggaaatggctatgcccctgttcttgactgccacacttcccacattgctgtcaagtttgctgaactcatgaccaagattgacaggcgat

SEQ ID NO: 290719 - DNA, 268 bp, Glycine max
  unsure (1)..(268): unsure at all n locations
gcgactctctttccttccctctttttccgaatctgaatcgaaatggcttcggagactgagacgtttgcntttcaggccgagatcaaccagctcctcagnctaatcatcaacaccttctacagcaacaaggagannntttcttcgcgagctcatcagcaatgcctctgatgctttggacaagattcgatttgagagtcttacagacaagagcaagcttgangctcagccagagttgttcattcacattattcctgacaagaccaacaac

SEQ ID NO: 290720 - DNA, 267 bp, Glycine max
  unsure (1)..(267): unsure at all n locations
cagaaagcaagctcatcctagagttttaaaaatggcagcagcctcctccatggctctctcttccccatccttggctggcaaggccgtgnagctgggcccatcagcccccgaagtcgggagggncagcatgaggangaccgtcaccaagcaggcctcctccggaagcccatggtacggcccagaccgcgtcaagtacttgggcccattctctggcgagcccccgtcctatctcactggcgagttcccaggtgactacggctgggacat

SEQ ID NO: 290721 - DNA, 264 bp, Glycine max
  unsure (1)..(264): unsure at all n locations
tttgaggccaggcaagccccactcaaccaccacacctctcctcgttcacgctacccctttctgctcttcttctacctttcaagttttaaaagtataaagatggcagagacattcctatttacctcagagtcggtgaacgagggacaccctgacaagctctgcgaccaaatctccgatgctgtcctcgacgcttgcctcgagcaggacccagacagcaaagttgcctgcgaaacatgcaccaaaaccaantggtcatggtcttcg

SEQ ID NO: 290722 - DNA, 265 bp, Glycine max
  unsure (1)..(265): unsure at all n locations
ctcttcctcaccgattgcnagaatggaatttcgatgctcagtcatcncttttaccattctcttctctcttgctcttgcaggagagagccatgtccatgcatcgctacctgaggaagattattgggaagctgtttggccaaacactcccattcccactgcactgcgagagcttctaaagcctctccctgcaggtgttgaaatcgatgaacnccccnagcaaattgatgatacacagtacccaaaaacattcttctataaagaagac

SEQ ID NO: 290723 - DNA, 270 bp, Glycine max
  unsure (1)..(270): unsure at all n locations
tcgagataactagaaacagtgtgatgaaaatgaaggtccttgttttcttcgttgctacaattttngtagcatggcaatgccatgcgtacgatatgttccctctccgaatgaacactggctatggtgcccgtactccggaggtgaaatgcgcaagttggaggcttgctgtggaagcacacaacatctntggctttgagaccattcctgaagagtgcnttgaagcaacaaaggaatacatccatggcgaacaatatagatcagatccaaaac

SEQ ID NO: 290724 - DNA, 271 bp, Glycine max
  unsure (1)..(271): unsure at all n locations
gttggaaatcacaaacaaattgttggtttccatgttgctggaagcaaaggaagactgggatatgcttcattgataccatatgttgagccagntgtgcaagctcaaagtgctgaagtttattttgacttcttccctgtggaggttgatagtcaagagggagttgctcacattggtgaattgaaatctggtgtctatgttccattgcctacaaaaactaatttggtggaaactcccaaggaatggcaactggatctaccttgtgacaaaattc

SEQ ID NO: 290725 - DNA, 272 bp, Glycine max
  unsure (1)..(272): unsure at all n locations
ctgagtaatattcatatttccggcttattttacgacggnaganacaaattctggactaaacacgaganaaaccttgctttgacagaagaagaaaagatggaagtgattagaaatagaggcattcctgctgatgttcttgcaaagcgagctcatgaatttgaaaaacatgttgctcatgaaagcctcaaggatcaaattcctgctgttgacaagttgtattctactaaggttaataagtttgcaaaaattatgaaccttagacaaagtgttgt

SEQ ID NO: 290726 - DNA, 271 bp, Glycine max
  unsure (1)..(271): unsure at all n locations
cgtggcttcaagaagagaatctcaatggaggcccaggagctgaagcgtcctgttccagatgttcgaccgcaacggcgacgggagaataacgaagaaggagctgaacgactcgctggagaacctgggcatcttcatctctgacaaggacctgagccaaatgatccagaggatcgacgtcaacggcgacggttgcntggacatggacgagtttngggagctgtatcagancataatggagagcggcgacnatnnagaagacnncagggggcct

SEQ ID NO: 290727 - DNA, 274 bp, Glycine max
gcgcggacactcaaacccgcttctgtcattttccagcttcatccatcaacactgcgtccgcttagggtctgacctcgcgactcgtttggatgacacgaaacgagccctagctcaagctcatcataatcttctattccccaaacacgccctcgccgccacttctactctgggctccctgcacgtggctaagtccctcgtcggcacctctgtttacaccgtcagcaattccaacaatgagttcgttcttatctctgacgctgatggagccaagtcc

SEQ ID NO: 290728 - DNA, 276 bp, Glycine max
  unsure (1)..(276): unsure at all n locations
ctcgttagtcgtttgtaacgcctttgtttgcgttttttgcacngaagaattaacacgtatatagcaagcatggcagtcacactctacgaccttagctctgcctctgggttgaagaagcttgatgagtaccttctcccacgcagctacatcaccgggtaccaagctacaaaggatgatcttactgtttatgcagctttgccaactgctccatcagatgaatatggaaatgtttccaggtggtacaagcacattgatgcttgttgagaatctctggtg

SEQ ID NO: 290729 - DNA, 281 bp, Glycine max
  unsure (1)..(281): unsure at all n locations
cgtagggctaatccgcctcacgagggtcaccaacggcacgtgcctttggggggccgaggccccctaactgctggtccggcaaacggacggcgggcgcacgcgtcgcttctagcccggattctgacttagaggacntcagtcataatccaacgcacggtagcttcgcgccactggcttttcaaccaagcgcgatgaccaattgtgcgaatcaacggttcctctcgtactaggttgaattactattgcgacactgtcatcagtagggtaaaactaacctgtct

SEQ ID NO: 290730 - DNA, 270 bp, Glycine max
ggtttattgagtttaatagtcgtgctggagctgagagaattctccaaacatataatggggctattatgccgaatggggggcagagtttcaggttgaattgggcaacttttagtgccggtgagaggtcgcgtcaagatgattctcctgattacaccatatttgttggtgacttggctgcagatgttactgattatcttcttcaggagacattcagggctcgttacaactcggtgaagggtgcaaaagttgtcattgataggctaactggcc

SEQ ID NO: 290731 - DNA, 271 bp, Glycine max
  unsure (1)..(271): unsure at all n locations
aaatccgatggcggcgtcgcggcgtctccgggacctccaatcccaaccggcgaacaagatctgcgtggactgttcccagaagaacccgcaatgggcctccgtatcgtacggcgtcttcatgtgcctagagtgctcaggcaagcaccgcggncctgggcgtgcacatctccttcgtgcgatccgtgacgatggattcgtggtccgaaatccagatcaagaaaatggaagccggagcaacgacaaactcaacgccttcctcacgcaatacggc

SEQ ID NO: 290732 - DNA, 269 bp, Glycine max
  unsure (1)..(269): unsure at all n locations
gtgagaacaccattgaattttgattctagcaagcagagcttttgtcaattttctattgaccttctcggtggaggaattttagtggacaaaactggagattggatcacacttatacaaaattctccaattagtaacttgttgagagttgctgcttggaagaaaggctgtttaatggtcaagattgtgatgtctgggaatgcagcagtcaaaaggagtgattnggcctcattggtacaagtggttttnacaaacagcaacagtacagagcc

SEQ ID NO: 290733 - DNA, 272 bp, Glycine max
  unsure (1)..(272): unsure at all n locations
ctcgcttgtgctgccttcgtttgcgtttttatcacagaggaattaacatatatatagcaagcatggcagtcacactctacgaccttagctcttcctctgggttgaanaaacttgatgagtaccttctcccacgcagttacatcaccgggtaccaagctacaaaggatgatcttactgtttatgcagctttgccaactgctccatcagatgaatatggaaatgtttccaggtggtacaagcacattgatgctttgttgagaatctctggtgtt

SEQ ID NO: 290734 - DNA, 273 bp, Glycine max
  unsure (1)..(273): unsure at all n locations
ctctgtgtttgcggctgaggattccgaacgagcgaccttcttcgtttctcgcaaagtttaagtcatcatgggtaaggaaaagactcacatcaacattgtcgtcattggacatgnccgactctgggaagtcaactaccactggtcatttgatctacaagcttggaggtattgacaagcgtgtgattgagaggttcgagaaggaggctgctgagatgaacaagaggtcattcaagtatgcctgggtgcttgacaagctcaaggctgagcgcgaaa

SEQ ID NO: 290735 - DNA, 274 bp, Glycine max
ggggaagtgctaatcctaccatcaatagccaaggcaacaggtttgttgcacctgatgacagattcagcaaagaggtgacaaagcatgaggatgcagcagagagtgaatggaaggggtggaattggaggtcagaaggggacttgttagtaaacggtgcgtttttcacggcatcgggggctggagcctcctctagttatgcaagagcttctagcttgagtgcaaggccatcttcactggtggggtccataaccactggtgcgggtgcactcacctg

SEQ ID NO: 290736 - DNA, 275 bp, Glycine max
  unsure (1)..(275): unsure at all n locations
gggnttacgagtctctcancgttcaatggggtgatcangntgnttatnangntgtgcgnnaagtgngnagggncaagtacagtgaggttttngaaggcataaatgttaatagcaatgagcgttgtataatcaagattcttaagcctgtcaaganaaagaagattannagagagatanaaatacttcagnacctttgtggtgncccaaatattgtcaagcttcttgatattgtcagagatcagcactctaaaactcctagcnnaatatgtgagnat

SEQ ID NO: 290737 - DNA, 276 bp, Glycine max
  unsure (1)..(276): unsure at all n locations
gagtttgttgatcgagataactagaaacagtgtgatgaaaatgaaggtccttgttttcttcgttgctaacattttngtagcatggcaatgccatgcgtacgatatgttccctctccgaatgaacactggctatggtgcccgtactccggaggtgaaatgcgcaagttggaggcttgctgtggaagcacacaacatctttggctttgagaccattcctgaagngtgcgttgaagcaacaaaggaatacatccatggcgaacaatatagatcagactc

SEQ ID NO: 290738 - DNA, 280 bp, Glycine max
ggatgacaatagctcaatggcgcaacttgggataccagaaccaacaagaacaccaggcatttgcacaactattacgagctccgcatgacgatgcccaaatgataattagagaacggttcccggtgcctagattggtagtgtgtgaccaacatggttcccaggctagattcttattagcaaaactgaatccctcagcaacgtataataatgcacatgaaatggctgctggttcagatgtaatctttactgatgatgtgagccttcaagttttctttgagca

SEQ ID NO: 290739 - DNA, 271 bp, Glycine max
  unsure (1)..(271): unsure at all n locations
ccgtntctcttctctctgttcctcactcactcgcattncattcaccatgactaagcaacaagctaattggtctccatacgataacaacggaggatcatgtgttgcaattgctggagcagattactgcgtcatcgccgcggatacgaggatgtccaccggttacaatatcctcactcgcgattactccaaaatcncccaactggcggagaagtgtgttatggcttcttctggttttcaagctgatgtcaaagctttgcagaaggttttgtct

SEQ ID NO: 290740 - DNA, 270 bp, Glycine max
  unsure (1)..(270): unsure at all n locations
cttggggataacatctacaactttggagagctacttgcccatcctataattaagagccttctggggacaaaggtggaatggctttactatattctgcaggcattcaattctggtgatctggtacgatatcaagaattatgncgggtgcataatgctgctttaagagcccaaccagcactagttcaaaatgagcaaaagttgttggaaaagatcaacattctgtgtctgatggagattatattcagtcggccttcggaagatcgaactatt

SEQ ID NO: 290741 - DNA, 270 bp, Glycine max
  unsure (1)..(270): unsure at all n locations
ctctaattacactttctatctcatttccaatctcattttcgttcggttcaaacactctcatggcatcagacaagaagattangatcggcatcaacggatttggaaggattggccgtttggtggccagggttgctcttcagaggaatgacgttgaacttgttgctgtcaacgatcctttcatcaccactgattacatgacatacatgttcaagtacgacaccgttcatgggcagtggaagcattttgatgtgaagctgaaggactctaaga

SEQ ID NO: 290742 - DNA, 274 bp, Glycine max
  unsure (1)..(274): unsure at all n locations
caagcggtgactctaactgctttggtgttatccaccttcactgcatcagatcccgattctncttcaagacctctgtgtcgcagaccttgcctcagcggttaaagtgaatggattcacctgcaaagatgctggcaaggtaaatgcgagtgatttcttctcagacatactagccaaaccaggtgccacaaacaacacgtatggctccctagtgactggagccaacgttcagaaaatcccaggactcaacacccttggcgtgtctttgtcacgcatt

SEQ ID NO: 290743 - DNA, 273 bp, Glycine max
  unsure (1)..(273): unsure at all n locations
gatctccattcccattccatggcttccnctgaatcatcccctttcaagaaaattcagattcaaagggatgacactacatttgacgcatatgtggttggaaaagaggatgctcctggaattgttgtgattcaggagtggtggggtgtggattacgaaattaagaaccatgccgtgaagatttctcagcttggtanngggtttaaagctcttattccagatttatacagaggaaaggttggtctggatgttgctgaagctcagcatttgatggat

SEQ ID NO: 290744 - DNA, 273 bp, Glycine max
gcaaaacttgttcgtgacgcctttcaactagcaaaagaaaagtcaccatgcattatttttatagatgaaattgatgcaattggaaccaagcgttttgatagtgaagtaagtggagacagagaggtccaacggacaatgttagaattgcttaatcagcttgatggttttagcagtgatgaccggattaaggtgatagcagcaacaaaccgtgcagatattcttgaccctgcccttatgcgttctggtcgattagatcgtaaaattgagtttcca

SEQ ID NO: 290745 - DNA, 272 bp, Glycine max
  unsure (1)..(272): unsure at all n locations
ctactgcctcttcacnactncanctcntgccttctnagaggcaatttagntnccactgttagggccatccaatcagaaaagccaacctatcaagtgattcaaccaatcaacggtgatcccttcattggaagccttgaaaccccagttacatcnagccccttgattgcatggtacttatcgaacctcnccgcatacaggaccgnagtgagcccactactaagagggatcgangtgggnctggcccatggctaccttctggtgggcccattcgt

SEQ ID NO: 290746 - DNA, 270 bp, Glycine max
  unsure (1)..(270): unsure at all n locations
tccaccaatctccaaccttcttctccactgttccgtttctctctccaacggagagtncttttgttttttgtggcgagtttgttgcacgtttaagaagcaatggcacgcaagaagatcagagagtatgactccaagaggttgttgaaggagcactttaagagaatctctggccaggagttgcccatcaagtctgcacaggttacagaatccaccaatttcagtgagctagcagagaaggaaccctggcttttatcttcaaaattggttgtg

SEQ ID NO: 290747 - DNA, 269 bp, Glycine max
  unsure (1)..(269): unsure at all n locations
gaatctttcaaatcaaaataccgtgaagctgctgagcaacataaacaacagggtgtaagctttttggtgggagatgttgagtctagtcaaggtgctttccagtattttgnactgaaagaagaacaagtacctctaattatcattcaacacaatgacgggaanaagttttttaaacccaatttggaagcngatcacattccaacttggttgaaggcgtacaaggatggtaatgttgcaccatttgtgaagtctgaacccattcctgaagg

SEQ ID NO: 290748 - DNA, 270 bp, Glycine max
accgatccgaaatcccagagtacttgaccggagaagtccctggagactatggttatgacccatttggtcttagcaagaagccagaagactttgccaaatatcaggcatttgagttgattcatgccagatgggcaatgcttggtgctgctggattcatcattcctgaggccttcaacaaatatggagcaaactgtggtccagaagctgtttggttcaagactggagctctgcttcttgatgggggtacgctgaactactttgggaaaccca

SEQ ID NO: 290749 - DNA, 259 bp, Glycine max
  unsure (1)..(259): unsure at all n locations
ctggaatgtgagcttcgatttccagtttttattgaagaaaaatnttaccttgttatttagtagatctgatttcttttctggaaggtgacatattaaaaccttatcaattttggattttctttgaggtttcgttctggctttatgtttaggattttgttatacattatgtttttcgaatactatttgccttttaatttctgaaactatgcagactcttcatttgctttaccagtaatatatttagtttactcgggtttct

SEQ ID NO: 290750 - DNA, 274 bp, Glycine max
  unsure (1)..(274): unsure at all n locations
cttccaccctttggcttattnntgggagcaatacatatcattcnttcagaggcaacaaaggagttgtaaattaagagcatggctgcacaagctcttgtatcatcatcatctcttaccttctcagccgaggctacaagacaaagtcttggaccaagatcactccaatctccatttggcttctccagaaaagcctcctttcttgttaaggcagctgctactccccctgtcaagcaaggatcagacagacctttgtggtttgcatcaaagcaaagtc

SEQ ID NO: 290751 - DNA, 265 bp, Glycine max
  unsure (1)..(265): unsure at all n locations
ggtcatgaagcacctgtatattctgtatgccctcatcacanagaaagtattcagttcatcttctcaactgcaactgatggaaaaataaaagcatggttgtatgataacatgggttctagggttgactatgatgcacctggtcattcttctactacaatggcatatagtgctgatggaacaagattgttctcgtgtggcacaaataaagaaggggaatcatttctagtggaatggaatgaaagtgaaggagcagtaaagcgtactt

SEQ ID NO: 290752 - DNA, 271 bp, Glycine max
gcttggaaacccattgtcgatgccgtccacgccaaaggcggtgttttcttctgtcagatttggcacgttggaagagtttcagattcagtttatcagccaaatggacaagcacccatatcttctacggacaagccactcacaccccaaattcgaagtaatggcattgatcaagtacaatttacccctccaaggagattaaggactgatgaaattccgcatattgtaaatgacttcagacttgctgcaaggaatgccatcgaagctggttttg

SEQ ID NO: 290753 - DNA, 277 bp, Glycine max
caaattagttcattctctttgcgcagttccctacctctcctttcaagatgcagatcttcgtcaagaccctcaccggaaagaccatcacccttgaggtggaaagctctgacaccatcgacaacgtcaaggccaagatccaggacaaggaaggaattcccccggatcagcaacgtctcatcttcgccggaaagcagctcgaggacggccgtaccctcgccgactacaacatccagaaggagtcaacccttcaccttgtccttcgtctccgtggtggcat

SEQ ID NO: 290754 - DNA, 280 bp, Glycine max
  unsure (1)..(280): unsure at all n locations
gcgcaagttggaggcttgctgtggaagcacacaacatctttgggctttgagaccattcctgaagagtgcgttgaagcaacaaaggaatacatccatggcgaacaatatagatcagactccaaaacagttaaccaacaagcttacttttatgccagagacctcgaagtccatcccaaggacacatttgtgttcagtatagatggcaccgtactctctaatattcccatactacaaaaaacatggntatggggtggagaaatttaactcgacttgtatgatg

SEQ ID NO: 290755 - DNA, 217 bp, Glycine max
  unsure (1)..(217): unsure at all n locations
ctaacantcattaattgcaagaatggcacttcgttgcttggtgatgtnctngactgcnttgttcactgctngggtctgcgnnagganagccatgnccgggcacgaannttttaggcangcngttgggccaaacactcccattccangtnnaatngccnanatncttctaaagcctngnctntaagtgttgaaatngatgatcnccctangcaaattg

SEQ ID NO: 290756 - DNA, 283 bp, Glycine max
  unsure (1)..(283): unsure at all n locations
ggtgggatgggaaaactgactttcccccagggcacttcccgaagtgttaagagaatgctctttctatagggggaagagngggtgccaagaatgncaatnnccntgacnangccaanngccgtccttncaatgnggagatnttttgttggaganctcgtctttgaagtttctaagatgattctcctacattaaatgtacagtctctttcttcatagcatttggaaattntggctgatgacaccatcaattttgaggccttccccacaagctggtgcagtttgga

SEQ ID NO: 290757 - DNA, 261 bp, Glycine max
  unsure (1)..(261): unsure at all n locations
gaccattcagtattgggcaggaatctcatttgtgtttactctaaaaangcacatgcttgatgatccagctnctttatagagatgaaaagnnntngcanatataggantnctganggaattgntannttttaaagggtnggttcacaaatcgtcgggatngcccnaggtngtggnagggatcgcccagatcccanaacgggagnatggangcnnanaccctttnatacttcntcggtnnttatatgcgnganctgttganat

SEQ ID NO: 290758 - DNA, 273 bp, Glycine max
  unsure (1)..(273): unsure at all n locations
atatttgagtntgacaaagatnatccagagggttctggcattggctttaaggaggnagacaaacccaacttcattgggtctntctaattcccaaacnnagggctanggccgaagagntcttgaangantatgacaangtgtgcaccctcagggttcgcatgcnaatttcactgacttgagcaatccgcgcatttcatcaccaagatttctcgttataacaaagtagtcaacattccaaacagcatgaccattttggagaattctgccgattnc

SEQ ID NO: 290759 - DNA, 279 bp, Glycine max
  unsure (1)..(279): unsure at all n locations
ccgcacggaatatcttgttgtntggagcgatccgagaaaaactctgtaaacatgttggtttaacaggaactccnttancagtgattaanctcntctcctgactcccttcccgttacaaggaaattgagaatggaatgctgtgggaagttgaggggaatgggttgttaaaggagcagttgatgtagacattggtgcaaacccttctgctgagggtggaggagaagatgagggagttgatgatgcagctgttaaggttgttgacattgttgacacattcac

SEQ ID NO: 290760 - DNA, 284 bp, Glycine max
  unsure (1)..(284): unsure at all n locations
ggccaagccagtgtccattgaggtatggaacccaagtgggcaaatacagagttgttagcaccaaaccaatgcctggnacnncgttcgantccattctccnggttcaaatgaangtncngccttnaataatgnaccgagacgaaaacgnttctgtccagtngaagacatcattgnctttnattggtgataagtgtgatggagtnattggacagctgactgaagactggggagcncagtngttctctactttgagcaaagccggnggcaangctttcgtaaacatg

SEQ ID NO: 290761 - DNA, 289 bp, Glycine max
  unsure (1)..(289): unsure at all n locations
gcagaaagcaagctcatcctagagttttaaaaatggcagcagcctcctccaagggtctctcttccccantcntnggtngcaaagncgttaaattgggccantnagcccccnaattcggaagggtcnancntnaggaanaccntcaccaagcaggcctcctccggaagcccatggtacggcccanaccgcgtcaagtattgggcccattctctggcgagcccccgtcctacctcatggcgagttccangtgaatacggctggggacctgctgggtttcggccgacccana

SEQ ID NO: 290762 - DNA, 295 bp, Glycine max
atccaggacaaggagggtatccccccggaccagcaacgtctcatcttcgccggaaagcagctcgaggacggccgcacccttcgccgactacaacatccagaaggaatcaacccttcacctcgtcctccgtctccgtggtggcatgcagatcttcgttaagaccctcaccggcaagactattaccctagaagtcgaaagctccgacaccatcgacaacgtcaaggctaagattcaggacaaggagggaatccccccagaccagcagaggctgatcttcgccgggaagcagctcgag

SEQ ID NO: 290763 - DNA, 288 bp, Glycine max
catgattgggatggaatctcctggtatccatgagacaacatataactctatcatgaagtgtgatgtcgacattaggaaggatctctatggtaacattgtcttgagtggtggttccacaatgttccctggcattgctgataggatgagcaaggagattacagcattggcaccaagtagcatgaaaattaaggttgtagcaccaccagagaggaagtacagtgtctggattggaggctccatcttggcttccctcagcaccttccaacagatgtggattgcgaaggcaga

SEQ ID NO: 290764 - DNA, 285 bp, Glycine max
  unsure (1)..(285): unsure at all n locations
attctcccaaactaacaaacaaatcccagggagccaccaaccatggcttccaagctctgcgactcatgcaaatcagccactgctaccttgtactgccgccccgacgcggccttcctctnccggcgcctgtgactctaaggttcatgccgccaacaagctcgcatcgcgccacccgcgcgtcgtgctctgcgaggtgtgcgagcaggcgcccgcgcatgtgacctgtaaagccgacgccgccgcgctctgccttgcctgcgatcgcgatatccactccgccaaccc

SEQ ID NO: 290765 - DNA, 261 bp, Glycine max
  unsure (1)..(261): unsure at all n locations
cgaaaaanagtgtgggcttttaattggttttagcattaaagcgaaaganacaccaaaacacgagacactatatatatgtatatgtatatgtaagtnagtngtggaggtgaaaaagagtggaaatggcaggtgcaggaggagggtatggggacgcgaaccagaggatagactacgtgttcaaggtggtgctgataggggactcggcggtggggaatcgcagatactagctcggtttgcgaggaacgagttcagcttggactc

SEQ ID NO: 290766 - DNA, 283 bp, Glycine max
  unsure (1)..(283): unsure at all n locations
cttgctttgacagaagaagaaaagatggaagcgattagaaatagaggcattcctgctgatgttcttgcaaagcgagctcatgaatttgaaaaacatcgttgctcatgaaagcctcaaggatcaaattcctgctgttgacaagttgtattctactaaggttaataagtttgcaaaaattatgaacctnagacaaagtgttgttggtgatctaaacttcttactgatgggaagttgtatgagggtaagcatattccctgtatctaatattagtgcnggggaaatc

SEQ ID NO: 290767 - DNA, 280 bp, Glycine max
  unsure (1)..(280): unsure at all n locations
gattccacgtataggatgctaaaaattgcctgcaattttgggtcctctcagcatccatcagtgcaatgcatgcaggctctcagagttgcaactgtggagcagggaaacatcgatccatatagcgtttatacacagccttgtaacaatacagcatcactcagacgtggtttgaaggggcgtatccatggatgtctcgagcatatgatccatgcactgaaaggtattctgatttgtatnccaaccgtccagaagttcagaaggcacttcatgccaatgttac

SEQ ID NO: 290768 - DNA, 281 bp, Glycine max
  unsure (1)..(281): unsure at all n locations
cagtagtcatatgcttgtctcaaagattaagccatgcatgtgtaagtatgaactaattcagactgtgaaactgcgaatggctcattaaatcagttatagtttgtntgatggtatctactactcggataaccgtagtaattctagagctaatacgtgcaacaaaccccgacttctgggagggatgcatttattagataaaaggtcaacacaggctctgcctgttgctttgatgattcatgataactcgtcggatcgcacggcctttgtgccggcnacgcatc

SEQ ID NO: 290769 - DNA, 278 bp, Glycine max
tccctccagtcggcgttcgattatgcaatccaatctggagggtacgagtctcattaccaaggagtttaccccgtcaaatgcaaccaggaccggttcgtggtggaggatatcgtgaaattcggttcacccttccggttcggtctggaggccgggtctaagccggaactccttctggccatgagctgtctttgcaaaggcaaccccgacgcgcttttgatttgcaacggcttcaaggacgcggagtacatttctcttgccctggttgccaacaaattgcc

SEQ ID NO: 290770 - DNA, 284 bp, Glycine max
tcttgccagtgaatatccagttgttgatggaaagctttcacaaacttgttacctcatggctgttgattcttgctataagaatttctgtcacaagtatgagaaattcgagggaaaacaattttctctttctgatgctgaatactttgtatttcactctccttataacaagcttgtacagaagagttttgctcggttggttttcaatgacttcttaatgaattccagctctgtagatgaggttgccaaagaaaaactgggaccttttgcaatttatctggtgatga

SEQ ID NO: 290771 - DNA, 270 bp, Glycine max
  unsure (1)..(270): unsure at all n locations
gtgacaatanatancnatancgggctcatngagtcnggtaattggaatgagtacaatctaaatcccnnaangangatccannggagggnaagtctggtgccagatagccgcggtaattncagatccaatagcgtatanttaagttgntgcagttaaaaagctcgtagttggancttgggttnggtcgatcggnncgnctccggtntnnaccggtcggcacgtcgcgtcngtcggtgatgngctcctntcctnannnggccgngtcgtgcc

SEQ ID NO: 290772 - DNA, 282 bp, Glycine max
  unsure (1)..(282): unsure at all n locations
gttgatcgagataactagaaacagtgtgatgaaaatgaaggtccttgttttcttcgttgctacaattttngtagcatggcaatgccatgcgtacgatatgttccctctccgaatgaacactggctatggtgcccgtactccggaggtgaaatgcgcaagttggaggcttgctgtggaagcacacaacatctttgggctttgagaccattcctgaagagtnccgttgaagcaacaaaggaatacatccaggcgaacaatatagatcagactccaaaacagtta

SEQ ID NO: 290773 - DNA, 281 bp, Glycine max
  unsure (1)..(281): unsure at all n locations
ccttcaccccttccttttttgcgttcattctgttttcatagtgacgaacttctgaaganatggcaaatcatcctttgacacactctcactgctttccgcgagaggtttgatgaaactctcactggtcacaggaacganattntggnccttctgtcaaggcttgaagccaagggcaagggatcctgcnacatcaccaagtggttgcagagtttgaagngatccctgaggagagnaganacnnatcccaggatggtgtctttggagaagtnttgagatccaca

SEQ ID NO: 290774 - DNA, 282 bp, Glycine max
atttaatccaaacccgtgttctgatgcatggagtttggaatttctgaagcgtaccggatttcattgtgatatcatttgtgtcactggatggactgccaccccaatgcaggatgttcaggttacaattgattggtttatttcctctcaggaatgtgttcccagaacctattgtgttttaaatccacaaaatccttttgtgttaaataggtggatgggaaaactgactttcccccagggcacttcccgaagtgttaagagaatgcctctttctatagggggagg

SEQ ID NO: 290775 - DNA, 286 bp, Glycine max
  unsure (1)..(286): unsure at all n locations
ttttctgggctaaccaaccctgacactccttcttctccgcttcctcttcgatcatcgcttcagaatgccgccgaagttcgacccctcccagatcgtcgacgtcttcgtacgcgtcaccggcggtnaggtcggcgcggcgagttncctcgcccccgaanatcggtcccctcggtctctcccccaagaagatccggagaagatatcgccaaggaaaccgccaaggactggaagggcctccgcgtcaccgtcaagctcaccgtgcagaaccgtcaggccaaggtcaggt

SEQ ID NO: 290776 - DNA, 272 bp, Glycine max
  unsure (1)..(272): unsure at all n locations
cgtctcaaacctcttcgttccttcgatnccattccatttcttccaaaatggccacagacccagttcgcgttctcgtcactggagccgcagggnaaattggatatgctctngtccctatgattgctaggggagtgatgctgggtcctgaccagcccgtgatcctccacatgcttgacattcctccagcagcagagtcnctgaatggggttaanatggaatggtggatnctgcattccctcttctnaaaggtgttgttgcnacaaccgatgtgg

SEQ ID NO: 290777 - DNA, 287 bp, Glycine max
  unsure (1)..(287): unsure at all n locations
atcaaacacgactctcgcctcgaaggcctcatcaagatgcagatctcactattaatctgggctgccatttgcactcccgcggattacaacacccgtcctctcgancaccatttacagcaatttcatcgangcgattcnccgtggtgacaatactgttcngagaacaagaagcggctnatccanttctctacttgcgaagtgtacggaaagacgattggngcctttnnncctanagntngtcctntncgnaaggatccggcatantatntccttanagaagacgngtc

SEQ ID NO: 290778 - DNA, 283 bp, Glycine max
ataccctgaccgaatgatgctcacattctctgtgttcccatcccctaaggtttctgacactgttgttgagccttacaatgcaaccctatcagtgcaccagctcgttgagaatgcagatgaatgcatggttttggataacgaagctctctatgacatctgcttccgcacgcttaagctcaccactccaagctttggggatctgaaccatctaatttcagccaccatgagtggtgtgacatgttgtcttcgtttccctgggcaactcaactcagatcttcgcaaa

SEQ ID NO: 290779 - DNA, 258 bp, Glycine max
  unsure (1)..(258): unsure at all n locations
caataatggcgtttgctcacgactncggagttggaatcctctncttcccctctggtgttctcngtacggaggagtgaaccggagctggtggctccggccaagcccactccccgcgaaattaagatcctatctgagatagattctcaggcgggtcttcgtacccaaattccaatcatacagttctaccgtaacgacccatcattggcaggcaaggacccagttcaagccattcgaaacgctcttgcggangacttgttt

SEQ ID NO: 290780 - DNA, 273 bp, Glycine max
  unsure (1)..(273): unsure at all n locations
gggattgttgccggggtgtcctatgccataaacagtggttaccagtcttggggtccactatttggcaagctgttcttcgctatctgggtcattgcccatctatacccattcttgaagggnctcttgggcaggcaaaatcgtaccccaaccattgttattgtttggtccgttcttcttgcttcaatattctccttgctgtgggtgaggatgatccctcactctgactccaacaaataaccaatggtcaatgtggtatcaatgttagtctcttgt

SEQ ID NO: 290781 - DNA, 281 bp, Glycine max
  unsure (1)..(281): unsure at all n locations
cgatgctgatcaangaggccattcatgtaattagctgtggatatgaagaaaagactttatggggaaaagagattggttggatttatggttccgtcactgangatatcttatcggggtncaagatgcaatgtcgaggatggaagtcaatttactgcatgccctgaggctgccatcaaagggtctgcacctatcnacttgtctgatagattgcaccaagtccttcgatgggccttgggatcaattgaattttcttaagtaggcatggccccctctggtatgga

SEQ ID NO: 290782 - DNA, 274 bp, Glycine max
  unsure (1)..(274): unsure at all n locations
gtcactgaaggacctgatggatatccattaattcatgcacggnacttgggtgaagctagaacatttacacccacccaagtatttggaatgatgttatcaaaccttaaagaaatagccgagaaaaatctgaatgctgccgttgttgattgctgcattggaattccactttattttactgatccttcagagnagggcggtcttggatgctgctactattgctggtttgcatcnattcgtctgtttcatgaaacaactgcaatgcattggcttatgg

SEQ ID NO: 290783 - DNA, 278 bp, Glycine max
  unsure (1)..(278): unsure at all n locations
tggagctgccctcatatacaggaacaaagtatggagattaggagtgacaccaagtgaaccccagataagagagatagctttgtggttgtctgagtaccatatggattccacaggctttagtacancatagcttgtttgatgcagggttcccatcggctctttctctgggtgatgttgtgtgtggaatggcatctgttagagtaactgcaaaagacatggtattttggcttcggtcacacactgctgcagaaagccgatggggtggtgcaaagcatgag

SEQ ID NO: 290784 - DNA, 278 bp, Glycine max
aacctacctctttttcttctctctcaacaacttcaccttcttcctcctcgatcatgtctcacttcaagggcaagtaccatgatgagcttatcgccaatgctgcgtacattggcactcctggaaagggtattcttgctgctgatgagtcaacagggacaattggcaagcgtttggccagcatcagtgtagagaacattgaatccaacaggcgagctcttagggagctgcttttcactgctcctggtgttcttcaatatctcagtggtgtcatcctcttt

SEQ ID NO: 290785 - DNA, 282 bp, Glycine max
  unsure (1)..(282): unsure at all n locations
taaaatccttgaatcaccaatgttcagtaatagacctctgttaccatatgaagaatggaatattgatttcacagaattgactgttggaactcgtgttggaattgggttcttcggagaagtttttcgtggcatatggnatggcacagatgttgcaatcaaggttttcctagagcaagatttaactactgaaaacatggaagatttctgcaatgagatatccattcttagtcggcttcgacatcctaatgttattttatttcttggtgcctgcacaaggccccc

SEQ ID NO: 290786 - DNA, 276 bp, Glycine max
  unsure (1)..(276): unsure at all n locations
cgcggcagcatgtgggggtataaganatttttcaaacgggctcaactcgaggcgtcaactttcctcaaggatgactgcttgaagataactgcactgttggtgttgtggtgtactccattgattgttccaagttaaacacaatacaggttcccgaatccgatattggggcacatttcgggatgctgttagagaatgaggagggatcanatgttactttctctgtcggtggagaaaggtttcatgcacataagcttgttttggctgctcgatcaatgc

SEQ ID NO: 290787 - DNA, 280 bp, Glycine max
  unsure (1)..(280): unsure at all n locations
gaacaagtagttgagaactaagaaggagaagcaaatggcttcctcaatgatctcttccccagctgttaccacngtcaaccgtgccggtgccggcatggttgctccattcactggcctcaagtccatgggctggcttccccaccagaaagaccaacaatgacattacctccattgctagcaacggtggaagagtgcaatgcatgcaggtgtgggccaccagttggcaagaagaagtttgagcactcttcctanctgccagaccttgatgatgcacaattgg

SEQ ID NO: 290788 - DNA, 276 bp, Glycine max
attaaataggggattggtcccagaagatgttgatatacattgtttggcaggacaaattaaggcttggtttagggaactgcctactggtgttctggattctttatcaccagagcaagtaatgcaatgccagactgaagaggattgtactgaactggccggccagctacctcacactgaagcttcccttttggactgggctattaatctaatggctgatgttgcccaagaggaagacttgaataagatgaatgcacggaacatcgccatggtttttgc

SEQ ID NO: 290789 - DNA, 276 bp, Glycine max
  unsure (1)..(276): unsure at all n locations
caatgcctcctttgactttgtggctggtgctgccttttctcgtgttgctagcggcggcaacaacgtctccaacacgcgccacgacggtcgcctcgtcgttccacggtcaacgagagttctgactatttcgctttcgcgttgcaatggcccggtacttactgcantngcacncgcagttgctgccccaccaacggttgctgcagaggctccaattttccaacagtgttcaccatacatggactctggcctgactatnatgatggaactggncgtctg

SEQ ID NO: 290790 - DNA, 276 bp, Glycine max
  unsure (1)..(276): unsure at all n locations
actaactctctcatcttctacagcattcttctgcaattcaaatcaaattttcaaaccatggcttcctccaccaacgctcttcctcccaccggcaacggcctcatcgtgagcttcggcgcgatgctcatcgatttcgtccccaccgtctccggngtgtcccttgcggaggctccgggcttcntcaaggcccccggcggcgcncccgccaacgtcgncatcgccgtcgcgaggctcgncggaaaggcggcgttcgtcggnaagtcggngacgacgagt

SEQ ID NO: 290791 - DNA, 277 bp, Glycine max
tggggttgttgtgccatttgctgccattgctgttcaaatacgccttaggaggaggcgatcattctatagccactagcactcttcagttgtcaagagcaagcagcgttgttatgcttctagcatacgctgcttacatcttcttccaattgaaaacccatcgtaaattgtttgatgcacaagaggtggacgaagatgaagagaaggcagttataggattttgggagtgcatttagtggttggtgggtaggacattggtcatatcgtgctttccgataag

SEQ ID NO: 290792 - DNA, 285 bp, Glycine max
  unsure (1)..(285): unsure at all n locations
ccgattgctagaatggaatttcgatgctcagtcatctcttttaccattctcttctctcttgctcttgcaggagagagccatgtccatgcatcgctacctgaggaagattattgggaagctgtttggccaaacactcccattcccactgcactgcgagagtttctaaagcctctcctgcaggtgttgaaatcgatgaaatccctaagcaaattgatggatacacagtaccccaaaaaccattcttctataaggaggactttcatccagggnaaaccatggaagtac

SEQ ID NO: 290793 - DNA, 309 bp, Glycine max
  unsure (1)..(309): unsure at all n locations
gctggttcacattcttcagaagattttcctgaaaaggaagatcaagaaaaacccaaaaagattgatgccagattgagacaaagaatagatcctcaatacaatgaggnncaggcctcanatggaacnaaatttgtttaaattgtctctgatgatgttgaaactcctaaaggttccatgttgggtcttaaaatttctcaaatctaaaattgcacttccccaggaacncagttggaggaaccattctgncgtagtgcntctattggcaatntttgacagagggnatttttngagccagtgtngtttggcgnc

SEQ ID NO: 290794 - DNA, 305 bp, Glycine max
  unsure (1)..(305): unsure at all n locations
gccccaaatccaatgggcttcagagaagaaactttcgaacccaatgagggagataaaggtgcagaagctcgtcctcaatatctccgttggcgagagtggagatcgtcttaccagagccgctaaggtgttggaacagcttagtggccaagcccctgtgttttccaaagcaaggtacacggttcgttcctttgggatagaagacatgagcaagattgcatgctatgtcactgtcagacgtgacaaggccattgcaacttttggagagtggttgaaggtgaaggaatatgaacttctcaganggactt

SEQ ID NO: 290795 - DNA, 301 bp, Glycine max
  unsure (1)..(301): unsure at all n locations
ctcgagncaggctttncattctcatccctggtattccaagctgccatcgttgctgantgctttggctttggaagaccttggatttccatattaagnctacttggacttagaccacntgcngaacgtgtgagcttcattacagaacaagttgcntttacactggtccacagttgggaggacttctgaatgctacatgtgggaatgttactgagctcccaatagcaatatttggcccntaagcagtaacaaanttgcntggtcnagtnttctctntnggtccnatnctttcaaacttcttctg

SEQ ID NO: 290796 - DNA, 302 bp, Glycine max
  unsure (1)..(302): unsure at all n locations
aagcaaccacatcatctttctttcaaatctaagggtttcctctttcttggaaaccaatcaatgtcggcnaatcgcggctccccaacacagatcctcgaagacagagtcctacgtggacaataagcggcaaggaggatatnccgccatggccaacatcgtggccgcacgctcagtcgccaacgcggttcgcaccagtctgggccctaagggcatggacaagatgatctccactcctccgacgaggtcatcatcaccaacgacggcgccaccatcctcaacaagatgcagtcctccagcccgcc

SEQ ID NO: 290797 - DNA, 288 bp, Glycine max
  unsure (1)..(288): unsure at all n locations
cactcataacacaaagcacaaagcaaagctcatccttgagttaaaaaatggcagcagcttcttccatggctctctcatccccatccttggctggcaaggccgtgaagctgggcccatcagccccagaagtgggaagggtgagcatgaggaagaccgtcaccaagcaggtctcctcaggaagccatggtacgggccagaccgagtcaagtattggggccattctctggcgagccccgtctacctaaccggtgantccaagcgataggcgggaactgctgggnttccgca

SEQ ID NO: 290798 - DNA, 303 bp, Glycine max
  unsure (1)..(303): unsure at all n locations
tgtatcaagagggagtagtacctatattggaaagttgagatcaaactttcttggcaccaaattcacagtgtatgatgcacaccctccaatttatggagccaaagttacaaagtctctcntccaccaggctagttagtctcaagcaagtttctccaagagttcctgctggcaactatcccattgctcatgtgtcatatgatctgaatggtntgggctctaggggccctagaataaatgcaatgtgttatggatgccatccctggcctcagctgttgaacctggaggtgtggccccaacacagat

SEQ ID NO: 290799 - DNA, 289 bp, Glycine max
  unsure (1)..(289): unsure at all n locations
gtctcatacatcaacttgggaggttaaagagacggcaacgttgtgctgtccgcttgaccgagccagagctcgtcttgggcctcgattttgcctgtaaaactaatcccagttcacaacagaaataatcaatggcaccgaaacagaccaaggctgagaagaagatcgcttacgatgcgacctgcattgttgcccagtangcataaggccttctcatatgggctgtggtctcnctgttatgataatggttcatgtcaanccgaggtcttgatcttatgaggngactcattgg

SEQ ID NO: 290800 - DNA, 228 bp, Glycine max
  unsure (1)..(228): unsure at all n locations
tgattgaagaagatgccgatcagaaacatcgccatcggaaggcctgaagaggctactcaccccgacacgttgaaggcggggttggctgagttcatctccaccttgatcttcgtgttcgccggttcaggttccggcatcgcctacaacaagcttcaccgacaacggcgccgccactcccgccggcctcatctccgcttccatcgnnccatgctttcgccctcttcgtcg

SEQ ID NO: 290801 - DNA, 298 bp, Glycine max
  unsure (1)..(298): unsure at all n locations
ggaggaaggatgagacccttggacgagaaggagacgagcgcagtgttcgagaagctgttcaagttcgtcggaaacaacctgaagaacatcgtggagaacccctcgnacgaangtcccgattcgaaaccccgggcgctactgcttccggctccanaagaacaagatcttctacgccagcgagttccctcgtgaagcgcgccaccaacgtcgcncgccccaaactggtcntccctcggcactgcatcgggaaatacancacgggcggcagttcccacttcacgttcaaggcctcaacttg

SEQ ID NO: 290802 - DNA, 179 bp, Glycine max
  unsure (1)..(179): unsure at all n locations
cactcataacacaaagcacaaagcaaagctcatccttgagttaaaaaatggcagcngcttcttccatggctctctcatnccccatccttgggctggcaaggccgtgaagctgggcncatcagccccagaagtgggaanggtgagcntgangaagancgtcataaggcaggtctcctcnc

SEQ ID NO: 290803 - DNA, 296 bp, Glycine max
  unsure (1)..(296): unsure at all n locations
cgagataactagaaacagtgtgatgaaaatgaaggtccttgttttcttcgttgctacaattttggtagcatggcaatgccatgcgtaacgatatgttccctctccgaatgaacactggctatggtgcccgtactccggaggtgaaatgcgcaagttggaggcttgctgtggaagcacacaacatctttggctttgagaccatttcctgnagcagtgcgttgaagcaanaaaggaatacatccatgggcgaacnatatagntcagactccaaaacagttanccaacaagcttacttt

SEQ ID NO: 290804 - DNA, 288 bp, Glycine max
  unsure (1)..(288): unsure at all n locations
gaatttacaccatctacagcatcctgttcattgtcttcatcattctcttgattgttactggctttcatcactgtggcatgacatacttccagcttgctgctgaggatcatgagtggtggtggagatcattccctatgtggtggttcaactgggttatgtatcnatgcctactgtctgtattactactatgcacgctccgacatgtctgggatcatgcagacctccatttttcctcggganacatggcccgtatatgctatggtttcctccttatgctggnaccgttng

SEQ ID NO: 290805 - DNA, 299 bp, Glycine max
  unsure (1)..(299): unsure at all n locations
gcaaacctggcttccagcaagtagtgctctattggaaatgatgatatttcatctaccctctccatcaacagcccagaagtatcgtgtgncgaacttgtatgagggtcctcttgatgatcaatatgcttctgctatcagaaattgtgatcctgaaggtcctctgatgctctatgtctccaagatgattccagcatctgataaggggagattttttgcctttggcgtgtattctcctggcagggtttcaactggtttgaaggtgaggattatgggacctaattaaggtccctggggagaaa

SEQ ID NO: 290806 - DNA, 297 bp, Glycine max
  unsure (1)..(297): unsure at all n locations
gagtttgttgtggagctataagctagtttatcgtgaggagaatatgaagttgtttgtnttcnttgttgctgcagtagttttggtagcatggccatgccatggncgcaggctaccaaaggttccctctccgaatgaaaactggctatggtgagcgttcttcagaggtaaatggcgcaattttaggcttgctgtggaagacagaaacatccgagcnttaaaaaccattccngaagaatgcgtnggaccaacaaangnntacattaatggcgaacaattttggaccagattctananaca

SEQ ID NO: 290807 - DNA, 288 bp, Glycine max
  unsure (1)..(288): unsure at all n locations
tgtgttttaaatccacaaaatccttttgtgttaaataggtggatgggaaaactgactttccccccagggnacttcccgaagtgttaagagaatgcctctttctatacggggaggtcctggtgcaaagaatgctattctcatgaacatgccaaatgctgttctttcaatgtggagatattttgttggagatctcgtctttgaagtttctaagatgactctccctacattaaatgtaccagtctctttcttcataggcattggaaattggctgatgacaccatcaatttt

SEQ ID NO: 290808 - DNA, 292 bp, Glycine max
  unsure (1)..(292): unsure at all n locations
attctccataccttcaacgaagaggttaaagagacggcaacactttgctgtccgccttgaccgagcagagttcgtcttggccctcgattttgccctaaagtactctcagtcacaacagacacnnnnnnnnnnnnnnnnnnnnnnaatggcancgaagcagaccaaggctganaagnagatccgcttacgatggcgaagtgtgcgacctaatggaggagtacggccagntcctcggtgtggaanccgataacgtggntcgaancnagctccagaacattcgnaangggtctcg

SEQ ID NO: 290809 - DNA, 172 bp, Glycine max
  unsure (1)..(172): unsure at all n locations
gcgaagagactggctcccaagggtttaatctttttggntgtgttatgcttcncaggactgtcactgagtcgttgtcttncggaggatnatggacttgttatgaacttntncaaggaatcatggcctcaggctgaagacatcctcaaagcncaagtcnagcttctctacaanc

SEQ ID NO: 290810 - DNA, 287 bp, Glycine max
  unsure (1)..(287): unsure at all n locations
cttacaagcttggaagaggtggttatggacctgtttataagggaacntttcctggaggtcaagacatagctgtaaagaggctttcaagtgtttccactcaaggcttagaggaattcaagaatgaggttattttgattgcaaaacttcagcatcggaaccttgttagactcaggggctattgcattaaaggagatgaaaaaatcttactttatgaatacatgccanncaagagttggactcatttatatttgacggacagaacttcatccggattggccaatacgatt

SEQ ID NO: 290811 - DNA, 286 bp, Glycine max
  unsure (1)..(286): unsure at all n locations
gaaagcaagctcatcctagagttttaaaaatggcagcagcctcctccatggctctctcttccccatccttgggctgggcaaggccgtgaagctgggcccatcagccccccgaagtcgggagggtcagcatgaggaagancgtcaccaagnaggcctcctccggaagcccatggtacggcccagaccgcgtcaagtacttgggcccatcctctggcgagcccccgtcnacttcactggcgagttcccaggtgactacggctgggacctgtgggctttggccgaccca

SEQ ID NO: 290812 - DNA, 290 bp, Glycine max
  unsure (1)..(290): unsure at all n locations
ccagaacggaggaacgccgccgtcgggatgctgcaacggagtgaagagcctcaatgccgccgccaagaccaccgccgaccgccagacggcgtgcaactgcctcaagtcggnngccagccaaatctccggcttcaaagccaacaacgccgcctcgctccccggcaaatgcggagtcttccatcccctacaagatcagcacctccaccaactgcgctaccatcaaggtttgaagagaaagttcatggncgcaggaaaccggaaactactcactagtatatgagtagattatt

SEQ ID NO: 290813 - DNA, 288 bp, Glycine max
  unsure (1)..(288): unsure at all n locations
cccggggtcttattcatccgtgcccatgtccaaagttctcggcttttccggagttgacgatttttgccctatgggatcaatatacgccaaccccaaggaagcaagtntnttcttgtcccttggccctcaagttgatgtatactttcctcctcggaagagatcgcgtgtcaatgctccattcgtttttgatggagaatggttcgagcaaaagcagaaaacctctattgaagcttgccagatgagtgtctctttgagatctttagaagggtgctgctggcggagacagga

SEQ ID NO: 290814 - DNA, 290 bp, Glycine max
  unsure (1)..(290): unsure at all n locations
cgagataactagaaacagtgtgatgaaaatgaaggtccttgttttcttcgttgctacaattttggtagcatggcaatgccatgcgtacgatatgttccctctccgaatgaacactggctatggtgcncgtactccggaggtgacatgcgaagttggaggcttgctgtggangcacacaacancctttggcnttgagaccattcctgaagagnncgttgaagcaacaaaggatacacccatggcggagcaatatagatcagactccanaacagttaancnacnagcttnct

SEQ ID NO: 290815 - DNA, 288 bp, Glycine max
  unsure (1)..(288): unsure at all n locations
aacggtcacaggtgtggaaatgttccanaagattctagacgaagccctcgccggggacaacgtggggctgttgctgagaggggttcaaaagacggacatccagagagggatggtgttggcgaacctgggcacgattacgccgcacaccaagttctcagcgattgtntatgtnttgaagaaggaagaaggtgggagacattcacctttctttgcagggtataggnctcagttntacatgangaccacgatgttactgggaggttanggttttnaccaacggtnnngtnt

SEQ ID NO: 290816 - DNA, 292 bp, Glycine max
  unsure (1)..(292): unsure at all n locations
ctcttcttttcacactgccgctgcaacaatggcttcaganaagaaactttcgaacccaatgagggagataaaagtgcagaagctcgttnctcaatatctctgttggcnanantggagatcgtctcaccagagccgccaaggtgttggaacaacttagtggccaaaccccagtgttttccaaagcaangtacactgttcgttcctntgggattagaagaaatganaagattgcatgctatgtcactgtcagaggtgacaaggcaatgcaacttttggagatggtttgaaggtt

SEQ ID NO: 290817 - DNA, 287 bp, Glycine max
  unsure (1)..(287): unsure at all n locations
cttttcactacttgttctcttcccttttnctttccagaacaacagaacaacagagcaaaaagctccaccaatggcgggttacagnnccgacgantantacgactacctcttcaaggtggtcctcatcggcgantccggcgtgggcaagtncaacctcctctcgcgcttcaccangaacgngttcaacctngagtccaagtccancattggcgtcgagttcgccacccgcacttgaagtcggttccaaagtcatcaaggcccagatctgggatancgcaggcangaaa

SEQ ID NO: 290818 - DNA, 246 bp, Glycine max
  unsure (1)..(246): unsure at all n locations
gnnttcgttctncctttctncctctctcagtcacacaccttctcgatgaccaacgacaacatcgccgtgacagatctcacttctgccctcaatgaagagaatcgcgccganctagtcaatgctctcaagagcaagattcagagtctggctggggcgcattctgatgttctagagactctatccccgaatntcaggaagcgtgttgaatctcttagagaaattcagggtaaacatgntganntagag

SEQ ID NO: 290819 - DNA, 290 bp, Glycine max
  unsure (1)..(290): unsure at all n locations
atgaagctaggtctgtacttgcacaagcagaaaggcagttccctgncttctgcaccaaatgccataacagcaaatgaccctgtcctgagcaacgggaaaagagctgctgaggatgaggatctggctcctggtgcaaagaaaattcatcctggaatatcttctagcataatttccgagctnactgattgcaatgcttctctttcccagcagagaaagaagcgacagattcctgcaactttggctcttgttgaagctctagaggcatatacccagatatctagtcacccctt

SEQ ID NO: 290820 - DNA, 290 bp, Glycine max
  unsure (1)..(290): unsure at all n locations
ggtgcagaagcaaatggcggcgagaagcaattgaaatttctgatctacggtcgcagcggttggattggtggtctactgggtaagctctgcgaagagcgcgggatccaatatgagtacggcaccggcagattggagaaccgctcgtcgttggaggcggacatagcggctgtgaagcccagccacgtgttcaacgccgcgggtgtcacgggtagacccaatgttggactggtgcgaatctcacaaagttgaaaccatccgaaccaacgtcgtnggnantctcacctcgcnga

SEQ ID NO: 290821 - DNA, 293 bp, Glycine max
  unsure (1)..(293): unsure at all n locations
ctctctcagctcaggagtgtataatctgagcgatgtcagatcttgaggctcccttgcgccctaagaggaagaangtttgggtggactatttcgttcagtttcgatggatccgtgttattgttgtngtccttcccatctccttcaccatttatttccttncataccttggggntgtaagatctgagtggaagtcctataagacgcgtcagaaggaacatgatgagaatgtgaagaaggttatcaaacgtctcaaacagaggantccatcaaaagatggtctgtctgtaccgctc

SEQ ID NO: 290822 - DNA, 289 bp, Glycine max
  unsure (1)..(289): unsure at all n locations
agcactatagtaaaaaaaggacattcattcatctatggctacccttattgctcccagcaaccactctccccaagaagatgctgaagctctcagaaaggcttttgaaggatggggaactgatgagaacactgtcatagtaattttgggtcatagaactgtgtatcagangcagcaaatcagaagagtttatgaggaaatttaccaggaggatcttgtgaagcgcctagagtctgagatcaaaggagactttgagaaagccgtgtaccgatggatactggaactgcagatc

SEQ ID NO: 290823 - DNA, 291 bp, Glycine max
tcccaaagagctaacaagagattcaagaccggcatggctaatgaagaggaacagaaaaaccacctcttcggcatcaaagatctcggtcacaagactctccttcagagtgatgcactctatcagtatatacttgaaaccagtgtctatccaagagagcacgagtgcttgaaagagatacgcaagatgactgcaaaacacccactgaacatcatggcaacaccagcagacgaaggacaacttctgagcatgcttgttaagctcacgaattcaaagaacgccttggaaattggt

SEQ ID NO: 290824 - DNA, 296 bp, Glycine max
  unsure (1)..(296): unsure at all n locations
cgnaaatccagttttgatgtctgcagctgagcagatttttagtgctggtggaaagaggatgagaccagctttggtgttcttggtgtcaagggcgactgcagagttacttggcttgaaggaacttactgcaaagcatcgacgtttagcaganataatnganntgattcatactgcaagtttgatacatggtgatgtactagatgagagtgacctncgacgagggaagaaaactgttcatcaaatgtntggaacaagantgcagtctggctggatncttcatgtttgcccagtcatcc

SEQ ID NO: 290825 - DNA, 284 bp, Glycine max
  unsure (1)..(284): unsure at all n locations
cctctttctatagggggaggagctggtgcaaagaatgctattctcatgaacatgccaaatgctgttctttcaatgtggagatattttgttggaganctcgtctttgaagtttctaanatgatcctntccctacattaaatgtacagtctcttncttcatagcatttggaaatttggctgatgacaccatcnattttgaggcctttccccacaagctggtgcagtttggagaaattcaggaaaaaggngtatgaaattttcacaagaggaattcttacagctggg

SEQ ID NO: 290826 - DNA, 288 bp, Glycine max
  unsure (1)..(288): unsure at all n locations
ggaaattttcacaagaggaatttcttacagcttggtcaactcaggtgcgtcctgcaacaactctgttggctgangggtgcccatattngtatgctatggtgcatgatagttcagtgtctacaataccaggtgattttgtcattggtgtcaagttgacaaccataaacaatatgtgtgcatatgggctcaatcctggtatttcaggttctcgtctttgggcacaattcctcagtnccatttccacagcaaactgtttggaatcaaatggcaacagtgagaccaccattg

SEQ ID NO: 290827 - DNA, 292 bp, Glycine max
  unsure (1)..(292): unsure at all n locations
cgctaatatgcttcgtgctcaaaganagantnctcagagacagtnggaagctgagaanaagaaaagaactgaggggcctcgagtggatncnctanaganaaggtcttctgatactcatgatagantacatttgttggagnagatgatggcgcaagacatttcactgggttatntgtgcatcgctacagagacattgnccanaatattagaatgtcatgcatcgaatcgttgggtgcatggatcctgtcatacccatcncttttcctgcaggatttgtacttgaaatatcttg

SEQ ID NO: 290828 - DNA, 290 bp, Glycine max
  unsure (1)..(290): unsure at all n locations
ctagttctgagtattctgatcgctccctgagagagctcgtcgcggcggttgcagaagaagattgcaagatgaagttcaacatcgcgaatcccaccantggatgccagaagaagctcgagatcgacgacgatctgaaactgcgagcattttgggacaagaggatctcacatgaggtcatcggagatgcactcggtgaggaatttaagggctatgtcttcaaaattaccggaggttgtgacaaacaaggatttccaatgaagcagggagtgctgactcctggtcgtgttaga

SEQ ID NO: 290829 - DNA, 289 bp, Glycine max
cacccaccattggatccaccaatctccaaccttcttctccactgttccgtttctctctccaacgagtcttttgttttttgtggcgagtttgttgcacgtttaagaagcaatggcacgcaagaagatcagagagtatgactccaagaggttgttgaaggagcactttaagagaatctctggccaggagttgcccatcaagtctgcacaggttacagaatccaccaatttcagtgagctagcagagaaggaaccctggcttttatcttcaaaattggttgtgaaccagaca

SEQ ID NO: 290830 - DNA, 285 bp, Glycine max
  unsure (1)..(285): unsure at all n locations
ctggcgacgaaaccgctcctttcttcggcttcctcggtgccgctgcggccctcgtcttctcctgtatgggagcggcgtatggaacggcgaanactggggtgggggtggcgtcgatgggagtnatgaggccgganctggtgatgaagtcgatcgtgccggtggttatggcgggagtgttcgggatttacgggttgattattgcggttatatcagcactgggataaacccaaaggctaagtcttactatctctttgatggataatgctcatttgtcctctggccttg

SEQ ID NO: 290831 - DNA, 288 bp, Glycine max
  unsure (1)..(288): unsure at all n locations
ccaggggcgattagtgaagataatattttgaatgggatagcatgggatggttggggtctggcaactgatgganaagtcttgtttggaagtgatggcagttcaacattgtatcaantgnttcaaactgatcctcagacatttaaagctgtatcaaaacaagttgtctactataagggtcatgaagtacacaatctcantgaattggaatacataaatggtgaagtttgggcaaatgttttaccgactgnctgcattgtaagaatctctccgagtgatggcagtgttctt

SEQ ID NO: 290832 - DNA, 289 bp, Glycine max
  unsure (1)..(289): unsure at all n locations
cggcagaaagcaagctcatcctagagttttaaaaatggcagcagcctcctccatggctctctcttccccatccttggctggcaaggccgtgaagctgggcccatcagcccccgaagtcgggagggtcagcatgaggaagaccgtcaccaagcaggcctcctgccggnagcccatggtacggcccagaccgcgtcaagtacttgggcccattctctgggcgagcccccgtcctacctcactggngagttcccaggtgatacggctgggaactgttgggctttcggccgac

SEQ ID NO: 290833 - DNA, 294 bp, Glycine max
  unsure (1)..(294): unsure at all n locations
caacgacatatntatattcgggcatagataacaccgtactctctaatatcccatactatgaaaaacatggatatggggtggaggaatttaatgaaaccttatatgatgaatgggttaacaaggggcgacgcaccgggcattgccagagactcttaaaaattaccacaagctgttgtctcttgggcttcaanattgtatccttgtcaggaagatatcttgacaaaatggccgtaacagaagcaaacctaaangaaggntggcttccacacatgggagcagttattctcaaggntc

SEQ ID NO: 290834 - DNA, 211 bp, Glycine max
cgctaaggagtgtgtaacaactcacctgccgaatcatcccgcatcgccagttctgcttaccaaaaatggcccacttggagctctcgattccatggcgcggctcaacagagcagccgcaccgtcctacctatttaaagtttgagaataggtcgagggcgttgcgcccccgatgcctctaatcattggctttacccgctagttctagatcgcg

SEQ ID NO: 290835 - DNA, 285 bp, Glycine max
  unsure (1)..(285): unsure at all n locations
tcagtcttgtntatttgaaattaacaagtagcaaanatgtttggnatcatcggaggaaacaagggtcacaagntanaggggaacttggtgattatgcnaaanantgtgttggatatcaacagcattaccagtgttaagggtgtcatcggaaccggcattancatcattggaggagtcgtcgacaccgttactgctttggcgtcccacatctccatccagctcattagtgccaccaaggctgatggacatgggaaagganaagttggaaaggctacaaatttaana

SEQ ID NO: 290836 - DNA, 284 bp, Glycine max
  unsure (1)..(284): unsure at all n locations
tncgnttcaaggcgtctcgtagggctaatccgcctcanganggtcaccaacggcacgtgcntttggggggcngaggncccctagntgntggttggcaaanggacngcgggcngangcntnncntctagnccggattctgacttngaggcgttcagtcatgatccaacgnacggcagcttngcgccanttgcttttcaacnaagcncgatgaccaattgtgcgaatcaacggttcctctcgtactaggttganttactattgcgacactgtcntcngtagggtaa

SEQ ID NO: 290837 - DNA, 282 bp, Glycine max
  unsure (1)..(282): unsure at all n locations
ccatctgttgctggttttcctttgcaaaaggaacttgattaccttgttggggcagtatcaaaccccaaaaggccatttgctgncattgttggtggttccaaagtctcatctnnaatttcagtgattgagtcacttttagaaaaagtngacatccttcttcttggtggaggnatgatcttcacatttgacaaggcacaaggtctttcagtgggttcatcccttgtngaagaagataagttggatcttgctacatcatacttgcaaaagccaaggnaaaggggg

SEQ ID NO: 290838 - DNA, 266 bp, Glycine max
  unsure (1)..(266): unsure at all n locations
ggaaaaggatcagctcagggaggagaccaaagctggaaaagtnccccagggaatgcggganggncttatcanatttcctccaacatataaatttgagaggcacaaaccaggtttaggagggnatgattctggngagattnaatcggttccggcctggtgtgacagaataatatancgcgatactcggtnagctccagtttctgagtgcaatttagagtgnccctgttgtgtcatcaattgtacagtangnngcttgnatggatgtg

SEQ ID NO: 290839 - DNA, 247 bp, Glycine max
  unsure (1)..(247): unsure at all n locations
tcttagatctcttctttctctacgccgcacgccgaaaccatggccggaaaatgagagggtcctgctatcggaatcgatctcggaaccacctactcttgcgtcggtgtgtggcaacatgaccgcgttgaaatcatcgncaacgaccaagggaacagnnncacgccgtcttnacgtcggattcactgacacggagngtctcatcggtgatgcngccaagatcaagnngcaatganccccatcannaccg

SEQ ID NO: 290840 - DNA, 280 bp, Glycine max
  unsure (1)..(280): unsure at all n locations
ggccagattganacaaagaatagntcctcaatacaatgaangttcaggctcagatgcccnacaaatttgtntaaattgtctctngatgatgttgaaactcctnaaggttccatgttggatcttaaaatttctcaatctnanattgcacntcccaagaacacagttggaggaaccattctgcgtagtgatctattggcaaattttttnncagagggcaattttagagcangtgttgattngcagcgcactcatcgtattaaaggaatgattaaaatggtgg

SEQ ID NO: 290841 - DNA, 284 bp, Glycine max
  unsure (1)..(284): unsure at all n locations
ttatcctaatgggtgccgttgaaggttaccgtattgctggtggccccctcggtgaggtcactgacccaatctacccaggtggcagcttcgacccattgggccttgctgatgacccanaggcttttgctgagcttaaggtnaaggaactcaagaacggacgattggccatgntctctatgtttggcttctttgttcaggccattgtcaccggaaagggtccattggagaacctcgccgatcaccttgctgaccctgtcaacaacaacgcctgggcctatgccacc

SEQ ID NO: 290842 - DNA, 173 bp, Glycine max
gctgacattggtcaggcaatagcaaaagacacccgcattcccctggtttcatttactggaagttcaaaggttggcttgatggtccagcaaacagttaatgagagatttggcaaatgcttgcttgagttaagtggtaacaatgcaataatagtcatggatgatgcagatatcat

SEQ ID NO: 290843 - DNA, 173 bp, Glycine max
caccacgtagcaagctagatacacaagcctacggtgatcatacctgtataataacaaaacaacatttggaacctaacttgggtgggctcactgttgagcaggctatccagagcaagaagctgttcatcttagatcaccatgactatctcattccatatttgaggaaaataaat

SEQ ID NO: 290844 - DNA, 171 bp, Glycine max
ttccctacctctcccttcaagatgcagatcttcgtcaagaccctcaccggcaagaccatcacccttgaggtggaaagctctgacaccatcgacaacgtcaaggccaagatccaggacaaggaaggaatccccccggaccagcaacgtctcattttcgccggaaagcaactt

SEQ ID NO: 290845 - DNA, 169 bp, Glycine max
  unsure (1)..(169): unsure at all n locations
agaaaggctcttcatcttctaagganggcactgctaaatcaacctcttctaagaaaaaagcaagtggctctgatgaagaccacacttcacctactcacagtcaaattgacgagaaagaggaggctccagatgaagatgatgacgacgacgtgcaatggctgacagatac

SEQ ID NO: 290846 - DNA, 172 bp, Glycine max
ttgcctcagaagctgagctgaaaaagacagtgtttcatgacttccatgttgctcatggtgggaagatggttccatttggctggatggagcatgccaatccaatacaaggactcaatcatggactctaccatcaactgtaggcagaatggtagcctttttgatgtttcccatt

SEQ ID NO: 290847 - DNA, 175 bp, Glycine max
agaccatcaaagaagctttggaaagggaatgcccaggagttgtttcctgtgctgatatcctcgttctctctgccagagatggcattgtttcgctaggaggtccccatatccctcttaaaacaggaagaagggatggtagaaggagcagagccgatgtggtagagcagttcctccc

SEQ ID NO: 290848 - DNA, 175 bp, Glycine max
cttgggaatccaaaaatgagagaaatcatcagcattcacataggtcaggccgggatccaggttggcaactcctgctgggaactctactgcctggaacatggcatccagcccgatggcatgatgccaagtgactcctccttcggtgtagcccacgacgccttcaacaccttcttca

SEQ ID NO: 290849 - DNA, 172 bp, Glycine max
  unsure (1)..(172): unsure at all n locations
gcacagtccaacactccattgtgggtnaacgttcacgtttggattatggtgntgagctcctggacactgnaatgatgggagcngactatnaccaaactgantctgaaattgcttctctgctggcagaggggaaggtcccaattggtantggaaggaataccanaattagnaa

SEQ ID NO: 290850 - DNA, 187 bp, Glycine max
  unsure (1)..(187): unsure at all n locations
cgagaanacaggtatagcattgggcctgtgctatgaatagttcttttagggggcgcgccagtttctganatttacancatctgctctcaagactgtgaatnatggaatcctgcttgcacaaaagcaatgggctatgtcatttaatccaaacccgtgttctgatgcatggagtttggaatttctgaag

SEQ ID NO: 290851 - DNA, 173 bp, Glycine max
  unsure (1)..(173): unsure at all n locations
ctcttcttcgtctcaaaccncttcgttcctggcgattcattccanttcttccaaaatggccaaagacccagttcgcgttctcgncactggagccgcagggcaaattggatatgctcttgtccctatgattgctaggggagtgatgctgggtcctgaccagcccgtgatcctcc

SEQ ID NO: 290852 - DNA, 164 bp, Glycine max
  unsure (1)..(164): unsure at all n locations
ttttgaaggtttcgagaaaaggttggaaatatcctttttccagccgggactttttgctgaccctgaaggaaggggtctaagggctcttacaaaatcccagttgggtgagatnctaacaccanctgcttgnancattgtntcttcgctcaaaaacgataatgtcg

SEQ ID NO: 290853 - DNA, 164 bp, Glycine max
caagaagtggaacgccgtcgctctctgggcttgggacatcgttgtcgataactgtgctatctgccggaaccacatcatggatctctgcatcgagtgccaagccaaccaggctagcgccactagcgaggaatgcactgtggcttggggagtttgtaaccatgctt

SEQ ID NO: 290854 - DNA, 165 bp, Glycine max
  unsure (1)..(165): unsure at all n locations
tgaaacacaaagaagaaaaaatgggttcctctttgtggacttgtctgattttgttatcacttgcttctgcttccttcgccgtcaacccaagaacaccaattnatgtgccatttggcagaaactatgtgcctacttgggcctttgatcacatcaaatacctcaatg

SEQ ID NO: 290855 - DNA, 171 bp, Glycine max
  unsure (1)..(171): unsure at all n locations
tcattcgcatctttctctcttctctctccacccaaaccctaactcccgaccctgttcccctctcgnatccgtcanganaggaggaaagtncaagaccgaatctaagagagccgatcccaaacttgctgtgaataagaagggagccgccaccaaggctaggaaacccgccgg

SEQ ID NO: 290856 - DNA, 295 bp, Glycine max
tagagagagacgcttcgcaaatctcaatcgaatctcagaaaatgagagaaatcatcagcattcacataggtcaggccgggatccaggtcggaaactcctgctgggaactctactgcctcgaacatggcatccagcccgacggcatgatgccttctgactccaccttcggtgtagcccacgacgccttcaacaccttcttcagcgaaaccggatctggcaagcacgtcccccgtgctgtcttcgtcgacctcgaacccaccgtcatcgacgaggtccgctgcggcacctaccgtca

SEQ ID NO: 290857 - DNA, 294 bp, Glycine max
  unsure (1)..(294): unsure at all n locations
aaaaaagtcatagaagggaagagagaaacataaganagaagatcanaagaaaaaagagaanacaaatggcagcactgggtggctttaccgacatcaccggagcacanaacagcatcgatatcgaaaatctcgctcgctttgctgttgatgaacacaacaaaaaagagaatgcagttctggagtttgtgagggtgattagtgcaaagaaacaagtggtttctggcaccttgtactatatcactttggaggcaaatnanggcgtgacgaaaaaggtttatgaaactaaggtgttgg

SEQ ID NO: 290858 - DNA, 294 bp, Glycine max
  unsure (1)..(294): unsure at all n locations
ctcgaagatcgagatatctatttagatctcagaaaaacagtgtttgnntttcaattcattcagtcttattacttattagggtttgggcgattcagagagaaagagaaatgggagaacgaaaaggaatcccaattgctctggggctcttggcgatgctcctcttcttcattgcttcttcctcttcctctcacctcgttcgtgcttccgatgacgccgacgacgcgatcttctacgagtcattcgacgaggattttgacggacggtggattgtgtccgacaaggaggattacaacg

SEQ ID NO: 290859 - DNA, 289 bp, Glycine max
  unsure (1)..(289): unsure at all n locations
gcaattaacagcaacattgttcggataactccaccgctgtcccaatatagtagaggaagattggtggctgggtcatttcagggatacactggccatgtggatggaaaaccaagtgatgctcgtttcaatcatcccaaaggcataactgtggatgataaggggaatgtttatgttgctgatactcagaatctggccatcagaaagattggagatgctggtgtgacaaccattgnggaaggaagtccaatgttgcaggctacagggatgggnctagtgangtgctaaattc

SEQ ID NO: 290860 - DNA, 288 bp, Glycine max
  unsure (1)..(288): unsure at all n locations
gcttgcacttcgaggtgatccaccgcatggtcaggaaaattcgtccaggtcgaaggcggctttgcctgtnccacgcgacttggtgcaacatatcagagctaaatntggtgactactttggcattacagtcgctggttatccagaggcacatccggatgttatagaaagtgatgggttggctacatcanagggttatcaaaatgatcttgcttacttgaagagcaangttgatgctggagcagatctgattgtcactcagtnatttntgatacggnaaattcctccaat

SEQ ID NO: 290861 - DNA, 287 bp, Glycine max
  unsure (1)..(287): unsure at all n locations
tttgtaaganagatgtttggagagttgaatgtggaacccttctggatttccgctcacagttatttgcaatagcatttttaatgagatgctcattagatatagctatgaaaaattactgcgccaggctaaagctccaagtatgtttttacaatccttcaaaaatttngtttctttgtgtgtgnatggtgatgataacttaattagtgttcatgaatatgtcaagccttactttagtggttctnaattgaaaagctttctagctggtcataatatcaccttactgatgg

SEQ ID NO: 290862 - DNA, 290 bp, Glycine max
ttgcattgctgatcatacagcctgaatatgcttttggtccatctgggtcctctcaggaattggctaatgttcctccctaattccactgtgtactacgaagttgagctgctttcctttgtaaaggaaaaggaatcgtgggatctgaatacacaagagaagattgaggcagctgggaagaaaaaggaagaagggaatgccttttttaaggttggcaaatatgaaagagcttcaaagagatatgaaaaggccataaagtttgtcgagtatgattcctcctttaggatgaggag

SEQ ID NO: 290863 - DNA, 291 bp, Glycine max
  unsure (1)..(291): unsure at all n locations
ctcgagataactagaaacagtgtgatgaaaatgaangtccttgttttcttcggtgctacaatttncggtagcatggcgtgccatgcgtagcgatatgttccctctccgantgancactggctntggtgcccgtactccggaggtgaaatggcgcaagttggaggcttgctgtggaagcacacaacantctttggctttgagaccattcctgaagagtgcgttgaagcaacanaggaatacatccatggcgaacaatatagatcagactccaaaacagttaaccaacaagct

SEQ ID NO: 290864 - DNA, 287 bp, Glycine max
  unsure (1)..(287): unsure at all n locations
cacttttggggaagaggtcgagtttcacagcagcatggtgtacgtcaaggctcagaaatcaaaagcctacttcaagagntatcaagtcaagttcaagagaagaagagagggaaaaaccgattaccgtgccaggnttcggttgattaatcaggacaagaacaaatataacactccgaaataccgatttgttgttcgctttagcaacaaggacattgttgcacaaataatatctgctagcattgctggcgatattgttcttgctgcagcatatgcacatgagctgccac

SEQ ID NO: 290865 - DNA, 285 bp, Glycine max
  unsure (1)..(285): unsure at all n locations
tttctgtctctgtgtttgcggctgaggattccgaacgagcgaccttcttcgtttctcgcaaagtttaagtcatcatgggtaangnaaagactcacatcaacattgtcgtcattggncatgtcgactctgggaagtcaactaccactggtcatttgatctacaagcttggaggtattgacaagcgtgtgattgagaggttcgagaaggaggctgctgagatgaacangaggncattcaagtatgcctgggtgcttgacaagctcaaggctgagcgcgaaagaggat

SEQ ID NO: 290866 - DNA, 285 bp, Glycine max
  unsure (1)..(285): unsure at all n locations
cgaagagaatggctcccaagggtttaatctttttggctgtgttatgcttctcagcactgtcactgagtcgttgtcttgcggaggataatggacttgttatgaacttctacaaggaatcatgccctcaggctgaagacatcatcaaagaacaagtcaagcttctctacaagcgccacaagaacactgctttctcctggctcagaaacatcttccatggactgtgcngttcagngttgtgatgnttcactgtnnnnggactccacaagaaggagttgctnggnaagg

SEQ ID NO: 290867 - DNA, 288 bp, Glycine max
  unsure (1)..(288): unsure at all n locations
cccgcatcttttgatccgtgctctgtgattcccagaccttatttntnctgtcatttgcttcaaatntcaggagattaattatggctcaacccacaacaagaataggccttgctggattgggctgttatgggccaaaatctggcactcaatattgctgagaaaggctttcccatttctgtttacanccgaaccacttccaaggttgatgagacagtagaacgagcaaancaaganggaaatcttccagtttatggctaccatgaccctgaagcttttgttcnttccatt

SEQ ID NO: 290868 - DNA, 278 bp, Glycine max
agagatccatcgatcaattaatttccaatggccgatcagctcaccgacgaacagatctctgagttcaaggaagcctttagcctcttcgacaaggacggcgatggttgtattaccaccaaggaacttgggactgtgatgcggtcgcttgggcagaacccaactgaggctgagctgcaggacatgataaatgaggttgatgctgatgggaatggtaccattgatttcccagaattcctcaatctcatggcgcgcaagatgaaagacactgatcagaggaa

SEQ ID NO: 290869 - DNA, 288 bp, Glycine max
  unsure (1)..(288): unsure at all n locations
cacccctcttagtcccaattttctagggttttattattttccgatggcttctgcagatgttgagtaccgttgctttgtcggtgggcttcgcttggnccactgacgaccatgccctcgagagagcttctctcagtacggcgaaatcgttgaaacgaagattatcaacgatcgtnagactggcagatccaggggttttggatttgtnaccttcgcctcggagcagtccatgaaagatgcgatcggagcgatgaatggacagaacttggacggccgtaatatcactgtcaa

SEQ ID NO: 290870 - DNA, 287 bp, Glycine max
gtgtactgagataattgagtattcaagtccaactgaaactgctgtgtgcaatctggcatcaattgcactaccacgatatgtaagagaaaagggtgtcccgatggagtctcatccatccaagcttgttggaagcacaggctctggaaatcggtattttgactttgataaactagcagagattactgcactggtcacaacaaacctgaacaaagtaattgatgttaattactacccagttgaaaatgcaaaacggtcaaacttacggcacagaccaattggtataggag

SEQ ID NO: 290871 - DNA, 286 bp, Glycine max
  unsure (1)..(286): unsure at all n locations
caggaaaaagttgtattgaaattttcacaagaggaatttcttacagcttggtcaactcaggtgcgtcctgcaacaactctgttggctgatgggtgcccatatttgtatgctatggtgcatgatagttcagtgtctacaataccaggtgattttgtcattggtgtcaagttgacaaccataaacaatatgtgtgcatatgggctcaatcctggtatttcaggttctcgtcttttgggcaccattcctcagtccatttcacagcaaactgtttggnataaatggcaac

SEQ ID NO: 290872 - DNA, 282 bp, Glycine max
  unsure (1)..(282): unsure at all n locations
caacagtgagaacaccattganttttgattctagcaagcagagcttttgtcaattttctattgaccttctcggtggaggaattttagtggacaaaactggagattggatcacacttatacaaanttctccaattagtaacttgttgagagttgctgcttggaagaaangctggttaatggtcaagattgtgatgtctggggaatgcngccagtcaaaaggagtgattgggcctcattggtacaagtgttttaacnaacagncacagtncngnncttttgatg

SEQ ID NO: 290873 - DNA, 276 bp, Glycine max
  unsure (1)..(276): unsure at all n locations
ctacgctttctcgtttganatccctcaagggatccactaactgaaggagcaatggggttgacatttaccaagctttttagccggcttttcgccaagaaggaaatgcgaattctaatggttggtcttgatgccgctggtaagaccaccatcctgtacaagctcaaacttggagagatcgttaccacaattcccaccattgggttcaacgtggagactgtggaatacaagaacattagtttcactgtctgggatgttggtggccaggaaagattcgtc

SEQ ID NO: 290874 - DNA, 277 bp, Glycine max
  unsure (1)..(277): unsure at all n locations
gcaacacaacaaaaaaagnnnncnccncagngngcgtcttaataaacgctcttctctgaaaacccncatttcttttcttcttnctcttctcttcgcttcttcgatcttcgatcttcgtcgctgaaaatgagagagtgcatttcaatccacatcggccaggccgggattcaggttggaaacgcntgctgggagctttactgcctcgaacacggcattcagcctgatgggcagatgccaagtgacaagaccgttggtggaggtgatgatgtttcaacac

SEQ ID NO: 290875 - DNA, 286 bp, Glycine max
  unsure (1)..(286): unsure at all n locations
cttcaatttataagaatggcactttctcctattcgttcttcttctnntctcttcatcagctattgttgcattggctgtgttactgcttcttacagggacctcttcagctaacctctcaaagaacttctattccaagacatgtcccaacgttttcaacactgtaaaatctgtagttaaatctgctgttgtcagagaacctcgcattggggcatctattgttcgtctcttcttccatgactgctttgttcaaggctgtgatgggtcaatactacttgatgacactcca

SEQ ID NO: 290876 - DNA, 283 bp, Glycine max
  unsure (1)..(283): unsure at all n locations
gtcactcacaaaatcaccaccaaccgcgagtcatccagctctccttaaaaatcacnttccgcgcggtggagcanaactacttcaccgtgaaanaactctttaccgaacacgacgacctaacaaaacgcgaaananccgctctccacgactgcctggnaaccatagacgaaaccctcgacgagctcagagaagcacaacacaacctcgagctttaccctaacaagaaaacgctctaccagcacgccgacgatctcaaaaccctcatcagcgccgcataacgaac

SEQ ID NO: 290877 - DNA, 290 bp, Glycine max
  unsure (1)..(290): unsure at all n locations
ggcagttcggtgttggtntctactcggcttatcttgtagctgataaggttattgttaccacaaagcacaatgatgntgaacagtatgtctgggagtcccatggccggtggctcatttactgtgacaagagatacatctggtgagacccttgggnagggggaacgaagtaaacntttggngtcttaagggaggtcnacttngangatcntganggacgccggtctgaaggatttgnttaaaagagcattcnngaaatccattagnnatccgatttctcnccggnntgaaga

SEQ ID NO: 290878 - DNA, 277 bp, Glycine max
aagacattgatagcaatatggggggattcccatcaggcaacaacggttctgcctgaccctacttaagcatgcatattatgtcagtgaagacttggtgtgaagccttggagcttacgttagaagagcaaaaggcccggggctagggtgagctgaggggggacagcgtaagtgagcgaatgtgtgtaagcccagtcaaacatgactgttctaggcggggcgggccacccaccttcgaatggtgttggtcctacggaccgtgaatggatcgcctctggcc

SEQ ID NO: 290879 - DNA, 274 bp, Glycine max
  unsure (1)..(274): unsure at all n locations
gtggtgtcggaatcnacgagtagtggaggaatgaacagttttgggtcatcggtggtgtctcggcgcatctctttgctgttttccaaggcttgctcaaagtgcttgctggaattgacaccaacttcactgtcacctccaaggcctcggatgaagacggagactttgccgaactatacatgttcaaatggaccacccttcttattcctccaacaacccttctcataataaacttggtgggggtggttgctggcatctcctatgccatcaacagtgg

SEQ ID NO: 290880 - DNA, 283 bp, Glycine max
  unsure (1)..(283): unsure at all n locations
cacacatagaaacccaacaacaagaatgaagaagatgattctaaccctcttcttcaatatcattttatctctcctctccctctcccacgcctccgtggtggatttctgcgtagagactancacaggccccaatggccccgcaggtaactcatgcaagagcccagcaaaggtcacggtggacgacttcgtctactccggccttggcaccgccggcaacacctcaaacatcatcaaagccgcggtgacgccggcgttcgacgcgcaattccccgggtcaacgggc

SEQ ID NO: 290881 - DNA, 281 bp, Glycine max
  unsure (1)..(281): unsure at all n locations
ctacgctttctcgtttgnnnatcccncaagggatccactaantgaaggagcantggggttnacatttacntatctttntanncgnctanncgccaagaagganatggcgaattctaatggntggtcttgatgccgctggtaagaccaccatgctgtacaagcgcaaacttggngagatcgtgacnacaattccccccattgggttcaacgtggagactgtggaatacaagaacnttagtttcactgtctgggatgttggtggccagggacagattcgtcct

SEQ ID NO: 290882 - DNA, 279 bp, Glycine max
  unsure (1)..(279): unsure at all n locations
caattttcttctttctctctcccttagtcaaagggactcattgttcttctcccaggttatttagaaaagcaaaatggtgaagatttgctgcattggtgctggatatgtggggggtnctactatggcagtcattgcacttaagtgcccatccattgaagttgctgttgttgatatctctaaatcccggcattgcagcctggaacagtgaccagctttcctatctatgaacctgggccttgatggtgtgtgaagcaatgccgtggcaagaactcttcttca

SEQ ID NO: 290883 - DNA, 277 bp, Glycine max
  unsure (1)..(277): unsure at all n locations
cctagattcagccacagtttcggggagaagaaaatagtcgttcganatggcccgtacgaagcaaactgctcgtaagtccacaggaggaaaggctccctaggaaggcagcttgcaaaccnaggctgcacgtaagtctgcaccaatactggtggtgtgaagaagccacatcgttaccgtcctgggaccgttgctcttcgtgagntttgggagataccngaggantaccgagcttttgatcnggaagctccccttncagaggnggttcgtgaantgntcc

SEQ ID NO: 290884 - DNA, 279 bp, Glycine max
  unsure (1)..(279): unsure at all n locations
gcaaagaatgctattctcatgaacatgccaaatgctgttctttcaatgtggagatattttgttggagatctcgtctttgaagtttctaagatgacttctccctacattaaatgtacagtctctntcttcatagcatttggaaatttggctgatgacaccatcaattttgaggcctttccccacaagctggtgcagtttggagaaattcaggaaaaagttgtattgcaaattttccccaagaggaattcctaacagcttggtcantccagggncgtcctg

SEQ ID NO: 290885 - DNA, 279 bp, Glycine max
  unsure (1)..(279): unsure at all n locations
cgggttatcatttctccatttccattttctctctcacttttcaagaatcgtaagctatgggaaagtcttacccaactgtgagtgctgattaccagaangccgttgagaaggcgaagaagaagctcagaggcttcatcgctgagaagagatgcgctcctctaatgctccgtttggcatggcactctgctggaacctttgacaagggcacgaagaccggtggacccttcggaaccatcaagcaccctgccgaactggctccacagcgctaaaaangtcttt

SEQ ID NO: 290886 - DNA, 283 bp, Glycine max
agaactatactatctatgctgtgtcaatcaccattcgtattgtgtttggtttcttgtttattgcgttgatctggaagtttgattttgcacccttcatggttttgattattgccatactcaatgatggtaccattatgactatatccaaggatagagtgaaaccatcaccacttcctgatagctggaaactgagggagatatttgctactggcgttgtgctaggaagttacatggcactaatgacagtagtatttttctgggcaatgaaagataccaacttctt

SEQ ID NO: 290887 - DNA, 279 bp, Glycine max
  unsure (1)..(279): unsure at all n locations
tttggtgtgnagctataagctagnttatcntagacgagaatatnangttgtgtgnnttctttgttggtgncagtagttttggtagcatggccatgccatggcgcnggctaccaaaggttccctactccgaatgaaaactggctanggtgatcgttcttcggaggtaaaatgcgcaagttttaggcttgctgtggaagcacacaacatccgagcctttaaaaccatncctgaagagtgcgttaaaccaacancngactacataatggcgacaatttagat

SEQ ID NO: 290888 - DNA, 275 bp, Glycine max
  unsure (1)..(275): unsure at all n locations
gctttctgctgacccagagactttgccaaaaaccgtgaactggaagtcatccactccagatgggccatgttgggagccttgggctgtgttttccctgaactcttgtcccgcaacggagtcaagtttggcgaggccgtgtggttcaaggccgggtctcagatattcagtgagggtgggttgataacttggggnaacccaagccttatccatgcannaagcattcttgccatctggggccaccaagttatcttgatgggttccgttgaggggtacgg

SEQ ID NO: 290889 - DNA, 278 bp, Glycine max
  unsure (1)..(278): unsure at all n locations
tgttcccagaacctattgtgtntaaatccacaaaatccttttgtgttaaataggtggatgggaaaactgactttcccccagggcacttcccgaagtgttaagagaatgcctctttctatagggggaggagccggtgcccagnatgctantctcatgaacatgcccaaatgtgttctttcaatgntggagatatttgttgggagatctcgtctttggaagtttctaagatgacttctccctacattnaatgtncngtctctttcttccaaagcnnttgg

SEQ ID NO: 290890 - DNA, 288 bp, Glycine max
  unsure (1)..(288): unsure at all n locations
ggaaatttgatgccactttatacatcaagttgttaagggcagtttatcttcctagccaaggggttagtgaattaatggaggttcgtggagattcggncacttcaatggtgtctttctctgagtttttagttatgtttgacgatccagattggggttttggcatcatgcctactctggtgaagcttgaaaccggggatagaaacaggcatggtgacacggtatgctcggtttgccgctacccaattattggttctcggtttaaggagataaaatctcatttagtttgtg

SEQ ID NO: 290891 - DNA, 299 bp, Glycine max
  unsure (1)..(299): unsure at all n locations
aagaatacttcactcgtgaccagatgtgaaattggtgacagtctcgaaganttcctcacaaaancaacaccagatnaggggttgatcaggttgttggtgtccatgggagaagcattgagaacaatttccttcaaagtgaagacggcttcatgtggtggaacacaatgtgttaatacttttggggatgagcagcttgcagtggatttgctagctaatcagcttctttttgaggccttaaattactctcatttctgcnagtatgcttgctctgaagaaaatcctgagctcttggncatggg

SEQ ID NO: 290892 - DNA, 296 bp, Glycine max
  unsure (1)..(296): unsure at all n locations
cccaaagagctaacaagagattcaagaccggcatggctaatgaagaggaacagaaaaaccacctcttcggcatcaaagatctcggtcacaagactctccttcagagtgatgcactctatcagtatatacttgaaaccagtgtctatccaagagagcacgagtgcttgcnaganatacgcaagatgactgcaaaacacccactgaacatcatggcaacaccagcagacgaaggacaacttctgagcatgcttgttaagctcacgaattcaaagaacgccttggaaattggtgtattc

SEQ ID NO: 290893 - DNA, 273 bp, Glycine max
  unsure (1)..(273): unsure at all n locations
caaagctactgctgccctcccattnccggacgattgtggttacnagttctcatatggncactncnttacgtctcctttgcttgtattgggagggattgctgggaagaatagcaaggctgaatttcaagctcctgttcggacaactaaatatccaagggagattccacctctgccttggtatcgtggaacaattcctcagatggcgatggcaggatttttgcctttcagtgctatatacattgaactttactatatatttgccagtgtttgggg

SEQ ID NO: 290894 - DNA, 288 bp, Glycine max
  unsure (1)..(288): unsure at all n locations
cacttggctgcacgatttaacaatcctgncantgagattgttgaccattanacatatgttatattgggtgatggttgtcaaatggagggaatttcaaatgaagcatgctcacttgccgnctcactggggtctagggaagcttattgctttntatgatgacaaccacatttccattnctggggacactgagattgcattcactgagantgttgatcaacgtttgaggcacttgggtggcatgtaatttgggtgaagaatgganatactggatatgatgaaattcgtgcg

SEQ ID NO: 290895 - DNA, 287 bp, Glycine max
  unsure (1)..(287): unsure at all n locations
aatttcaagactgtgcaagtcacggattacaacagttccaagagaaagagctattggacaactagtagtgaagttgcanagactgnatctnntgcaaagaccanactagggttcagccctncagagatagtaattgtnaaccctaataagaagccttccactggaaatgaagtagggtaccgtttggttccaaatgccgcatctcatccccttctcagagaggatgattaccctcaaagacgtggtgctttcaccaattacaatgtatgggtacaccttacantnag

SEQ ID NO: 290896 - DNA, 286 bp, Glycine max
  unsure (1)..(286): unsure at all n locations
aactgactttcccccagggcacttcccgaagtgttaagagaatgcntctttctatagggggaggagctggtgcaaagaatgctattctcatgaacatgccaaatgctgttctttcaatgtggagatattttgttggagatctcgtctttgaagttnctaagatgacttctccctacattaaatgtacagtctctttcttcatagcatttggaaatttggctgatnnnnncatcaattttgaggcctttccccacaagctggtgcagtttggagaaattcaggaaaa

SEQ ID NO: 290897 - DNA, 302 bp, Glycine max
  unsure (1)..(302): unsure at all n locations
ctcnttaanttgcnanantngcacntcgntgcttngtgatgtcnctttctgtnctnttcactgcttggtcttgcgagaganagccntgccagagacgaagatttttggcatgctgtttggccaancnctcccattccnagttcnttgcgagatcttctaaagcctggccctgcaagtgttgaaatcgctgatcnccctatgcnaattgnagaaacacagtncccgnaaaccttcttctntaaagnnncccttcntccnggcaaaacnntgaaagtacnattcagcaagcctccctttcaaca

SEQ ID NO: 290898 - DNA, 300 bp, Glycine max
  unsure (1)..(300): unsure at all n locations
cttacgttgctcataacgttaatcagccccaagagaaagatttgncnagagggaaatttttcctttgntattaaatctcgctctagattggaaaaagtttcctctacaaaagcacaatttgttagtggnaaaaccttcaaatatgatataattgntgctggttcacattcttcagaagattttcctgaaaaggaagatcaagaaaaacccaanaagattgatgccagattnagacnaagaatagatcctcaatacaatgaggttcaggctcagatggaaacaaatttgttaaattgtctc

SEQ ID NO: 290899 - DNA, 293 bp, Glycine max
cgcggatcaatatgggagtcgatttattcaacaaaagcttgaaacagctactacagaagaaaaaaacatggtttatcaggaaatcatgccacattcccttgctttgatgactgatgtctttggtaattatgtggttcaaaagttttttgagcatggacttgcatcccagagaagagaattagccaacaaacttcttggtcatgttctgacacttagccttcaaatgtatggttgccgtgtcatccagaaggccattgaagttgttgatctggatcagaagatagagatggttc

SEQ ID NO: 290900 - DNA, 285 bp, Glycine max
  unsure (1)..(285): unsure at all n locations
cngnattgttgtaactttttgattcctaaattcnctaaaattcgaaattctaatttcgttagggganagagattgtttgtgtgtgagtgagtatggctggacaaggcgagggtcctgctatcggnatcgatttgggaacgacgtactcttgcgtcggcgtgtggcaacacgatcgtgttgaaatcatagccaacgatcagggtaacagaactaccccatcctacgtggctttcaccgacacagaacggttgatcggcgatgcggcgaagaaccaggtcgctatga

SEQ ID NO: 290901 - DNA, 288 bp, Glycine max
  unsure (1)..(288): unsure at all n locations
gcgtaccgggatttcattgtgatatcatttgtntcactggatggactgccaccccaatgcaggatgttcaggttacaattgattggtttatttcctctcaggaatgtgttcccagaacctattgtgttttaaatccacaaaatccttttgtgttaaataggtggatgggaaaactgactttcccccagggcacttcccgaagtgttaagagaatgcctctttctatagggggaggagctggtgccaagaatgctattctcatgaacatgccaaatgctgttctttcaa

SEQ ID NO: 290902 - DNA, 296 bp, Glycine max
  unsure (1)..(296): unsure at all n locations
cttcgtttggccaaagacctcgctgaaaacaacaagggtgctcgcgtgcttgtcgtttgttctgagatcaccgcagtcacatttcgcggcccaactgacacccatcttgatagccttgtgggtcaagccttgtttggagatggnccagccgctgtcattgttggatcagaccccttaccagttgaaaagcctttgtttcagcttgtctggnctgcccagacaatccttccagacagtgaaggggctattgatggacaccttcgcgaagttggtctcactttccanctcctcaaggg

SEQ ID NO: 290903 - DNA, 299 bp, Glycine max
  unsure (1)..(299): unsure at all n locations
ccacacttcttcgccgtttcagctgaagagccatccgcaggtaagcaatggttaagcataataatgttatccccaatgggcacttccgganacactggcaaaactatgtgangacttggtttaatcaaccancncgatanatcaganganggttggntcggcagaagaaggctgtcaagattttccccaggcctactgctggatctctcaggcctattgttcatggccagactctgaaatacaacatgaaagtcagagccgggagaggattttcactggaagaattgaaggctgcagga

SEQ ID NO: 290904 - DNA, 292 bp, Glycine max
  unsure (1)..(292): unsure at all n locations
caagacccaactgaggaatggtactacaagactttctttgatgctggtgaatttgcattcggtaaatctatggtttctttggtgcctttggaagattgtccaccacacgcacagttcctagatgcatattttgctgcaactgatggtagcccacaacacttggagaatgcaatttgtgtgtttgaacaatacggtggtatcagttggcgtcacactgaaacaggccttgatgagatatttacagaagtcagaacagatgtgagtctaatngttagatcaattgttaccgtcg

SEQ ID NO: 290905 - DNA, 290 bp, Glycine max
  unsure (1)..(290): unsure at all n locations
cgaaaacaaagaagcaaacgaaactaaagcactanagacagtaacgctgtcttccttgcttcgntcttgaataagagagnattcaaaangtngacccagnatcgtcgttcgtcgnctttggccgctcctgcaaacatggccaagaagcgtcntcctctctnnaacctcaccaacaccgttgntcnccggaactcttcctctttggttcgnngnggngtattattttccaaggnnnagatagnggtttttccggnttnttcagggaccaannggcnntntttggggnatnt

SEQ ID NO: 290906 - DNA, 286 bp, Glycine max
  unsure (1)..(286): unsure at all n locations
cgaaaacaaagaagcaaacgaaactaaagcactaaagacagtaacgctgtcttccttgcntcgttcttgaataagagagaattcaaaatgtcgacccagaatcgtcgttcgtcgtctttggccgctcctgcaaacatggccaagaagcgtcctcctctctccaatnctcancaacaccgttgctcaccgcaactcttcctctttggttccatgcgcantaaatttgccaagaccaagaaagaggttgttccggcgtgttcagggaacaaaagaccaacattggcga

SEQ ID NO: 290907 - DNA, 290 bp, Glycine max
ccaagccaccatgtttcaacattcaacagaagcctttttccttccacttttctctttggaattggttcttctgcttaccaggcagaaggagcagcaagtgtagatgggagaggaccaagcatatgggacacctacactagacagcatactgaaaagatttgggatcatagcaccggtgacatgggagctgatttttatcatcgatacaagggtgccataaaaatagcgaaagaaattgggctggactctttcagattctctatctcatggtcaagaatattcccaaaggg

SEQ ID NO: 290908 - DNA, 284 bp, Glycine max
cttttgggccacagtgattcctacactcaggacaagagcatgcaggtcactattgctttcaaccactttggtgaaggcctagttcaaagaatgccaaggtgtaggcatggatattttcatgtggtgaacaatgactatacccactgggaaatgtatgccatcgggggaagtgctaatcctaccatcaatagccaaggaaacaggtttgttgcacccgatgacagattcagcaaagaggtgacaaagcatgaggatgcaccagagagtgaatggaaaggatggaa

SEQ ID NO: 290909 - DNA, 294 bp, Glycine max
  unsure (1)..(294): unsure at all n locations
cgaaaatataacaaataatttgtactttcatcaaaacaaaatcccgttgtatttttctcagatggctcgaacgaagcaaacggcccgcaagtccaccggcggcaaggcgccgcggaagcagctngcgactaaggcggctcgcaagtcggctccggcgaccggcggcgtgaagaagccgcacagattcaggccgggaaccgtggcgctgcgcgagatccggaagtatcagaagagcacggagctactcatccggangcttccgttccagngcttngtccgcgagatcgcgcagga

SEQ ID NO: 290910 - DNA, 272 bp, Glycine max
  unsure (1)..(272): unsure at all n locations
ggaagaagcaacaatgtctggtcgcncccaagggaggcaagggacnnggaaatgttggagctaacntgcntcgcaaggngatcngcgacaacatncagggattcangnaacccgcgattcggaggctagccagaanangnggcgtgaaaagnntcngcggcttgatctacaaggaaaccangggtgtgctcaaaatcttcctcgagnacgtcattcgcnnngccgtcncnnanaccgngnacgtnaagtgaatggccgtnangncnatggcc

SEQ ID NO: 290911 - DNA, 289 bp, Glycine max
  unsure (1)..(289): unsure at all n locations
cgactatctcattccatatttgaggaaaataaatgcaaataccacaaagacttatgctacaagaaccatattttgccttgaaaaatgatggaactttgacgccattggccattgagttaagtaagccgcatcctcagggtgaagaatatggtcctgttagcgaagtctacgtgccttcgagtgaaggagttgaagcttacatttggttactggcaaangctnatgttgtnntgaatgatgcatgctaccatcaaatcattagccattggctaaacactcanncggttgt

SEQ ID NO: 290912 - DNA, 281 bp, Glycine max
  unsure (1)..(281): unsure at all n locations
tggtccttggtgaacaagcagaagcctatttggatgaggaagcctgaggagatcacaaaagaggagtattctgctttctacaagagtcttaccaatgactgggaagagcatttggctgtcaagcacttctcngttgagggtcanttggagtttaaggctatactctttgttcccaagagggcaccttttgacctctttganacnaggaagaagcctaacaacattaagctctatgtccgncgtgtccttantatggacaatgtgaggagttgttcctgagt

SEQ ID NO: 290913 - DNA, 286 bp, Glycine max
  unsure (1)..(286): unsure at all n locations
tcctcttgggatctctncaagagatgtgggagacttgatgatcaaattggtctactgaagcacaagttgtacttnnttcaacaaggatncgctttcaatggacagcgaacaaagactgcaagatctcaagnaaagaagtttcaagtctctgtggagcaagaagccactagattgctgggaaacttgggatgggcactgntgcaacagaacaattacatagaagcagaagacgcctaccgtcgcgcgctttcgatagccccagataacaacaagatgtgcaatctgg

SEQ ID NO: 290914 - DNA, 287 bp, Glycine max
  unsure (1)..(287): unsure at all n locations
cacggatagaagtgaacgttaaggtaaagagtgttttnncgngcanaaatgtttgcacttggggttggagtcaagattcctgttccaaaacaaacagcgaaaacaaatttcacagttacatctggccgggcaanatacnatgcnnctatngatngtctcgtttggaagattagaaaattccctnggcagactgagtcaaccntaagtgnagaagttgaacttatctccacaatnnnaganaagcnatcttggactagacnancaattcagatggagtttcaggttcc

SEQ ID NO: 290915 - DNA, 294 bp, Glycine max
  unsure (1)..(294): unsure at all n locations
gttttaaatccacaaaatccttttgtgttaaataggtggatgggaaaactgactttcccccagggcacttcccgaagtgttaagagaatgcctctttctanagggggaggagctggtgcaaagaatgctattctcatgaacatgccaaatgctgttctttcaatgtggagatattttgttggagatctcgtctttgaagtttctaagatgacttctccctacattaaatgtacagtctctttcttcatagcatttgganatttggctgatgacaccatcaattttgaggccttt

SEQ ID NO: 290916 - DNA, 292 bp, Glycine max
  unsure (1)..(292): unsure at all n locations
cttgccctggtactgaaaganagctttaaaatttattgtgctattaatgacggcattatcaatcttgttgataagttttttgagatgcccagacatgaagctattaaagcccttgaagcctataaacgtgcgggtcagcaggcagcaagtctatctgatttctatgatgtttgcaaaggattggaactcgctaggaattttcagtttcctgtcttaagagagcctccacaatcttttcttacaaccatggaagagtacattaaggaggcaccacgagtggttacagttccaa

SEQ ID NO: 290917 - DNA, 289 bp, Glycine max
aaatttctgcccagaattcttgggtgggaaaaggtggggctttcacgggagaaatcagtgtggagcaactaaaagaccttggctgcaagtgggttattcttggacattctgagcgaagacatgtaattggagaaaatgatgagtttataggaaagaaaactgcctatgctttgagtgagggtcttggtgtgatagcatgtattggggaacttctacaagaaagagaagctggtcaaactttcgacatttgtttccagcaattgaaggcttttgcagatgcagtgccaag

SEQ ID NO: 290918 - DNA, 287 bp, Glycine max
  unsure (1)..(287): unsure at all n locations
agatgtcttcggcagtttacaaggggtgggttttcactgatcaancccttcctgcggatcttatcaagagaggaatggcagtggaggatccatcctctccctatggccttcgccntgtgatagatgactacccttatgcngttgatggactagagatatggagtgctatccagacatgggttaaggactacgtctccttgtactatgccacggatgatgcagtnaanaaagactcagaactccaagcttggtggaaggaagctgtnganaagggtcncggtgacttg

SEQ ID NO: 290919 - DNA, 280 bp, Glycine max
  unsure (1)..(280): unsure at all n locations
gtggtagcactcacataactgtngaagangtgaagaaggagataggtgatttacttacagaatatgtggatagtggggacncattggaggcctgtagatgnatacgtgngtngggggtttcattcttccatcatgaggttgtnaagagggctttgatanttgccatggagatncgttcggcagancctctaatgtngaagttattaaaagaagcagctgangaatgncttgttagtcccagccanatngtnaaagggttttctcgtttggcagaatcncc

SEQ ID NO: 290920 - DNA, 285 bp, Glycine max
  unsure (1)..(285): unsure at all n locations
anatttgtntaaattgtctcttgatgatgttgaaactcctaaaggttccatgttggatcttaaaatttctcaatctaaaattgcacttcccaagaacacagttggaggaaccattctgcgtagtgatctattgncaaattttttgacagagggcaattttagagcaagtgntgatttgcagcgcactcatcgtattaaaggnatgattaanatggtggctacagttggtattcctgagattacaggtatagcattgggcctgtgctatgaatagtacttttaggg

SEQ ID NO: 290921 - DNA, 278 bp, Glycine max
  unsure (1)..(278): unsure at all n locations
ccccgattcatttccaccagcacaagaagcntggctgcaatatcaataccttctncacatgaaagcttggacatacttctgagtatggaaaatccaaggaagttctcaagtttaatcagagtgtggctttgcctgaggtgaaggaagaccaggtcctcatcaaggtcgctgctgcttcccttaaccccattgatcataagagaatggaaggctatttcaagaacagcgactcccctttacctactgctccgggttatgatgttgctggactggtggtt

SEQ ID NO: 290922 - DNA, 283 bp, Glycine max
  unsure (1)..(283): unsure at all n locations
cttcagtgtctacaataccaggtgattttgtcattggtgtcaagttgacaancataaacantatgtgtgcatatgggctcaatcctggtatttcaggttctcgtcttttgggcaccattcctcagtccatttcacagcaaactgtttggnatcanatggcaacagtgagancaccattgaattttgattctagcaagcagagcttttgtcaatnttctattgaccttctcggtggaggnctttagtggacaaaactggagattggatcacactnatacaaaat

SEQ ID NO: 290923 - DNA, 268 bp, Glycine max
  unsure (1)..(268): unsure at all n locations
cagctntgtcgttgcgcangcgaaccttgctcaaggtcattgttctcngcgatagcngggttggaaanacctcgttgatgaatcaatacgtgcacaanaagtttagtcagcantntnaggctaccnttggggcngattttgtcaccaaagagcttcagnttgatgaacagacttgtcactctacaaatntgggacactgctgggcaaganagattccagagtctcggggttgcnttttacagagtgccgattgctgtgttcttgtgta

SEQ ID NO: 290924 - DNA, 268 bp, Glycine max
  unsure (1)..(268): unsure at all n locations
cgattcgggtcgaacatggatgggaaatcnccggagaaactaatactggtgaaccgcganccaaacggcgtcgcactggtgacgattaaccgtcccngttcccttaactcnctgacccggcccatgatggtggacctggcccaggctttcaagaggctcgaccggnacgagttggtgcgggtcattatattaaccgggtcgggccggtcattctgttcgggcgtggatctcacggccgctgaggacgtgttcaagggcgatgtgaagg

SEQ ID NO: 290925 - DNA, 273 bp, Glycine max
  unsure (1)..(273): unsure at all n locations
ctttantacatggtgtnntattcttnaacgtgtacccaacagtgcactctggctcctcagatttcctgcagctggggaaangagactgagagcatatgctgctgcacaaggggtacaaccggatcaanttnttttcacagntgttgccacgaagaatgaacacatcagaagaagttctttagcagacttattccttgactcgcctttatgcantgcacatacaacaggaacagatntactttgggcangtttgccaatggttactctgcctct

SEQ ID NO: 290926 - DNA, 265 bp, Glycine max
  unsure (1)..(265): unsure at all n locations
gtgggnttgacatacctgntgtggntcatgtcntnaantntgntntgcctgggnntnttgnantgtacactcaccggnttgggcgtactggtcgtgcaggaaagacgggtgtggctaccacnttcttgantcttcacgantctgntgtcttctntgacctcaagcagatgcttntncaaagtnncagtcctgttccacctgaactggcaaggcacgaagcttcaaanttcaagccaggaantnttccagacagaccacctagacg

SEQ ID NO: 290927 - DNA, 272 bp, Glycine max
  unsure (1)..(272): unsure at all n locations
cacgggcacagattgcatagggacatccattcggcatgggtgtngtagcnttgtnaatctggaacttctccctcanccaccacaaactagagccccaggcaacccttggccacagtggcctcgcatataccgagtngattatgggcaccaagaaggtgcagcaaaatttgggaaanatccaagatcttatgaggtattgactaagcggtttgtgggagatgaaaatggagttgtgaagggattgaagtnatacgtgtctctgggagaaggat

SEQ ID NO: 290928 - DNA, 262 bp, Glycine max
  unsure (1)..(262): unsure at all n locations
cagttgctcatganttcatcattgacctgagaggctttaagaatactgctggaattgagcctgaagatgttgcaaagcgcctcatggactacggttttcatgcaccaacantgtcatggcctgtgcctggcacactcatgattgagccaactgagagtgaaagcaaggctgaactagacaggttctgtgatgctcttatttccattagacaagaanttgctgagattgagaaagganatgctgacattaacaacantgtact

SEQ ID NO: 290929 - DNA, 263 bp, Glycine max
  unsure (1)..(263): unsure at all n locations
caaaaccatcaatggcatcagcattatcttctctctcctccacctcttcttcactgttacagcacagtttcaccggaaactcgaaggctcctcccactactcaattccccaacaaaaatgtacgcttttcggtcttcgctcaaaagaaggcaaagaaacttcgaaagnttnttttgaaggaagatgtggcttntgtagganagcaagggcaacttcttgatgtgaaggctggctttttcagaaattacctgcttcctatggga

SEQ ID NO: 290930 - DNA, 264 bp, Glycine max
  unsure (1)..(264): unsure at all n locations
ctgaggctgagatttcccctnccaccttgtatgccattgcttgtnttatggaaaatgttcctttcatcaatggaancccncagaaacacctttntcccaggactcattgatctggccatcaaaaggaatagtttgattggnggagatgactttaagagtggtcagaccaaaatgaantcggtgttggtggatttcctagtaggggccggcatcaagccaacatctatagtgagttacnaccatttgggaaacaatgatggcatt

SEQ ID NO: 290931 - DNA, 266 bp, Glycine max
  unsure (1)..(266): unsure at all n locations
ccaatatancccaanccntatacaaccaaaccctaacacacacccatttgattcagtttccatgggctagcctcaaggttgcatttttngctgcagtgctctgcatggttgtggtgagtgcacccatggcacatgcagctatcacgtgcgggcaggtggacgagtagcctggccaattgcatcggttacctccagaagggaggaacgccgtcgtcgggatgctgcaacggagtgaagagcctcaatnccgccgccaagaccaccgc

SEQ ID NO: 290932 - DNA, 271 bp, Glycine max
  unsure (1)..(271): unsure at all n locations
cancaacantaacantggcagcctcactacangctgcagctaccttcatgcaacccaccaaggtgggcatggccactcgcaacctcaaatctacacaatgcntttctnaggcttttggcttggaacccgctgcagctaaactcatttgctcccttaagcccgatctcaaagnttttgctcaaaantgtgtcgacgccaccaaaattgcaggattcgcccttgccacctcagctctcgttgtttctggagcgagtgcagaaggtgttccaaa

SEQ ID NO: 290933 - DNA, 272 bp, Glycine max
  unsure (1)..(272): unsure at all n locations
ttcgatgttggatgtctatanctcactggttgatgtggcnctttgatttgnagaagttcagaccaagtgaagtaccaagggtgaagataagtttggcttgtgtttttgcctttatagcanttggatggccattaattntttacaagactggaatcatgggatggataaanttctggttgatgccatggttgggctnatcacttctggatgagtacgtttaccatggtacatcatactgcaccgcatataccatcaaatactcagnagagtgg

SEQ ID NO: 290934 - DNA, 269 bp, Glycine max
  unsure (1)..(269): unsure at all n locations
ctaattcagactgtgaaactgcgantggctcattaaatcagttanngtttgtntgatggtntctactactacggataaccgtagtanttctagagctaatacgtgcaacanaccccnancncctggaagggntgcntttnttngataanaggtcaacacaggctctgcctgctngcnttgatgattcatgntaactcgtcggancgcacggcctttgtgccggcgcacgcntcattcagatttctgccntatcaactttcgatggtagg

SEQ ID NO: 290935 - DNA, 260 bp, Glycine max
  unsure (1)..(260): unsure at all n locations
ttggngaggctggaaacaagtacttccgccacgccactggacagttgtatgccatttcaaaagatctggctacatntntttcaaataacaagcacgttctccacaagtatgccaatgaggatgtctcactaggttcttggtttattggacttgatgtgaatcacntngatgatcgaagactctgctgtggtacaccaccagattgtgaatggaaagcacaagcaggcaacgtttgtgttgcttcatttgattggacgtgc

SEQ ID NO: 290936 - DNA, 260 bp, Glycine max
  unsure (1)..(260): unsure at all n locations
cgcattcgtggnnttgctgtaggcaatgaagttttgggtgggacagactattctttgtggggagttcttctgggcgctgttanaaatatttacaatgctaccaagaaacttcatctagatcaactggttcagatttctacggcaaactcatttgcggtttttgcagtttcttaccctccctcctctggtaaatttgatnataatgttantcagtntatgaagccactactggagttcttccaacagattggctctccttt

SEQ ID NO: 290937 - DNA, 258 bp, Glycine max
  unsure (1)..(258): unsure at all n locations
ctgaggnggaaganagaaaaaccatggcaacaacactcaacaatggcttcaagatgcctatcattggattgggcgtgtggcgcatggnaggaaacgaaatcagggacctanttctcaattccatcaaanttggttatcgccattttgnttgtgctgctgactacaaaaacgaancagaagttggagatgcgcttaaggaggcttttgatagtggccttgtgaagagagaggatctcttcattaccaccaagctttgga

SEQ ID NO: 290938 - DNA, 259 bp, Glycine max
  unsure (1)..(259): unsure at all n locations
cgctgctacagttacagcatnacttctnttctntntttctttctactacgcaagcnaatcagaagaagagantggcagcagcanaggggctaaacagagagcagtacgtgtacttggcgacctgtcggagcnngcggaacggtacgaggagatggtggagttcgtgcagaaggtggtggtggggtcgacgccgncgtcggagctcacggtggnggagcgcaacctcctctcggtggcctacaagnacgtcatcggctcg

SEQ ID NO: 290939 - DNA, 264 bp, Glycine max
  unsure (1)..(264): unsure at all n locations
tgattttggnagtgcaaaagtgctggtcaaaggtgaagctantntatcacatntntgttcacttttctaccgnncaccagaacttatgtttggtgccactgagtntactacttcaattgatatttggtcagctggctgtgtccttgctgagctgcttttgggtcaggttactcaaatgaagcaggagcntgacaagaggcaagcnagcctcatagctgaacacaacgaacagctaaagcgtacccaactgcaagctgaaaatga

SEQ ID NO: 290940 - DNA, 267 bp, Glycine max
  unsure (1)..(267): unsure at all n locations
ctttgttgcantntcacaaacacctcgtccgtcacantgcagctanctgtggcggccaacgctgtcgtttcaccgtcgccgttccgacctcatccccttctccggtcatccttctccggcgtctccgttaagctcactccccaatccataacgttttcacgcttgangcccctcaccgtcttcgccgccaccaagaaggccgtcgctgtcctcaaggggacctccgccgtcgaaggcgtcgccactctcatccaagaagacgatggt

SEQ ID NO: 290941 - DNA, 269 bp, Glycine max
  unsure (1)..(269): unsure at all n locations
cgagggacaccctgataagctctgcgaccaaatctccgatgctgtcctcgacgcttgcctcgaacaggacccagacagcaaggttgcctgcgaaacatgcaccaagaccaacttggtcatggtcttcggagagatcaccaccaaggccaacgttgcatacgagaagatcgtgcgtgacacctgcaggagcatcggcttcatctcanacgatgtgggacttgatgctgacaactgcaaggtccttgtnaacattgagcagcngagccctg

SEQ ID NO: 290942 - DNA, 257 bp, Glycine max
  unsure (1)..(257): unsure at all n locations
ttcactgaaacagagcncagaaganaatacatttactaatcgaganaatgancancggcgctggaaaggttgtgtgtgtcaccggcgcgtccggttacattgcttcctggatagtcaaattccncctccttcgcggctacaccgttaaggccaccgttcgcgacacaagtgatccgaaaaacacaaaccacttgattggcctcgacggtgctaaggagagactgcacctctacgaggcgaatcttctcgaagaaggt

SEQ ID NO: 290943 - DNA, 256 bp, Glycine max
taagagcatggctgcacaagctcttgtatcatcatcatctcttaccttctcagccgaggctacaagacaaagtcttggaccaagatcactccaatctccatttggcttctcaagaaaagcctcctttcttgttaaggcagctgctactccccctgtcaagcaaggatcagacagacctttgtggtttgcatcaaagcaaagtctttcctacttggatggcagccttccgggtgactatggatttgaccctctggga

SEQ ID NO: 290944 - DNA, 264 bp, Glycine max
  unsure (1)..(264): unsure at all n locations
gggcnactgctggtgatactcacttgggaggtgaagnttttgatnacanaatggtgaannattttgttcagganttcaagaggaagaacaagaaggatattagtggaaatgccaganctctgaggaggttgagaacagcatgtgcagcgggcaagaggactctcnctnccactgctcaaaccaccntagagattgattccttgtacgagggtattgacttctacacaaccattaaccnagaatcgnattgaagagctaaacatg

SEQ ID NO: 290945 - DNA, 269 bp, Glycine max
  unsure (1)..(269): unsure at all n locations
cgtnnccattctcatccncttctnncnctctctaccattgccatggatccctaacaagcatcaacnnnaacaacgccttcaatnctcccttctggactacaaattctgntgtacctatttggnacaacaactcctctttaaccgttggaggtagaggtccaattctgctggagggattatcatcttgtggagangcttnncnaattttgattagggaacgtatcccaaaacgtgttgttcctgnccannggcgcttagtgcaaanngtt

SEQ ID NO: 290946 - DNA, 267 bp, Glycine max
  unsure (1)..(267): unsure at all n locations
cnaacgtaggttttntaaganctggtgcaagtccaagangaaggccttcaccaagtactcaaagcagtatganactgaggaggganaganaaacattgaggcacagctggagaaactgaagangtatgctactgtggttcgtgttttggctcacacccagatcaggaaaatgaaagggttgaagcagaagaaagcccatatcatggaaattcaggttantggtggtactattgcacagaaggtggactttgcatacgtttctttgag

SEQ ID NO: 290947 - DNA, 276 bp, Glycine max
  unsure (1)..(276): unsure at all n locations
ctttgacaaggctattgggattaatgttcctcgatcacgattccntcctgtgaaggcaacttcagatttgcttcttgtccagtctgacctctacactttggaagacggatttgtcattcggaacaaagctagggaaaatcctgaaaacccttctattgaactgggaccagaatttaagaaggttagcaacttcttgggccgcttcaagtcaattcctagtatcgttgagcttgacagtctaaaagtggctggtgatgtatggtttggagctggtgt

SEQ ID NO: 290948 - DNA, 277 bp, Glycine max
  unsure (1)..(277): unsure at all n locations
gcactgctgtttaagcagcagcttactgccttccttgaaaaaatatatggaatgataagagacaacctaaaaaaggaganctctgccattacttggactgtgtatacaggctccaagaaactcgcgtcaaagtctagtaaaaggacgtgcacaggcaaatgcagttgctcagcaagctttaattgctcactggcaaagtattgtgaaaagcttaaacaattatctaaagataatgaaagccaactatgcaccccctttcttgntccgaaaagtgttc

SEQ ID NO: 290949 - DNA, 267 bp, Glycine max
  unsure (1)..(267): unsure at all n locations
gcagttgcggggagttttatatgttcaatcacgggaattgactctctggggggtttccatctatcgttagatgccattttggaagggcttggatatgcagctcctccaattatggcccttttgtttatactcgatgatgaagttgtgaagctatcgcccatgccngtgtatcaganngcnnnaggntaagnnnctnggacttttcctnggggatnccncggggnnnnacnannngggggccnnanccntggnnanngcccntncccc

SEQ ID NO: 290950 - DNA, 277 bp, Glycine max
gatagactcaattatgcagcgatgaggatgtggtttttggggaatccaccaggcaaggcaaccattcaagttgcaaaacattgaagactttacatggttgaatgcaagttacagtcccgttcttaaacagttgggttcccaatccatgattgattattacttcaaggctcatcgagcagcctctgattcaaatctgaagtttcggaatccaaagtatttgtctatcttgaaccacctccgattctatctgcctgagatctttccaaagctcaacaaa

SEQ ID NO: 290951 - DNA, 276 bp, Glycine max
  unsure (1)..(276): unsure at all n locations
ctgtttcccgccatatatccaataagctttaaccatntctgcctttgttggaaagtacgcagatgagcttatcaagaatgccaagtacatagccacaccagggaaggggatcctggcagcagatgagagcacgggcaccatcgggaagcgcctagcgagcattaacgttgagaacattgaggccaaccgccaagcccttcgcgagcttctcttcaccgctccaaatgccctccaatacctctctggtgtcatcctctttgaggaaactctttacca

SEQ ID NO: 290952 - DNA, 277 bp, Glycine max
  unsure (1)..(277): unsure at all n locations
gcaagatagacatcacaactactgtcctgggcttcaaaatatccatgccaatcatgcttgccccaacagccatggcagaaaatggctcatcctgagggagaatatgcaacagcaagagctgcatctgctgctggaacaatcatgactttgtcttcatgggctacttcaagtgttgaagnggtagcttcaacaggacctggcattcgctttttccagctatatgtgtacaaggacaggaatgtggttgctcagcttgtgagangagctgaaaggctgg

SEQ ID NO: 290953 - DNA, 278 bp, Glycine max
  unsure (1)..(278): unsure at all n locations
agatattctggagatattgactaatggaatttatagaagcgttgaacaccgagcaacaatcaacgcagagaaggagagaatttctattgctacatttcacaggcctcaaatgaacagaattgtaggtccaacgccaagccttgttactcctgaaaggcctgcactgtttaaaagaattggtgtagcagattactatagaggctatttttcacgcgagttacgaggnaaatcatacattgatgttattaaaataaaaaatacataggacataaattagg

SEQ ID NO: 290954 - DNA, 277 bp, Glycine max
  unsure (1)..(277): unsure at all n locations
atccctcntcttcacacatttncttagcngntctnnaacaatcnctctngttcanantttnagattgtgtgaagatgggggctggtnagnngaactgctgttcctcctgccaacaggaagtcagaggctgaccctttgaagcgggtaccatttgaaaaacctcagtttagtctcagcnagattaagaaggccattccacctcactgtntccaggagnnctgtnctccgcttcattctcntatgttgtttatgagnccancatagccttctggctcta

SEQ ID NO: 290955 - DNA, 271 bp, Glycine max
  unsure (1)..(271): unsure at all n locations
caaganaacaacttccaagactacttgcctgtgatggccaacaagcttggtggggatggcctaattgatgaactgtgcaatgggttcgatcttttgaaggattctgataaaggggtcatcacttttgagagcctcaagaggaattcttacttgcttggtcttcagggtctcagtgatgaggatcttcgctccatggttttggaaggtgactttgatggtgacggtgcactcaaccagatggagttctgtgtcttgatgttcagactcagcc

SEQ ID NO: 290956 - DNA, 274 bp, Glycine max
  unsure (1)..(274): unsure at all n locations
gaactaaattgtgagaaacaacagagnaagtaagcaagaaaccgaagagnagaaaaaatgccgtgcctcaacctncaacaccaacgtgtccctcgacggcgtcgacacctcttccatcctcgccgaagccacctcctccgttgccaacatcatcggcaaacccgcggcctatgtgatgattgtactgaaaggatcagtacccatagcttttggtgggaatgaacagccagcagcntatggagantggtgtccatggtggtcttaaccctagtgt

SEQ ID NO: 290957 - DNA, 282 bp, Glycine max
  unsure (1)..(282): unsure at all n locations
acaaggcagaaagcaagctcatcctancagttttaaaaatggcagcagcntcctccatgngctctctcttccccatccttggctggcaaggccgtgaagctgggcccatcagcccccgaagtcgggagggtcagcatgaggaagaccgtcaccaagcaggcctcctccggaagcccatggtacggcccagaccgcgtcaagtacttgggcaacccaagccttgtccacgcccagagcatcctcgccatctgggncacccaagttatcctaatgggtgctgtt

SEQ ID NO: 290958 - DNA, 271 bp, Glycine max
  unsure (1)..(271): unsure at all n locations
ggaaaatctttccaatgtgagcttgtctttgccaagatgggaatcaaccccatcatgatgagtgcngagagttggaaagtggaaatgcaggagagcnagcaaaactgatcaggcagagataccgtgaagccgcagacttgatcaagaagggaaagatgtgtgctctcttcatcaacgatcttgnctgcaggagctggtcgtcttggtggaaccacccaatacactgtcnannaaccagatggtgattgccaccctnatgaaccattnccng

SEQ ID NO: 290959 - DNA, 277 bp, Glycine max
  unsure (1)..(277): unsure at all n locations
cacaatccaaaggtggatggagacactgaaaacaatgttgcggagttactgtcggaagaactaaatcttcgggaaactgaagctttgaaaaatcagcattgtgctgacatggctctgctggagtctaagaagattgcatctcagtatcaaaaagaagcggacaagtgtaattcaggaatggaaacatgcgaggnagccagggaaanagccgagatggcgttagtggctcagaagaagcactctgcattgtgggaacagagagctcgtcaganaggat

SEQ ID NO: 290960 - DNA, 266 bp, Glycine max
ccgtttatggccaacctgaaaagataccgtgtgaggaggatttcaggttacaagctatgaatccctatggacggaccaagcttttcctggaagaaattgcccgagatattcagaaagctgaaccagaatggaagatcatattactgaggtacttcaatccggttggggctcatgaaagtggtaaactcggtgaagatcccaagggcatcccaaataacctcatgccttacattcagcaagtagccgttggaagattgccggaactc

SEQ ID NO: 290961 - DNA, 268 bp, Glycine max
gcgggtggacaacgaaatttctcagccaaagaacaaggatcagaatcgtttaatcaagttgaggaagatggcactagtctccggaggaagatcaacactgaaccctaacgcccctctttacattcccgccgcgttccgccaagtggaggatttttctccagaatggtggcagctggtgacgacactgacatggtaccatgactactggctaagccagcagcacgatgatggagcctctatggcgaggatgggtttgatggcaatgatg

SEQ ID NO: 290962 - DNA, 265 bp, Glycine max
  unsure (1)..(265): unsure at all n locations
cctagattcagccacagttggaaaaaaaaaaaaagttgttcganatggcacgtacgaagcaaactgctcgtaagtcccacaggaggaaaggcacctaggaagcagctcgnaaccaaggctgcacgtaagttctgcaccaactactggnggtgtnaanaagccanatcgttatcgtcctggtaccgttgctcttcgtganattaggaaatcccagaagagtnccgagcttttgatcaggaagctccccttccagaggcnggttcgt

SEQ ID NO: 290963 - DNA, 263 bp, Glycine max
  unsure (1)..(263): unsure at all n locations
ggctctggctctgccctttttggttttctctcgttaccgaaaccagaagaaccatttgtggtggacatggatctggaccagtggatctccaaggtcaaagatggccagcatcttcttgaagacgagcttcaacttctctgcgaatttgtaaaagagatccttattgaggagtccaatgtgcagcctgtcaatagtccagtgactgtttgtggtgatattcatggtcaattccangatctaatgaaactttccagactgggggt

SEQ ID NO: 290964 - DNA, 289 bp, Glycine max
gcctctagggttatcatatctccatttccatttcctctctctcagtttccaagaatcttaagctatgggaaagtcttacccaaccgtgagcgctgattaccagaaggccgttgagaaggcgaagaagaagctcagaggcttcatcgctgagaagagatgcgctcctctaatgctccgtttggcatggcactctgctggaacttacgacgtgagctcgaagaccggtggtcccttcggaaccataaagcacccctccgaactcgctcacggcgctaacaacggtcttgac

SEQ ID NO: 290965 - DNA, 279 bp, Glycine max; identical to SEQ ID NO: 188798

SEQ ID NO: 290966 - DNA, 274 bp, Glycine max
aagaggaaccctagctagggtttggaagaagctgatccgagaagatggtgcagcgtctcacctaccgcaaacgccacagctatgctaccaaatccaaccagcacagagtcgtcaagactcccggtggcaagcttgtttatcagaccacgaagaagagggccagcggacccaagtgccctgtcactggaaagaggattcaagggattccacatttaaggccagcagagtataatagatcaaggttacacagaaaccgaagactgtgaaccgtgca

SEQ ID NO: 290967 - DNA, 272 bp, Glycine max
aagaacgccgagagtaatgctgaggtaaaaggtttggatgtcgatgctctgtacatttcccatgtccaggttaatcaagcacagaagcaaaggcgtcgtacctacagagctcatggaagaatcaacccttacatgtcatctccatgccacattgagctgatattgtctgagaaggaagagcctgtgaagaaagaggctgagacccaattggcaacaagcaagaagaagggtgctcttcgaagtggtgctcatcttaaattgcccttgaagct

SEQ ID NO: 290968 - DNA, 279 bp, Glycine max
  unsure (1)..(279): unsure at all n locations
ccctgatgggagcattcgctatttcagaagatacatggaatgaaccacttggacgaggaactgagattagattacacctcaaggaagnggctggggaatacttggaggagtctaaactgaaaganttggtgaagagatactctgaatttattaacttccctatcnatatntgggcaagcaaagaagttgatgtggaggttcccgctggatganggtgattccagtgatgaagcggattcatctgcaagcagctgccaggaggngnagcnangatgaant

SEQ ID NO: 290969 - DNA, 279 bp, Glycine max
  unsure (1)..(279): unsure at all n locations
ccaaaggaagacttcggaggaggacacccagaccccaatttgacatatgcaaaanagttggttgctcgtatgggattgggcaaatccgaaccccaagaagagcccccagagtttggtgctgcttctgatggtgatgcagatcgcaacatggttcttggtaaaaggttttntgtcactccttcagattccgtggccattatcgctgcaaatgctgttgaagctataccatacttttctgctggtttaaagggtgttgccaggagcatgccaacctctgct

SEQ ID NO: 290970 - DNA, 277 bp, Glycine max
cgttaccacaattcccaccattgggttcaatgtggagactgtggaatacaagaacattagtttcactgtctgggatgttggtggccaggacaagattcgtcccttgtggaggcactacttccaaaacacacagggtctcatttttgtggttgacagcaacgacagggacagagttgttgaggccagagatgagttgcacaggatgttgaatgaggatgaactgagagatgcagtattgctcgtatttgctaacaaacaagatcttcccaatgcaatg

SEQ ID NO: 290971 - DNA, 269 bp, Glycine max
  unsure (1)..(269): unsure at all n locations
ttcattctctttgcgcagttccctacctctcctttcaagatgcagatcttcgtcaagaccctcaccggaaagaccatcacccttgaggtggaaagctctgacaccatcgacaacgtcaaggccaagatccaggacaaggaaggaattcccccggatcagcaacgtctcatcttcgccggaaagcagctcgaggacggncgtaccctcgccgactacaacatccagaaggagtcaacccttcacttgtcttcgtctccgtggtggcatga

SEQ ID NO: 290972 - DNA, 284 bp, Glycine max
  unsure (1)..(284): unsure at all n locations
gtttctnacaagcctctactatactgcttcaccttctgctctagaaaattcagtgctgaaacatggcttcggctacttctctctgtagccaaaccagcccttcaggcaaatgggaaaggcttctctgaattctctggcctccgaagctcatcaggcttccttcccttttctagaaaatcttcagaggatttccattctgtcattgccttccanacctatgcagttgtaancagtggaggatacaagaagggtgtganagnagcaaaactgaaggttgccataaa

SEQ ID NO: 290973 - DNA, 281 bp, Glycine max
gaagttctactggggcaccaacaagggaagaccgcattggtgtttgcaccggaattttccgcactgatggtattcctgaacaggacattgtcaagcttgttgacaccttccctggccaatccattgatttctttggtgcactgagggccagagtatatgatgatgaagtgaggaagtggatttctggtgttggtgttgacagtgttgggaagaagcttgtgaactcaaaagatggacctccaacctttgagcagcccaagatgactctggagaagctcttg

SEQ ID NO: 290974 - DNA, 279 bp, Glycine max
  unsure (1)..(279): unsure at all n locations
cttcagtgggtcactgagactngggcctgtggccagcccaagacgatcaagtttacccctcttctaaaaaatcctagaagatcatcactgtattatgtgaacttggtggctattagagttggccggagaattgtggatatcccaccggaggctctagcgttcaatgctaacaccggcgccggcaccgtttttgattcgggtacggtattcacccgactggttgaaccggcctacaacgccgtccgaaatgagttccggcgacgaattgccgttcacaag

SEQ ID NO: 290975 - DNA, 276 bp, Glycine max
caagcgtttacgtatcatgaaaggaaaggaagctattggactggcaccaagagccgtggagaaatgcaagaacaggagctagactagtagttaccagtccaaaatctgctccatcatcattagcggtgcctagttgacttagtaactgaagcaaggttaagctgcagcagacacagagggagagagcagggtgttaaaaaatatagttaagtaaatctgtgtatcattatggtttgttatataatatatatttcaaacaaagttgtgagatgtcgt

SEQ ID NO: 290976 - DNA, 274 bp, Glycine max
  unsure (1)..(274): unsure at all n locations
gcaattcacagctatgttccgcagaaaggccttcttgcattggtacactggagaaggtatggatgaaatggagtttactgaagctgagagcaacatgaatgaccttgtgtccgagtaccagcaataccaagatgcaactgctgangatgagggctatgagtatgaagatgaggaagaacctcaggaagatgaggtttaaaacaatagtagtgatttgcagggtgttcttgtttgtgtttngttgtgatacgctgttaatgttgtgttttttncc

SEQ ID NO: 290977 - DNA, 278 bp, Glycine max
  unsure (1)..(278): unsure at all n locations
cgcgaagtccatcacaacgacatatttatattcggcatagataacaccgtactctctaatatcccatactatgaaaaacatggatatggggtggaggaatttaatgaaaccttatatgatgaatgggttaacaagggcgncgcaccggcattgccagagactcttaaaaattanaanaagctgttgtctcttggctcangattgttattcntggtcaggngcatntcttgacaaaatggccgtaacagaggcaaacctaaagnnggctggctccacac

SEQ ID NO: 290978 - DNA, 271 bp, Glycine max
ttgctaacgatcctgctgaacagactggggaatctgtgcttctcattaagggtcctcagggaagaataaatagggctatttggggacctctcaacagaaccattattagtgccggtgaagatgctgttattcgtatttgggattctgagacgggaaaactgcttaaagagtcagacaaggaatctggccataaaaagaccgtgacatcacttgctaagtctgcggatggttcgcatttccttactggctcccttgacaagtctgctaggct

SEQ ID NO: 290979 - DNA, 264 bp, Glycine max
tgcttagagagagagcaaaacatattattttcattttcatctttttttgagtatcaacaaatggcaaccactgtgatgaccactctcccccaattcagtggtcttagaccccaattctcagctgcccctgtgaagaacttggttgctgtgcaacccatgagtcgcaaggggaagggtgcattgggagctcgatgtgactacattggttcatccactaatctgattatggtggcttctacaaccctgatgctgtttgctggaagg

SEQ ID NO: 290980 - DNA, 267 bp, Glycine max
  unsure (1)..(267): unsure at all n locations
accagcttattactcagcgagaggctgttagtcgggaaatccggaagattctaactgaaagggctgctaacttcaatattgcccttgatgntgtgtcaattactagtctgacttttggcaaggagtttactgctgcaattgaagctaagcaggtagctgcacaagaagctgagagggctaaatttgttgtggaaaaagctgagcaagacaagagaagtgctgtaattagagncacagggagaagcaaaaagtgcccaactgattggg

SEQ ID NO: 290981 - DNA, 271 bp, Glycine max
  unsure (1)..(271): unsure at all n locations
tattcctttcaaagaaccaaattgagtgatcgtgatggcaccaaaggcagagaagaagccagcggagaagaagcccgcggaggagaagaagtccacggtgggagacaaggctccggcggagaagaagccaaaggccggaaagaagcttccgaaggagggaggcgccggcggagaaggnnnnnnnnnnnnnnnnnnnnnnnnnagcgtggagacatacaagatctacatcttcaaggttctgaagcaggtccaccctgacattggtatctca

SEQ ID NO: 290982 - DNA, 253 bp, Glycine max
  unsure (1)..(253): unsure at all n locations
gaattcttcatggaatgatgagaagcagctccaggacatgtaccttagccgaaagtntttcgcttttgatctgcgatgcgcctggtgcaggcatgacagaaaaaagaaaggtctttgagatggctctgagcacagcagatgccacattccaaaaccttgattcatcagaaatctccctcactgatgtcagtcattctttgactcagatccaacaaacctggttcanagtctaagaaaagatgggaagaagcca

SEQ ID NO: 290983 - DNA, 254 bp, Glycine max
  unsure (1)..(254): unsure at all n locations
tctattcaattcatctatggntgcctcttccttatgctatgcaatcaatcctgggcaaaccctttgatccgcatttccagcgggtctagggtgaaccaatttggcgntcctgctttgcacatgagaaggaatgttggcctgagagttaggtccatggctaaggaagaacaaccaagtgagcctgcaaccccagtacaccgccaccatcagtagnacccaagcccacagccagtctctgctccttcaccaaaggg

SEQ ID NO: 290984 - DNA, 255 bp, Glycine max
  unsure (1)..(255): unsure at all n locations
gtagttgagaactaagaaggagaagcaaatggcttcctcaatgatctcttccccagctgttaccactgtcaaccgtgccggtgccggcatggttgctccattcactggcctcaagtccatggctggcttccccaccagaaagaccaacaatgacattacctccattgctagcaacggtggaagagtgcaatgcatgaggtgtggccaccagttggcaanaagaagtttgagactctttcctacctgccagacctg

SEQ ID NO: 290985 - DNA, 247 bp, Glycine max
  unsure (1)..(247): unsure at all n locations
atgggtgtaccaacaagggtcaagtgccatggctaaaagcaccaacagcgagaggatgaagcagaacctggacatatttgattttgtgctgagtgaagaggatttagagaggatcagtcaggttccacaacgcaggcaatacacaggggacatatggctatctgaaaatnggtcttgcaagaccttggaaaactttgggatggagacgtttaagtatttcttcaaggataaaactatgttttgggat

SEQ ID NO: 290986 - DNA, 249 bp, Glycine max
ctgctccccaagtctcgttggctcgtcagaactacgctgatgagtgtgaatctgcgattaacgagcagataaatgtggaatacaatgcttcctacgtgtaccactccttgtttgcatactttgacagggacaacgtggctctcaagggatttgccaagttcttcaaggaatctagtgaggaagaaagagagacgctgaaaagctcatgaaatatcagaacactcgcgggggaagagttgtacttcaccc

SEQ ID NO: 290987 - DNA, 244 bp, Glycine max
  unsure (1)..(244): unsure at all n locations
angnncctcacatctctgaanggcgtcactgcatatgggnttgatttgntccgtggancccatactcttgatttnatcaagggtggatttcccagtggaaaatacctctttgctggagtggttgatggaaggaacatctgggccaatgaccttgctgcttctctcactacattgcagggtcttgagggattgtgggcaaagataagcttgttgtgtccacctcctcctcccttcttcacactgc

SEQ ID NO: 290988 - DNA, 222 bp, Glycine max
  unsure (1)..(222): unsure at all n locations
aacactcataacacaaagcacaaagcaaagctcatccttgagttaaaaaatggcagcagttcttccatggctctctcatccccatccttggctggcaaggccgtgaagctgggcccatcagccccagaagtgggaagggtgagatgaggaagacgtcacaagcagttctcaggagccatggtggccagacgagtnagtatgggccatcttgcggccgctact

SEQ ID NO: 290989 - DNA, 248 bp, Glycine max
  unsure (1)..(248): unsure at all n locations
aanaggacattcattcatctatngctacccttattgctcccagcaaccactctccccaagaagatgctgaanctctcagaaaggcttttgaaggatggggaactnatgagaacactgtcatagtaattttgggtcatagaactgtgtatcagaggcagcaaatcagaagagtttatgaggaaatttaccagaggatcttgtgaagcgcctagagtctgagatcaaaggagactttgagaaagccgtgt

SEQ ID NO: 290990 - DNA, 245 bp, Glycine max
gccagaacaacttgtggaggctgatggtttgatatttggttttccttctcgttttgggatgatgccgagccagctcaaggccttctttgatgcaactagtgagctatgggcatcccaagcacttgccggcaaacctgctggaatcttctggagtactggtttttatggtggaggccaagaactatcagattgacagctataactcaattagctcatcatggtatgctttttgttcctcttggata

SEQ ID NO: 290991 - DNA, 238 bp, Glycine max
tgcttgtgcatttatctcacttggaactatttttttatccccccctcccccgtttttcttttcctttgccctttaataaggtatgcatgcgggattgcccaaatatgtccatgtaaatctgagagacatagaagatgctaaatttaaggaaggggaagaagtgtctctagagtcactgaagcgaaaggtgtgattaatccatcaggaagagaaaggagacttcctttgaagatcttgg

SEQ ID NO: 290992 - DNA, 219 bp, Glycine max
  unsure (1)..(219): unsure at all n locations
cttggtatctggggangcaagggacaaggaaaatctttccaatgtgagcttgtcctttgccaanatgggaatcaaccccatcatgatgagtgctggagagttggaaagtggaaatgcaggagagccagcaaaactgatcaggcagagataccgtgaagcccagacttgatcaagaagggaaagatgtgtgctctcttcatcaacgatcttgatgcagga

SEQ ID NO: 290993 - DNA, 286 bp, Glycine max
  unsure (1)..(286): unsure at all n locations
gancctgcnccaacatcaaggttcctctcattcttggtatctggggaggcaagggacaaggaaaatctttccaatgtgagcttgtctttgccaagatgggaatcaaccccatcatgatgagtgctggngagttggaaagtgganatgcaggagngccagcaaaactgatcnggcagagataccgtagaagccgcagacttgctnanagcanggganaagatgtgngcnccccncnnanaancgatcnangnngcannancggnnnccnaggaacaccccacnnncc

SEQ ID NO: 290994 - DNA, 276 bp, Glycine max
  unsure (1)..(276): unsure at all n locations
ggccgatgacgtgaagaagcccctcgtcaacaagcacaagcccaagccngcgaaactncagggctagcattactccagggactgttctgatcctgcttgctgggaggttcaagggaaagagggttgttttcttgaagcagcttccatctggattgcttcttgtaacaggtccctttaagatcaatggggttcctctgagaagggtgaaccaatcgtatgttattggtacatccacaaaggtggatatctctgatgtcaatgttgataaatttgatg

SEQ ID NO: 290995 - DNA, 277 bp, Glycine max
  unsure (1)..(277): unsure at all n locations
gcttctcaggtgttgaaggagcttcaagaggctaagactgcataccccaatggcttcatccgtatcattggatttgacaacgttcgccaagtgcagtgcatcagcttcatcgcctacaagcccccaggcttctaagtcattgaaaaatttgcaaagcatctgtagccaccccactttgtttgttgtacttaaactacattccccatttgttttngctttatgagntnncancanccggnattnngggttnctgtttggggactccagggnaaatnag

SEQ ID NO: 290996 - DNA, 273 bp, Glycine max
  unsure (1)..(273): unsure at all n locations
tgcaattgangttgaagtcttgcccttctctcttcaactccaaacacaagacatcatcatccatggctgcctccgtctccactgtcggagctgtcaacagagctcttttgaacctgaatgggtctggacctggggtttcagctcccagttcatccttctttgggagcagcttgaagaaggttattggctcaagggtccccaacacaaagatttcctctggaagcttcaagattgttgctgtagaagagaaganagagttgaagagacccagca

SEQ ID NO: 290997 - DNA, 282 bp, Glycine max
  unsure (1)..(282): unsure at all n locations
ggacaagncnggaatcncccnggaccagnaacgtctcattttcgccggaaagcaacttgagganggccgtacccttgctgactacaacattcagaaggagagtactcttcacctcgtcctccgtctccgtggtggnatgcagatnntccgttaagacactcacnggcaagaccataaccctanaggttnaaaactcccgaagccatcganaacntgcaggccnggattcaggncaggnagggtttcccccngaaccaanaacgtnnttattttcggngngaa

SEQ ID NO: 290998 - DNA, 269 bp, Glycine max
  unsure (1)..(269): unsure at all n locations
caacaaggaagagaacccccgtgttcccatcattgtcaccggtaacgatttctcaacactctatgcacctctcatccgtgatgggcgtatggagaagttctactgggcaccaacaagggaagaccgcattggtgtttgcaccggaattttccgcactgatggtattcctgaacaggacattgtcaagcttgttgacaccttccctggccaatccattgatttctttggtgcatgagggccagagtatatgatgatgaagtgaggnagtg

SEQ ID NO: 290999 - DNA, 275 bp, Glycine max
  unsure (1)..(275): unsure at all n locations
ggaaaatgcagctacgccgggngcgtgancnacctcaacaccatgtgccccgttggcctccaagtgcgctcacgcgacaacaagcgcgtggtggcctgcaagagcgcttgctccgctttcaactcccccaggtactgctgcacgggctcctatggnagcccacaggcctgcaagcccaccgtctattccaagatcttcaagaccgcatgccccaaggccttactncctatgcctatgatgaccccaccagcatcgctacttgcaccaaagctaat

SEQ ID NO: 291000 - DNA, 269 bp, Glycine max
  unsure (1)..(269): unsure at all n locations
gaggcactgtggcagaagtcctaggagtgtaanccagagacgcaaaatgaagacgatcttgtcgtctgagaccatgaatattcccgacggcgtgagcatcaaggttcacgctaaggttatcgaggttgagggccctcgtggaaaactcgtgcgagacttccaccatctgaacttggacttccaacttattaccgacgatgccggtaaaaggaagctcaagattgattcttggtttggttctcgtaaaacctccgccgccatccgcaccg

SEQ ID NO: 291001 - DNA, 267 bp, Glycine max
  unsure (1)..(267): unsure at all n locations
ctaaaatcacttcatcatggcttcctcgtgtgcttcctctgccattgcagctgttgccatctccacaccaagttcccagncgaatggatcactcttgggaagcacaaaagcttcttttcttagtgggaggaaactgaaggtgaacaactttacagcaccagttggagcacgatccagcactacagtttgcgcagttgctgagcctgataggcctctgtggttcccaggcagcacccctctccatggctagatggcatttgccaggat

SEQ ID NO: 291002 - DNA, 276 bp, Glycine max
  unsure (1)..(276): unsure at all n locations
agtaagtgttgagagaagagtgngtntgtttgtttgaaattaagtagtaaagatgtntggaatcatcggaggnaacaagggtcacaagataaaggggaacttggtgattatgcgaaagaatgtgttggatatcaacagcatcaccagtgttancnggtngtcattggnaccggcattaanatncattggaggtgtccgtcganangttantgntttggcgtcccacatctcnatngagnnccatnagtncnacnnaaggttgatnncanatgggaa

SEQ ID NO: 291003 - DNA, 269 bp, Glycine max
  unsure (1)..(269): unsure at all n locations
gtcatgttnctgggtctattggagcttacccagaagaatggctgccagaaaatggaaatcactttgtttttgccctaatgttctcaatatctgtagtagtcnattgcntgtccctgtgcacttggcttggcaacaccaactgctgtcatggtggcnacaggggttggggctaacaatggagtgttaattanaggangagatgccttggnaagggctcagagggtgaagtatgtgatatttgataaaacaggcattctaactcagggaaa

SEQ ID NO: 291004 - DNA, 269 bp, Glycine max
  unsure (1)..(269): unsure at all n locations
cgcaaaggacatcaagaatgttaatctcttctccaagatggacgtatacgccgccgtttcgctctccggtgaccctctccaccctcagggcgccatcacccacgtccacaaagacgccggctcnaaccccacgtggaactaccccgtgaaattctctgtcaacgaatcgctggcgaaggaaaatcgtttatctcttgagatcaagcttcatctccgaccgcaccctcggcgacaccgtcatcggcaccgtccatgttcctctcagggaa

SEQ ID NO: 291005 - DNA, 268 bp, Glycine max
  unsure (1)..(268): unsure at all n locations
ttgcgggcttcacggtatctctgcctgatcangaaggganagatgtgtgctctcttcatcaacgatcttgatgcaggagctggtcgtcttggtggaactcaccaatacatgtcaacaaccagatggtgaatgccaccctcatgaacattgctgataaccccaccaatgtgcagttcctggtatgtataacaaggaagagattcccgtgtgcccaatcatcgtcacnggtaacgatttctccaaantctatgcgcnntcatcgtgatgg

SEQ ID NO: 291006 - DNA, 267 bp, Glycine max
  unsure (1)..(267): unsure at all n locations
ggcggactcggcgatgataatggacggtgtgaagaaagctatggctcctgataaacttgctgaacttgctcttatggatcccaagagagctaagaggattcttgctaacaggcaatctgctgcaagatccaaggagaggaagattcgttacacaagtgagttggagaggaaggtgcagactcttcagactgaagcaactaacctttcctgcacagcttaccatgcttcagagagacactacagatttgactcacagagaataaggng

SEQ ID NO: 291007 - DNA, 221 bp, Glycine max
  unsure (1)..(221): unsure at all n locations
tctgagtcacaaaatattgtttttgtacaaacattaacaccatggcagatgtcctgagtgaagaacagattggtgagatcaaagaagcctttggcttgtttgacaaagatggagatgggtgcattactgtggaagaattggccactgttattcggtcattggatcagaaccccacagaagaagagctccaagacatgataanngnggccnatacagagggc

SEQ ID NO: 291008 - DNA, 263 bp, Glycine max
caaggatacactccggacttaattacgttattttgttagggtcaccgtttcgagatattctaaacttgtactgaaaaatatggagggaaaagaagaggacgtaagagttggagccaacaggtacggagagaggcagccaatagggaccgctgctcaggctaaagactacagagagccaccgtcggcgcctctcttcgaaccgggagagttgtcatcgtggtctttctatagggctggcatagcagagtttgtggccactttct

SEQ ID NO: 291009 - DNA, 268 bp, Glycine max
  unsure (1)..(268): unsure at all n locations
ggcagaaaaacaagtagttgagaactaagaagaaggaaatggcttcctcaatgatctcctccccagctgttaccaccgtcaaccgtgccggtgccggcatggttgctccattcaccggcctcaaatccatggctggcttccccacgaggaagaccancaatgacattacnctccattgctagcaacggtggaagagtacaatgncatgcaggtgtggccaccattccnctagangaagttcganccctctttcctattgccagactng

SEQ ID NO: 291010 - DNA, 261 bp, Glycine max
  unsure (1)..(261): unsure at all n locations
ctttcctctccgaaccctcgatcactctcacgcgctcctanattcgctcctccaccgtcgctctctcgaacaaccacaacaccattcttcatcacatggcaaacgcagcatctggtatggcagtccatgatgactgcaagttgaggtttttggagctgaaggcaaaaaggacacaccgtttcatagtttttaagattgaggagcagcagaagcaggtcattgtggagaagcttggtgagcctgcccagggctatgaagatt

SEQ ID NO: 291011 - DNA, 256 bp, Glycine max
  unsure (1)..(256): unsure at all n locations
cagaagtgggaagggtgagcatgaggaagaccgtcaccaagcaggtctcctcaggaagcccatggtacggcccagaccgagtcaagtacttgggcccattttctggcgagcccccgtctacctaaccggtgagttcccaggcgactacggctgggacactgctgggnttccgcagacccagaaacttcgccaagaaccgtgaactcgaatgatccactccaggtgggccatgctcggagcttgggctgcgtcttcc

SEQ ID NO: 291012 - DNA, 264 bp, Glycine max
caagattgttgctgtagaagagaagaaagagattgaagagacccagcagaccgacaaggacagatggaagggtcttgcctatgatatctcagacgaccaacaggacatcacaagaggaaagggtttggttgactcccttttccaagctccacaggatgctggaactcactatgctgtcatgagctcctacgagtaccttagcactggacttcgccagtacttggacaacaacatggatggattttacattgctccagcttttat

SEQ ID NO: 291013 - DNA, 275 bp, Glycine max
  unsure (1)..(275): unsure at all n locations
taccaactaaagttgatcatcaggtcacatgaaggtcctgatgctagggaaaaaagggatggtcttgagggaatggatgaaggttacactattgatcatgttgtagattctggaaagctggncactgtttttagtgctccagattacccacaatttcaggcaacacaggagangtataacaacaaaggcgcctatgttgtccttcaaccnccgatttngaaatcctatatttcatggattttcagcagtcactccaaggcccgangtgantccct

SEQ ID NO: 291014 - DNA, 276 bp, Glycine max
  unsure (1)..(276): unsure at all n locations
gcaaagcgcctcatggactacggtttcatgcaccaacaatgtcatggcctgtgcctggcacactcatgattgagcctactgagagtgaaagcaaggccgagttagacaggttctgtgatgctcttatttccattagacaagaaattgctgagattgagaaaggaaaggttgacattancancaatgtacttaagggcgcccctcatccaccatcatgcctcatggctgangcatggacaanaccatactcccaggcatgtgcagcntccccanccc

SEQ ID NO: 291015 - DNA, 277 bp, Glycine max
gctagccaagggctttatcttagggaaagatgctgtcaacaaagcaaagacctttgacgagaagcaccagttatcctccacagcctcagcaaaagttgcgtctttcgatcagaaaattgggcttagcgagaaaataagtgctggtgctacagtagtgggtgatagagttcgagaagtggaccaaaagtttcaggtttcagagaagaccaaattcagcatttgcagctgcagaacagacagtgagtaatgctggttctgccataatgaagaatcgcta

SEQ ID NO: 291016 - DNA, 269 bp, Glycine max
ttaaaatggaattggtggatgctgcattccctcttcttaaaggtgttgttgccacaactgatgtggttgaggcatgcactggggtcaatattgccgtgatggttggtggattcccaagaaaagaaggtatggagaggaaggatgtgatgactaagaacgtctccatttacaagtcccaggcttctgcccttgaaaagcatgctgctgccaactgcaaggttcttgttgttgctaacccagcaaacaccaatgcattgatctgaaggaat

SEQ ID NO: 291017 - DNA, 275 bp, Glycine max
  unsure (1)..(275): unsure at all n locations
ctccgcgtggccacacccatcgatcagttgccactcatngacggtcagttatcgcagtcccaccatctcctccgctcttatgcctcacaccattcccattccctctcgccccatgaccgacaagaacttgacaacttcatggcacagtatttgattgtgttgtgtacatttaaagagcagcttcagcaacatgtgagggtgcatgccgtggaggctgtgatggcctgccgtgatattgaaagtaccttgcaagctctgacaggatcagtttggga

SEQ ID NO: 291018 - DNA, 258 bp, Glycine max
  unsure (1)..(258): unsure at all n locations
ctggaatacctcaagccagatgatgncttctgaaatggtctantgtatagncggttgagtcactatcaatacttgagaagatgcactcaaaaggttatgtgcatggggatgtaaaaccaganaactttttacttggtcaaccagctacagcgcaaganaagaaactgtttcttgttgaccttggattagcaacaaaatggagagacacctcccagtggacannatgnggactatgnntcaccgccctgatnntntaag

SEQ ID NO: 291019 - DNA, 275 bp, Glycine max
  unsure (1)..(275): unsure at all n locations
gatggaaggcatagtacacaggacagttgaagtgaatggcataaaaatgcatgttgctgagaaaggtgaaggtcccgtggtcttgttcctccacggcttcccggagctctggtactcctggcgccaccagattctggctctcagcaacctcggctaccncgccgtggctccagatctccgcggctacggagacaccgaggcaccagcttcaatcagcagctacaccatcctccacttagtttctgacatcgtcgcgctcattcntccattgntgg

SEQ ID NO: 291020 - DNA, 271 bp, Glycine max
  unsure (1)..(271): unsure at all n locations
ctttttttcttcttcttgaatggctctccaggctgcttctcttgancctgcttccttctcggttcttaaagagggaaagagtggtgtgtctctcaaggactccaccttgttcggtctttcattttcagaacctatcaaagctaacttcagctcttctgcattgaggttaagagggaattcgaacaaaagctcngtgctgtgagggccgaaacagtggctacagcctctccagcagttaccaagtctacaccagaaggcaannaacattgag

SEQ ID NO: 291021 - DNA, 118 bp, Glycine max
cccgtgtgcccatcatcgtcaccggtaacgatttctccacactctatgcgcctctcatccgtgatgggcgtatggagaagttctactgggcaccaacaagggatgaccgcattggtgt

SEQ ID NO: 291022 - DNA, 269 bp, Glycine max
accttctgctctagaaaatcagtggtgatacatggcttcggctactctctctgtagccaaaccagcccttcaggcaaatgggaaaggcttctctgaattctctggcctccgcagctcatcaggcttccttcccttttctagaaaatcttcagaggatttccattctgtcattgccttccagacctatgcagttggaagcagtggaggatacaagaagggtgtgacagaagcaaaactgaaggttgccataaacggatttgaaggattgg

SEQ ID NO: 291023 - DNA, 269 bp, Glycine max
gcaaaaagaaagaatcccaggcgaggagaaagatggaggggaaggagcaggatgtgtcgttgggagcgaacaagttccccgagagacagccaattgggacggcggcgcagagccaagacgacggcaaggactaccaggagccggcgccggcgccgctggttgacccgacggagtttacgtcatggtcgttttacagagcagggatagcagagtttgtggccacttttctgtttctctacatcactgtcttaaccgttatggagtcgccg

SEQ ID NO: 291024 - DNA, 273 bp, Glycine max
  unsure (1)..(273): unsure at all n locations
ggcggagcaaggcaaacttctaccgtctgatgacagtgttttctggaattctctctgttgtgcgatggttaggggaagtttccacatggaagcatcctataacaacagtgctggtgcacattctttttctgatgcttgtatgtttccctgaacttattctgccaactgtatttctatacatgtttgtcatcagcatgtggaantggaggttccggccgaggtgccctcctcacatgaacaccagactcctcctatgcagaagggtgcccccac

SEQ ID NO: 291025 - DNA, 268 bp, Glycine max
ctttctttgcatagggcacctcctttctctgtgactctgagtatcgtatcgttttattattatttctaattctctcttatcaggtccattgaatatgtctccgtcgttggatcttcctcccaagggtggcttcagttttgatctatgccgaagaaacgcaatgcttcaaaacaagggcctcaaagccccaacctttctcaaaactggcaccactattgtcggtttagttttccaggatggtgtcattcttggtgctgatactagggca

SEQ ID NO: 291026 - DNA, 287 bp, Glycine max
  unsure (1)..(287): unsure at all n locations
gataactagaaacagtgtgatgaaaatgaaggtccttgtnttcttcgttgctacaattttngtagcatggcaatgccatgcgtacgatatgttccctctccgaatgaacactggctatggtgcccgtactccggaggtgaaatgcgcaagttggaggcttgctgtggaagcacncaacatctttgggctttgagaccattcctgaagagtgcgttgaagcaacaaaggaatacatcccatggcgaacaatatagatcagactccaaaacataaccaacaagcttatt

SEQ ID NO: 291027 - DNA, 276 bp, Glycine max
  unsure (1)..(276): unsure at all n locations
gtcactaggatcctggtttattggacttgatgtggagcatatagatgatcgaagactttgttgtggcactcctcctgattgtgagtggaaggcacaagctggaaacatttgtgttgcatcatttgattggagctgcagtggaatttgcaggtctgctgagaggattaaagaggtacataggaggtgtggagagggtgagaatgttttgtggagtgcctctttctaggaggccacnagtgacgttggagttccttcctaatcaggaagataatncta

SEQ ID NO: 291028 - DNA, 281 bp, Glycine max
  unsure (1)..(281): unsure at all n locations
cttgacaactactgtcctaggcttcaaaatatccatgccaatcatgtttgccccaacagcctttcagaaaatggctcatcctgagggagaatatgcaacagcaagagctgcatctgctgctggaacaatcatgactttgtcctcatggggcnatttccagtgttgaagaggtggcttcnaacaggacctgggcattcgctttttccngctatatgtgtacaaggaccgccngtgggtngcncagccntgtgagangaacttgaggggctggattcanagcc

SEQ ID NO: 291029 - DNA, 272 bp, Glycine max
  unsure (1)..(272): unsure at all n locations
agaaaccctagctagccacaatgcagatattcgtgaaanccctaaacggggaagacgataaccctagaggtagagtcatcggacacaatcgacaatgtgaaggcgaagatccaggacaaggagggcatcccgccggaccagcagcgcctgatcttcnccggtaancagctggangacggcngcaccctncgccggactacaacatcccagaaggagtcnccgcttcacnttcgtactccgcttcggcggnggcncaaagaagcgcaagaaga

SEQ ID NO: 291030 - DNA, 289 bp, Glycine max
  unsure (1)..(289): unsure at all n locations
caaaacatggctttgcccaatcagcaaaccgtcgattaccccagcttcaagcttgtcatcgtcggcgacggtggcacaggaaagacaaccttcgtgangaggcatctcactggtgaattcgagaagcaattatganccgacccattggtgtggaggctcatncgtncggatttttcacgaactgtggaaacnttcgcnttccaatcgntgggatactgtngggcnanganagtttggtgacccnggnntggatatnntantccnngggcatgtgnngattagcatgttc

SEQ ID NO: 291031 - DNA, 284 bp, Glycine max
  unsure (1)..(284): unsure at all n locations
ctcagactgtctcagaccatccaaatgaatctattcatgtacttcatgttggaaagatgaggatgaagctctgtaaaggaaatacaacaattgccaaagaatactattctagttcaatgcagctttgtggagttcgaggaggtgggaatgctgcagcacaggcagtcttttggcaaccgaagcaaggtccttncttttgtattagcttttgagtcagagcgagaaaggaatgcagtaatcatgcttgcaaggagatttgcatttgctgtaatataattccttgc

SEQ ID NO: 291032 - DNA, 291 bp, Glycine max
  unsure (1)..(291): unsure at all n locations
ttttacattgctccagcttttatggacaaacttgttgttcacattaccaagaacttcatgaccctgcccaacatcaaggttcctctcattcttggtatctggggangcaagggacnnggngnatcntcccaatgtgagcttgtctntgccaagatggggnatcaagcccatcatgntgangtggctgnccngcctngacnattnggaatnccnccagagccancaaaaatgnttcngncanaggctaccntgaaanccgcagnagtngacngccnngngangcatgngngc

SEQ ID NO: 291033 - DNA, 153 bp, Glycine max
  unsure (1)..(153): unsure at all n locations
ggctcctacggagtaccttagcactggacttcgccagtacttggncaacaacatggatggattttacattgctccagctttnatggacaaacttgttgttcacattaccaagaacttcatgaccctgnccaccatcnaggttcctctcattct

SEQ ID NO: 291034 - DNA, 282 bp, Glycine max
ttctattcattcaagattcagcaagtgcgtttcggaagcagagaccgaaatacttcgagatggcccgtacaaagcaaactgctcgtaagtcaactggaggaaaagctcccaggaagcagcttgcaaccaaggctgcacgtaagtctgctcaacaactggtggtgtgaagaagcctcatcgttatcgccctggaactgttgctcttcgtgagattaggaaataccagaagagcactgagctcctaatcaggaagcttcctttccagaggttggttcgtgaaat

SEQ ID NO: 291035 - DNA, 276 bp, Glycine max
  unsure (1)..(276): unsure at all n locations
gttgagtgttgagttgaggcagagattcaagagaatggagggtgtgagccccgagcccctgagatcagaattggattccaaatccaaacatgacacagcanaagnagatgatgacgctttgaaagacagcactgaagccgaagtaccaaaattcgtctcatgagagcctttgttgaaagccgagatccctcttccaaggaagaaaatgatttgatgatgagaagattcttgcgggctcgtagtttggatgtggagaaggcttcggcaatgttcctt

SEQ ID NO: 291036 - DNA, 274 bp, Glycine max
  unsure (1)..(274): unsure at all n locations
aacacaaggcagaaagcaagctcatcctagagttttaaaaatggcagtancctcctccatggctctctcttccccatccttggctggcaaggccgtgaagctgggcccatcagcccccgaagtcgggagggtcagcatgaggaagccgtcaccaagcaggcctcctccggaagcccatggtacggcccagaccgcgtcaagtacttgggcccattctctggcgagcccccgtcctacctcatggcgagttcccaggtgactaggctgggacctg

SEQ ID NO: 291037 - DNA, 271 bp, Glycine max
ccaagccccactcaaccaccacaccactctctctgctcttcttctacctttcaagtttttaaagtattaagatggcagagacattcctatttacctcagagtcagtgaacgagggacaccctgacaagctctgcgaccaaactccgatgctgtcctcgacgcttgccttgaacaggacccagacagcaaggttgcctgcgaaacatgcaccaagaccaacttggtcatggtcttcggagagatcaccaccaaggccaacgttgactacgag

SEQ ID NO: 291038 - DNA, 275 bp, Glycine max
  unsure (1)..(275): unsure at all n locations
cttcctagaacgnaaaannanaagaagagcaattttccctcaccaaagaagaagaagcaaacantggccgatcaattacngatgancagatctccgagttcaaggaagccttcagcttgtncganaaggacggcgatggttgctcacaaccaaggagcttgganctgttntgcgttcattggggcaaaacccaactgaggcagagntccagggcatgatcactgaagtggctnctgatgggaatggtnncattgacttncctgagtncctaaatt

SEQ ID NO: 291039 - DNA, 256 bp, Glycine max
  unsure (1)..(256): unsure at all n locations
gtcatcatccgcagctgctgttattcgcaccgcaaacaaacagtgagccatggccgtcggaaagaacaagcgcatctccaaagggaaaaagggtggcaagaagaaggcagctgatnccctttgccaagaaggattggnatgacattaaggccccttctctttttcaagtgaaaaatgttggcaaaaccctccgtctctcgtacgcagggtaccaagattgcttctgaaggacttaaacatagagtgtttgaggtcc

SEQ ID NO: 291040 - DNA, 251 bp, Glycine max
  unsure (1)..(251): unsure at all n locations
gtgttcgtgacatcgaaggaaatgaattacctcgtcttgtctatgtgtctcgtgaganaagacctggatatgatcaccacaaaanagctggagctatgaatgctttggtgagagtctcggcaataatcaccaatgctccttatgtactgaatgttgattgtnatcactacataaataacagtaaggcccttcgtgaagccatgtgcttcatgatggatcctacatcagggaaaaanatatgctacgtagtt

SEQ ID NO: 291041 - DNA, 259 bp, Glycine max
  unsure (1)..(259): unsure at all n locations
agtgtttctgtaaccatggcatccaccactctatcccctacaacnccttctcagctatgctcaggaaagagtgggattttcagtccntcacaggcacttcttgtgaagccagtgaagaggcagatgatggggaagagcaagggaatgagaattgcatgccaagccaccagcattcctgctgatagagtccctgacatgggcaaaagacagctcatgaatctgcttctcttggtgccatttcactcccctctgctggngc

SEQ ID NO: 291042 - DNA, 248 bp, Glycine max
  unsure (1)..(248): unsure at all n locations
agaaagctgtcgagaattcccccttccttgaaaagcttaagaagaagggatangccnaanctctacatggttgatgctattgatgagtatgctgttggccagcttaaggaatttgagggaaagaagttggtctctgctaccaaggaaggcctaaaacttgatgagagcgaagacgagaagaaaaagaaggaagaactaaaggataaatttgagggtcttgccatgtgatcaaggatgtgttgggtgaa

SEQ ID NO: 291043 - DNA, 247 bp, Glycine max
  unsure (1)..(247): unsure at all n locations
attgttgtaactttttgantcctaaattctcctaaaatnccgaaattctaatttcgttagggganaganattgtttgtgtgtgagtnagtatggcnggaaaaggcgnnggtcctgctatcggaatcgatttgggaacgacgtactcttgcgtcggcgtgtggcaacacgatcgtgttgnaatcatagccancgatcagggtaacagaactaccccatcctacgtggctttcaccgacacagcacgtg

SEQ ID NO: 291044 - DNA, 250 bp, Glycine max
  unsure (1)..(250): unsure at all n locations
gatctttgtaagantcatccatatcatacccttcactttcctgggaaaaaattggaacctgcctctgttaaagtttgtatttttctgagtgggtgggttgattgagagtgctgtgcaagctttggaactttttcccaacctgctacttcaatggccactgaagaggttaacaaacctcaatcacttcctccataccctgagatgatagtgaaagcacttgaagcactgaatgagccaaatggatcgaaag

SEQ ID NO: 291045 - DNA, 264 bp, Glycine max
  unsure (1)..(264): unsure at all n locations
cctcttcacacattttcttagctctctccaacaatccctctcgttcacactttcagattgtgtgaagatgggggctggtggccgaactgctgttcctcctgccaacaggaagtcagaggctgaccctttgaagcgggtaccatttganaaacctcagtttagtctcagccagattaagaaggccattccacctcactgtttccagcgctctgttctccgctcattctcctatgttgtttatgacctcaccatagccttctnctc

SEQ ID NO: 291046 - DNA, 261 bp, Glycine max
  unsure (1)..(261): unsure at all n locations
ctgggaaatgaaaggacaaaatattgcctcacatccaagattccactaggagtgattttngccattccaccttttaactatcccgtcaatcttgctgtttccaaaattgctcctgccctgattgctggaaactcaattgtgctcaagcctccaactcagggagctgtttctgctttgcacatggttcactgctttcacttggctggttttcccaaaggcctaatcaactgtgtcactggaaaaggctcagaaattggtgtt

SEQ ID NO: 291047 - DNA, 257 bp, Glycine max
  unsure (1)..(257): unsure at all n locations
gcaccttgcagataacagactcggaagttgatgantatnattctgatgggaagatggggaatggtttctactgtcaagagatgtatcctggcgaggatggacaactatcatggttcaatgctggtgttagagttggtgttggaatcggccttgggatgtgcgtagggcttgggattggtgttggactgctcatgcgatcgtaccaaacaacaactagaaacttcaggaggagatttttctaaactgctataagcatt

SEQ ID NO: 291048 - DNA, 257 bp, Glycine max
  unsure (1)..(257): unsure at all n locations
gcatcgtagagaaataagggaaaaatggtgtcgctgaaactgnagaagcncctctcaggnaancgtgctnaagngcggcagaggaaaggtttggcttgaccccaatgaagtcaacgaaatctccatggccaattctcggcaaaacatcaggaagttggttaaggatgggtttatcatcaggaagccaaccaagattcactcccgcttcacgtgctcgtaggatgaaggaggcaaagaggaagggccgccactccgta

SEQ ID NO: 291049 - DNA, 249 bp, Glycine max
  unsure (1)..(249): unsure at all n locations
gaagtgaggnagtggatttctggtgttggtgttgacagtgttgggaagaagcttgtgaactcaaaagatggacctccaacctttgagcagcccaagatgactctggagaagctcttgctgtatggtaacatgcttgtccaagaacaagagaatgtcaagagagtccaattggctgacaagtacttgaacgaggctgctcttggaaatgctaacgaggatgctattcagaggggaactttctccagtcga

SEQ ID NO: 291050 - DNA, 247 bp, Glycine max
gccattgcagctgttgccatctccacaccaagttcccagaagaatggatcactcttgggaagcacaaaagcttcttttcttagtgggaggaaactgaaggtgaacaactttacagcaccagttggagcacgatccagcactacagtttgcgcagttgctgagcctgataggcctctgtggttcccaggcagcacccctcctccatggctagatggcagtttgccaggagattttggctttgatccta

SEQ ID NO: 291051 - DNA, 243 bp, Glycine max
  unsure (1)..(243): unsure at all n locations
gttgatgcgagcaaacanntggantttncaaaggttgagnagcgtgtgcgtanaacangnggtgggagtncaggaactgtgaggaatctacgtattcgagaggatnctgcanaatatcttcttaatcttgatgtcaattctgcacactatgatcccaagaccaganccatgcgtgaggatccacttccanatgcngatccgaangaaaagttttntctgggtgataaccactatnggaatagg

SEQ ID NO: 291052 - DNA, 247 bp, Glycine max
gtacatctctggtgccattctctttgaggaaacactctaccaatccacaactgatggcaggaagattgttgacgtgctgcttgagcaaaacattgttcctggtattaaagtcgacaagggtttggtgccccttgcaggttccaacgacgagtcatggtgccaaggtttggatggtctagcctctcgctcagctgcatactacgagcaaggtgcccgtttcgccaaatggcgtactgttgtgagcacc

SEQ ID NO: 291053 - DNA, 255 bp, Glycine max
  unsure (1)..(255): unsure at all n locations
tggggttattcttctgtgggatttggctgagggtaagcgtctttactccctcgatgctggttctatcatacatgcgctctgcttcagccccaacaggtactggnctttgcgccgccactgaacagagcatcaagatctgggatttggagagcaagagtatcgttgaagatttgaaggttgncctaaagactgaggctgatgccaccaccggtggtggtaaccccaacaagaagaaggttatctactgcacaattg

SEQ ID NO: 291054 - DNA, 244 bp, Glycine max
  unsure (1)..(244): unsure at all n locations
acgcgcactctctctttttctctctgttttttgttctctcttcgcttaaaccctatcgttctnnctcgttttcgccgattctcgccatgccgaaagctaaatccgacgccaaagccgccgatagcaggttgaagcggaagggcgctggtgctgggaggaagcaatcgaagaaagctgctaaggaccctaacaagccgaagagacctccaagcgctttcttcgttttcatgtccgagttcagagc

SEQ ID NO: 291055 - DNA, 245 bp, Glycine max
  unsure (1)..(245): unsure at all n locations
cganaactagaggccagggtctcggngtgtttgggttnctttatcttaaacaccacanacacagaacagaggtgtagagaagaaagctcaaaaatatggcggcagagtcatcactgagggtggcgactcccactctttgcaacctcaatgggtctcagagacgaccaaccaccaccactctctctccgcttcgcttgcatgggttttcgtcctcgaccctcctctacactctctcacctcctccc

SEQ ID NO: 291056 - DNA, 244 bp, Glycine max
  unsure (1)..(244): unsure at all n locations
cggctccatcttcttcgatctctcaaactctatcggcgcagaaccaatcctatatcactntggggaagacacatggaatgggagctgcccgcaagctgaagtctcaccgtaggagacaaaggtgggctgacaagtcatacaaaaagtctcatcttggaaatgaatggaagaagccttttgctggttcatcccatgcaaagggtattgttcttgaaaagataggtattgaggctaagcagcccat

SEQ ID NO: 291057 - DNA, 246 bp, Glycine max
  unsure (1)..(246): unsure at all n locations
cagtttcagcctttctctcccactcactcactcacaggtaagcaatggcgggnaaaggagggaaggggcttcttgcagcgaaaaccaccgcggcgaataaggacaaagacaaggacaagaagagacctatttctcgctcttcccgtgctggaatccantttcctgtgggacgtatccataggcagctgaaacaaagggtccaagccaatggacgtgttggggcaacagctgcagtgtacttagcca

SEQ ID NO: 291058 - DNA, 247 bp, Glycine max
  unsure (1)..(247): unsure at all n locations
ggagaagaagagaatcataagaaagcaagncagaaaatgggagtggagaagcagttgttgaggcctggcaccggtcccaagccaattcccggtcagaacgtcaccgttcactgcactggtttcgggaagaacggtgacctttctcagaaattctggagcaccaaggatcctggccaggaccctttcactttcaaaatcggccaaggttctgttatcaaaggatgggatgaaggtgtgcttggcataa

SEQ ID NO: 291059 - DNA, 252 bp, Glycine max
  unsure (1)..(252): unsure at all n locations
gtcttgcaattgaagtngaagtcttgcccttctctcttcaactccaaacacnngacatcatccatccatggctgcctccgtctccactgtcggagctgtcaacagagctcttttgaacctgantgggtctggacctggggtttcagctcccagttcatccttctttgggagcagcttgangaaggttattggctcaagggtccccaacacaaagatttcctctggnagcttcaagattgttgctgtagaaga

SEQ ID NO: 291060 - DNA, 245 bp, Glycine max
  unsure (1)..(245): unsure at all n locations
gcactctttgcaacacaacaaaaaaanccaacacagagagangcgtcttaataaacgctcttctctgaaaaacctgatttcttctcttcttctcttctctttcgtttcgatcttcgatctctgaaaatgagagagtgnatttcaatccacatcggtcaggccgntattcaggtcggaaacgcctgctgggagctctactgcctcgaacacggcattcagcctgatgggcagatgccaagtgaaga

SEQ ID NO: 291061 - DNA, 242 bp, Glycine max
gcagaaagcaagctcatcctagagttttaaaaatggcagcagcctcctccatggctctctcttccccatccttggctggcaaggccgtgaagctgggcccatcagcccccgaagtcgggagggtcagcatgaggaagaccgtcaccaagcaggcctcctccggaagcccatggtacggcccagaccgcgtcaagtacttgggcccattctctggcgagcccccgtcctacctcatgggcgtt

SEQ ID NO: 291062 - DNA, 240 bp, Glycine max
aaacttctgaagatgggtggcattgcattcggacgcttggatgattctttcagtttaacctcaatcaaggcctatattgctgagttccattcaaccttgctctttgtttttgccggtgttggttcagccatagcctatggtaagttgacatcagatgcagcacttgatcctgctgggttactggcagttgctatttgccacggttttgcactctttgttgcagtttctgttggtgccaat

SEQ ID NO: 291063 - DNA, 248 bp, Glycine max
  unsure (1)..(248): unsure at all n locations
caagtagttgagaactaagaaggagaagcaaatggcttcctcaatgatctcttccccagctgttaccactgtcaaccgtgccggtgccggcatggttgctccattcactggcctcaagtccatggctggcttccccaccaggaagaccaacaatgacattacctccattgctagcaacggtggaagagtgcaatgcatgcnggtgtggccaccagttggcaagaagnagtttgagatctttcctacgc

SEQ ID NO: 291064 - DNA, 257 bp, Glycine max
tcattcgttcatcatggttcggttcagcaacaacgtgatcggactcctgaacttcctgaccttcctcctctccatcccgatcctggtggccggagtgtggctgagcaagcagggcgccaccgagtgcgagcggtggctggagaagccggtgatcgcactcggcgtcttcctcatgctcgtctcactcgccggcctcgtcggcgcgtgctgtcgcgtgtcgtggctcctctggctctacctcctcgtcatgttcgctc

SEQ ID NO: 291065 - DNA, 263 bp, Glycine max
  unsure (1)..(263): unsure at all n locations
ctgagtttcgctttacatatggatatgagatgcctgtagatgtnttagctaaatggattgcagataaatcacaagtctatactcaacatgcttatatgagaccactcggagtagttgctatggttttgggtattgatgatgaatatggacctcagctatacaaatgtgatccagctggtcattactttggtcacaaggcaacaagtgctggattgaaggaccaagagngcaattaatttcttggaaaanaagatgaagaatgc

SEQ ID NO: 291066 - DNA, 259 bp, Glycine max
caggaggagcttcctgtttccatttcctctcacaaaaatcacttattatgaacacacgaaaagacatggaccggatcaaaggcccatggagcccggaggaggacgaggctctgcagaagctggtggagaaacacgggcccaggaactggtccctcatcagcaagtccatcccgggccgctccggcaagtctgcaggctccgctggtgcaaccagtgtccccccaggtggagcaccgggcttcacccacgaagaggacga

SEQ ID NO: 291067 - DNA, 262 bp, Glycine max
  unsure (1)..(262): unsure at all n locations
ttttggccatgggatgagtccaatgctacctgtgggaagcgtttggcttcaattgggctagagaacactgaagctaaccgccaggcataccgtaccctccttgtgacagttccangacttggtcagtacatctctggtgccattctctttgaggaaactctctaccaatccacaactgatggcaggaagattgtcgacgtgctcctcgagcaaaacattgttcccggtattaaagtcgacaagggtttggtaccccttgctg

SEQ ID NO: 291068 - DNA, 263 bp, Glycine max
  unsure (1)..(263): unsure at all n locations
cganaagcttatgcaaccatcctgcactctgcacagatgtatgtttgtggagccattactgcagcnccagagtattcgcatgtccgggttcaacacgagatcttgtgattctgttgatgaaacaattagtgagtancatagagggggcttgaaggctgctggatggaagatccatacaatccaaagaatcaggaatccaaaagcagaaccagaggcatataacgagtggaactacagcaaattnccgtcctctggcagctaac

SEQ ID NO: 291069 - DNA, 258 bp, Glycine max
  unsure (1)..(258): unsure at all n locations
cttgcttggaattcgagttggagcacggtttcgtgtaccgtgancacaacaggtcaccaggatactacgatggacgctactggaccatgtggaagctgcctatgtttggttgcactgatgcttctcaggtgttgaaggagcttcaagaggctaagactgcataccccaacggcttcatccgtatcatcggattcgacaacgttcgccaagtgcagtgcatcagcttcatcgcctacaagcccccaggcttctaagtgt

SEQ ID NO: 291070 - DNA, 260 bp, Glycine max
tagaagaagcagaaagagaagcattagcaaaagcaagaagaactagtctaagcagaaatggcctcttcagtgatggcatctgtggccctcaaacctgcccctttcactgttgagaagtcctcagttagaggccttccctccctctcaaggaactcctccttcattcagagttgtggccagtggtggcaagaagatcaagactgacaagccttatggaattaatggtggcatggctttgagggaaggagttgatgcatctg

SEQ ID NO: 291071 - DNA, 267 bp, Glycine max
  unsure (1)..(267): unsure at all n locations
catttnttcagtcctgcccacattatgcctcttttggagattatacgaaccgataaaacatctgcacaagtgattcttgatctgataacagttggtaaaatcataaagaagacacctgttgtggtgggtaattgtactggctttgcagtgaataaaacattcttcccatattcacaaggtgcccatttgttggtcaacttgggcgtggatgtntncagactgacacattgattacgcaatttggctttcngattggtctttccagct

SEQ ID NO: 291072 - DNA, 264 bp, Glycine max
  unsure (1)..(264): unsure at all n locations
gcagcacttggtgggaatcgtgatgtgacaggaagccagaacagcgttgagatcgatgctctagctcgctttgctgttgaagaacacaacaaaaaacagaatgcccttttggagtttgaaaaggtggtaactgcgaaacagcaagtggtttctggtaccttgtacaccatcactttggaggcaaaagatggtgggcaaaagaaggtttatgaagccaaagtttggnagaagtcatggttgaacttcaaggaggtgcaagattca

SEQ ID NO: 291073 - DNA, 243 bp, Glycine max
  unsure (1)..(243): unsure at all n locations
gctgagcactagaatccagtttacagctgaaaatgaggncaaattccactcattccacccngttgctaccattctcagctatctgaccaaggctcctctggttccaccgggtacaccagtggtgaatgcattgtcaaagcagcgtgcaatgctggaaaacataatgagggcttgtgttggattggccccagagaataacatgattctcgagtacaagtgacgcatgggatagaatnatntttt

SEQ ID NO: 291074 - DNA, 265 bp, Glycine max
  unsure (1)..(265): unsure at all n locations
cgnacatgtncccgncccggccgccaagacanccaaagcggtcaaggcgggacaagagcctgtgatggcttatcctcctgctggggcgggatccagttcgatgccctatggtacgccacnccctcccccgccgnancaatatgcggcgacgggntatnggtatccacctcagcaggtgcnttgtggatacccatcttcaagcagcatatgggtaaccncctcagaccggttatggataccnacaacagtcgggttatggatatcc

SEQ ID NO: 291075 - DNA, 258 bp, Glycine max
  unsure (1)..(258): unsure at all n locations
caaggacatcatgatgtccttggtggttgcataagtggttcaattnnngtggtttcgcaaattcggactttgcaccatgtnttgggtggtacacttaacccgaatgctgcatacctattcatcagaggcatgaaaacgctgcatctccgtgtacagcagcagaattcaacaggaatgaggatggccaaacttttagaggcacatcccaaggtgaagcgggtctactatccaggcttgccgagtcaccctgaacatgag

SEQ ID NO: 291076 - DNA, 256 bp, Glycine max
ccgtatgtgacttatggatacccaaatctcaagagtgtgagagaacttatttacaagagagggtatggaaagctaatgaagcagaggactgctctaactgacaactctatcattgagcaggctctgggcaagtatggaatcatatccactgaagatctgatccatgagatcatcactgttggacctcacttaaggaggctaacaacttcctttggccatttaagctcaaggctcctttgggtggcttaaagaagaa

SEQ ID NO: 291077 - DNA, 254 bp, Glycine max
  unsure (1)..(254): unsure at all n locations
cgcacctcgactcgctcgtgggacaggcnctgttcggagacggcgccgcagcgttgatcatcggatnagaccccgacccagcagtggagcngccgatattcgagatgatatcggccgcccagacaatcctgcccgnctctgacggtgctatagatgggcaccttcgggaggtgggactcncgttccacctcttgaaagatgtgcccgggatcatctcgaagaacattgagaagagtctgttgaagctttgagcc

SEQ ID NO: 291078 - DNA, 253 bp, Glycine max
  unsure (1)..(253): unsure at all n locations
cacctttgttcactcttcttctcttgcggctagggttttagcgcagttcttctagatttaaggnagatgggtaaggaaaaggttcacatcagtattgtggtcattggccatgtcgactctgggaaatccactaccactggtcacctgatttacaagcttggaggcattgacaagcgtgttattgagaggtttgagaaggaagctgctgagatgaacaagaggtcttcaagtatgcctgggtgctggacaaact

SEQ ID NO: 291079 - DNA, 258 bp, Glycine max
  unsure (1)..(258): unsure at all n locations
actaactaaagccgagcagcgagagagagaaaccctagnaaaaatgccggctggtcacggtttganctcccgcaccagagattccttctctcgncccttcaggaagaagggtaccatcgccctcaccacatacntcagaactaccangtcggcgattatgtcgacgtcaaggttaanggngccgtccacaagggaatgcctcacaagtnctaccatggccgcaccggtcgcgtctngaatgtcnccaaacgtgtgttg

SEQ ID NO: 291080 - DNA, 228 bp, Glycine max
caccattgccatggatccttacaagctccggccatccagcgccttcaattctcccttctggactacaaattctggtgctcctgtttggaacaacaactccctctttaaccgttggagctagaggtccaattctgcttgaggattatcatcttgtggagaagcttgcaaactttgacagggaacgtatcccagaacgtgttgtccatgccaggggagctagtgcaaagg

SEQ ID NO: 291081 - DNA, 242 bp, Glycine max
  unsure (1)..(242): unsure at all n locations
agcnttgccattctcatcctcttactttctctctctaccantgccatggatccctacaancaccggccatccagcgccttcaattctcccttctggactacaaattctggtgctcctatttggaacaacaactcctctttaaccgttggagctagaggtccaattctgctggaggattatcatcttgtggagnngcttgcncattttgatagggaagtatnncagaacgtgttgtccctgcc

SEQ ID NO: 291082 - DNA, 261 bp, Glycine max
caaagcacaaagcaaagctcatccttgagttaaaaaatggcagcagcttcttccatggctctctcatccccatccttggctggcaaggccgtgaagctgggcccatcagccccacaagtgggaagggtgagcatgaggaagaccgtcaccaagcaggtctcctcaggaagcccatggtacggcccagaccgagtcaagtacttgggcccattctctggcgagcccccgtcctacctaaccggtgagttcccaggcgactac

SEQ ID NO: 291083 - DNA, 256 bp, Glycine max
  unsure (1)..(256): unsure at all n locations
cacaccattggttggagcatttttggctgattcctancttggaagatattggacaattgctgttttttcaataatttatgctattggaatgacactgttgacattgtctgcgtcagttcctggcataaaaccaacatgtcatggacatggagatgaaaactgtcatgctactactctagagagtgcagtgtgcttcctagctctttaccttattgctcttggcaccggcggcattaagccttgtgtctcatcctat

SEQ ID NO: 291084 - DNA, 259 bp, Glycine max
  unsure (1)..(259): unsure at all n locations
gcttcgaggaggagaacaagcttgaacccgagagacagaccanaccagccaaagaccttggtttgcagccacggcaagttgctatttggttccagaaccgtagagctcggtggaagaacaaacagctggagnaggattacgagactctgcatgnccgttttgagagtctcaagtccaactatgactgtctcctcaaggagaaagacaagttaaaagctgaggtggcgagcctcactgagaaggtgcttgccagagggaa

SEQ ID NO: 291085 - DNA, 252 bp, Glycine max
  unsure (1)..(252): unsure at all n locations
cacaagtngcaagcnttcactgacgcatatgcagaacttgcacctgctttgtctgatctgaatgttcttgttgagacctactttgctgacatccctgctgaggcgtacaagaccctcacatctctgaatggcgtcactgcatatgggtttgatttggtccgtggaacccatactcttgatttgatcaagggtggatttcccagtggaaaatacctctttgctggagtggttgatggnaggnacatctgggcc

SEQ ID NO: 291086 - DNA, 256 bp, Glycine max
cactctgtgttttcagcgccgtctccgatctccgacaatggcgacccaaatgagcaagaagagaaagttcgtagctgatggagtgttcttcgctgaactgaacgaggttctgacaagagagttggccgaggacggttactccggcgtggaagttagggttacgccgatgcgcaccgaaatcataattagagccaccagaacccaagctgttctcggtgagaagggaaggagaataagggaacttacctctgtggtt

SEQ ID NO: 291087 - DNA, 255 bp, Glycine max
  unsure (1)..(255): unsure at all n locations
tttctaacatggctgctgggactggnctctttgcagagattttggatggagatgtgtacaagtnctatgctgatggagaatcgaagaaatctgcttctgggaaaagtgttgccatcatcaaccccactaccagaaagactcaatacaaagttcaagcttgttcacaagaggaggttaaccaaggtcatggacttggcaaaatctgcccaaaagttatgggcaaagaccccactatggaaacgtgctgaacttctt

SEQ ID NO: 291088 - DNA, 264 bp, Glycine max
  unsure (1)..(264): unsure at all n locations
cattttttgttgcattatcacaaacacctcgtccctcacaatgcagctagcaatggcggccaacgctgtcgtttcaccgtcgccgttccgacctcagccctttctccggtcatccttctccggcgtctccgtcaagctcactccccaatccataacgctttcacgctccaagcccctcaccgtcttcggcgccaccaagaaggccgtcgccgtcctcaaggggacctccgccgtcgaaggcgtcgccaattctcatccnagaag

SEQ ID NO: 291089 - DNA, 256 bp, Glycine max
  unsure (1)..(256): unsure at all n locations
ttgttgatgtgctcatcaagaacccgaatccggtgccaatccctctgattgacatagattacttggttgacagtgatgaaaggnagctagtttctggattgataccagntgcgggtaccatcggtgcacatggagagcagactgtcaaaattcctgtcactttgatttatgatgacatcaagcaaacatatgctgctattaaacctggaagcatcattccttatagggtgaaggttagtctcatttttgatgttcc

SEQ ID NO: 291090 - DNA, 255 bp, Glycine max
  unsure (1)..(255): unsure at all n locations
gaagaacaagtagttgagaactaagaaggagaagcaaatggcttcctcaatgatctcttccccagctgttaccactgtcaaccgtgccggtgccggcatggttgctccattcactggcctcaagtccatggctggcttccccaccagaaagaccaacaatgacattacctccattgctagcaacggtggaagagtgcaatgcatgcaggtgtggccaccagttggcaagaagnagtttgagactctttcctacct

SEQ ID NO: 291091 - DNA, 256 bp, Glycine max
  unsure (1)..(256): unsure at all n locations
gcaattgangttgaagtcttgcccttctctcttcaactccaaacacaagacatcancatccatggctgcctccgtctccactgtcggagctgtcaacagagctcttttgaacctgaatgggtctggacctggggtttcagctcccagttcatccttctttgggagcagcttgaagaaggttattggctcaagggtccccaacacaaagatttcctctggaagcttcaagattgttgctgtagaagagaagaaagag

SEQ ID NO: 291092 - DNA, 262 bp, Glycine max
  unsure (1)..(262): unsure at all n locations
ggaaaagaatgtggggattctcgccattgacatctacttccctcccgcttgcnttcagcaggaagcattggagactcatgatggtgccagtaaagggaagtataccattggacttggccaagactgcatgtcattctgtaccgaagtagaagatgtcatctcaatgagtttgacagtggttacttctcttcttgagaagtatgggattgatcctaaacaaatcggtcgtctggaagttggaagcgagaccgtgatagacaaa

SEQ ID NO: 291093 - DNA, 217 bp, Glycine max
ggcagttacttcgacccactgggcctggcctcagatccagagaagaaagccacccttcaattggcggagatcaagcacgcccgtctcgccatggtgggcttcttgggctttgcagtccaagctgccgccactggcaagggcccgctcaacaactgggccacccacttgagtgacccactccacacaaccatcattgacaccttctcatcctcctctt

SEQ ID NO: 291094 - DNA, 258 bp, Glycine max
  unsure (1)..(258): unsure at all n locations
agaagcgtaanagcggctaccctaacctcgtcttcctctctactaatttcagctatggccgacgaagctgtggttgttccagatcccacccagatcgatgtcaagctctttaaccgctggagcttcgaggatnttgaggttantgacatttcactggctgattacattggagttgcggcatccaagcacgccacatatgttcctcacaccgccggaaggtactccgtgaagcggttcaggaaggcgcagtgccccatt

SEQ ID NO: 291095 - DNA, 262 bp, Glycine max
gtcctgttatttctcagcgcgtaaagcatggctttgttggtggagaaaaccacgagtggtcgcgagtacaaggtcaaggacctttcccaggccgacttcggccgcctcgagatcgagctggccgaggttgagatgcccggcctcatggcctgtcggaccgagttcggcccctcccagcccttcaagggggcccgcatcaccggctccctccacatgaccatccagctccgccgttctcattgagaccctcaccgcccttggc

SEQ ID NO: 291096 - DNA, 296 bp, Glycine max
  unsure (1)..(296): unsure at all n locations
agtaaagtaaattaagaagatcattaatggcttctcttgcaaccttagctgctgttcaaccagctgcgctcaatggccttgctggaagttccctctctggaactaagctctctttcaagccctctcgccacactgtcaaatccaagaacttcaggagtggtgccgtggtagcaaaagtatggtgacaagagtgtgtactttgatttggaggatctgggcaacactacggggcantgggacttgtatggctcagatgcaccttcaaccctaaaacctcttcangtttgtnnttttta

SEQ ID NO: 291097 - DNA, 260 bp, Glycine max
gcagcagcctcctccatgggctctctcttccccatccttggctggcaaggccgtgaagctgggcccatcagcccccgaagtcgggagggtcagcatgaggaagaccgtcaccaagcaggcctcctccggaagcccatggtacggcccagaccgcgtcaagtacttgggcccattctctggcgagcccccgtcctacctcactggcgagttcccaggtgactacggctgggacactgctgggctttcggccgacccagaaa

SEQ ID NO: 291098 - DNA, 255 bp, Glycine max
  unsure (1)..(255): unsure at all n locations
aattgccaaggaaaacaacaagagtgcctcatcatccaaggggaaaatcaccttcagtgtcaccaagaccaagcctgagaccggcgaggttatcggtgtgttccagagtcttcagccgtccgacactgatttgggagcaaaggctccaaaggatgtcaagatccagggtatctggtatgctcagcttgagtcatagagtgtttttntttgtnttnttnttttcnatgcctttgttttcttgnaacnccatgctgt

SEQ ID NO: 291099 - DNA, 237 bp, Glycine max
  unsure (1)..(237): unsure at all n locations
ccccaaaccgaaaccgaagncctcaacattgctgaacgatgtcacaccagctcataggncaaaacgccgatggtttacctcaacaatatcgtgaagggttctgtggccaatattgctgcgaanttgagattatngagccctgttgtagtgtcaaggacaggattggttttagtatgataaatgatgctgagcagagaggagctataacacctgggaagagtatattggtggaaccta

SEQ ID NO: 291100 - DNA, 266 bp, Glycine max
  unsure (1)..(266): unsure at all n locations
attttatccanttgaaattttanaaatgactgggataaacttaagantncanttattnaanttgaataagtaaacactttaattggattggtcgaatggtatcaanaaaatggagtantaacctcccatttcttattnattattgaattanccgatcaacttgctttgttatcgaacatttntttttgatttcaaaaattttccggaaaanatttncaatctannnntatntgcgaatcaatcctatacttctggtctngaggttt

SEQ ID NO: 291101 - DNA, 260 bp, Glycine max
  unsure (1)..(260): unsure at all n locations
tgtcatcatccgcagctgctgttattcgcaccgcaaacaaacagtgagccatggnccgtcggaaagaacaagcgcatctccaaagggaaaaagggtggcaagaagaaggcagctgatccctttgccaagaaggattggtatgacattaaggccccttctctttttcaagtgaaaaatgttggcaaaaccctcgtctctcgtacgcagggtaccaagattgcttctgaaggacttaaacatagagtgtttgaggtctcctt

SEQ ID NO: 291102 - DNA, 254 bp, Glycine max
agcccaagccctatacaaccaaaccctaacacacacccatttgattcagtttccatggctagcctcaaggttgcatttttggctgcagtgctctgcatggttgtggtgagtgcacccatggcacatgcagctatcacgtgcgggcaggtgacgagtagcctggccaattgcatcggttacctccagaagggaggaacgccgtcgtcgggatgctgcaacggagtgaagagcctcaatgccgccgccaagaccac

SEQ ID NO: 291103 - DNA, 253 bp, Glycine max
  unsure (1)..(253): unsure at all n locations
ctcatccaaatgagtgttcgggaagtgatctggatggagatatctactttgtttgttgggaccatgaattgattccttctnccccaattgatccaatggactatactgctcctgnaactgtggaattggatcatgatgtgatgatcgaggaggttgaggagtattttgccaattacatagtcaatgacagtctgggaataattgccaatgcacacactgtctttgcagataaagaacatttganagcaatgtc

SEQ ID NO: 291104 - DNA, 269 bp, Glycine max
  unsure (1)..(269): unsure at all n locations
aaactaacaaacaaatcccagggagccaccaaccatggcttccaagctctgcgactcatgcaanncagccactgctaccttgtactgccgccccgacgcggccttcctctgcggcgcctgtgactctaaggttcatgccgccaacaagctcgcatcgcgccacccgcgcgtcgtggtctgcgaggtgtgcgagcaggcgcccgcgcatgtgacctgtaaagccgacgccgccggctctgccttgcctgcgatcggatatccatccgnca

SEQ ID NO: 291105 - DNA, 294 bp, Glycine max
  unsure (1)..(294): unsure at all n locations
tccagttccaacatccttgctttccactccacagctcaatggaatgctcattataaagccaccaaagaaactaacaaactgatggtacttgatttcacagccacatggtgtggaccttgcaaactcatggacccagttatccaagantttgntggnaattacacagatgttgacttcatcaagattgatgtggaggagttaacggaagtgtctcaagcactccaggtctancaattgncaacatcatacctcgttaagaaaggccaagttgcngatagagtggtggggtgaaaa

SEQ ID NO: 291106 - DNA, 262 bp, Glycine max
caagattcaggtactgcgtttcggaagcagacacagatggctcgtacgaagcaaaccgctcgtaagtccacaggaggaaaggctcctaggaagcagcttgcaaccaaggctgcacgtaagtctgcaccaactactggtggtgtgaagaagccccaccgttatcgtcctggtaccgttgctcttcgtgaaattaggaaataccagaagagtaccgagcttttgatccggaagctccccttccagaggctggttcgtgaaattg

SEQ ID NO: 291107 - DNA, 254 bp, Glycine max
tgaggatgaagtccgtcatgcgggtgacctgggaaacatagttgctaatgcagagggggttgcagaggctacaattgtggataatcagataccactctctggccccaattcagtagttggaagagccttggtggtccatgagcttgaggatgaccttggaaagggtgggcatgaactcagtttgacaactggaaatgctggtggaagattagcatgtggtgtggttggtttgactccagcataatcagtgcagc

SEQ ID NO: 291108 - DNA, 256 bp, Glycine max
  unsure (1)..(256): unsure at all n locations
cgcctttctctctcttcttnttactctctctctgtctctctctacgctttcttcgtncgagatccctcaagggatccactaactgaaggagaaatggggttgacattcaccaagcttttcagccggcttttcgccaagaaggaaatgcgaattctgatggtgggtctcgatgcagctggtaagancaccatcctgtacaagctcaaanttggagngatcgttaccacccactcccaccattgggtcaatgtggaga

SEQ ID NO: 291109 - DNA, 264 bp, Glycine max
  unsure (1)..(264): unsure at all n locations
ctatttttcttcctcagtagtgtcatttacgcttctcttctctngcagcaactatgcctaaccctaaggtcttcttcgacatgaccatcggcggtcaatctgctggccgcatcgtgatggagctctacgccgacgtcactccccgcaccgccgagaacttccgcgcgctttgcaccggcgagaagggcgtagggcggagggcaagcccctccactacaagggtcgtcttccaccgcgtgattcccgagtttcatgtgtcagggg

SEQ ID NO: 291110 - DNA, 259 bp, Glycine max
gtgtttgcaccggaattttccgcactgatggtattcctgaacaggacattgtcaagcttgttgacaccttccctggccaatccattgatttctttggtgcactgagggccagagtatatgatgatgaagtgaggaagtggatttctggtgttggtgttgacagtgttgggaagaagcttgtgaactcaaaagatggacctccaacctttgagcagcccaagatgactctggagaagctcttgctgtatggtaacatgct

SEQ ID NO: 291111 - DNA, 254 bp, Glycine max
cgaggcgaagagaagagaaaaattaagatggaggggaaggagcaggatgtgtcgctgggagcgaacaagttcccggagagacagccgattgggacggcggcgcagagccaagacgacggcaaggactaccaggagccggcgccggcgccactggttgacccgacggagtttacgtcatggtccttttacagagcagggatagcagagtttgtggccacttttctgtttctatacatcactgtcttaaccgtcat

SEQ ID NO: 291112 - DNA, 248 bp, Glycine max
gtttgttgactcctttgaacctaacgtaacctgatccgtggctctggttctggctctggctctgccctttttggttttctctcgttaccgaaaccagaagaaccatttgtggtggacatggatctggaccagtggatctccaaggtcaaagatggccagcatcttcttgaagacgagcttcaacttctctgcgaatttgtaaaagagatccttattgaggagtccaatgtgcagcctgtcaatagtcc

SEQ ID NO: 291113 - DNA, 251 bp, Glycine max
ttgaagacctgtctgaaaagtttgatgtggtgtatgatacagtagggcaaactgaacaggcattcaaggttttgaaagaaggaggaaaagttgtgacaatagtaccacctggatttcatccagctatccttttcatactctctactgatggggcgatcttagagaaactaaacccctattttgagagtggtaagctgaagccaatacttgacccgaagagcccgtttccattttctcagactgttgaagcg

SEQ ID NO: 291114 - DNA, 258 bp, Glycine max
cgcagacgcaaacgcaaacgcaaacgcaaacgcaaacgcagagcgtgatccattgacgaagatggtgcagcgtctcacctaccgcaagcggcacagctatgccaccaagtccaaccaacacagggtcgtcaaaacccctggtgggaagctcgtttatcagactaccaagaagagggccagcggacccaagtgccccgtcactggcaagaggattcaggggattccacacttgaggcctgcagagtacaagaggtcaag

SEQ ID NO: 291115 - DNA, 253 bp, Glycine max
gcaagcattatcagaagcagaaagaaagaataagaggttgcagcaacaatggcagccatggctgcgcttcagagctcaatggtcggtctctccctctcctccaactctttcttaggccaacgcctttctcccatcaccctcccctctcttcttccgggtaagtcaacagagaagcaatgtcctattgtaatgaggcttaaacgatgggaacggaaggagtgtaaaccaaacagccttcctatcttgcacaaaa

SEQ ID NO: 291116 - DNA, 259 bp, Glycine max
  unsure (1)..(259): unsure at all n locations
ggtttggtactcctttgctggttccaacgagcgagtcatggtgccaaggtcttnatggtcttgcctctcgctcngctgcatactaccagcaaggtggcccgttctcgccaaatggcgtanctgttgtgagcatccccancggttcccttctgctctggcagttaagnaagctgcctngggtctggctcgctatgcancaattgctcaggacaatggattggtcccaattgtgggaccatagatctnncttnanngggnc

SEQ ID NO: 291117 - DNA, 219 bp, Glycine max
  unsure (1)..(219): unsure at all n locations
cttcgaatcgaaactcagaagtagaaaaaaacacaaatcacaatcgctatggctaggtacgaccgagcaatcaccgtgttctcccctgacggccatctcttccaggtcgagtacgccctcgaagccgtccgcaagggcaacgccgcgtcggcntcccgcggcaccgacaatgttgtcctcgggtcgagaagaaatccaccggccaaactccnagactcc

SEQ ID NO: 291118 - DNA, 264 bp, Glycine max
  unsure (1)..(264): unsure at all n locations
caaacacgctgttcctacaatcattccaaatgtgcccttccggtcgcaccctcctcccttcctccgtctccgatttccgaccggcattcgacgtcctcgatgccgaccgcgacggcaaaatcagccgcgacgacctccgcgccttctacgccggagtcggcggcggaggagatgacgtgatcggggcaatgatgacagtggctgacaccaataagggacgggtttcgtngagtacgaggagttcgagcgcgtggtctcggcnga

SEQ ID NO: 291119 - DNA, 253 bp, Glycine max
  unsure (1)..(253): unsure at all n locations
gatgacaacaatcaattttccgtacctcttctcacctggttttattgttattttgcttttttcctgcgtgctggcattcttcttgaattactgtatttttctgaacacaacactaaattcagctgtgacacagacaatttgtggtaatctgaaggatctctttactattggccttggctggataatttttggtgggctaccatttgntttttggaatataattgggcaatttctcggttttgccggatctggc

SEQ ID NO: 291120 - DNA, 260 bp, Glycine max
  unsure (1)..(260): unsure at all n locations
ttttttctctctccatacaacatagaaacgngngtcgttttgtgancngccgaaggaccggaggttgtagcaggagancagctatggatntggcatccaatctcggtggcaagggtganaaagcngaagtnctngctgccgtncagaagtatgagaagtatcatgtntgcnatggaggtcaagaggaagagaggaaagctaattatancgatatggttaataaatactacgatctggnnacnagctttaaggagtntggg

SEQ ID NO: 291121 - DNA, 259 bp, Glycine max
  unsure (1)..(259): unsure at all n locations
tcattnttctctctcccttagtcaaagggattcatcgttcttnttcccaggntatttaganaagcaaaatggtgaagatttgctgcattggtgctggatatgtggggggtcctactatggcagtcattgcacttaagtgcccatccattgaagtcgctgttgttgatatctctaaatcccgcattgcagcctggaacagcgaccagcttcctatctatgaacctggccttgatggtgttgtgaagcaatgccgtggcaa

SEQ ID NO: 291122 - DNA, 255 bp, Glycine max
  unsure (1)..(255): unsure at all n locations
gtattgttgaacaagggtttctctgtctgcttcttcactttctctcgtttcaatcganaccaanacaaaatcatgggcagaaaattcttcgttggtggcaactggaaatgcaatgggaccactgaggaggtaaagaagattgttactactttgaatgaggctaaagtccctggagaagatgtcgtagaagttgttgtgagccctccttttgtgttccttcctgttgtaaaaagtttgctgcgccctgatttccat

SEQ ID NO: 291123 - DNA, 223 bp, Glycine max
  unsure (1)..(223): unsure at all n locations
gctcgacattcccaattcttggcaaatgcctcacgggtacnattgatgaaggtgaggatccaagaaatgcagccatcagggaattaagagaagagacaggagttaattctgcagaagtgattgctgaggtaccatattggttaacttatgacttcccaccaaaagtaagggagaaattaaatattcagtggggatctgattggaagggtcaggcacagaaatg

SEQ ID NO: 291124 - DNA, 255 bp, Glycine max
agacattgtcactaaaaggaggatactatgactttgttaagggatcttttgagctctggggccttcagtttggccttgcatcctctttctccgtatgaacatcaaccattatcaatgacctcatcttggttccctaagttaaagatgtggccaccattctgcattggaagctataggggccatgcttagaggtcgtgtgtatctgcaatgaagaggcctagccaccttcatcaccatatgatatttataaaaata

SEQ ID NO: 291125 - DNA, 259 bp, Glycine max
  unsure (1)..(259): unsure at all n locations
gcacacactccctcttctcttctacggttatggcgtccacgttgggcacttcttcaattgcggttcttccttcgcgctgcatctcttctttttcttccaagccttccattcacacactctctctaacttcagggcagagctatgggcggaaattttatggaggaattggaattcatgggcatcaagggaangtctcagctctcagttgccaatgttgccactgaagttaactctgtagaacaggcccaaagtattgctt

SEQ ID NO: 291126 - DNA, 260 bp, Glycine max
  unsure (1)..(260): unsure at all n locations
aaaacactcataacacaaagcacaaagcaaagctcatccttgagttaaaaaatggcagcagcttcttccatggctctctcatccccatccttggctggcaaggccgtgaagctgggcccatcagccccagaagtgggnagggtgagcatgaggaagnccgtcaccaagcaggtctcctcaggaagcccatggtacggcccagaccgagtcaagtacttgggcccattctctggcgagcccccgtcctacntaaccggtga

SEQ ID NO: 291127 - DNA, 250 bp, Glycine max
  unsure (1)..(250): unsure at all n locations
gaagtgaggnagtggatttctggtgttggtgttnccagtgttgggaagaagcttgtgaactcaaaagatggacctccaacctttgagcagnccaagatgactctggagaagctcttgctgtatggtaacatgcttgtccaagaacaagagaatgtcaagagagtccaattggctgacaagtacttgaacgaggctgctcttggaaatgctaacgaggatgctattcagaggggaactttcttccagtctt

SEQ ID NO: 291128 - DNA, 248 bp, Glycine max
  unsure (1)..(248): unsure at all n locations
gaaaaacaaaagagtagtggcctttaggtggtgaagaacaagagctcaaatcanatcgaatcganaaaagaaagaaagatcatattcatggcgatggcaagcctggctcgacggaagggttacgccgtcgttttgtcgtcgaggtcgtcgttttgtctgacaagctggaggggattcgcgtccggatctgacgaaaacgacgtcgtcgtcatcggcggcggtcccggcggctacgtggccgccatcaa

SEQ ID NO: 291129 - DNA, 253 bp, Glycine max
  unsure (1)..(253): unsure at all n locations
caaagactattcagagaatggagctgctggtgctgtcaactcttaagtggaggntgcttccggtgactccaatttcctntttgaacacnttgtgagnaggcttggtttganangtcgcttgcattgggagtttctgtggcgttgtgagcgggttcttctcaatatcattgcggattcaagggtnatgagttatcttccttctacattggctgctgcgacaatgatccatgttattaaagaaattgaatcattt

SEQ ID NO: 291130 - DNA, 256 bp, Glycine max
  unsure (1)..(256): unsure at all n locations
atatccttcaanncacggtgtttatgaggaaggtattgaggaaatttgnaatattaatgtttcncttggcatcagttccaacagaganaattttnattccanacatagctgcantggncaggatttgttccgtgtgctgagacaggtataatgcaaacattgcggtggtggtctccccttgncaaatgatatgcacgaataaccataagtccagcatattntncagnagcaccagcatttggttgnaaactcgagc

SEQ ID NO: 291131 - DNA, 249 bp, Glycine max
gtgggagcaatacatatcattcattcagaggcaacaaaggagttgtaaattaagagcatggctgcacaagctcttgtatcatcatcatctcttaccttctcagccgaggctacaagacaaagtcttggaccaagatcactccaatctccatttggcttctcaagaaaagcctcctttcttgttaaggcagctgctactccccctgtcaagcaaggatcagacagacctttgtggtttgcatcaaagcaa

SEQ ID NO: 291132 - DNA, 255 bp, Glycine max
  unsure (1)..(255): unsure at all n locations
caagacatctgaaccctgtgtttgctactggngcatttgtcgttcctgcatctctttactttgttctaaagaaactttttattaaaccttattaccttagaaggaataaacagaaggctctggaggagaaggagaaaacttctgctcaggttaaggaagcacgagctacagcagaganagctcagaatttacaacaaantgtggctaataggaaaagaaacaagcaattagaaacaggtggactggttattatga

SEQ ID NO: 291133 - DNA, 258 bp, Glycine max
  unsure (1)..(258): unsure at all n locations
cagtgatcctgaggaacataatggagaaccctgcntggtacactcagtacacaccttaccaggctgagatatctcaggggaggcttgagtcattgctgaattaccaaaccatgatcaccgacctcaccggcttgcctatgtcgaatgcttcattgcttgatgagggtactgctgctgctgaagcaatgtctatgtgtnntaatattcngaaagggangaagaagaccttccattantgcnagtaactggcaccctcag

SEQ ID NO: 291134 - DNA, 251 bp, Glycine max
gagagagtgagtgagatagagagagacgcttcgcaaatctcaatcgaatctcagaaaaatgagagaaatcatcagcattcacataggtcaggccgggatccaggtcggaaactcctgctgggaactctactgcctcgaacatggcatccagcccgacggcatgatgccttctgactccaccttcggtgtagcccacgacgccttcaacaccttcttcagcgaaaccggatctggcaagcacgtcccccgtg

SEQ ID NO: 291135 - DNA, 250 bp, Glycine max
  unsure (1)..(250): unsure at all n locations
actttccattcgttcaccgccncaatctctgcagcgccttcgatctagaaaacatgactaanagaacaaananngctggcattgtnggnaaatacggtacccgttatggtgccagtctgcnaaagcagattaagangatggaagttagtcagcacagcaaatttttctgtgaattttgtgggaagtatgctgtgaagaggaaagctgtaggaatatggggatgcaaggactgtggtaaagtgaaagcngg

SEQ ID NO: 291136 - DNA, 248 bp, Glycine max
tcaaatacgaggcgaagttagttggaacttggatacgcttggagattttgtgataatgaggagtaatggtcagcctgtttataacttctgtgtaacggtggatgatgctaccatggcaatttcccatgttatcagggcagaagagcatttaccaaacactctaaggcaggcattgatatataaggcactaggatttcccatgccttattttgcacatgtttctttgattttagctcctgataggagta

SEQ ID NO: 291137 - DNA, 249 bp, Glycine max
ggaaattcatcgtaccttaagcttgctactgctcctggcctggccaagcatgctggtgccttctggggaggccctgattatggggtactcagctgggataacaagcttgctggtgctcaggttcttctgagtcgtttgaggttgttcttgagtcctgggtatccatatgaagaaattttgaggacctttcacaatcagacaagcataatcatgtgctcctatctaccagttttcacaagctttaacaga

SEQ ID NO: 291138 - DNA, 173 bp, Glycine max
  unsure (1)..(173): unsure at all n locations
ctgatgtgcaagtnatacctggaattcaaagagatgacattaatctcgtctcaataatatcaatccgtnatctcagatgctatactgggggctgttgtgaaggtaaaganngttgaaggcatttcngaacnanaanncctgnctggtacccaacctggagangtccttgtcct

SEQ ID NO: 291139 - DNA, 280 bp, Glycine max
  unsure (1)..(280): unsure at all n locations
ggcagaaagcaagctcatcctagagttttaaaaatggcagcagcctcctccatggctctctcttctccatccttggctggcaaggccgtgaagctgggcccatcagcccccgaagtcgggagggtcagcatgaggaagaccgtcaccaagcaggcctcctccggaagcccatggtacggcccagaccgcgtcaagtattgggcccattctctggcgagccccgtcctacctcactggcgagttcccaggtgactaggctgggacattgctngnctttcgg

SEQ ID NO: 291140 - DNA, 284 bp, Glycine max
agaatttgttagggacaacaaatcacttggtagcttccgcttggatggtatccctcctgcgcctcgtggtgttccccagattgaggtgaaatttgacattgatgccaatggcattctatccgtcactgctatcgacaaaggcacagggaagaaacaagatattaccatcactggtgctagcaccttgccttcagatgaggtggagagaatggtaaacgaagctgagaaattttcgaaggaagacaaagagaagagggatgctattgacccaaagaaccgggcag

SEQ ID NO: 291141 - DNA, 283 bp, Glycine max
  unsure (1)..(283): unsure at all n locations
gctagctagctagcaagcaagcacagagatggaggcaaagcgaggccatgccctcatgtgcttggcacgtgttntcactacttcctctgcgctctaaacctatncgntgctcacggaagcaccacggttcaancacntcgcgaganacttgaaactcggggacaacgagcttctgcgcacggagaagaagttcaaggttttcatggagaattacgggaggagtatccacagaggagggatatttgcgccgtttggggatttcgcccagaacatggtcagagcg

SEQ ID NO: 291142 - DNA, 287 bp, Glycine max
  unsure (1)..(287): unsure at all n locations
cgnagtttcgaccaccctgcatggtactatcaaccattggaatttcaaagcctgggagactngagggacaaagtaccagggaatgttcaacgcacctgcaccaacttcatgtctgcttaccatcttcaaaacaaaagacaagattgctatacagaatgtcactggattttgctcctctgcttnagcatatacctttaatgaaatatctatggaggcatttcgcagaacaggttttaaatgaggatctacggctatggtggggcagcaagagagaatgaacaatggtg

SEQ ID NO: 291143 - DNA, 290 bp, Glycine max
  unsure (1)..(290): unsure at all n locations
gtttctattcctcactaggagctccgggcactggttcttcatctgcatgcacacagttgcatagttttgcgaaaccaagncttcctgaagaagggtagcatcaacaagcagttctgaaaatggagatcaccaatgtcagtgagtatgaggctattgcaaagcagaagttgccaaagatggcgtttgactactacgcatctggtgcagaggacnagtggactctgcaagagaacaganatgccttttccagattttgtttcggccacgtattcttattgatgtgagcagat

SEQ ID NO: 291144 - DNA, 282 bp, Glycine max
  unsure (1)..(282): unsure at all n locations
ccccatcatgatgagtgctggagagttggaaagtggaaatgcaggagagccagcaaaactgatcaggcagagataccgtgaagccgcagacttgatcaagaagggaaagatgtgtgctctcttcatcaacgatcttgatgcaggagctggtcgtcttggtggaaccacccaatacactgtcaacaaccagatggtgaatgccaccctcatgaacntnggctgataaccccaccatgtgcagcttcctggtatgtataacaaggaagagaatccccgtgtgcc

SEQ ID NO: 291145 - DNA, 250 bp, Glycine max
  unsure (1)..(250): unsure at all n locations
aaccataatagtcatgggtttgaaggaggattttgagcagtatgctgagaaagcaaaaactttgccaccgactcaatcaaacgaagacttgcttatcctttatggattgtacaaacaggccaccgttggacctgtcaacaccagccgtcctggaatgttcaacatgagggacagagctanatgggtgcatggaaggctgtngaggggantcccaggcncganncaatgggtgatnacatcattanggtga

SEQ ID NO: 291146 - DNA, 279 bp, Glycine max
  unsure (1)..(279): unsure at all n locations
ttctttcgcaccttgcagaatcaattttctctctcaatcgtctttcatggctcgtaccaagcaaacnnctcgcnaatttnccggtggganggntcctaggnngcnactngcnaccaaggctgcaaganaatctgcacctannaccggtggagtnaagaagcctcatcgctatcgtcctggaangttgctcttcgtgagatccgaaaatacnaaaagagnanagagttcngatcncgaaagtcccctttgagngtttgttcgtgaaaatcgcgnaggntt

SEQ ID NO: 291147 - DNA, 280 bp, Glycine max
  unsure (1)..(280): unsure at all n locations
ggaggcactgtggcagaagtcctaggagtgtaaaacagagacgcaaaatgaagacgatcttgtcgtctgagaccatgaatattcccgacggcgtgagcatcaaggttcacgctaaggttatcgaggttgagggccctcgtggaaaactcgtgcgagacttccaccatctgaacttggacttccaacttattaccgacgatggcggtaaaaggagctccaagattgattccttggttgggttccgnaaaaccnccgccgcaatcngcaccgccctcagcaa

SEQ ID NO: 291148 - DNA, 262 bp, Glycine max
  unsure (1)..(262): unsure at all n locations
cttggacgtatggtaacatgcttgacccaagaacaagagaancgtcaagagagtccaattggactgacaagtacttgaacgaggctgcacttggaaatgctaacgaggatgctattaacaggggaactttcttccaatcttgaattggaggcaaagcaaacttggcaagtaaatatttctgtncctgaaggttgtgctgatccaagtgctagaagttgtgatgggacttgcgtgtaacattcttagaattctcaatgtctta

SEQ ID NO: 291149 - DNA, 278 bp, Glycine max
ctggcagcaacattgatggcagcaacaacaagttctggtactcttaaagcaactcctttccttggccaaggcaagggtgccaatgccaatgctcttagggatgttgtctccatgggaactgggaagtacaccatgggcaatgatttgtggtatggaccagacagagtgaaatacttgggacccttctcagctcagaccccttcatacttgaaaggagaattccctggggattatggatgggacactgctggcttatctgctgacccagaagcatttgc

SEQ ID NO: 291150 - DNA, 287 bp, Glycine max
  unsure (1)..(287): unsure at all n locations
gttatttttctttttttctcatttgcactgcaaattgcaatggcttccaacaaggttattgccaccatcatggtgctttctctccttgcctactcaacatcattcaccaatgcatgtggcacatgccacccaaaannnnnnnnnnnnnnnnnnnnnnnatcaggaaagtgccctaaggacacattgaagctaggggtgtgtgcagatattctaggtcttgttactgttgttgttggctcccctgtctccagcaagtgttgtgcattgcttgaaggttggctgatttg

SEQ ID NO: 291151 - DNA, 280 bp, Glycine max
  unsure (1)..(280): unsure at all n locations
acaaagcanaaagcancngctcatccttgagttaaaaaatggcagcagcttcttccatggctctctcatccccatccttggctggcaaggccgtgaagctgggcccatcagccccagaagtgggaagggtgagcatgaggaagaccgtcaccaagcaggtctcctcaggaagcccatggtacggcccagaccgagtcaagtanttgggcncatttctggcgagcccccgtcntacctaaccggtgagttcccaggcgattacggctgggacatgtgggct

SEQ ID NO: 291152 - DNA, 278 bp, Glycine max
  unsure (1)..(278): unsure at all n locations
ccactcactcgcaagcaaaaagnaataatcccaggcgaggaganagatggaggggnaggagcaggatgtgtcgttgggngcgaacaagttccccgagagacagccaattgggacggcggcgcagagccaagacgacggcnaggactaccaggagccggcgccggcgccgctggttgacccgacggagtttacgtcatggtcgttttacagagcagggatagcagagtttgtngccacttttctgtttcnctanatcactgtcttaaccgttatgggga

SEQ ID NO: 291153 - DNA, 279 bp, Glycine max
caaaaagaaagaatcccaggcgaggagaaagatggaggggaaggagcaggatgtgtcgttgggagcgaacaagttccccgagagacagccaattgggacggcggcgcagagccaagacgacggcaaggactaccaggagccggcgccggcgccgctggttgacccgacggagtttacgtcatggtcgttttacagagcagggatagcagatttgtggccattttctgtttctctacatcatgtcttaaccgttatgggagtcgccggggctaagtctaa

SEQ ID NO: 291154 - DNA, 272 bp, Glycine max
  unsure (1)..(272): unsure at all n locations
gattcttcagcaactgcgattttggatcggaacctcttctgcggcgtanaatgggacactccaacgtttggaattctcacccaaaaaactacggtcctggttctcgcacttgccgagtgtgtgggaatccacatggattgatcaggaagtatggccttatgtgctgcaggcagtgcttccgtagcaatgccaaggaaattggcttcatcaagtatcgctaaaagagctgttgtcacctacggaccaatattatgttctggcactaggatgtt

SEQ ID NO: 291155 - DNA, 264 bp, Glycine max
  unsure (1)..(264): unsure at all n locations
ccatttttcacaccaacaaacacaagatgtntctccacattgtgttcctccttancttctctcatccacttcccatgccactgtccaagacttctgtgtggcagacctcaaaggtgcagacacccctgcaggctacccctgcaagccacctgctaatgtcacttcagatgactttgtgtacactggcttagctgaagctgcaaatgtcacaaacataatcatgctgctgtgaccccagcttttgttgctcaattcccaggtctc

SEQ ID NO: 291156 - DNA, 270 bp, Glycine max
  unsure (1)..(270): unsure at all n locations
caagcaagcacanagatggaggcaaagcgaggccatgccctcatgtgcttggcacgtgtttcactccttcctctgcgctctaaccctatccgctgctcacggaagcaccacggttcaanacntcgcgagananttgaaactcggggacaacgagcttctgcgcacggagaagaagttcaaggttttcatggagaattacgggaggagctactccacagaggaggagtatttgcgccgtttggggattttcgcccagaacatggtcagagc

SEQ ID NO: 291157 - DNA, 253 bp, Glycine max
  unsure (1)..(253): unsure at all n locations
gagaattnnttagggacaacaantcacttggtagcttccgcttggatggtatccctcctgcgcctcgtggtgttccccagattgaggtgaaatttgacattgatgccaatggcattctatccgtcactgctntcgacaaaggcacagggaagaancaagatattaccatcactggtgctagcaccttgccttnanatgaggtggagaggtggtanacgaagctgagaaattttcgnaggaagacaaagagang

SEQ ID NO: 291158 - DNA, 248 bp, Glycine max
  unsure (1)..(248): unsure at all n locations
ctctgccctattttcggttcctctcgttatcgaaacagaaaccatttgtggtgaacatggatttggaccagtggatctcgaaggtcaaagatggccagcatcttctcgaagacgagcttcaacttctctgcgaatatgtaaaagagatccttattgaggagtccaatgtgcagcctgtcaatagtccagtgactgtttgtggtgatattcatggtcaattccatgatctantganacttttccagact

SEQ ID NO: 291159 - DNA, 248 bp, Glycine max
ggcacggatacaaagaagctccatgtgatactctcctaccacggtcaaaattaccccataaagaaggacctgcaatgtgaaactgacaggttaactcatttctacacattcattctcacgccagatgccacatacagtgtcctggttgataatagagagagagattctggaagcatgtatacagattgggatattcttcctccacgaaaaatcaaagatgtcaaggccaaaaagcctgcagactggga

SEQ ID NO: 291160 - DNA, 247 bp, Glycine max
  unsure (1)..(247): unsure at all n locations
acatattgaaattctttagttgtaatcgacaaagttttctgaganaataaggattattattgagagaatggctggctcatcggaagagggacaagtcattagctgccacaccgttgaagaatggaacgatcaactccagaagggcaacgaatccaagaaactcattgttgtggattttactgcttcttggtgtggaccatgccgtttcattgcaccattcttggctgagctggctaagaagttcaca

SEQ ID NO: 291161 - DNA, 254 bp, Glycine max
  unsure (1)..(254): unsure at all n locations
ggtttaagcagttaaaagaagaggacaagaagaaaaaggtaagcaaggcactgccagtggaagaagttcagcccctggcttctgtgtctgcttctgatgatggctcggatacagaaagtgacaataagggacaggaagatgcagaagaagcatatgcttctaaagttggcgaagaggttcaanattattctagggaaagaagaagcaagcgttcgaagcggaagcgtggctgtataaaggaccgctacaattag

SEQ ID NO: 291162 - DNA, 250 bp, Glycine max
  unsure (1)..(250): unsure at all n locations
ccaagattnaaaagtatgcgtatcgccaactttgaaggtgactctttatcctggaaacgtgttatcacttaaaatgtcaaagccgcatgggtttagctacaaaagtggacaatacatgtttgtnaactgtgctgctgtgtctccatttgaatggcatccattttccataacttccgcccctgatgatgattaccttagcgttcacataaaaatacttggtgattggactcgaagtctgaaagccaaattc

SEQ ID NO: 291163 - DNA, 246 bp, Glycine max
gttcaaaatgtgggatgggaatatggtctggtaaaaccacgtggagctattcgtccagatggctgggcttacagatttcccaagactaataccactatcttatattattggtcggctagcttatgtgatctgcagccttttaacatcacagacaaacagaccaatgtttccatgcatttagatcgccccccggctttcatgagacggttcctccatcgctttgatgttttggttcttaatacagga

SEQ ID NO: 291164 - DNA, 248 bp, Glycine max
  unsure (1)..(248): unsure at all n locations
gtgaganaatggccgttgaatatgagaactgtaagtngctgttagttgacaaaaagataaccaatgcaaggnatcttatcaacatactggaggatgctattagaagtggataccctatattaattattgctgaggatattgaacaagaagctttagcaactcttgtggtgaacaaacttagaggatcactgaaaattgcagcactcaaggcccctgggtttggagatcgcaagagccagtaccttgat

SEQ ID NO: 291165 - DNA, 247 bp, Glycine max
cgcagaatgccacccttgctttccaggctgcaatttggagatggatgacaccaatgaaaaagtcacagccctctgctcatgatgcttttgtcggcagctggaagcctaccaagaatgacactatggagaatcgggttcctggatttggcactacaatgaacattctctatggggatggtgtttgtggacaaggtgatgtggactcaatgaacaatattgtttcccattacctgtattatcttgacct

SEQ ID NO: 291166 - DNA, 249 bp, Glycine max
  unsure (1)..(249): unsure at all n locations
cacactgtctccaaacttattggttcacctcctggatatgttggttacactgaaggtggttcaattgaccgaggcagttcggcgtcgtccttacactgttgtactgtttgatgagattgagaaagcccatcctgatgtgttcaacatgatgcttcagatcctggaagatggaagactaacagacagtaagggcagaacagtggatttcaagaacccacttcttataatgacatcaaatgtnggaagcag

SEQ ID NO: 291167 - DNA, 248 bp, Glycine max
  unsure (1)..(248): unsure at all n locations
cttggtactccgactcgagaggaaatccgttgcatgaacccaacttatacagattttagattccctcagattnnngctcatccttggcacaaggttttccacaagcgaatgcctcctgaagcaattgaccttgcatcaaggcttctccaatattcacctagtctacgctgcactgcgctggaagcatgtgcacatcctttctttgatgagcttcgcgagccaaatgcccgtctnccctaatggccatc

SEQ ID NO: 291168 - DNA, 249 bp, Glycine max
  unsure (1)..(249): unsure at all n locations
gttgatcangcgttttgnaagcacttggatggcatgtaatttgggtgaagnatggaaatactggatatgatgaaattgcgtgcagccattaaagaagnaaaggctgtcaaagacaaacccactttgatcaaggtanccactagnattggattaggttctccaaacaaggctaattcncacagtgttcatgggncgtgcattaggtgctaaagaagtggatgctacnangnanaatnttggatggcnata

SEQ ID NO: 291169 - DNA, 246 bp, Glycine max
gcaagaagaagttcgagactctttcctacttgccagacctcgatgatgcccaattggcaaaggaagtcgaataccttctaaggaaaggatggattccttgcttggaattcgagttggagcacggtttcgtgtaccgtgagcacaacaggtcacctggatactatgatggacgctactggaccatgtggaagctgcctatgtttggctgcactgatgcttctcaggtgttgaaggagcttcaagagg

SEQ ID NO: 291170 - DNA, 248 bp, Glycine max
  unsure (1)..(248): unsure at all n locations
gaagaacangtagttgagaactaagaaggagaagcaaatggcttcctcaatgatctcttccctagctgttaccactntcaaccgtnccggtgccggcatggttgctccattcactggcctcaagtccatggctggcttccccncccaggaagactatgaaatgacattacctcnattgctagcaacggtggaagagtgcaatgcatgcaggtgtggccaccagttggcaanaagaagtttgagactct

SEQ ID NO: 291171 - DNA, 248 bp, Glycine max
cacttcatcatggcttcctcgtgtgcttcctctgccattgcagctgttgccatctccacaccaagttcccagaagaatggatcactcttgggaagcacaaaagcttcttttcttagtgggaggaaactgaaggtgaacaactttacagcaccagttggagcacgatccagcactacagtttgcgcagttgctgagcctgataggcctctgtggttcccaggcagcacccctcctccatggctagatgg

SEQ ID NO: 291172 - DNA, 251 bp, Glycine max
ccataacacaaggcagaaagcaagctcatcctagagttttaaaaatggcagcagcctcctccatggctctctcttcccccatccttggctggcaaggccgtgaagctgggcccatcagcccccgaagtcgggagggtcagcatgaggaagaccgtcaccaagcaggcctcctccggaagcccatggtacggcccagaccgcgtcaagtacttgggcccattctctggcgagcccccgtcctacctcactgg

SEQ ID NO: 291173 - DNA, 250 bp, Glycine max
  unsure (1)..(250): unsure at all n locations
cttncggagaganagagtggtacttcttttcaccacgggaccggaaatacccaaacggttcgaggccgaaccgggcggctggcaccggttactggaaggcaaccggggcggataagcccattggtcatcnccaaaccggttgggattaaaaaagctttggtgttttacgcagggaaagctcctaaaggggacaaaagcaattggatcatgcacgagtatcgtctcgcagacgtagatcgctccgttcgca

SEQ ID NO: 291174 - DNA, 246 bp, Glycine max
  unsure (1)..(246): unsure at all n locations
cagaaaaacaagtagttgagaactaagaagaagganatggcttcctcaatgatctcctccccagctgttaccaccgtcaaccgtgccggtgccggcatggttgctccattcaccggcctcaaatccatggctggcttccccacgaggaagaccaacaatgacattacctccattgctagcaacggtggaagagtacaatgcatgcaggtgtcgccaccaattggcaanaagaagttcgagactctt

SEQ ID NO: 291175 - DNA, 242 bp, Glycine max
  unsure (1)..(242): unsure at all n locations
aaagattttcccatttgagctatttcacttgggtggtgatgaagttaatacagattgctggagtagtacttctcatgtaaagnaatggcttcagagtcacaacatgaccactagagatgcctatcaatattttgtactgaaggcccaagagatggctgtttcgaaaaattggagtccagtgaactgggaggaaacctccaatacgtttccatcaaagctccatccaaacaccatagtgcaca

SEQ ID NO: 291176 - DNA, 247 bp, Glycine max
ggttatttagaaaagcaaaatggtgaagatttgctgcattggtgctggatatgtggggggtcctactatggcagtcattgcacttaagtgcccatccattgaagtcgctgttgttgatatctctaaatcccgcattgcagcctggaacagcgaccagcttcctatctatgaacctggccttgatggtgttgtgaagcaatgccgtggcaagaacctcttcttcagcactgatgttgaaaagcatgtc

SEQ ID NO: 291177 - DNA, 246 bp, Glycine max
gaagccagaagttcgagatgcagctagggaagctgctcttcgtgaaattaaggagaggatcaagaaaacaaaggatgagaagaaggctaagaaagcagaagttgcttccaagtcgcaaaaagcaggagggaaaggcaatgtttctaagggtgctatgcccaaaggtcccaaacttggcggtggaggcgggaaacgctgagcttttagttttgttcctaattttggctacaatttaaatagttgttt

SEQ ID NO: 291178 - DNA, 241 bp, Glycine max
  unsure (1)..(241): unsure at all n locations
ggtgaccacatacatcctcgtggatggttggagtggaatggagactttgctttgaacacattgtattatggtgantacatgaattatggaccgggtgcagcagtgggccaacgggttcaatggcctgggtaccgggtcattaagtctaccatggaggcgaatcgattcacggtagcccaatttatatctgggtcagcctggttaccatccaccggagtggcctttgcagccgggttatctt

SEQ ID NO: 291179 - DNA, 262 bp, Glycine max
gaacaagtagttgagaactaagaaggagaagcaaatggcttcctcaatgatctcttccccagctgttaccactgtcaaccgtgccggtgccggcatggttgctccattcactggcctcaagtccatggctggcttccccaccaggaagaccaacaatgacattacctccattgctagcaacggtggaagagtgcaatgcatgcaggtgtggccaccagttggcaagacgaagtttgagactctttcctacctgccagacctt

SEQ ID NO: 291180 - DNA, 257 bp, Glycine max
  unsure (1)..(257): unsure at all n locations
ganaaatggggtgtttccatctcacagtgactagtctgtgctttgtngtggttgtggttggagtgcttccactctccttagatgcacaactagatccctcgttttacagagacacgtgtcccaaggttcactccattgttcgcgaagtggtgaggaacgtttccaagaaagatccccgcatgcttgccagtcctcattagacttcactttcatgactgttttgttcaaggatgtgacgcatcanttttgttgaacaa

SEQ ID NO: 291181 - DNA, 262 bp, Glycine max
  unsure (1)..(262): unsure at all n locations
aagnaaaangccatataattttncttttatttgaaataatgtccgggatcatccacaagattgagganangtcnccatgtgggagggcanaagnnagangagcacaaaggagaacaccatggtgagcacaaaggtgaacacaaaggagaacaccatngtgagcacaaaggtgaacacaaaggagaacannaccatggggancnctaggagggncttgtggataagatcanggacnnnatccatggtgttggccatgacnagt

SEQ ID NO: 291182 - DNA, 255 bp, Glycine max
cacaactctgctaccctcttctctctctctcggttgtgagtgcagatttcttgcgcggtttatcatgggggatagtcagtattcgttttctctcaccacatttagcccttctggaaagcttgttcagattgagcatgctttgacggctgtcgggtctggacaaacgtctttgggaattaaagctgcaaatggagttgtcattgctaccgagaagaaattgccatctatattggttgatgaagcatcagtccagaa

SEQ ID NO: 291183 - DNA, 256 bp, Glycine max
  unsure (1)..(256): unsure at all n locations
caccagctgatgcnaaanccatgggtgaggtgatgttcaggggcaacactgtgatgaatggatatctgnaggacttgaaagcaacacaagaggcatttaaaggtggatggttttggactggtgatttgggagtaaagcatcctgatggatacatagagcttaaggatcgctcgaaggacatcatctcctctgggggagaaaatattagcacaattnagttggaaggagtgatttttagtcatccggcagtttttga

SEQ ID NO: 291184 - DNA, 253 bp, Glycine max
  unsure (1)..(253): unsure at all n locations
cacaaggcnganagcaanctcatcctagagtnttaaaaatggcagcagcctcctccatggctctctcttccccatccttggctggcaaggccgtgaagctgggcccatcagcccccgaagtcgggagggtcagcatgaggaagaccgtcaccaagcaggcctcctccggaagcccatggtacggcccagaccgcgtcaagtacttgggcccattctctggcgagcccccgtcctacctcactggcgagttccc

SEQ ID NO: 291185 - DNA, 261 bp, Glycine max
  unsure (1)..(261): unsure at all n locations
ggaagcaagtnttcacaccttcttggcacncaaccagtgttnggctctggaggtttgccaaggctcatgttcttgcacatgactctggctatgaccaacttgttagtcattggttaagaactcactgtgtgacagagccgtatgttattgcaaccaacaggcaacttagtgagttgcaccccatatacaaattgctacaccctcatttccgttatacaatggagattaangctatcgcacgagaagcattatcaangtgtg

SEQ ID NO: 291186 - DNA, 252 bp, Glycine max
  unsure (1)..(252): unsure at all n locations
ggcatttccatgggacaacagcatnttgtcttggcagagaactgcttttcatttccaaccagagaaaaactncgatgaacgatcccaatggtcctatgtantacaagggatggtatcactttttctacnaatacaacccgaacggtgcagtttggggtgacatagtttggggacatgcagtttcangggacatgatccattggcttcaccttccactggcaatggtgggggatcaatggtatgacatgcaag

SEQ ID NO: 291187 - DNA, 230 bp, Glycine max
  unsure (1)..(230): unsure at all n locations
gtttcttanaagcctctactatactgccttcaccttctgacctagaaaattcagtgctgaaacatggcttcggctactctctctgtagccaaaccagcccttcaggcaaatgggaaaggcttctctgaattctctggcctccgaagctcatcaggcttccttcccttttctagaaaatcttcagaggatttccattctgtcattgccttccagacctatgcagttgncna

SEQ ID NO: 291188 - DNA, 245 bp, Glycine max
  unsure (1)..(245): unsure at all n locations
tgatcctcttcttngtctnnntncntattgnnatggatccctanaancancggncatcnagcgccttcaattctccnttctggactanaaattctgntgctcctatttggaacaagaactcctctttaaccgttggagctagaggtcnaattntgctggangattatcattcttgtggagaagcttgcaaattttgatagggaacgtatcncagaacgtgttgtccatgncaggggcgctagtgt

SEQ ID NO: 291189 - DNA, 261 bp, Glycine max
ggtgtttttgtgaagcttgagatcaggaattaatttcagtggttcagagaatggcaacggattcttcaaatggtaatggacatcaccagacaacaacaaagcagcctcctttgccatctcccctgcgcttttccaaattttttcagtccaacatgagaatcttggttactggaggagctggattcattgggtctcacttagttgacagattgatggaaaatgaaaaaaatgaggtcattgttgctgacaactacttcactg

SEQ ID NO: 291190 - DNA, 255 bp, Glycine max
  unsure (1)..(255): unsure at all n locations
catcgctgatcaaacttcaaaccctagctaggatttcaaggtacactnnaacgatggcttcaaaacgcattactaaggagttgaaggatctgcagcaggaccctcctgtttcctgcagtgctggccctgttggtgatgacatgtttcattggcaagctacaattatgggtccaactgacagtccttatgctggtggtgtattcctggtgaccattcacttcccaccagattatccatntaagccaccaaangttt

SEQ ID NO: 291191 - DNA, 251 bp, Glycine max
  unsure (1)..(251): unsure at all n locations
cttttgccacattacacaagaacnctccaaggatcctccttcccnccgaaattcatttgntgggaaaatccaagaagagggtggaatttcaagccagggaagatggattatttcaatgcaccaggaagaaaccatctctttgttccggggccggttaacatcccggaccagatcattcgggccatgaacagaaacaatgaggactaccgttctccagcaattccagctatgaccaaaacnctgcttgagga

SEQ ID NO: 291192 - DNA, 245 bp, Glycine max
  unsure (1)..(245): unsure at all n locations
atcacatagcagaatggcttctntcaatgtttcttgcaccaccatgctcttaccacccctgccagatccccatcacaacgcatcatggttagcaccaagcctaaccagcttgtttgcaaggcacagaagcaagaggatattgatgtcagcccaatctctcgccggttagctctaaccgtgctcattggtgctgctgctgttggctccaaagtccaacctgctgatgcagcttatggggaagctgc

SEQ ID NO: 291193 - DNA, 259 bp, Glycine max
  unsure (1)..(259): unsure at all n locations
cattacattacattagattggnggcaaagcaatggcatcgtcactacaagcagcagctactttcatgcaacccaccaagtttttgcagctaaagtctactcaggccatatctaaggcttttggtttggaacctgctggagttaataaggtcacatgctcccttcaggctgatcttaaggacttggctcacaagtgtgttgatgctaccaaaattgcaggctttgcccttgccacctctgctctcgttgtttctggggca

SEQ ID NO: 291194 - DNA, 254 bp, Glycine max
  unsure (1)..(254): unsure at all n locations
ggaaaatttgaatggaaatatgggtatccctatttggcatgcattcttanttttagtcagacatgggccctgtattgccttgtacggttttattctgtcacaaaagataagttggagccgatcaaaccattggcaaaatttctgacttttaagtcaatcgtcttcctgacatggtggcaaggtgtggctgttgcatttcttttttccatgggtncatttaaagggtcattggctcaagagctgaaaacacgtat

SEQ ID NO: 291195 - DNA, 253 bp, Glycine max
  unsure (1)..(253): unsure at all n locations
gctagtttatcgtgaggngaatatgaagttgtttgtnttctttgttgctgcagtagttttggtagcatggccatgccatggcgcaggctaccaaaggttccctctccgaatgaaaactggctatggtgagcgttcttcggaggtaaaatgcgcaagttttaggcttgctgtggaagcacacaacatccgagcctttnaaaccattcctgaagagtgcgttgaaccaacaaaggactacattaatggcgaacaa

SEQ ID NO: 291196 - DNA, 252 bp, Glycine max
  unsure (1)..(252): unsure at all n locations
tcgagataactagaaacagtgtgatgaaaatgaaggtccttgttttcttcgttgctacaactttngtagcatnngcaatgccatgcgtacgatatgttccctctccgaatgaacactggctatggtgcccgtactccggaggtgaaatgcgcaagttggaggcttgctgtggaagcacacaacatctttggctttcggaccattcctgaagagtgcgttgaagcaacaaaggaatacatccatggcgaacaa

SEQ ID NO: 291197 - DNA, 249 bp, Glycine max
  unsure (1)..(249): unsure at all n locations
ggcaacgttcagtcacctcccaacaatgatcctcgatatgnttcagcaaccagagcttttactcaaaaggaacttgaagacttgaggtctctgttcatcnatctggcaaatcaatcccagagcaacgggaaatacatctctccctccgtttttcagtcatattttggacttcatggccctcttggggagaggatgtttgatttagttactcaggagcgcaaggatcagaggctaacctttgaagacctc

SEQ ID NO: 291198 - DNA, 229 bp, Glycine max
  unsure (1)..(229): unsure at all n locations
aaccctcaggtaagaagnaaagatgccggctggtcatggtttgagatcccgcaccagagattccttctctactcctttcangaagaagggaaccatcgccctcaccacatacctgagaacctaccacgtcggcgactatgttgacgtcaaggttaacggtgccgttcacaagggaatgccccacnaattctaccatggccgcaccggacgcgtctggaatgtcaccaaa

SEQ ID NO: 291199 - DNA, 253 bp, Glycine max
  unsure (1)..(253): unsure at all n locations
ggngccgtagcagcagcggaagtctagcttgggcagcgaatcacaatggcgagaggattgaagaagcatttgaagaggcttaatgccccaaagcattggatgcttgacaaactgggtggtgcatttgctcctaagccctcatctggaccacacaaatccagggaatgcctgccactcatactcattttgcgaaaccggctgaagtatgctctgacataccgtgaagtcattgctatnctgatgcagcgacatg

SEQ ID NO: 291200 - DNA, 253 bp, Glycine max
acactcataacacaaagcacaaagcaaagctcatccttgagttaaaaaatggcagcagcttcttccatggctctctcatccccatccttggctggcaaggccgtgaagctgggcccatcagccccagaagtgggaagggtgagcatgaggaagaccgtcaccaagcaggtctcctcaggaagcccatggtacggccccgaccgagtcaagtacttgggcccattctctggcgagcccccgtcctacctaaccg

SEQ ID NO: 291201 - DNA, 250 bp, Glycine max
  unsure (1)..(250): unsure at all n locations
attgaagttaaaagccttagccttccntacaactccanacaggaaganatcnacaaccatggctgcntcngtctccactgtcggagcngtcaacanagcnctnttgaacctgaatggntctnganctggagcttcancncccagttcancctnctttgggaccancttgaagaaggttattgcctcaagggtcnccaacagnaaggtttccggtggaagcttcaagattgttgctgtagaagagaagaaa

SEQ ID NO: 291202 - DNA, 247 bp, Glycine max
  unsure (1)..(247): unsure at all n locations
tcaggtgagtcctgcaactggtataataagaccagatcaaattgttgaagtatcagtgcatcatgaggaatttcagactctggaagagtttgnccgatggcgttgtacaaaattcttggtgcgaagactccagagacaaggaagctattttggttgttaaggtgcatggcaattacactatccagccaagaaatcaccgagtccgtgttcaccactgttattcatccaagaaaaaacctatgattga

SEQ ID NO: 291203 - DNA, 252 bp, Glycine max
  unsure (1)..(252): unsure at all n locations
agaagattgagccagagatgcaagagaaggccctaangntctcatgagccttagggtagattttgggcccatgggctaagtatgagcccacttatccttgtacatattagattaggattttattatttttggtccttgtattnngggatccataatgtaggtaggatatcctagaaatgtaggatttttcagcccttgtattttagggcacctagactagtttttgtattaggggtagttttgtaatttcac

SEQ ID NO: 291204 - DNA, 283 bp, Glycine max
  unsure (1)..(283): unsure at all n locations
gccccagaagtgggaagggtgagcatgaggaagaccgtcaccaagcaggtctcctcaggaagcccatggtacggcccagaccgagtcaagtacttgggcccattctctggcgagcccccgtcctacctaaccggtgagttcccaggcgactacggctgggacactgctgggctttccgcagacccagaaaccntcgccaagaaccgtgaactcgaagtgatccactccaggtgggccatgctcggagccttgggctgcgtcttcccggagttgctgtcccgca

SEQ ID NO: 291205 - DNA, 279 bp, Glycine max
ggcacactctctctcaccaaagccttcctagaacgaaaaaaaaaagaagagcaattttccctgcaccaaagaagaagaacccgacaatggccgatcaacttaccgatgaacagatctccgagttcaaggaagccttcagcttgttcgacaaggacggcgatggttgcatcacaaccaaggagcttggaactgttatgcgttcattggggcaaaacccaactgaggcagagctccaggacatgatcaatgaagtggatgctgatgggaatggtaccattg

SEQ ID NO: 291206 - DNA, 269 bp, Glycine max
ctcttgggaagcacaaaagcttcttttcttagtgggaggaaactgaaggtgaacaactttacagcaccagttggagcacgatccagcactacagtttgcgcagttgctgagcctgataggcctctgtggttcccaggcagcacccctcctccatggctagatggcagtttgccaggagattttggctttgatcctctaggtcttgcatctgatcctgagagcctgagatggaatgtccaagcagagcttgtgcactgcagatggcctgt

SEQ ID NO: 291207 - DNA, 274 bp, Glycine max
  unsure (1)..(274): unsure at all n locations
cagtttcggaggagaagaaaatantcgttcgagatggcccgtacgcagcaaactgctcgtaagtccacaggaggaaaggctcctaggaagcagcttgcaaccaaggctgcacgtaagtctgcaccaactactggtggtgtgaagaagccacatcgttaccgtcctggtaccgttgctcttcgtgagattaggaaataccagaagagtaccgagcttttgatcaggaagctccccttccagaggctggttcgtgaaattgctcaggacttcaaga

SEQ ID NO: 291208 - DNA, 271 bp, Glycine max
  unsure (1)..(271): unsure at all n locations
tnacagtnttgggaagaagcttgtnaactcaaaagatggacctccaacctttnagcagcccaagatgactctggagaagctcttgctgtatggtaacatgcttgtccaagaacaagagaatgtcaagagagtccaatncngctgacaagtacttgaacgaggctgctcttggaaatgctaacgaggatgctattcagaggggaactttcttccagtcttgaattggaggcaaagcaaacttggcaagtaaatatttctgttcgtgaaggtt

SEQ ID NO: 291209 - DNA, 245 bp, Glycine max
  unsure (1)..(245): unsure at all n locations
agnatcttgtagcaatggcgagcgctcccactccacgcgaagagttcgtgtacatggcgnantggcggagcaggccgngcgctacgaggagatggtggagttcatggagaaggtctccgcctccgccgagagcgaggagctgaccgtggaggagcgtaacctcctctccgtcgcctacaagaacgtgatcggcgctcgccgcgcctcctgggnatcatctcctcaatcgagcagaaggaggagag

SEQ ID NO: 291210 - DNA, 268 bp, Glycine max
gtgaaaatggcgcagtgtgtgaccaacacattcgtgcaaggaaaaccctttcttccagttgcagcagctcccactaaaaatcaggttcggagagcggttcagtgcggtgtgtggtgcaagaagaaggagatacacccgcaattctacgaggaatcgaaggtgtactgcaacggggagctggtgctgacgacaggtgggacccagaaggaatacgtggtggacgtgtggtcggggaaccaccccttctacctcggaagccggtcggcgt

SEQ ID NO: 291211 - DNA, 267 bp, Glycine max
  unsure (1)..(267): unsure at all n locations
gtngatctgcaaaagaagatcattgatgtacagaagatggcnaacgaaactggactggncttcagtgatcagattctctcattggagaacaagtaccagcaggctttaaaggatctgtatacgcatctgactcctattcagcgggtcaacatcgcacggcaccctaacaggccaactttccttgntcatgtctttaacataactgaaaagtttgttgaactccatggtgatcgggcaggttatgatgatcctgctattgttactggt

SEQ ID NO: 291212 - DNA, 276 bp, Glycine max
  unsure (1)..(276): unsure at all n locations
gtntcttncaaggcntctactcnantgnttcacgcttctgctctagaaaattcagtnggtgatacatggcttcggctactctctctgtagccaaaccagcccttcaggcaaatgggaaaggcntctctgaattctctggcctccgcagctcatcaggcttccttcccttttctagaaaatcttcagaggatttccattctgtcattgcctncccagacctatnnagnnactaancantggaggatncaanaagggtgtgacanangcaaaactgag

SEQ ID NO: 291213 - DNA, 266 bp, Glycine max
  unsure (1)..(266): unsure at all n locations
ggaaacgnnttcatcccatgccttttcctgattcatctgtaccngttcaaccaagacctatgacatcctaaaaaggatattgcagtttatggatatggaagtgttgcatggaaggaacggatggaggattggaanaaaaaacaaagtgaaaaacttcaggttgttagacatgaagggggtaaagatagtgatgagctggatgatcctgacttaccaaaaatggatgaaggnanacanccacttnggggaanntgccanttagtnct

SEQ ID NO: 291214 - DNA, 267 bp, Glycine max
  unsure (1)..(267): unsure at all n locations
atcacaaacagcgcattcgagccatcatctatgatggccaagtgtgntccctcgccatggaaaatacatggcttgnngtctcatgtaccggggtgatgttgtgcctaaagatgttaatgcagctgtgggaattatcaagaccaagcgcactattcaatttgttgactggtgccccactggtttcaagtgtggaatcaattaccagcctccaactgttgttcctggcggtgatcttgccaaggttcagagggctgtgtgcatgatctc

SEQ ID NO: 291215 - DNA, 285 bp, Glycine max
  unsure (1)..(285): unsure at all n locations
tcaaaacactcataacacaaagcacanagcaaagctcatccttgagttaaaaaatgngcagcagcttctncccatggctctctcatccccatccttggctgggcaaggccgtgaagctgggcccattcagccccagaagtgggaagggtgagcatgaggaagaccgttcaccaaggcaggttctnccttcaggaagcccatggtaacgggcccagaaccgagtcaagtanttggggcccattctctggcganccccngtcctanctnaaccggtgagtccccggg

SEQ ID NO: 291216 - DNA, 276 bp, Glycine max
ttcctcgggcctcaagccgctccgcttcccggcgcacgcccagaaggcgcccatcctccccaccaaggatctccccaaggatttcgattggcgagacaaaggagccgtcactaacgtcaaggaccaaggggcgtgtggttcgtgttggtctttcagtacgacgggtgcgttggaaggagctcattatctggccactggtgagctcgtgagccttagcgagcaacagcttgtggattgcgcatcacgtgtgtgatccagaagaatatggagcgtgtg

SEQ ID NO: 291217 - DNA, 272 bp, Glycine max
ctgggcccatcagcccccgaagtcgggagggtcagcatgaggaagaccgtcaccaagcaggcctcctccggaagcccatggtacggcccagaccgcgtcaagtacttgggcccattctctggcgagcccccgtcctacctcactggcgagttcccaggtgactacggctgggacactgctgggctttcggccgacccagaaaccttcgccagaaaccgtgagctcgaagtgatccactccaggtgggccatgctcggggccttgggtgcgtc

SEQ ID NO: 291218 - DNA, 269 bp, Glycine max
  unsure (1)..(269): unsure at all n locations
ggttaacaaatgcgactacacagtgtggccaggcattctctcaaacgcaggaatcgccacgcttccaacaacaggtttcgtncntcaaaccggagagtccaaaaccgtaaccgctccaacctcttggggtggccgtttctggggccgcacactctgcacgcaagactccgctggaaaattctcttgcctcancggcgattgcggctccggcaagctcgaatgcgccggaaacgccgccacgccgcctgctaccttagccgagttcatct

SEQ ID NO: 291219 - DNA, 266 bp, Glycine max
  unsure (1)..(266): unsure at all n locations
agccaatgattttnatctcatgtatgaacaagttaaagctcttaaggatggaattgctgttgaaaaaccaatctacaaccatgtcactggtctcttggatccccctgagctcattaaaccccccaaaatnttagtcattgaangtttgcacccaatgtttgattcccgtgtcagagatctcttggactttagcatctacctagacattagcaatgaggtcaaattcgcttggaaaattcagagagacatggcagagcgtggacaca

SEQ ID NO: 291220 - DNA, 263 bp, Glycine max
  unsure (1)..(263): unsure at all n locations
ctantgggtgctgttgagggttatcgtattgctggtgggcccctcggtgaggtcactgacccaatctaccctggtggcagctttgacccattgggccttgctgatgacccagaggcttttgctgagcttaaggtgaaggaactcaagaacgggagattggccatgttctctatgtttgggttctttgttcaggccattgtcaccggtaagggtccattggagaaccttgctgatcaccttgcggacccagtcaacaacaatgc

SEQ ID NO: 291221 - DNA, 267 bp, Glycine max
  unsure (1)..(267): unsure at all n locations
gagaagcaaatggcnncctcaatgatctcttccccagctgttaccactgtcaaccgtgccggtgccggcatggttgctccattcactggcctcaagtccatggctggcttccccaccaggaagaccaacaatgacattacctccattgctagcaacggtggaagagtgcaatgcatgcaggtgtggccaccagttggcaagaagaagtttganactctttcctacctgncagaccttgatgatgcacaattggcaaaggaagtagaa

SEQ ID NO: 291222 - DNA, 266 bp, Glycine max
  unsure (1)..(266): unsure at all n locations
ttantcaataggtatggctccatgtttaagtcacacattttgggntatncttgtgtgatgatttctgacccagaagcagcaaagtttgtgctgaacaaagctcaantcttcaaaccaacatttcctnccagcaaagaganngntgttgggaaagcaagcaattttctttcaccaaggagcataccatgctaaccttagaaagcttgttcttcgcacnttcatgcctgaggccatcaaagacaaagtctctaacattgantccattg

SEQ ID NO: 291223 - DNA, 261 bp, Glycine max
  unsure (1)..(261): unsure at all n locations
cagtctctgtgtttgcggctgaggattccgaacgagtgacctnccttcgttnttcgcaaagtttaagtaatcatgggtaaggaaaaggttcacatcaacattgtcgtcattggacatgtcgactctgggaagtcaactaccactggtcacttgatctacaagcttggaggtattgacaagcgtgtgattgagaggttcgagaaggaggctgccgagatgaacaagaggtcattcaagtatgcctgggtgtcgacaagctca

SEQ ID NO: 291224 - DNA, 263 bp, Glycine max
  unsure (1)..(263): unsure at all n locations
attccaatatattccnattctcctctgtgtatntccctacntctcccttcaagatgcagatcttcgtcaagaccctcaccggcaagaccatcacccttgaggtggaaagctctgacaccatcgacaagtcaaggccaagatccaggacaaggaaggaatccccccggaccagcaacgtctnattttcgcggnaagcanttgaggacggccgtacccttgntgactanaacattcagagggnggtactcttnactcgnctncgt

SEQ ID NO: 291225 - DNA, 280 bp, Glycine max
  unsure (1)..(280): unsure at all n locations
cttgaacttcaaanacctcctttaggaggtaaagagcgaccttatcctagacgttgtcgaactggtcgtccacatagtgaagcagatccattgtcagagaaaagaagtagaaatttttacgttccaagggacgagtgcttctcagaggtgaagcagctcacgttctcaaccaagacattacactcggtgttgctaatattgctcccaactttggggaaaattatcaaagaaaaggagcttgcattttcctacttccacgacatagattcacnttcagcca

SEQ ID NO: 291226 - DNA, 254 bp, Glycine max
  unsure (1)..(254): unsure at all n locations
tataggtgccaggatgcactagacacctatctgaaacttaccacagaagcattacaanactggctgggttctttctcaggttgggaaagcatactttgagctagttgattatttagaagctgatcgtgcctttagtcatgctcgtcagattacaccttatagtttggaaggaatggatatacactcaacagtcctttatcatttaaaggaagatatgaagctaagttacctggcacaggaattgatttcaactg

SEQ ID NO: 291227 - DNA, 270 bp, Glycine max
  unsure (1)..(270): unsure at all n locations
gcaattgaagttaaaagccttagccttccctacaactccaaacncccaagacatcntcatccatggctgcctccgtctccactgtcggagcngtcaacagagctcttttgaacctgaatggttctggagctggagcttcagctcccagttcagccttctttgggaccagcttgaagaaggttattgcctcaagggtccccaacagcaaggtttccggtggaancttcaagattgtngctgtagaagagaagaaaganattgaagagaccc

SEQ ID NO: 291228 - DNA, 268 bp, Glycine max
  unsure (1)..(268): unsure at all n locations
cttcactttctctcgtttcaatcgaaaaaaatcatgggcagaaanttcttcgtcggtggcaactggnaatgcaatgggaccactgaggangtgaagaagattgttactactttaaatgaagctaaagtccctggagaagatgttgtagaagttgttgtgagccctccttttgtgttccttccttttgtaaaaagtttgctgcgccctgatttccatgtctcggcccaaaattgttgggttcgcaaaggtggtgcttatactggagang

SEQ ID NO: 291229 - DNA, 265 bp, Glycine max
tcaacaggtcaccctccaagtgtgcctctgttggcattcaaggcattgcttgggcctttggtggcatgatctttgcccttgtctactgcactgctggaatttcagggggacacatcaacccagctgtgacctttggtctctttttggcaaggaagctgtccctcacaagggcgctgttctacattatcatgcagtgtcttggagccatctgtggggctggtgtggtgaagggatttgagggcaatgctaggtatgagatgttcaa

SEQ ID NO: 291230 - DNA, 269 bp, Glycine max
cacttttaagttaaatagtttttcattgtttcatttaatctacaatggctgcttcaacaatggctctctcttcatcatcattgggctggccaagctatcaagcttgccccctccacccctcagcttggtgttggaagggttagcatgaggaaaacagcctccaagactgtttcttctggaagcccatggtacggcccagaccgtgtcaagtacttgggcccattctctggtgagcccccatcctacctcactggtgaattcccaggtga

SEQ ID NO: 291231 - DNA, 269 bp, Glycine max
  unsure (1)..(269): unsure at all n locations
ccnagggtgagggccttccatggcttccgcttgtgcttcctctgcaattacagctgttgccatctctacgccgagttccgggcagaagaatggatcaggaggttgttttcttagtggaaggaaattgagggtgaaaaaggagagagcagcaattggaggacgatcgatgggcactacagtgtgcgcagttgctgagcctgacagacctctatggttcccaggcagcacccctcctccatggcttgatggcactctacctggagacttcg

SEQ ID NO: 291232 - DNA, 198 bp, Glycine max
tgattgaagaagatgccgatcagaaacatcgccatcggaaggcctgaagaggctactcaccccgacacgttgaaggcggggttggctgagttcatctccaccttgatcttcgtgttcgccggttcaggttccggcatcgcctacaacaagctcaccgacaacggcgccgccactcccgccggcctcatctccgttcca

SEQ ID NO: 291233 - DNA, 273 bp, Glycine max
  unsure (1)..(273): unsure at all n locations
aaccgtatcaccccatcgtgggttgctntcaccganagtgagagnataattggagannctgccaagaatctggcagctgtcaatccagaaaggaccatctttgatgtcaagagacttattggaaganagtttgaagataaggaagttcaaagaganatgaagcttgttccttataagatngttaacaaggatggaaaacctaccntacaggtgaaanttaaggttngtgagaccanggtgtgcagccctgaggnaatcagtgncatgattctg

SEQ ID NO: 291234 - DNA, 266 bp, Glycine max
  unsure (1)..(266): unsure at all n locations
cagaaagtgagaggagaganaaagtagctgatcctccatggcctccaccaaggaacgcgaaaactttgtctacaccgccaagctcgccgaacaagccgaacgctatgaagaaatggtggaagcaatgaagaatgtggcgaactgaacgtggaattgacggtcgaggagcggaaccttctgtcggtagggtacaagaacgtggtgggtgctcgtagggcttcgtggaggattctatcgtcgattgaacagaaagaagaagctaangg

SEQ ID NO: 291235 - DNA, 277 bp, Glycine max
  unsure (1)..(277): unsure at all n locations
cattttcagaggaaaatggcgggtacggtttcgacttgtttctncttcgtgtttcttctttctctcctnccttccttttcagatcctccgctgaggaatcctcggagaaggagttcgtactcacattggatcactctaactttcangacactgtcagcaagcacgatttcatcgtcgtcgagttctacgccccatggtgtggtcactgtaagaagcttgctccggagtatgagaaagctgctnctatcttgagtagtcatgatcctcctattgttnt

SEQ ID NO: 291236 - DNA, 265 bp, Glycine max
  unsure (1)..(265): unsure at all n locations
acccttatggtgatccaaatggtacattttggctacaagggtgtcacatggtgcattgtgcatacaacagcttgtggatgggcaatttcatccacccagattggnacatgttccaatctactcatccttgtggctgccttccatgctgcctcaagagccatatctggtggcnccatttacatcagtgacacagttgggaaccacaactttgagctgcttaagaccttggccttgccagatgggtcatcctcagatgtgagcactc

SEQ ID NO: 291237 - DNA, 265 bp, Glycine max
  unsure (1)..(265): unsure at all n locations
aagcttgcaatggccaaagactatggagaagttgagttgtttggtgtaggtggaagcccttttgccagaagggtgcagattgccctagaactgaagggagttcaatacacttactttgaagaagatcttaggaacaagagtgctcttcttctcaaatacaaccctgttcacaagaaggtgcctgtgcttgtccacaatggaagacccttggctgagtcccttgtgatccttgaatacnttgatgagacatgggagncccaccncc

SEQ ID NO: 291238 - DNA, 229 bp, Glycine max
caacaacatggctgccactgctgctgcaggcatagcttccttgttttcttcttctattaacagtgtcaaatgtcttcgttcctccaagaactgctccataatagaccctctcataacaacagtgccctcaaaccgtggcatgtttgggtcacacttggtggaacctttgtccattaattcgcacaagttgtggggacctagaatttctgctgctgttgcacaagaagag

SEQ ID NO: 291239 - DNA, 265 bp, Glycine max
aacactcataacacaaagcacaaagcaaagctcatccttgagttaaaaaatggcagcagcttcttccatggctctctcatccccatccttggctggcaaggccgtgaagctgggcccatcagccccagaagtgggaagggtgagcatgaggaagaccgtcaccaagcaggtctcctcaggaagcccatggtacggcccagaccgagtcaagtacttgggcccattctctggcgagcccccgtcctacctaaccggtgagttccca

SEQ ID NO: 291240 - DNA, 269 bp, Glycine max
  unsure (1)..(269): unsure at all n locations
gtcgatggaaaaccaggtgttggcgcactctttgtgaaggtcagcatggatggtgctccgtatcttaggaaggtagatctaagaagttatacaacatancaggaactatcttctgcccttgagaagatgttcctaagctgttttaccctaggtcagtgtggttcccatggagctccaggaagagaaatgttgagtgagagcaagctgagggatcttctgcatggttctgagtatgttctcacttatgaagataaagatggagattggat

SEQ ID NO: 291241 - DNA, 267 bp, Glycine max
  unsure (1)..(267): unsure at all n locations
aaattatttatctttctacaagtncaacattggttcatatgaaatgttagtggggtatccgcccttttattcagatgaaccaatgttgacttgtagaaagatagtaaattggagaaattatttaaaatttccagaagaagttaaaatttcggcagaagcaaaggatcttattagtagacctcctatgtaatgtggatcagaggcttggaaccaaaggggctgatgaaataaaggcgcacccatggtttaaaggtattgaatgggaca

SEQ ID NO: 291242 - DNA, 247 bp, Glycine max
  unsure (1)..(247): unsure at all n locations
gtgattccatgggtggaactggttggangatgactgaatttggctgggatgtacnagtatgctggtgttcagacattagttgccaagttcctgatgcaaggcaaagctgggcatcatgctccagttttcgagagatatcagcagaaggctgaatctttcatgtgttcgtgccttggaaagggtgatcgcaatgttcagaagactccgggtggcctcatcttccgccagagatggaacaacatgcagt

SEQ ID NO: 291243 - DNA, 268 bp, Glycine max
  unsure (1)..(268): unsure at all n locations
tggcgatgtgcaatggcgcttcgnaggctttcatcttcaattnacaagcctctgcgccctctcttcaatggccggttccctctactacaagtcgtctttgcctgatgaagctgtttacgacaangagcgacccggagttacatggccgaagcagttgaatgctccacttgangtcgtggatcctgagattgctgatattattgagcttgagaaagctaggcaatggaaggggctagaattgataccgtcaganaatttcacctctgtg

SEQ ID NO: 291244 - DNA, 264 bp, Glycine max
gatattcattccccttatctttctctcttctctctccccgcccaaaccctaactccctaccctattccgctttctctcatccatcatgaaaggaggaaagtccaagaccgaatctaagagagccgatgccaaacttgctgtgaataagaagggcgccgccaccaagactaggaaacccgccggaaaggggaaggcagcgaaagatcctaacaagccaaagaggcctccaagtgctttcttcgttttcatggaggaattcaggaa

SEQ ID NO: 291245 - DNA, 270 bp, Glycine max
  unsure (1)..(270): unsure at all n locations
gcattagcaaaagcaagaagaactagtctaagcagaaatggcctcttcagtgatggcatctgtggccctcaaacctgcccctttcactgttgagaagtcctcagttagaggccttccctccctctcaaggaactcctcttcattcagagttgtggccagtggtggcaagaagatcaagactgacaagccttatggaattaatcggtggcatggctttgagggaaggagttgatgcatctggcaggaaaggaaagggaaagggcgtntacc

SEQ ID NO: 291246 - DNA, 263 bp, Glycine max
  unsure (1)..(263): unsure at all n locations
aatggcaggtgcaggaggagggtatggggacgcgaanccagaggatagactacgtgttcaaggtggtgctgataggggactcggcggtggggaagtcgcagatactagctcggtttgcgaggaacgagttcagcttggactccaagtccaccatcggtgttgaatttcagacaaggaccttggtcatagatcacaagaccgttaaggctcagatcngggacactgctggccaagaacgatacagagcagttacgagtgcatac

SEQ ID NO: 291247 - DNA, 267 bp, Glycine max
  unsure (1)..(267): unsure at all n locations
cggggataagattaaagattcaacaatggcctctgcttctgctactcttctcaagtcatctcctgttcttgacaagtgcgagtnggtcaaaggccagacccttcgccaacctctcgtgagatgtaacccttcctcagcatcagctctcaccatcaaagctgcttcctatgctgacgagctcgtcaaaaccgccaaaacagtggcctcaccggggcgtggtattttgggcgatggatgagtcaaatgcaacctgcgggaagcgtttgg

SEQ ID NO: 291248 - DNA, 262 bp, Glycine max
caaagacctcgaaacggagattcaaagtgggttgcctcacaaggactaccacgacccaccccccgccccattctacgaccccgccgagctccgaaagtggtccttcttccgagccctcatcgccgagttcgtcgccaccctcctcttcctctacgtcaccatcctcaccgtcatcggctacaaccaccagacagccaccgccgccgagcctgcagcggcgtcggcgtcctcggcatcgttgggcctttggaggcatgatttt

SEQ ID NO: 291249 - DNA, 263 bp, Glycine max
  unsure (1)..(263): unsure at all n locations
cttctcttaaaagagcctttgctttttctttaggcctttccgaatnaagtacttgtttcattttctctcgaagcaagaaaaatgttcatcgagagtttcaaggttgagagtcctaacgtgaagtacacagagactgagattcagtccgtgtacaactatgaaaccactganccttgttcacgagaacaagaatggcacttatcagtgggttgtcaagcccaaaactgtcaaatatgaatttaaaaccaacacccatgtcccta

SEQ ID NO: 291250 - DNA, 263 bp, Glycine max
  unsure (1)..(263): unsure at all n locations
ctttttcgtttattccttctttcatccattctactttcttttcctctcgctagtgtttagtgctaggtgattgattaacttagaaggactttgtgtgttacaagaaaacaagggcaagtttcatgtctgaatttnacacgaacatcccaactncttttgatccctttgctgaggcaaatgctgaggactcaggtgccgggacaaaagagtatgttcatgttcgtgtacaacagcgcaacggaaggaaaagcctaacaactgtt

SEQ ID NO: 291251 - DNA, 298 bp, Glycine max
cgctatgctcttagcggtagggcttgggaccttgtcattgagcaaaggattgcattcacaaggcaaaaggactttggaaaggaacaacgtgaacttcaatgggcacatgcacaaagaacattacatggattacaaccagctgacaccaagttcaatgagcgtacacatgtcagtgaactcaatcaaatggccgaagaagctaaaaggagagctgaaattgcaaggttgagagaacttcatacactaaaaggtcacgtagaatcagttgtgagattgaaggggcttgacatagacacaa

SEQ ID NO: 291252 - DNA, 295 bp, Glycine max
  unsure (1)..(295): unsure at all n locations
tcatgtgtgacatatgctaacgatgctaganaatcttccttttttgatcttgtagcttcccaactncactcccaagaccaatggatcatcaactcctgtgaggggagagacagtggccaagttgaaggtggcaatcaatggtttcggacgcattggtagaaacttccttcgctgctggcacggccgaaaagactcaccccttgangtcgttgttgtcaacgacagtggtggtgtcaagaatgcttcgcacctgcttaaatatgattccatgctgggaattttaaagcagattgtg

SEQ ID NO: 291253 - DNA, 283 bp, Glycine max
  unsure (1)..(283): unsure at all n locations
ggaaaaatggtttcgctgaaactgcagaagcggctcgccgcgancntgctcaagtgtggcagaggaaaggtttggcttgaccccaatgaagtcaacgaaatctccatggccaattctcgccaaaacataaggaagctggttaaggatgggtttatcatcaggaagcccaccaagattcactctcgctcacgtgctcgtcgaatgaaggaagccaagaggaaaggacgtcactctggatacggtaagcgtaagggtacaagggaggcaaggcttcccactaaaa

SEQ ID NO: 291254 - DNA, 293 bp, Glycine max
  unsure (1)..(293): unsure at all n locations
caaaaacaaganaaaaggttacctctttcaattttatcccttgtngtgagcttaattcaatttctgctcacacataatggcttgcacgctcgctgattcattactcctattcaagggttcttatcagaaaccagttctgaggagagacattgctgcccggtactccccgggtatatttagtctaaacagtaatgggcttatccagaaaaggttcaggcgtcaaaggaattttgttactaggaataaggttactgtcatacatgccgtggcaattccagtacaaccagctccgg

SEQ ID NO: 291255 - DNA, 295 bp, Glycine max
  unsure (1)..(295): unsure at all n locations
ctctctctaggatctgcttctttctcttatcaattctcattcgtaatcattcattcctccaatctacgactttctgttgtttctccctcaacacaacacaacatgntcctctttgactggttctatggcattctcgcttccctcggtctctggcagaaagaagccaaaattctcttccttggtctcgataatgccggcaaaaccaccctccttcacatgctcaaagacgagagattagttcagcaccagccgacgcagcaccccacttcggaggaattgagcattgggaagatca

SEQ ID NO: 291256 - DNA, 294 bp, Glycine max
gttttctcttcctcgttcgtttcatttcgtttcgttgaagagcaacttttctctctctgtctctgtacaattctcccttttcttccctcgtagatcgaaagggaatattcttccatggcctccaagcggattctgaaggagctcaaggacctacagaaagaccctccaacctcttgcagtgccggtcccgtagcagaagatatgtttcattggcaagcaactataatgggtccccctgatagcccttatgctgggggtgtttttctagttactattcattttcctccggattat

SEQ ID NO: 291257 - DNA, 293 bp, Glycine max
  unsure (1)..(293): unsure at all n locations
tcgcttacagtaagangtgagaaagagagacaaatcggcagaagcaaggaggctgagagcgaganagcaactgcacgcactgtaactcctaacttcccagatcgtcttcttcctcttttctctccggtgattgttggaactcagagagcttctttgatggaacagtacgagaaggttgagaagataggcgaaggaacatacggcgtcgtttacaagggtcgcgaccgcgtcaccaacgagaccatcgcgttgaagaagattcgcctcgagcaggaggatgagggggttcccag

SEQ ID NO: 291258 - DNA, 295 bp, Glycine max
atccacttcatgtgtgacatatgctaacgatgctagagaatcttccttttttgatcttgtagcttcccaactcactcccaagcagaccaatggatcatcaactcctgtgaggggagagacagtggccaagttgaaggtggcaatcaatggtttcggacgcattggtagaaacttccttcgctgctggcacggccgaaaagactcaccccttgacgtcgttgttgtcaacgacagtggtggtgtcaagaatgcttcgcacctgcttaaatatgattccatgctgggaattttaaag

SEQ ID NO: 291259 - DNA, 301 bp, Glycine max
  unsure (1)..(301): unsure at all n locations
ggaatccaaaagangttacagaagaagaatacaccaaattctaccactctcttgccaaggatttcagtgatgagaaacctttagcatggagtcatttcactgctgagggtgatgttgagttcaaggcagtcctgtttgtaccacctaaggcacctcaagatttatatgagagctattataacgcaaacaaatcgaacctgaagttgtatgttagacgtgtgttcatttcagatgaatttaatgaactgttgcccaagtacctaaactttttgctgggcttgttgattctgacactttgcca

SEQ ID NO: 291260 - DNA, 292 bp, Glycine max
  unsure (1)..(292): unsure at all n locations
tcaaatgcaacctgcgggaagcgtttgggcatctattgggttagagaacacagaagctaatcnngcaggcataccgtaccctacttgtgaccagtacctggtcttggtgaatacatctctggtgccattctctttgaggaaactctctaccaatccactgtcgatggaaggaagatngtcgacgtacttgttgaccaaaacattgttcccggtatcaaggtcgacaagggtttggtgcccctagctggttcgaacgatgagtcatggtgccaaggtcttgatggtcttgcgt

SEQ ID NO: 291261 - DNA, 290 bp, Glycine max
  unsure (1)..(290): unsure at all n locations
cttgtccatgtgcactgggtcttgctacgcccacagcaatcttngttggcacctcacttggggcaagaaaaggacttcttattaggggaggggatgtgctggaacgcttggctggaataaattatattgctctagacaagacaggaacccttaccaaaggaaaaccagttgtgtcggccataagctctatcctttatggagaatctgaaattcttcggcttgctgctgcagtggagaaaacagcatctcacccaatagcaaaggctattgtcaataaagctgagtcattt

SEQ ID NO: 291262 - DNA, 291 bp, Glycine max
tgtttttcatttcatcgtgcattcaatggccaccacagcagctctatccggaaccatggtgagcacctccttcatgaggaggcaacctatgaccaccacaagcctaaagacattccccaacgttggtgaagctctttttggtctgaaaagtggacgaggtggtcgtgtcacttgcatggcctcgtacaaggtgaagctcataaccccagaaggagaagtggagtttgaatgcccagatgatgttttcattgttgacaaggcagaggacgaaggcattgaacttccctactc

SEQ ID NO: 291263 - DNA, 290 bp, Glycine max
  unsure (1)..(290): unsure at all n locations
tggctgctgcggttagtgctgcagtctcttttccatccaccaagtctacctctctcccaagcaggacctccatcattaccccagananagttgtattcaagaaggcttcattgcaatacagagatgtttgtagcagtggaagggtagtttccatcagagctcaagtcaccactgaggctccagccaaggttgaaaaagagtccaagaaacaggatgaaggtgtggttgtgaacaagttcaaacccaagaccccttacgttggtagatgcctgctcaacacaaagatcact

SEQ ID NO: 291264 - DNA, 291 bp, Glycine max
  unsure (1)..(291): unsure at all n locations
anagttttttcctttctctgctctttgccttctctgacacatttggtgccttgtagagcgtgttttggcaggaaggtggtatggcgaaggacgttgaggttgctgagcgtggctccttctctgggaaggactaccaggaccctccaccagcaccactcattgatgctgaggagctcacaaagtggtccttttacagggctctcattgctgaattcattgccactttgctcttcctctacattactgtgctcacagtcatagggtacaatcaccagactgacctcaaggaaa

SEQ ID NO: 291265 - DNA, 297 bp, Glycine max
  unsure (1)..(297): unsure at all n locations
gtggagaaatttaactcgaccttgtatgatgaatgggntaaacangggnaatgcaccggnactgcccgangactcttaagaattacaacaagctggtgtctcttggcttcaagattatattcttgtcaggaagaacactggacaaacaggccgtaacagaagcaaacttaaagaaggctggctaccacacatgggaaaaattaattctcaaggatccacaagatccttccactccaaatgcagtttcatacaaaacagcagcgagagagaaactgataaggcagggatacaacattg

SEQ ID NO: 291266 - DNA, 296 bp, Glycine max
  unsure (1)..(296): unsure at all n locations
caagacngntgacaccgtccctggccantccancgatttcctcggtgcantganggccagagtatatgatgacgaangaggaagtggatttccggngntngtgtnnacggcattgggaanannnntgtgaactcaaaagatggacctccaaccttgagcagcccaagatgantctggagaagcncntgacgtatggnaacatgcctgnccaagaacnagagaatgtcaagagagtccaattggccgacaaggactggancgangctgcactnggaaatnctaacgaggatgctntt

SEQ ID NO: 291267 - DNA, 286 bp, Glycine max
  unsure (1)..(286): unsure at all n locations
gccagccatgtcgatcttttctattccctcaccaacgtaccgntgttcaatttcaatttcaatttctcggcagccattgccatgttctttcacggctcaagtgntcaagaagagggaaagggaaagtggtaatgagcatggaggcaggcattggagtgatgggcaccaagttgggtatgatgagctatttcgaatccgacggagaggttgttcctgtcactgtcgtgggtttcaaagaaggcaacatcgtcacccagatcaaaactgaggccaccgatggatacga

SEQ ID NO: 291268 - DNA, 285 bp, Glycine max
  unsure (1)..(285): unsure at all n locations
gcctcctggaggcccattccggggcggggcgggtgcaggcccggttcgggtttggcaagaagaaagccgccgccccgaagaaagtttccagggggtcgggctctagctccgataggcccctgtggtatccggncgccaaggcgcccgagtacctggatgggngccttgtcggagactacgggttcgacccatttgggctagggaagcccgccgagtacctgcagttcgagttggactcgctggaccagaaccttgcgaagaacgtggctggggacatcattggga

SEQ ID NO: 291269 - DNA, 286 bp, Glycine max
tgttccattggcaagcaacgattatgggtcctgctgatagtccttatgctggaggtgtattcctagtcactattcactttcctccggattatcctttcaaacctcccaaggttgcctttaggactaaggtgtttcatccgaacatcaacagcaatggtagcatttgtcttgatatccttaaggagcagtggagccctgcactcaccatctctaaggtactgctttctatctgctcattgctgactgatccaaatcctgatgatccacttgttccggaaatcgctca

SEQ ID NO: 291270 - DNA, 282 bp, Glycine max
cgggtttgacgttgttcacaatcactttctgcgcttcactcactcccttcgtgcggttttctttctttgtcgaactcgtgcgaagatgcgtgagattcttcacatacagggaggccaatgcggaaaccagatcggagcgaagttctgggaggtggtgtgcgcggagacgggatcgattccacggggaggtaccagggggacaacgagttgcaactcgagcgagtcaacgtctattacaatgaagcgagttgcggaaggttcgtgccgagggcggtgctcatg

SEQ ID NO: 291271 - DNA, 285 bp, Glycine max
  unsure (1)..(285): unsure at all n locations
cangnncaagcagcaatggcgccgaangtaacacgcaaggntagcagaaaccccgaattgataagggganttggaaagtactcgaggtcgcagatgtaccacaagangggcatttnggctatcaaggccaaaaatggtgncgttttacntngccacgaccctaaacccaaacctgaaacacccgctgannanccacccaaattttaccctgctgatgatatcaagaagccccttgtcaacaagcacanacccanacccgctaagctcagggctagcattactccg

SEQ ID NO: 291272 - DNA, 285 bp, Glycine max
caacaagttaaagctcttaaggatggaattgctgttgaaaaaccaatctacaaccatgtcactggtctcttggatccccctgagctcattaaaccccccaaaatcttagtcattgaaggtttgcacccaatgtttgattcccgtgtcagagatctcttggactttagcatctacctagacattagcaatgaggtcaaattcgcttggaaaattcagagagacatggcagagcgtggacacagtcttgaaagcatcaaggctagcattgaagcaaggaagcctgat

SEQ ID NO: 291273 - DNA, 286 bp, Glycine max
  unsure (1)..(286): unsure at all n locations
agagattcaagaccggcatggctaatgaagaggaacagaaaaaccacctcttcggcatcaaagatctcggtcacaagactctccttcagagtgatgcactctatcagtatatacttgaaaccagtgtctatccaagagancacgagtgcttgaaagagatacgcaagatgactgcaaaacacccactgaacatcatggcaacaccagcagacgaaggacaacttctgagcatgcttgttaagctcacgaattcaaagaacgccttggaaattggtgtattcactgg

SEQ ID NO: 291274 - DNA, 283 bp, Glycine max
  unsure (1)..(283): unsure at all n locations
gggtgtgcccatctcatgtgctagatttccaaccaggagaggcctttgtggtcagaaatgttgccaacattgtcccaccatatgaccagtcaaaatacgctggaactggggctgcagttgagtatgctgttttgcatcttaaggtgncggagattgtggtcattggacacagtgcttgtggtggtattaaggggcttctgtctttcccatatgatggaacctactctactgattttattgaggagtgggtcaaaattggcttgcctgcaaaggcaaaggtgat

SEQ ID NO: 291275 - DNA, 277 bp, Glycine max
gtcttcgagatggctctgagcacagcagatgccacattccaaaatcttgattcatcagaaatttccctcactgacgtcagtcattactttgactcagacccgactaatctggttcaaaatctaaggaaagatgggaagaagcctagtgcatacattgctgatacaaccacagccaatgctcaggtacgtacactttctgagacggttagacttgacgcaagaaccaagctgttgaatccaaagtggtatgaaggcatgttgtctactggatatgagg

SEQ ID NO: 291276 - DNA, 288 bp, Glycine max
tcactgagaaaggatctctatctacgaaggagcggaataaaacccttctctctgtgattaagagatctggcttcagatccggaaacttcacacttttgaggaggtggcaaagcacaaccagaccaaggattgctggctcatcttttctggcaaggtgtatgatgtcacccctttcatggaggatcatcccggaggtgatgaggttttgttatctgcaacagggaaagatgcaaccaatgactttgaagatgtggggcacagtgattctgctagagatatgatggaaaa

SEQ ID NO: 291277 - DNA, 295 bp, Glycine max
  unsure (1)..(295): unsure at all n locations
cnttcaatttcantcaacggttatacccttttgctatttgagnatcntcatgtccaccgcagcgcagnccaaggccaagaaaacggcgtcgtccaagaagcccctctcccatcctaccttcgccgtgatgatagcggaggcgatagcgagtctgaaggagagaaccggttcgagccaatacgcgataaccaaattcatcgaaggcaagcacaaggagttgcctccaacctacaagaagcttgttctcgttcatctcaagaagtctgttgctgctggcaagctcgttaaggtcaaa

SEQ ID NO: 291278 - DNA, 283 bp, Glycine max
cagtgagtgatcggtgttcacttgatctcatcataatcgtcagcgtcaattgaagaagatgccgatcagaaacatcgccgtcggaaggcctgaagaggcgactcaccccgacacgttgaaggcggctttggctgagttcatctcaaccttcatcttcgtgttcgccggctcaggctccggcatcgcctacaacaagctcaccgacaacggcgctgccacccctgccggcctcatctccgcctccatcgcccatgcattcgccctcttcgtcgccgtctccgtt

SEQ ID NO: 291279 - DNA, 267 bp, Glycine max
  unsure (1)..(267): unsure at all n locations
gtcagtgttcattgtgaacaatcttccnccatccatttgcatcctacagttaacncaagtgaaaagtctgggagctaaagctggagttgtcttaaaccccggtacccccttaagtgcaatagaatatatccttgatgtggttgatttggtcttaattatgtccgtaaaccctggctttggtggccagagttttattgagagtcaagtaaagaaaatttctgatttgagaagattgtgtgcggagaagggagtgaatccatggattga

SEQ ID NO: 291280 - DNA, 289 bp, Glycine max
gcttaacctctctcattccccatttcctcacctccttcaaccacctgctaaattctagggttccgaaatggacgctggcggaaagatcaagaagggcgccggaggtagaaagggcggcggcccaaagaagaagccggtttcaaggtccgtcaaagccggtctccaattccccgtcggaagaattggccgttatttgaagaaaggaaggtacgctcagcgtgtcggtaccggtgctcccgtatacttggctgcagttctcgaatacctagctgccgaggtaacgtgacat

SEQ ID NO: 291281 - DNA, 198 bp, Glycine max
  unsure (1)..(198): unsure at all n locations
cgcagttctcgagtttgagtctcgcgttgacgctgcacttgctagaaagaaggctgacatccaggaagcgctcaaaaacccgccatgtattcagaaaactcttcgtatttatgtatttaatacntttgctantcaaattcgcacgattccgaagangccaaatgtggagcctccaacctggacgctaaagatagttgg

SEQ ID NO: 291282 - DNA, 192 bp, Glycine max
tgcagccatggccacccacgcggctctagcttctacaaggatccccactaacaccaagttcccatccaaggcttcacactctttcccaacccaatgcgcctcaaagagacttgaggtgacagaattctctgggctaagatccacttcatgtgtgacatatgctaacgatgctagagaatcttccttttttga

SEQ ID NO: 291283 - DNA, 194 bp, Glycine max
  unsure (1)..(194): unsure at all n locations
acctaacgcagcatcgctattctcttcattccatggctttgcccaaccagcaaaccgtggattaccctagtttcaaactncgttatcgtcggcgatggtggcacaggaaagacaacctttgtgaaaaggcatctcaccggaganttcgagaagaaatatgagccaaccatcggtgtggaggttcacccattgtt

SEQ ID NO: 291284 - DNA, 193 bp, Glycine max
  unsure (1)..(193): unsure at all n locations
gtcattacctgcaaagctgcggtggcctgggaacccaacaagcccttaaccgtccaagacgttcaggttgctccgcctncaggccggcganntccgtgtccaaatcctcttcaccgctctctgccacaccgatgcttacacttggggcggcaaggatcccgaaggtctcttccctgtattctcggcaacgaag

SEQ ID NO: 291285 - DNA, 191 bp, Glycine max
aacaatattttggtcatttgcgattcttacaccccacaaggtgagcctatccctacaaacaagagacacagagctgctgaaattttcagtaacccaaaggtccaagcagaagttccatggtatggaatagaacaagagtacaccttacttcaaacaaatgtgaaatggccattaggttggcccgttggtgg

SEQ ID NO: 291286 - DNA, 190 bp, Glycine max
  unsure (1)..(190): unsure at all n locations
aggagagccagcaaaactgatcaggcaganataccgtgaagctgcagacatgatcaagaagggaaagatgtgcgctctcttcatcaacgatcttgatgcaggagctggtcgtcttggtggaaccacacaatacactgtgaacaaccagntggtgatngccactctcatgaacnttgctgatacccccanc

SEQ ID NO: 291287 - DNA, 191 bp, Glycine max
  unsure (1)..(191): unsure at all n locations
gccatttcaagantacagcgatcctcggactggaattctcaatcttgctgtgaagttgccagcccacgtcctgaaacctgacatgggtccaaaaacatatattgcatatgggattaaagaagagcttggtagangagactctgtaacaaagcttcattgtgatatgtcagangcggtgaatattttgcccc

SEQ ID NO: 291288 - DNA, 193 bp, Glycine max
  unsure (1)..(193): unsure at all n locations
aacactcataacacaaagcacaaagcaaagctcatccttgagttaaaaaatggcagcagcttcttccatgggctctctcatccccatccttggctggcaaggccgtgaagctgggcccatgcagccccagaantgggaagggtgagcatgaggaagaccgtcaccangcaggtctcctnaggaagcccatgnt

SEQ ID NO: 291289 - DNA, 188 bp, Glycine max
  unsure (1)..(188): unsure at all n locations
anaacttatagtaaccaccactagtccttatgagcaagctgcttttggttccaagactgattggcgtgtccgagcaatatcagccacaaatttataccttcgtgtgaaccatatatatgtgaactctgaggatataaaggaaactggatacacctatattatgccaaagancattttgaaaaagttta

SEQ ID NO: 291290 - DNA, 185 bp, Glycine max
  unsure (1)..(185): unsure at all n locations
aacccttcaccttgtccttcgtctccgtggtggcatgcagatcttcgtcaagactctcactggcaaaaccataaccctagaggtcgaaagctctgacaccattgncaacgtcaaggccannctccaggannaggggggagncccncgagacnggnannttnttatnggggggnangnanggnggg

SEQ ID NO: 291291 - DNA, 191 bp, Glycine max
  unsure (1)..(191): unsure at all n locations
cagcaatggggatcgatctcaaggccggaggtaaaagcaaaanaaccaaaagaacagcacccaagtccaatgatatctatcttaagctcttggtcaagctttatcgcttccttgttcggagaactggcagcaaattcaatgccgttatactcanganattgtncatgagnaaggttaacnanccccntttt

SEQ ID NO: 291292 - DNA, 189 bp, Glycine max
  unsure (1)..(189): unsure at all n locations
cgaaccctttgttcgagaagcgtccgaagcagttcgggatcggaggcgcgctgccgccgaagcgggaccncacgcgcttcgtgaagtggccgaagaacgtccaaatccaacgcaagaagcncatcctcaagcagaggctcaaggtccctncggctctcaacnagttcacnaaaaccctcganaaaaatt

SEQ ID NO: 291293 - DNA, 164 bp, Glycine max
acgggcacagattgcatagggacatccattcggcatgggtgtagtagcattgtaaatctggaacttctccctcagccaccacaaactagagccccaggcaacccttggccacagtggcctcgcatataccgagtagatttgggcaccaagaaggtgcagcaaaa

SEQ ID NO: 291294 - DNA, 158 bp, Glycine max
  unsure (1)..(158): unsure at all n locations
cnagggacaccctgataagctctgcgaccaaatctccgatgctgtcctcgacgcttgcctcgaacaggactcagacagcaaggttgcctgcgaaacatgcaccaagaccaacttggtcatggtcttcggagagacaccaccaaggccaacgttgacta

SEQ ID NO: 291295 - DNA, 267 bp, Glycine max
  unsure (1)..(267): unsure at all n locations
ctttcgcttctgaatcttcaacaatggtgctcgagttttttcatcgtattgatttcttcaacaggcgacgatgatctgtatcgacaactctgaatggatgcgtaacggtgattactctccttctcgatttcaagctcaagcagacgctgtgaatctcatttgcggtgctaaaacgcagtctaatccagaaaatacagtggganttctcacantggcagggaagggcttcntntttgggccncccttaccnntgtcnngggaagttnt

SEQ ID NO: 291296 - DNA, 265 bp, Glycine max
  unsure (1)..(265): unsure at all n locations
ataaacagattttaattgatgccgttgtccatgctgtgaatgaggactatgctgagatggctaatgatttcaccagattaggcttcctgaccccagggactgatgtgactcctataattcctgctttggaagcaatttggcagaactctgctggaaaaggactgtcagattttaattttcgtagtgtcacaggaaagtttaaccagtnggtttacaattatcccattcgattcccagaagggtttccantngnatcngnccttat

SEQ ID NO: 291297 - DNA, 267 bp, Glycine max
ctctgacttttgctacaactactaccagtacaagttggaatggctcgattttcattggatgagatatcagacactggtgcctttgtgagatctgcttcaacattcagaaattggatttcgagggacccgaattcgctgtttccaccggaatcagggaggtatcatctctatgtatcatatgcttgtccttgggcttccaggtgccttgcttacttgaatatcaaaggacttgacaaagccatcagtttctcggctgtcaaacccatc

SEQ ID NO: 291298 - DNA, 261 bp, Glycine max
gatttcttctcttcttctcttctctttcgtttcgatcttcgatctctgaaaatgagagagtgcatttcaatccacatcggtcaggccggtattcaggtcggaaacgcctgctgggagctctactgcctcgaacacggcattcagcctgatgggcagatgccaagtgataagactgttggtggaggtgatgatgctttcaacaccttcttcagtgaaactggggctggaaagcacgtgcctcgtgcgatttttgtagatctc

SEQ ID NO: 291299 - DNA, 266 bp, Glycine max
  unsure (1)..(266): unsure at all n locations
gcagaaagcaagctcatcctagagttttaaaaatggcagcagcctcctccatggctctctcttccccatccttggctggcaaggccgtgaagctgggcccatcagcccccgaagtcgggagggtcagcatgaggaagaccgtcaccaagcaggcctcctccggaagcccatggtacggcccagaccgcgtcaagtacttgggcccattctctggcgagcccccgtcctacctcantggcgagttcccaggtgactacggtgggaca

SEQ ID NO: 291300 - DNA, 265 bp, Glycine max
gctaaacaatttcatcaagcctgccatggcttcctcgtgtgcttcctctgccattgcagctgttgccatctccacaccaagttcccagaagaatggatcactcttgggaagcacaaaagcttcttttcttagtgggaggaaactgaaggtgaacagttttacagcaccagttggagcacgatccagcactacagtgtgtgcagttgctgagcctgataggcctctgtggttcccaggcagcacccctcctccgtggctagatggc

SEQ ID NO: 291301 - DNA, 265 bp, Glycine max
  unsure (1)..(265): unsure at all n locations
gctaaattggcgagtgcaaganctgaagatgcggtgctgtgccagantgggaccctggatcccaacaaggtgaagggaaagatcgtggtgtgtctccgaggaataaatgcaagantggacaagggagagcaagcttttcttgctggtgctgtgggaatggtccttgctaatgacaagactactgggaatgaaattatagctgatcctcatgtccttcctgcttctcatatcaattttgactgatgggcagtgctgtctttacgta

SEQ ID NO: 291302 - DNA, 262 bp, Glycine max
  unsure (1)..(262): unsure at all n locations
tcatcaaagttttttcctttctctgctctttgccttctctgacacatttggtgccttgtagagcgtgttttggcaggaaggtggtatggcgaaggacgttgaggttgctgagcgtggctccttctctgggaaggactaccaggaccctccaccagcaccactcattgatgctgaggagctcacaaagtggtccttttacagggctctcattgctgaattcattgccactcntgctcttcctctacattactgtgctcacagt

SEQ ID NO: 291303 - DNA, 263 bp, Glycine max
  unsure (1)..(263): unsure at all n locations
ctttctctcctacttctccgcctccttcaaaatcgtcatcaatntcgcgtctttctttctcaattctcttagattctcaattgggtcttcaaaaatgcggatgagttgcaatggatgtcgagttctgagaaaaggttgcagtgaaaattgcagcatcagaccctgtttacaatggatcaaaagcccagaatcccaagccaatgctactgtgtttctcgctaagttttatggtcgtgctggtctcatgaacctcgttaacgcag

SEQ ID NO: 291304 - DNA, 259 bp, Glycine max
  unsure (1)..(259): unsure at all n locations
gcagaaagcaagctcatcctagagttttaaaaatgggcagcagcctcctccatggctctctcttccccatcttggctggcaaggccgtgaagctgggnccatcagcccccgaagtcgggagggtcagcatgaggaagancgtcancaagcaggcctcctccggaagcccatggtacggcccagaccgcgtcaagtacttggggccattctctggcgagnccccgtcctacttcactgggcgagttcccagtgactacgg

SEQ ID NO: 291305 - DNA, 260 bp, Glycine max
  unsure (1)..(260): unsure at all n locations
gacgaagtgaggaagtggatttctggtgttggtgttgacggcattgggaagaagcttgtgaactcaaaagatggacctccaacctttgagcagcccaagatgactctggagaagctcttgacgtatggtaacatgcttgtccaagaacaagagaatgtcaagagagtccaattggctgacaagtacttgaacgaggctgcacttngaaatgctaacgaggatgctattaacaggggaactttcttccaatcttgaattgg

SEQ ID NO: 291306 - DNA, 215 bp, Glycine max
  unsure (1)..(215): unsure at all n locations
attaattaattaattttntccgttttatacagcttctgtactttgctttccctttttcttatactttaattgcacttttaggatggatatnattggataataatatttttctgtcccaaatgaaaatgtctttgttgttcttgtnactgttttacttcattttcttttgcngctgaattgcaatcaatgacgaaggatgaacgattttcctgttt

SEQ ID NO: 291307 - DNA, 253 bp, Glycine max
cgatgatcatctgaggcaagttttcagccagtatggagaattagttcatgtgaagattccagcaggcaagcgatgtgggtttgtccaatttgcagacaggagctgtgctgaagaggcccttcgggtgttgaatgggacgctgttgggtggacaaaatgtgcgtctttcatggggtcgcagtccttcaaacaaacaggctcaggcagatccaaaccagtggaatggtgctgctggtgctggttctggtggtgga

SEQ ID NO: 291308 - DNA, 259 bp, Glycine max
cactcaacattttacactcttttcttcttctcgttgttgcttcggtgttgaatcatggatcagaaagtcgatttcagtgctccgcattccatgggaaccactatcatcggcgttacttacaacggcggtgtcgttctcggagccgactctcgaaccagcactggagtgtatgttgccaaccgagcatcggacaaaatcacacagctcactgataatgtttacgtgtgtcgctctggatcggctgctgattctcagattg

SEQ ID NO: 291309 - DNA, 261 bp, Glycine max
  unsure (1)..(261): unsure at all n locations
cnagnattcactgacgcatatgnagaacttgcgccacgctttgtctggtttgacatgttcttnttgagacctactttggctgacatccctgctgaggcatacaagaccctcacatctctgaatggcgtcactgcatatggatttgatttggtccgtggaaccaanactcttgatttgatcaagggtggatttcccangggaaaatacttttttgggggantgntgatggaaggancattgggccaatgactttgctgtttt

SEQ ID NO: 291310 - DNA, 261 bp, Glycine max
  unsure (1)..(261): unsure at all n locations
ctgactcacccaaacaaaaaaacaaacggacgcttctcattctctctctactcgttcagaagatgtttctcacaaggactgagtatgaccgaggagtcaacaccttttctcccgaaggccgtttgtttcaggttgagtatgcaatcgaagccatcaagctgggatcaactgcgattgggttgaagaccaaagaaggagttgtccttgcagttnaaaagcgcatcacatcgccgctcctggagcctagtagtgttgagaaaa

SEQ ID NO: 291311 - DNA, 259 bp, Glycine max
  unsure (1)..(259): unsure at all n locations
cttttcttcccttctttccagaacaacaccacaacacaaacagagcaaaaaaagctccaccaatgggcgggttacagagccgacgacgactacgactacctcttcaaggtggtctgatcggcgattccggcgtgggcaagtccaanctcctctctcgcttcaccaagaacgagttcaacttggagtccaagtccaccattggcgtcgagttcgccacccgcaccttgaacgtcgattccaaagtcatcaaggcccagat

SEQ ID NO: 291312 - DNA, 259 bp, Glycine max
  unsure (1)..(259): unsure at all n locations
cccactcactcactcacaggtaagcaatggcgggaaaaggagggaaggggcttcttgcagcgaaaaccaccgcggcgaataaggacaaagacaaggacaagaagagacctatttctcgctcttcccgtgctggaatccagtttccngtgggacgtatccataggcagctgaaacaaagggtccaagccaatggacgtgttggggcaacagctgcagtgtacttagcctcaattctagagtatctgactgctgaagttct

SEQ ID NO: 291313 - DNA, 255 bp, Glycine max
cccgcaagacaatcactcatcaatgcaggtggcattattgagcaatcatttctgcctgggccatttgctgtggagatgtcttcggcagtttacaaggggtgggttttcactgatcaagcccttcctgcggatcttatcaagagaggaatggcagtggaggatccatcctctccctatggccttcgccttgtgatagatgactacccttatgctgttgatggactagagatatggagtgctatccagacatgggtt

SEQ ID NO: 291314 - DNA, 244 bp, Glycine max
  unsure (1)..(244): unsure at all n locations
ataccttctaaggaaaggatggattccttgcttggnattcgagttggagcaacngtttcgtgtaccgtgagcacaacaggtcacctggatactatgatggacgctactggaccatgtggaagctgcctatgtttggctgcactgatgcttctcaggtgttgaaggagcttcaagaggctaanactgcataccccaatggcttcatccgtatcattggatttgacaacgttcgccaagtgcagtg

SEQ ID NO: 291315 - DNA, 254 bp, Glycine max
cgagaatgagtggcggaggagaagagggagcaactctggagttcactccgacgtgggttgtggccgccttttgcacagtcatcgtcgccatttccctcgccgctgagcgcctccttcattatggcggaaagtttctcaaagccaaggaccagaagccgctctacgaagctctccagaagatcaaagaagagctgatgcttttggggttcatttccctgcttttgacggttacacaaaacggcattaccaaaatc

SEQ ID NO: 291316 - DNA, 257 bp, Glycine max
  unsure (1)..(257): unsure at all n locations
atctatggttccactccccggaatctaccgaccccgatttcattgctgccaaccaaggagaccgtgccaacaacgtgatcaagggcacaaagaaagaacaagttcaacaaatcatcanagacattaaggagtttaaggaaagcactaaggttgacaaggtggttgtcctgtggacagccaacacagagaggtacagcaacctagttgtgggactaaacgacaccatggaaaacctctttgcttcctggacaggaacg

SEQ ID NO: 291317 - DNA, 256 bp, Glycine max
gagttttgataggtgttcgtttctgaaatttgtggcacagcaagtgagcgatggggagagcttcaagggataagagggatatctattaccggaaagcaaaagaagaaggttggcgagctcgaagtgcgtttaaactccttcagatagacgaggaattcaacctttttgatggagtgaagcgtgttgtagatttatgtgctgccccaggtagctggagtcaggttttgagtcgtaaattgtatctcccagccaagct

SEQ ID NO: 291318 - DNA, 281 bp, Glycine max
  unsure (1)..(281): unsure at all n locations
cggctagggttttagcgcanttcttctagatttaaggaagatgggtaaggaaaaggttcacatcagtattgtggtcattggccatgtcgactctgggaaatccactaccantggtcacctgatttacaagcttggaggcattgacaagcgtgttattgagaggtttgagaaggaagctgctgagatgaacaagaggtctttcaagtatgcctgggtgctggacaaacttaaggctgagcgtganagaggaatcaccattgcatattgccttgtggaagttc

SEQ ID NO: 291319 - DNA, 270 bp, Glycine max
  unsure (1)..(270): unsure at all n locations
tgcagaattcaaaganggcgtcttcataaacgcctttattctccgtttccgtttccttcccggaattcgatttttcatctctgaaaatgagagagtgcatctcganccacattggtcaggccggtatccaggtcggaaatgcttgctgggagctctactgtcttgagcacggcatcgggcccgatgggcaaatgccaagtgacaaaacagttggcggaggtgatgatgctttcaacactttcttcagtgagactggtgctggaaagcagt

SEQ ID NO: 291320 - DNA, 162 bp, Glycine max
  unsure (1)..(162): unsure at all n locations
aagatagtggatngagaccagctanaacagtgaagcaaattcttgtgggcatccaggacctgcttgatcaannaaatcctgctgaccctgcccagactgngggtnatcatctattcanccaggatgcggctgagtanaagagaagggtcngacagcattcaa

SEQ ID NO: 291321 - DNA, 272 bp, Glycine max
  unsure (1)..(272): unsure at all n locations
agtttcacagcgaagtcgtagganggtttcaaaagatggagaacatgcagagcttctggcaattgggcgatgaactccgtggacactcaaaagcatcggaggatcanaaatggntaatggttgcttcgaaattggcggaacagacaagattcaagggggagcgtgtgaacaaccttgatctttcaaagggccccattgaaacaaggtcaagggataaatttgggttccaggaagagaacaattgattctctaatttaagcnnntgaacntgg

SEQ ID NO: 291322 - DNA, 270 bp, Glycine max
  unsure (1)..(270): unsure at all n locations
cnagttttcnccatcgtaatgggttccgaaggatccagcgtcgtggttcctaggaatttcagattattggaagagcttgagagaggtgagaagggaattggggatggaactgttagctatggaatggatgatgctgatgacatatanatgcaatcttggactgggantatcatcggtccccctagtantgttcatgaagggcgtatctancagttgaaattgttttnacagnagantntctagagaatcctcctnctgntagannacaaa

SEQ ID NO: 291323 - DNA, 268 bp, Glycine max
  unsure (1)..(268): unsure at all n locations
cagaagaaaggttgattggctgactgacaagatgcgaagtcgagaccacacagtctcagcaacccatggagacatggaccagaataccagggacattattatgcgtgaattccgttctgggtcatcccgtgttttgataactantgatcttttggcccgtggtattgatgtccagcaagtgtctttagtnataaattatgatctcccaacgcagcctgagaactatctccatcgtattggacgtagtggaaggtttggtaggaaaggt

SEQ ID NO: 291324 - DNA, 216 bp, Glycine max
  unsure (1)..(216): unsure at all n locations
gcgtgccattgttcctgtctttcctccttctgagtcaaaccgtgttagagagggttttctaagaggggagcaggttcctggcgagttgcagtgcgaaccttcacaatttttnatgctttttgacactaacaatgatggactcatttcctttgcagagtacatctgtttngttacnctccgcaggataccagagtccagtgtntcattggctttnat

SEQ ID NO: 291325 - DNA, 267 bp, Glycine max
cgcaaacacgctgttcctacaatcattccaaatgtgcccttccggtcgcaccctcctcccttcctccgtctccgatttccgaccggcattcgacgtcctcgatgccgaccgcgacggcaaaatcagccgcgacgacctccgcgccttctacgccggagtcggcggcggaggagatgacgtgatcggggcaatgatgacagtggctgacaccaataaggacgggttcgtggagtacgaggagttcgagcgcgtggtctcggcggagag

SEQ ID NO: 291326 - DNA, 270 bp, Glycine max
  unsure (1)..(270): unsure at all n locations
cactccctcctcttcacacattttcttagcnctctccaacaatccctctcgttcacactttcagattgtgtgaagatgggggctggtggccgaactgctgttcctcctgccaacaggaagtcagaggctgaccctttgaagcgggtaccatttgaaaaacctcagtttagtctcagccagattaagaaggccattccanctcactgtttccaccgctctgttctccgctcattctcctangtngtttangacctcaccatagcttnngct

SEQ ID NO: 291327 - DNA, 271 bp, Glycine max
  unsure (1)..(271): unsure at all n locations
caaaatccttagtgggaggaagagatggttctgactcagaagattcacgaagctttcaaaggcaccgtcgagaggatcactggcccccgaaccgtttccgccttcaaagaaaaaggagttctcagtgtctccgagttcgtcaccgccggcgataatctcgttgccaaatgccccacctggtcctgggaatcgggtgatccaggcaagaggaagccatacttgccagctgagaaacagttcttgattactagaaatgtgncttgtcttcgga

SEQ ID NO: 291328 - DNA, 269 bp, Glycine max
  unsure (1)..(269): unsure at all n locations
caaaaaggtaaacttcngcaacaaccatggttnccaatggcagcagcaacagnatcctcccagtngattttctcaaagcctcgttgcancctcgcgtctctgccccttccaactatgngtctttgncaccaaacaagtgctgtcaagttcaagtggcaggagaaggcatgtggggggttctggagttaggtgcatggcggtgggagaagctgcaaccactgagactaagaagagaagtggatatgagcttcaaacactcantaactggt

SEQ ID NO: 291329 - DNA, 266 bp, Glycine max
  unsure (1)..(266): unsure at all n locations
cggcaacaganacaaaagtngcagtattaggtggcatcaccgaagtgcagggagctgccaacagcgtcgagatcaacaatctcgctcgctttgctgtagaggaacaaaacaaaagagagaattcagttctggagtttgtgagggtgattagtgcacagcagcaagtggtttctggagtgaattactacataacntnggnancaaaagagggtgagattaaaantgngtatngngcggggntttgggagaggggatccnangttttt

SEQ ID NO: 291330 - DNA, 253 bp, Glycine max
  unsure (1)..(253): unsure at all n locations
agaagaacaagtagttgagaactaagaaggagaagcaaatggcttcctcactgatctcttccccagctgttaccactgtcaaccgtgccggtgccggcatggttgctccattcactggcctcaagtccatggctggcttccccaccaggaagaccaacaatgacattacctccattgctagcaacggtggaagagtgcaatgcatgcaggtgnggncncccanntnggcnngagattnnngatcnntngccgg

SEQ ID NO: 291331 - DNA, 263 bp, Glycine max
  unsure (1)..(263): unsure at all n locations
cancaagcaggtctcctcaggaagcccatggtacggcccagaccgagtcaagtacttgggcccattctctggcgagcccccgtcctanctaaccggtgagttcccaggcgactanggctgggacactgctgggctttccgcagacccagaaaccttcgccaagaagcgtgaactcgaagtgatccactccaggtgggccatgctcggagccttgggctgcgtcttcccggagttgctgtcccgcaacggggtgaagttcggag

SEQ ID NO: 291332 - DNA, 262 bp, Glycine max
  unsure (1)..(262): unsure at all n locations
ggccatgttgggtgttgcaggaatgttgcttcctgaggttttcaccaagtttggaatcatcaatgcccctcaatggtatgatgctgggaaatcagagtactttgcatcttcctcaaccctcttcgtgatcgagttcatcttgttccactacgtcgagatccgaagatggcaggacatcaagaaccctggctgtgtcaaccaagacccnatcttcaagcaatagagcttgcccccanatgagtgtggatacccnggtagtgtc

SEQ ID NO: 291333 - DNA, 261 bp, Glycine max
  unsure (1)..(261): unsure at all n locations
aattttttagttaaacaatgtccatggccatcattaacacttttggaaacgttggtgtctantatattgtattattattatcatggtttctcgtatctggtgtgtgtgtttggggacgacccgccacttttctgcaagactttgaaatcacgtggtcagagactcatatcaggcaaattgatcaaggcagagccanccaactcattctagaccaaaactctggttgtngctttgcctccaagagtaagtacatgtttggcc

SEQ ID NO: 291334 - DNA, 264 bp, Glycine max
  unsure (1)..(264): unsure at all n locations
ccgaggtccgctggtgctcctgcaacatcttctccacccaggaccacgccgccgccgctattgcccgcnacagtgccgccgtcttcncctggaagggtgagaccctccaggagtactggtggtgcaccgagcgcgccctgcgactggggccccggtggtggacccgacctcatcgtcgannacggtggtgacgctacccttctcatccaggaaggcgtcaaggccgaggagctctatgagaagaccggcgaactccccgancct

SEQ ID NO: 291335 - DNA, 266 bp, Glycine max
  unsure (1)..(266): unsure at all n locations
ttgaagttgaagtcttgcccttctctcttcaactccaaacacaagacatcatcatccatgggctgcctccgtctccantgtcggagctgtcaacagagctcttttgaacctgaatgggtctggacctggggtttcagctcccagttcatccttctttgggagcagcttgaagaaggttatnggctcaagggncccnaanacaaagnttnccggggnngcnanangattgtggtntagaagagannatgagttnccagcgcccccnt

SEQ ID NO: 291336 - DNA, 187 bp, Glycine max
  unsure (1)..(187): unsure at all n locations
gggaatgcttancggtcntgttancantctcaannggtcctttgttagaaatgaccaacctagatctgagaccanctaccagattgctttgtctatcaaggacgangtggaagaccntgaaaaggctggcatcantgtnatccaaattgatgaagctgcttggagagagggttncccagtgangaat

SEQ ID NO: 291337 - DNA, 259 bp, Glycine max
  unsure (1)..(259): unsure at all n locations
ggatgacgagatcaagtcatggctagcatttgctgcacaaaaaattgttgaagttaacgcattggctaaggcattgtctggcaacaaggatgtggccttcttctctgctaatgctgcagctcaggcttcaaggaagtcctctccaagagtgaccaacgaggctgttcagaaggctgctgctgcattnaagggttcagntcancgncgtncaacanntcncagccnnantgganantcncnaaaaaaggctcncccnncc

SEQ ID NO: 291338 - DNA, 256 bp, Glycine max
  unsure (1)..(256): unsure at all n locations
cgctgatagggaaaaacttagaaccttgtntgtcttcctgggagantgtttgangttgattgtngcggataatgaagtgggaagtttaaaacaagccttggaaggtaaatatgtggacccagggcctggtggtgacccaataagaaatccaaaatncttgccaanaggaaagantantcangcccnggaccctcaatctatgcctanaactgcagcgntccagagtggcaaaatagngttgataggnganncccng

SEQ ID NO: 291339 - DNA, 262 bp, Glycine max
  unsure (1)..(262): unsure at all n locations
ggncctttcggggtggaggatactgtgcacgcagcaggtcctctnttagccctcattggattcttgcttttcccattgatatggagtgttcctgaagctttgatcactgctgagatgggtaccatgttccctgaaaacagtggttatgtggtttgggtttcgtctgctttgggtccctattgggggtttcaacaaggttggatgaaatggctgagtggggtgatagacaatgcattatacccagttctatttcttgactanc

SEQ ID NO: 291340 - DNA, 257 bp, Glycine max
  unsure (1)..(257): unsure at all n locations
cagagctcttttgaacctgaatgngtctggacctggggtttcagctcccagttcatccttctttgggagcagcttgaagaaggttattggctcaagggtccccaacacaaagatttcctctggaagcttcaagattgttgctgtagaagagaaganagagattgaaganacccagcagaccgacaaggacagatggaagggtcttgcctatgatatctcagacgaccaacaggacatcacaagaggaaagggtttgg

SEQ ID NO: 291341 - DNA, 175 bp, Glycine max
  unsure (1)..(175): unsure at all n locations
agccatcatcatgggagcagtgattctcccagatctcggcaccgagattttgattccggtctgcgccatcattggaatagggttcgccctcttccagtgggtcctcgtctccaaggttaagctctccgctgccagagangcttcccnnaacgnggcgnnannaanggtacatcnt

SEQ ID NO: 291342 - DNA, 261 bp, Glycine max
  unsure (1)..(261): unsure at all n locations
gcagaagaacaagtagttgagaactaagaaggagaagcaaatggcttcctcaatgatctcttccccagctgttaccantgtncaaccgtgccggtgccggcatggttgctccattcantggcctcaagtccatggctggcttccccaccaggaagaccaacaatgacattacctccattgntagcaanggtggaagagtgcnangcatgcaggtggggccaccagttggcaagtaagatcnttgantcttttnnnanttnt

SEQ ID NO: 291343 - DNA, 259 bp, Glycine max
  unsure (1)..(259): unsure at all n locations
attcttcatggaatgatgagaagcngctccaggatatgtaccttagccgaaagtctttcgnttttgactgcnatgcgcctggtgcaggcatgacaganaaaagaaaggtctttgagatggctctgagcacagcagatgccacattccaaaaccttgattcatcagaaatctccctcactgatgtcagtcattactttgactcagatccaacaaacctggttcaaagtctaagaaaagatgggaagaagccaagtggcat

SEQ ID NO: 291344 - DNA, 259 bp, Glycine max
tctattcaattcatctatggctgcctcttcttatgctatgcaatcaatcctggcaaaccctttgatccgcatttgccagcgggtctagggtgaaccaatttggcgttcctgctttgcacatgagaaggaatgttggcctgagagttaggtccatggctaaggaagaacaaccaagtgagcctggcaaccccagttacaccgccaccatcagtagaacccaagccacagccagtctctgctccttcaccaaaggtgagca

SEQ ID NO: 291345 - DNA, 260 bp, Glycine max
  unsure (1)..(260): unsure at all n locations
ctgtagtccctgtgccaccattaccacccattgtgactccaccaaaccctccaagtgaaacaccatgtgnnnnnnnnnnnnnnnnnnnnngtggtgccatatccaccaccagcacaaccaacatgccccattgacagcctaaaactgggggcatgtgtggatgtgctcggtggcctcatacacattggcataggcagcagtgccaagcagacatgttgtccagtgcttgcagggcttgtggacttggatgctgcagtgtg

SEQ ID NO: 291346 - DNA, 262 bp, Glycine max
  unsure (1)..(262): unsure at all n locations
gtagttgagaactaagaaggagaagcaaatggcttcctcaatgatctcttccccagctgttaccactgtcaaccgtgccggtgccggcatggttgctccattcactggcctcaagtccatggctggcttccccaccagaaagaccaacaatgacattacctccattgctagcaacggtggaagagtgcaatgcatgcaggtgtggccaccagttgnccaagaagaagtttgagactctttcctacctgccagacnttgatga

SEQ ID NO: 291347 - DNA, 270 bp, Glycine max
  unsure (1)..(270): unsure at all n locations
ctnatcatttccaagctggangagattgctcanttggttantttttcggtgaggaagaaggactgtagggtgagtttggagggtaccagacagggggttagggggcctttgactattgctgccgagatatttgagttgacaccttctttggnngtagnggangtgnngaanaanggaggacatagagctgagtatgagangttttgtaaaaatgagttggnagcctggactgcaggaatttgatngtggangatctgctacttcttcana

SEQ ID NO: 291348 - DNA, 267 bp, Glycine max
atgggtgtaccaacaagggtcaagtgccatggctaaaagcaccaacagcgagaggatgaagcagaacctggacatatttgattttgtgctgagtgaagaggatttagagaggatcagtcaggttccacaacgcaggcaatacacaggggacatatggctatctgaaaatgggtcttgcaagaccttggaagaactttgggatggagacgtttaagtatttctccaaggataaaactatgttttgggatataaactcagaaaataagc

SEQ ID NO: 291349 - DNA, 268 bp, Glycine max
  unsure (1)..(268): unsure at all n locations
ctgctccccaagtctcgttggctcgtcagaactacgctgatgagtgtgaatctgcgattaacgagcagataaatgtggaatacaatgcttcctacgtgtaccactccttgtttgcatactttgacagggacaacgtggctctcaagggatttgccaagttcttcaaggaatctagtgaggaagaaagagagcacgctgaaaagctcatganatatcagaacactcgcgggggaagagttgtacttcaccccatcaagatgtcccctca

SEQ ID NO: 291350 - DNA, 256 bp, Glycine max
  unsure (1)..(256): unsure at all n locations
aagacctcacatctctgantgtncgtcantgcatatgggtttgatttggtccgtggaagcatactcttgatttgatcaagggnggatttcccagtggagaatacctctttgctggagtggttgatggaangaacatcngggccaatgaccttgctgcttctcncactacatgcagggtcttgagggcattgtgggcaaagataagcttgttgtgnccacctcnncctcccttctcacactgctgtngatcntgtna

SEQ ID NO: 291351 - DNA, 262 bp, Glycine max
  unsure (1)..(262): unsure at all n locations
ggccaggcaagccccactcaaccaccacacaagtcntcgtcacacgctgacccctttctggtnttnttgtanntttcaagntttaaaagtataaagatggcagagacattcctatttacctcagagtcggtgaacgagggacaccctgacaagctntgcgaccaaatctccgatgctgtcctcgacgcttgcctcgagcaggacccagacagcaaagttgcnngcgaaacatggcaccaaaaccaattggtcatggtnttcg

SEQ ID NO: 291352 - DNA, 253 bp, Glycine max
  unsure (1)..(253): unsure at all n locations
acactcataacacaaagcacaaagcaaagctcatccttgagttaaaaaatggcagcagcttcttccatggctctctcatccccatccttggctngcaaggccgtgaagctgggcccatcagccccagaagtgggaagggtgagcatgaggaagaccgtcaccaagcaggtctcntcaggaagcccatggtacggcccagaccgagtcaagtacttgggcccatctctggcgagcccccgtcctactaaccggt

SEQ ID NO: 291353 - DNA, 266 bp, Glycine max
aaaggacattcattcatctatggctacccttattgctcccagcaaccactctccccaagaagatgctgaagctctgcagaaaggcttttgaaggatggggaactgatgagaacactgtcatagtaattttgggtcatagaactgtgtatcagaggcagcaaatcagaagagtttatgaggaaatttaccaggaggatcttgtgaagcgcctagagtctgagatcaaaggagactttgagaaagccgtgtaccgatggatactggaa

SEQ ID NO: 291354 - DNA, 263 bp, Glycine max
gtcagaacaacttgtggaggctgatggtttgatatttggttttccttctcgttttgggatgatgccgagccagctcaaggccttctttgatgcaactagtgagctatgggcatcccaagcacttgccggcaaacctgctggaatcttctggagtactggtttttatggtggaggccaagaactatcagcattgacagctataactcaattagctcatcaggtatgctttttgttccctttggatacacctttggaagtggcag

SEQ ID NO: 291355 - DNA, 243 bp, Glycine max
  unsure (1)..(243): unsure at all n locations
tgcttgtgcatttatctcacttggaactatttttttatccccccctcccccgantttcttttcctttgccctttaataaggtatgcatgcgggattgcccaaatatgtccatgtaaatctgagagacatagaagatgctaaatttaaggaaggggaagaagtgtctctagagtcactgaaggcgaaaggtgtgattaatccatcaggaagagaaaggagacttcctttgaagatcttgggtga

SEQ ID NO: 291356 - DNA, 265 bp, Glycine max
  unsure (1)..(265): unsure at all n locations
tatcacatagcagaatggcttctactcantgtttcttgcaccaccatgctcttaccacccctgccagatcccccatcacaacgcatcatngttagcaccaagcctaaccagcttgtttgcaaggcacagaagcaagaggatattgatgtcagcccaatctctcgccggttagctctaaccgtgctcattggtgctgctgctgttggctccaaagtnccaacctgctgatgcagcttnatggggaagctgccaatgtntttggaaa

SEQ ID NO: 291357 - DNA, 259 bp, Glycine max
  unsure (1)..(259): unsure at all n locations
gntactaaganttgctgcttcttcagccantccgcacctcgcagcctctgtgccctcaacaaccatggctgaaatcgaaactaccgttccagatcccacccaaatcgacgtcaaactcttcaatcgctggagcttcgaggatgttgaggttaatgatatntctctggctgattacattggagtgtccccatcaaagcatgctacatatgttcctcacactgctggtaggtactncagtgaagaggttcaggaaagcgca

SEQ ID NO: 291358 - DNA, 223 bp, Glycine max
  unsure (1)..(223): unsure at all n locations
cttggtatctggggaantaagggacaaggaaactctttccaatgtgagcttntctttgccangatgggaatcaaccccatcatgatgagtgctggagagttggaaagtggaaatgcaggagagccagcaaaactgatcaggcagagataccgtgaagccgcagacttgatcaagaagggaaagatgtgtgctctcttncatcaacgatcttgatgcaggagct

SEQ ID NO: 291359 - DNA, 281 bp, Glycine max
  unsure (1)..(281): unsure at all n locations
agtttttaccaatggctgctgcggttagtgctgcagtctcttttccatccaccaagtctacctctctcccaagcaggacctccatcattaccccagagagagttgtattcaagaaggcttcattgcaatacagagatgtttgtagcagtggaagggtagtttccatcagagctcaagtcaccactgaggctccagccaaggttgaaaaagagtccaagaaacaggatgaaggtgtggttgtgaacaagttcaaacccangaccccttacgttggtngangc

SEQ ID NO: 291360 - DNA, 274 bp, Glycine max
gcagttcctctttccagctttgttgtcaccaatgcctcttcttctcgcttttccatgagtgctgattggatgcctggccagcctagacccccctaccttgatggttcagcacctggtgactttggattcgaccctcttcgtcttggtgaagtaccagagaatcttgagaggttcaaagagtcagaactcattcactgcagatgggccatgcttgctgttccagggattttggttccagaggcattgggcttaggcaactgggtaaaggctcagg

SEQ ID NO: 291361 - DNA, 271 bp, Glycine max
ccaaaacccagcctcaccctcgctctcggtgcccaaatcctcgacgagaactactcccttggaaaatcacttcaccaccgacaacatcgttagtttagcatccaagggtgctcccaatgacgccatcaacgttgttctaacattctcggacgtaaccgttgaggggttctgttccagtaggtgcgggactcacggctcctcggtgggtcatggcaagttggcttacgtgtgggtggggaatcggagacgcatgcccgggccaatgcgcatg

SEQ ID NO: 291362 - DNA, 271 bp, Glycine max
  unsure (1)..(271): unsure at all n locations
ctccttccaagttctaaccatttcccactgtcttcgattttagggcattaaatctgccatggcagcagcacccgctagagctcgtgccgattacgattacctcatcaagcttcttcttatcggcgacagggtgtggggaanagttgtctacttttgaggttttctgatggctcattcacaaccagttttatcaccaccattggtatcgattntaagataagaaccattgaactagacagcaaacggattaagtnacaaatctgggatactt

SEQ ID NO: 291363 - DNA, 264 bp, Glycine max
accacaaggagcaggacccaacttgttgcaactttcaaccgctacagagagatccatggcacttccatctctaagaaactggtggatgaaggatctgatgagtttcaaagggcattgtacactgccattcgtggcatcaaggatcctattaagtactacgaaaaggtggtgcggaatgcaatcaaaaaggttggaactgatgaggatgcactcacccgtgtggtcgtgagccgggctgagaaggacttgaagatatctcagagg

SEQ ID NO: 291364 - DNA, 263 bp, Glycine max
  unsure (1)..(263): unsure at all n locations
ctggtccttcaggtccaccagtaacaactgttcctaatcagaattctgnactggttctanctcctnatgttcctgatataatggttacaccccctgaggatgaccatttaaggcatgtaattgatacaatggctttgtatgtcctggatggaggatgtgcttttgaacaagcnattatggagaggggtcgtggcaatcctcttttcaatttctngtttgttcttggctcaaaggaacatacctactacgtttggagactctat

SEQ ID NO: 291365 - DNA, 263 bp, Glycine max
  unsure (1)..(263): unsure at all n locations
cgancagccacacctcccgcagcagccatggttctcaaaactgaactatgccgnttcagtggtgccnagatctacccaggaaagggcatcagatttgttcgtngtgattcnaggttttnctgtttgcnaactcaaaatgtaagangtatttccacaatcgcctgaagccttcaaagctcacctggactgcaatgtacagaaagcaacacaaaaaggacattgctcaagaagctgtgaggaagaggagacgtgctgccaaaaag

SEQ ID NO: 291366 - DNA, 269 bp, Glycine max
cattgacaacgtcaaggccaagatccaggacaaggagggaatccccccagaccagcaacgtctcatcttcgccggaaagcaacttgaggacgggcgcaccctcgccgactacaacatccagaaggaatcaacccttcacctcgtcctccgtctccgtggtggcatgcagatcttcgttaagaccctcaccggcaagactataaccctagaagtcgagagtccgacaccatcgacaacgtcaaggctaagatccaggacaaggagggtat

SEQ ID NO: 291367 - DNA, 267 bp, Glycine max
  unsure (1)..(267): unsure at all n locations
aattcctagtnaagcacccacaattattgaagattctcgccctccattctcatggccagaaaatgggacaattgaaataattgatttgaaggtccgttacaaggagaatcttcctatggtgcttcatggagtaacatgcacatttccaggtggaaagaagattggaatagttggacgtactggcagtggaaaatctactttaattcangcgttatttcgattgattgaaccagcaagtgggagtatccttatagacaacattaatat

SEQ ID NO: 291368 - DNA, 268 bp, Glycine max
caagacatcacaagaggaaagggtttggttgactcccttttccaagctccacaggatgctggaactcactatgcagtcatgagctcctacgagtacctcagcactggacttcgccagtacttggacaacaaaatggatggattctacattgctccagcttttatggacaagcttgttgttcacatctccaagaacttcatgaccctgcccaacatcaaggttcctctcattcttggtatctggggaggcaagggacaaggaaaatctt

SEQ ID NO: 291369 - DNA, 266 bp, Glycine max
  unsure (1)..(266): unsure at all n locations
cgttcgtgttcttcgtcgcaaattcaaaggaggatctctcttgcgttttctctaggttttcgctatggcgtcgaagcgaattttgaaggagcttaaggatttgcagaaggatcctccaacatcttgcagtgccggtcctgttgttgctgaanatatgttccattggcaagctacaattatgggtcctccagacagtccctatgcaggaggtgttttcctagtgaccattcatttccccccagattaanccctttaagccacccang

SEQ ID NO: 291370 - DNA, 259 bp, Glycine max
ataacacaaggcagaaagcaagctcatcctagagttttaaaaatggcagcagcctcctccatggctctctcttccccatccttggctggcaaggccgtgaagctgggcccatcagcccccgaagtcgggagggtcagcatgaggaagaccgtcaccaagcaggcctcctccggaagcccatggtacggcccagaccgcgtcaagtacttgggcccattctctggcgagcccccgtcctacctcactggcgagttcccag

SEQ ID NO: 291371 - DNA, 264 bp, Glycine max
  unsure (1)..(264): unsure at all n locations
tcgagtgagttcgatagcttcgacgaagtgcgtggtctctttgaaggtggaatcaagctcgccaacaaatatactgagccanattagnnccttaccagtcctcaaggaaatcttccgcactgatggtgaaantacccttcaatttccagcacctcatgtaatcagagttagtaaatctggatggntgactgatgatgagtttgcaagagagatgattgctggtgtaaatccaaatgtaattcgtcgtcttcaagagttcccacc

SEQ ID NO: 291372 - DNA, 259 bp, Glycine max
  unsure (1)..(259): unsure at all n locations
gctgaacggaaagatccaccttctntgnatcttcccgcaagatccttnaatcgttcaccctttctgtttgatccgaacgcgctcgcgtggtgcccgctccctctcatgccctgcaacccccacgtgtacggcctctgcaacttcgccgccgtctccctcgggtcccacctctacgtcctcggtgggtccctcttcganangcgctccttccccatngatggnccctggnnntcttncgcnagntgnggttnaggttnga

SEQ ID NO: 291373 - DNA, 263 bp, Glycine max
  unsure (1)..(263): unsure at all n locations
tttggcaaagttgttaacacaaaatgcaatgttggggcaaatagaaatcaagcttttattgaatttgcagatttgaatcaagccattgcaatgatatcatactatgcctcatcatcagagcctgctcaagtacgagggaaaactgtatacctacaatattcaaataggcaaganatagtgnntaacaaaactgctgcagntgttcctgggantgtnttgtggtaacgattgagggtgcagatgcacgtcttgtcagcattgnt

SEQ ID NO: 291374 - DNA, 263 bp, Glycine max
  unsure (1)..(263): unsure at all n locations
aataatgctcaatctgttgatagatccagtcatcattcttcaacaacagtttcatctgtggccaagtctctgctccctacaaagaggaggctccgccttgatccttccaacaagctctactttccatatgaacctggtaagcaagttaggagtgcaatcgcaattaaaaacacttgcaagtctcatgtagctttcaagtttcaaacaactgcacccaagagttgttatatgcngccctcctgggggtaatcctggccccgggg

SEQ ID NO: 291375 - DNA, 259 bp, Glycine max
  unsure (1)..(259): unsure at all n locations
aaacagtgagtcataaganagcattatcgaatgacgatgagcactatacaatcgacgccagganagctcagggtatttggatttgtttcctgaccgaaaaatgtcantttttaagaacccttatattctcggactaactgcagttgctggcattggtggcatgctttttggctacgacacaggtgtgatatcaggagcccttctatatattaaagatgattttnaaggggttagacaaagtaatttacttcaggaaaca

SEQ ID NO: 291376 - DNA, 256 bp, Glycine max
ttacgccgtcgttttgtcgtcgaggtcgtcgctttgtctgacaacgtggagggggttcgcgtccggatctgacgaaaacgacgtcgtggtcatcggcggcggtcccggcggctacgtggcggccattaaagcggcgcactgggtctgaaaaccacttgcatcgaaaaacgtggcactctcggcggtacctgcctcaacgtcggatgcatcccttccaaggcacttttgcattcttcccacatgtatcatgaggcta

SEQ ID NO: 291377 - DNA, 257 bp, Glycine max
  unsure (1)..(257): unsure at all n locations
cttgagaaagatccgaagaatctccaaatgcttcaggacatgtacaatcaatggcctttcttcagggtcaccctggacttggttgagatggtgtttgctaagggagacccggggattgcagccctatttgacaaactcctagtatcagaagagctgcgtccatttggagaaaatttaagagcnaaatacgangatttggttgatgccatagacaaagttcgatctagctaagaatatataaaagtattctctctctc

SEQ ID NO: 291378 - DNA, 266 bp, Glycine max
  unsure (1)..(266): unsure at all n locations
cactgtcggagctgtcaacagagctcttttgaacctgaatgngtctggacctggggtttcagctcccagttcatccttctttggnagcagcttgaagaaggttattggctcaagggtccccaacacaaagatttcctctggaagcttcaagattgttgctgtagaagagaagaaagagattgaagagacccagcagaccgacaaggacagatggnagggtcttgcctatgatatctcagacgaccaacaggacatcacaagaggnt

SEQ ID NO: 291379 - DNA, 236 bp, Glycine max
  unsure (1)..(236): unsure at all n locations
catagagcacagaacggtggaagtgaacggcataaagatgcatgttgcagagaaaggagaaggagcagtggtgttgttcttgcacggcttcccagaactctggtactcatggcgccaccagattctagctctgagctccctcggttaccgtgcggtggcacctgatctccgtggctacggtgacacagaggccccttctacggtgaacagctacacgtgttttcatcnggtgggtg

SEQ ID NO: 291380 - DNA, 267 bp, Glycine max
  unsure (1)..(267): unsure at all n locations
cgagaggccttccctctctctcaaggaactcttcttcattcagagtngtggccagtggcaagaagatcaagactgacaaaccttatggaattaatggtggcatggctttgagggatggaactgatgcatctggcaggaaaggaaagggaaagggtgtttaccagtttgtagacaaatacggtgctaatgtcgatggttacagtcctatctacgacaccaaggactggtctccaaccggtgatgtctacgctggcggtacgactggct

SEQ ID NO: 291381 - DNA, 264 bp, Glycine max
agcagaagaggaagatgctggtgagtgaatcgagtggttcgaaggtggatcttccggaggagttgctaaatgttctaccgtccgatccttacgagcagctcgatgtggcccgcaagatcacctccgttgcgctgtcgacacgtgtcgacgcgctccaatcagagtcgtccgctctacgcgccgaactcgccgataggaaccggctcatcgccgagctccagtctcaggtggagtccatcgacgccgctctctccgaagccgccg

SEQ ID NO: 291382 - DNA, 266 bp, Glycine max
  unsure (1)..(266): unsure at all n locations
cgattatagaggagcatatcttgatggtgtcatcagatttctagtgaacaataatgccccattaatggttaatgtgtactcttacttcgntaacactgcaaaancctaaggacattangtcttgactatgcaccttttaggtctccttcggtggtagtgcaaganggttcnctgggtgaccggaagnnntnggatgttnggtgnatggtntttangctgcantggagnaagcnggaggagggtcattgaacatagttgtgtctgag

SEQ ID NO: 291383 - DNA, 264 bp, Glycine max
  unsure (1)..(264): unsure at all n locations
cgggagatgggtcatctctatgctttggactttgatggagttatctgtncatagctgtggtgagacagctatctctgctcttaaggctgccaaattgagatggcctcccttgtttgatggtgtggattcaaccatagaagattggattgttgaccagatgattacagtacggccagtngtggaaactggatatgaaactcttttactcgtgaggttgttgcttgagactagagttccatccatcaggaagtcttcggtttcgga

SEQ ID NO: 291384 - DNA, 220 bp, Glycine max
  unsure (1)..(220): unsure at all n locations
tcttagntctcttcttnctctancgccgnacgccgaaaccatggccggaaaaggagagggtcctgctatcngaatcgatctcgganccacctactctngcgtcggtgtgtggcaacatnaccgcgttgaaatcatcgccaacgaccaggggaacagaaccacgccgtcttacgtcggattcactgacaccgagcgtctcatcggtgatgcggccaagaat

SEQ ID NO: 291385 - DNA, 263 bp, Glycine max
  unsure (1)..(263): unsure at all n locations
tgagtgaatagggatcatngatgtggaggctgaagatagcagatggaggaaatgatccatacatattcagcacaaacaatttcgtccnggaggcagacatgggagtttgatcctgaagcaggcagtccagaggaangggcccaggttgaagcagctcgtcagcatttctaccanaaccgcttcanggtcaagccctgcgctgacctccnttggcgttnncaggttntnngagaaaataacttcaaacaaacaattcctcgtgt

SEQ ID NO: 291386 - DNA, 263 bp, Glycine max
  unsure (1)..(263): unsure at all n locations
cgaagcttgttggaccatatccaatatcacagctggtaataaacagcagattcaggctgtgattgaggctaatctaattgctcctttggtcaatctgcttcaaaatgctgagtttgatatcaagaaagaagctgcttgggctatctcaaatgctacatccggtggttctcatgaacaaatcaagttcctagtaagccaagggtgtattaagcccttgtgtgatcttctcatctgtccngatcctagaatngttacagtttgtc

SEQ ID NO: 291387 - DNA, 266 bp, Glycine max
  unsure (1)..(266): unsure at all n locations
ctaagctttaaccatgtctgcctttgttggaaagtacgcagatgagcttatcaagaatgccaagtacatagccacacctgggaagggcatcttggcagcagatgagagcactggcaccattgggaagcgcctatcgagcattaacgttgagaacattgaggccaaccgccaagctcttcgcgagcttctctncaccgctccagatgccctccaatacctctctggtgtcatcctctttgaggaaactctttaccagaaaacctccg

SEQ ID NO: 291388 - DNA, 263 bp, Glycine max
  unsure (1)..(263): unsure at all n locations
ttgaagcgaccgacgagtcttgtgtgtgacctcaaaaccctgccgtcagtcaccgtcttctctgccgccatgaagcttgtcaggtttctcatgaagctgaacaacgaaaccgtttcaatcgagctcaagaacggaacagttgttcatggcaccattacaggtgttgatatcagtatgaatacacatttgaaaacagttaaactaactctgaaagggaaaaacccattnanttnggatcatcccagtgtgagagggcaacanct

SEQ ID NO: 291389 - DNA, 259 bp, Glycine max
  unsure (1)..(259): unsure at all n locations
cttgctactgagtttccacactgcataccttacgtcttccgaatncgaagttaatttgcaagatggctaaggaaaaggctcagatcaacattgtggtggttggtcatgtggaccctgaggaggcaaccaccattaacgagctgaagaagcctgttgtggagaaagaagctccagggcatgccatatgagggcatgcacgtacggcctcggaggggaaccagaaaattatgttaacaaattaatntggaaccctattgta

SEQ ID NO: 291390 - DNA, 259 bp, Glycine max
  unsure (1)..(259): unsure at all n locations
cntgatgttggtggttgtnaggngcagattgaaaagatgcgagangttgttgagcttcccatgctccaccctgagaaattcgttaagctaggaattgatcctccaaagggtgttctttgctatggtccaccagggactggcaaaacacttttagctagggctgtggctaataggnctgatgcttgtnttataagagttatnggaagtgagcnagtccagaatntgttggtaagggtccncaattgntcggnaacttttt

SEQ ID NO: 291391 - DNA, 260 bp, Glycine max
cagctcccaagggcctctctgcctcttcaccactccacctcctgccttctaagaggcaatttagcttcactgttagggccatccaatcagaaaagccaacctatcaagtgattcaaccaatcaacggtgatcccttcattggaagccttgaaaccccagttacatccagccccttgattgcatggtacttatcgaacctccccgcatacaggaccgcagtgagcccactactaagagggatcgaggtgggcctggcccat

SEQ ID NO: 291392 - DNA, 257 bp, Glycine max
  unsure (1)..(257): unsure at all n locations
ganaaacaagtagttgagaactaagaagaaggaaatggcttcctcaatgatctcctccccagctgttaccaccgtcaaccgtgccggtgccggcatggttgctccattcaccggcctcaaatccatggctggcttccccacgaggaagaccaacaatgacattacctccattgctagcaacggtggaagagtacaatgcatgcaggtgtggccacccttggcaagaagaagtccgagactctttcctacttgccaga

SEQ ID NO: 291393 - DNA, 257 bp, Glycine max
  unsure (1)..(257): unsure at all n locations
gaagaacaagtagttgagaactaagaaggagaagcaaatggcttcctcaatgatctcttccnncagctgttaccactgtcaaccgtgccggtgccggcatggttgctccattcactggcctcaagtccatggctggcttccccaccaggaagaccaacaatgacattacctccattgctagcaacggtggaagagtgcaatgcatgcaggtgtggccaccatttggcaagaagannttgccgactctttcttantgc

SEQ ID NO: 291394 - DNA, 254 bp, Glycine max
  unsure (1)..(254): unsure at all n locations
ctggagcaaacttttatagaacaaganacatgatagtnacgaatttgggtgctaaaccacttgtaattcagttaccaattggttcagaagataactttaagggagttatagaccttgttaggaataaggctatagtttggtctggagaagagctgggtgccaagtttgatattgtagatattccagaagatcttcaagagcaggctcaggattaccgtgcccagatgataganacatagttgagttngatgacc

SEQ ID NO: 291395 - DNA, 261 bp, Glycine max
  unsure (1)..(261): unsure at all n locations
cgcncataccggttctgaaatatttaaggaatgcntgaggngagctctaaaaggcaagaccattattcttgtaacgcaccaagtagatttcctacataatgtggatcaaatattggtgacgagggacggtatgatagttcaatcagggaaatacgatganttattagattcnggaatggnttttaaagctctggtagttgcacntgagncnccnagggctctantagngcngggncagggtggggcnatnctngtgaaaat

SEQ ID NO: 291396 - DNA, 258 bp, Glycine max
  unsure (1)..(258): unsure at all n locations
ctcgttagtcgtttgtaacgcctttgtttgcnttttttgcacagangaattaacacatatatagcaagcatggcagtcacactctacgaccttagctctgcctctgggttgaagaagcttgatgagtaccttctcccacgcagctacatcaccgggtaccaagctacaaaggatgatcttactgtttatgcagctttgccaactgctccatcagatgaatatggaaatgtttccaggtggtacaagcacattgatgct

SEQ ID NO: 291397 - DNA, 256 bp, Glycine max
ctcactcactcactcacaccgttccatttctcaacaacttctgctacttcctactccaaccgcacttctgttccgcaattatcatgggcaaggtcaagatcggaatcaacggatttggaagaattggccgtttggtagccagagtggctctgcagagagacgatgttgaactcgttgccgttaacgaccctttcatcaccaccgattacatgacatacatgtttaaatacgacagtgttcatggacactggaagct

SEQ ID NO: 291398 - DNA, 261 bp, Glycine max
  unsure (1)..(261): unsure at all n locations
aaaacactcataacncanagcacaaagcaaagctcatccttgagttaaaaaatggcagcagcttcttccatggctctctcatccccatccttggctggcaaggccgtgaagctgggcccatcagccccagaagtgggaagggtgagcntgaggaagaccgtcaccaagcaggtctcctcaggangcccatggntangggcccagacnggntcangtacttgggccattttnggggacccctgttntanttaangggggntt

SEQ ID NO: 291399 - DNA, 259 bp, Glycine max
caagtgagggaggttgaaggcggcgtgagaagcatgttggacatcaacctattcagagaggagaagggccacaaccctgaattcatccgcgaatcccagcgccgtcgtttcgccagcgtcgaagtcgtcgacgaggtcatcaatctcgacaaagaatggcgaaagcgtcaattcgagttggagaatctccgcaaagaatttaacaagatcaacaaggaagtctccaaactcaagcgtgctggcgaggatgcaactaagt

SEQ ID NO: 291400 - DNA, 256 bp, Glycine max
  unsure (1)..(256): unsure at all n locations
gagaagtgagatacactaagttatcctcataaatacactctaattaggtggcaagataagtgtctaaccttagtaacantgccacatattgtgttcattttggaattgtgccactaaaattctattcaattcatctatggctgcctcttcttatgctatgcaatcaatcctggcaaaccctttgatccgcatttccagcgggtctagggtgaaccaatttggcgttcctgctttgcacatgagaaggaatgttggc

SEQ ID NO: 291401 - DNA, 257 bp, Glycine max
  unsure (1)..(257): unsure at all n locations
ccatcatcaaagttttttcctttctctgctctttgccttctctgacacatttggtgccttgtagagcgtgttttggcaggaaggtggtatggcgaaggacgttgaggttgctgagcgtggctccttctctgggaaggactaccaggaccctccaccagcaccactcattgatgctgaggagctcacaaagtggtccttttacagggctctcattgctgaattcattgccantttgctcttcctcnaattnactgtgt

SEQ ID NO: 291402 - DNA, 257 bp, Glycine max
  unsure (1)..(257): unsure at all n locations
cactgacccaatctacccaggtggcagcttcgacccattgggccttgctgatgacccagaggcttttgctgagcttaaggtgaaggaactcaagaacggacgattggccatgttctctatgtttggcttctttgttcaggccattgtcaccggaaagggtccattgganaacctcgccgatcaccttgctgaccctgtcaanaacaacgcctgggcctatgccancaanttccgtccccggaaagtgagcgtcaaag

SEQ ID NO: 291403 - DNA, 250 bp, Glycine max
tctgccatcgggatatcaagcctcaaaatctattggtcaatccacacactcaccaggttaaattatgtgactttggaagtgcaaaggttttggtaaaaggcgaaccaaatatatcatacatatgttctagatactatagagcacctgagctcatatttggcgcaactgaatatacttcagccattgacatctggtctgttggatgtgttttagctgagctgctgcttggacagcctctgttccctggtga

SEQ ID NO: 291404 - DNA, 258 bp, Glycine max
  unsure (1)..(258): unsure at all n locations
gggatcagggatgtcggaggctgaagatagcagatggaggaaatgatccatacatattcagcacaaacaatttcnncnnggaggnagacatgggantttgatcctgaagcaggcagtccagaggaacgggcccaggttgaagcagcncgtcagcatttctaccacaaccgcttcaaggtcaanccctgcgctgacctcctttggcgttttcaggttctcagaganaataacttcnnannancaattccnnngngggac

SEQ ID NO: 291405 - DNA, 253 bp, Glycine max
  unsure (1)..(253): unsure at all n locations
aaccggtagtacaaaaggtgcggctattctgaaggactgggagaagtatttatcactattttggcagctggttccacctagtgaagaggatacccctgaggcaaatgccaagtatgacacaactacggcagatcaggtcacttatcagtctgcttagggtgacgatgcaaggttacattacattgattacnccaggctatggngccattgttgnatccctgntttgtacagganttggnganntancaatagg

SEQ ID NO: 291406 - DNA, 254 bp, Glycine max
  unsure (1)..(254): unsure at all n locations
cgaaaatgtggaacttctgggtcaaaagattgaccttacacctttcaaaggaatccttacctctgtccaagacacagcctcatcggtggtgaaaacaatttcaagtaggcctcccttgaagatcccaatttccaacagcaatgctcagtcctggttactcactacataccttgatgaagaattacgtatctcaaggggtgatggtggcagtgtgtttgttctcatcaaagagggaagctctcttttnacaagat

SEQ ID NO: 291407 - DNA, 251 bp, Glycine max
  unsure (1)..(251): unsure at all n locations
cctcactaggagctcctctccactggttctncatctgcatgcacacagttgcatagttttggaaaccaagaattcctgaagaagggtagcatcaacaagcagttctgaaaatggagatcaccaatgtcagtgagtatgaggctattgcaaagcagaagttgccaaagatggcgtttgactactacgcatctggtgcagaggnccagtggactctgcaagagaacagaaatgccttttccaganttttgtnt

SEQ ID NO: 291408 - DNA, 284 bp, Glycine max
  unsure (1)..(284): unsure at all n locations
tctcttaaaagagcctttgctttttctttaggcctttccgaattaagtacttgtttcattttctctcgaagcaagaaaaatgttcatcgagagtttcaaggttgagagtcctaacgtgaagtacacagagactgagattcagtccgtgtacaactatgaaaccactganccttgttcacgagaacaagaatggcacttatcagtgggttgtcaagcccaaaactgtcaaatatgaatttaaaaccaacacccatgtccctaaactaggggtaatgcttgtgggg

SEQ ID NO: 291409 - DNA, 276 bp, Glycine max
  unsure (1)..(276): unsure at all n locations
cacaaagcacaaagcaaagctcatccttgagttaaaaaatggcagcagcttcttccatggctctctcatccccatccttggctggcaaggccgtgaagctgggcccatcagccccagaagtgggaagggtgagcatgaggaagaccgtcaccaagcaggtctcctcaggaagcccatggtacggcccagaccgagtcaagtacttgggcccattctctggcgagcccccgtcctactaaccggtgagttcccaggcgactacggntggganctgct

SEQ ID NO: 291410 - DNA, 277 bp, Glycine max
  unsure (1)..(277): unsure at all n locations
cgcaattgaagttaaaagccttagccttccctacaactccaaacaccnaagacatcatcatccatggctgcctccgtctccactgtccggagctgtcaacagagctcttttgaacctgaatggttctggagctggagcttcagctcccagttcagccttctttgggaccagcttgaagaaggttattgcctcaagggtccccaacagcaaggtttccggtggaagcttcaagattgttgctgtagaagagaagaaagagattgaagagacccagcag

SEQ ID NO: 291411 - DNA, 269 bp, Glycine max
cttctttctctctcacgttttccgcttcagttttctcgggaaaatcatggtgaaaggtccaggcctctactctgacattggcaagagagctcgcgatcttctgttcaaggattatcagaatgaccacaagttcaccatcaccacttacacttccaccggagtggaaatcacttcaactggagtcaggaaaggtgagatatatttggccgatgtcagcactaaggtgaagaacaagaacatcacaactgatgtcaaagtggacactaact

SEQ ID NO: 291412 - DNA, 272 bp, Glycine max
  unsure (1)..(272): unsure at all n locations
gcaaatgacaagcctcaaggattatgtgaccaggatgaaggaaggtcagagtgacatctactacatcacaggtgaaagcaagaaggctgttgagaactctccattcttagagaagttgaagaagaagggatacgaggttctttatatggttgatgccattgatgaatatgctgttggtcagctcaaggaatttgagggcaagaagcttgtctctgccaccaaggaagggctcaagcttgacgagagtnaagatgagaagaagaancaagntt

SEQ ID NO: 291413 - DNA, 277 bp, Glycine max
  unsure (1)..(277): unsure at all n locations
cgattcattgtctccagccatctccaaggggaatcggtgcaggactggaganaaatagtgacatacttttcgtacccaaaaagagagagggactattcaaggtggccagacacgccagaagggtggagatcggtgactgaggaatacagcgacaaagtaatgggtctagcttgcaagctcatggaggtgttgtccgaagcaatggggttagagaaagngggtttaagcaaagcatgtgttgacatggaccaganggtggtggttattaccaccccag

SEQ ID NO: 291414 - DNA, 270 bp, Glycine max
  unsure (1)..(270): unsure at all n locations
cttatggaagcagctggtgatttgcagcaaatcaccggtttggcaaaacagatggnaaccacatttggaatgtctgatattggtccttggtcacttatggaagcatcagnccaaagtggggatgtcatcatgagaatgatggcaaggaactcaatgtcaganagacttgcagaagacatcgatgctgccatcaagaggatctcagatgaagcatatgaaatngcactagaccatataaggnacaaccgtgaggcgattgacaagnttgtc

SEQ ID NO: 291415 - DNA, 266 bp, Glycine max
  unsure (1)..(266): unsure at all n locations
cnatgaccgctcctacttcttccagcctgtngctggctccaaaccccagcaaaagatggggcgaactcttcttccttctctacacccccttctggctcaccctttgtctcggcatcnttattcccttcaatctttacganaaattcacagagctggagtanntgctcatcggattggtctcggctgttcctgctttcgtcgttccattgctgctcgttggaaaggttgacagaagcatttcttggaaggatcgttattgggtcagg

SEQ ID NO: 291416 - DNA, 266 bp, Glycine max
  unsure (1)..(266): unsure at all n locations
ccaagatgccaactgacacatcatcagtttccggcggcgaaatcgtgtgtgtgaccggtgccggcggtttcatagcctcttggcttgtcaaacatctcntagagaaaggctacactgtgagaggaaccgtgagaaacccagatgatccnaagaatggtcatttgaaagagttggaaggaggcaaggagaggctaactctgcataaagttgatctcttngatattgactccattaaagaagctcttaacggttgccacggtgtcttc

SEQ ID NO: 291417 - DNA, 271 bp, Glycine max
caaaccagtgactgacttttcgagaaagaaaaacaaaaatgagtttccgtcattccatcatgaacgctcttcccattctcctcttcttcctcttcgtttctgcattagtttctgcgaagaaaactggtgatgtgacggagctgcaaattggcgtgaagcataaaccagtatcatgtgaagttcaggcacacaaaggtgacagagtcaaagtacactatcggggaaaactcatgatggaactgttttcgattctagctttgaaagaaataat

SEQ ID NO: 291418 - DNA, 272 bp, Glycine max
  unsure (1)..(272): unsure at all n locations
gcacagagagaaaatggtttcggggtcagggatctgtgccaagagggtaattgtggacgcacgacaccacatgctggggaggctggcatcgatcgtggcgaaagancttctgaatgggcagaaggtggtggtggtacgctgcgaggagatttgcatctccggtgggctcgtcaggcagaagatgaagtactngcgtttcntccgcaggcgcatgaacaccaagncntctcanggcccnntcnnttccngtgcaccctgcantanttntggct

SEQ ID NO: 291419 - DNA, 270 bp, Glycine max
  unsure (1)..(270): unsure at all n locations
ctgggttgcgtgaacgctatgagttgcatcatggagtcaaaatatcagatagtgcacttntttcagcagcagttcttgcagatcgatacattacagaacgcttcttacctgacaaagccattgatcttgttgatgaagctgctgcaaaactgaagatggagatcacctctaagcctacggaattggatgagatagacagggctatattgaaattggngatggaaaagctctctttgaaaaatgacactgacagggctctaaagaaagntt

SEQ ID NO: 291420 - DNA, 271 bp, Glycine max
  unsure (1)..(271): unsure at all n locations
cgacctgcttcctcttatagcaagtggtgtcagangcgtcactagcaaccctgcgatctttcagaaagctatctcatcatcgaatgcttacaatgatcagttcagggaacttgtgcaaacagggaaagacattgaaagtgcatattgggaacttgtagtgaaggatatccaagatgcttgcagactatttgaaccaatctatgatcaaacagatggtggtgatgggtatgtttctgtngaagtatctcctaggctcgctgatgacactgag

SEQ ID NO: 291421 - DNA, 264 bp, Glycine max
cagcacaacaactcactcactaagctaaacaatttcatcaagcctgccatggcttcctcgtgtgcttcctctgccattgcagctgttgccatctccacaccaagttcccagaagaatggatcactcttgggaagcacaaaagcttcttttcttagtgggaggaaactgaaggtgaacagttttacagcaccagttggagcacgatccagcactacagtgtgtgcagttgctgagcctgataggcctctgtggttcccaggcagc

SEQ ID NO: 291422 - DNA, 270 bp, Glycine max
  unsure (1)..(270): unsure at all n locations
gcnagananggcgattgcaatggcgctncgcangctttcatcttcaattganaagcctctgcggcctctctnccattgccggttccctctantacaagtcgncgtgtgcctgatgaagctgtttacgacaaggagcgacccggagttacatggncgaagcagttgaatgctccacntgaggtcntggatcctgagattgctgatattattgngcttgagaaagctaggcaatggaaggggctagaattgatancgtcagagaattncact

SEQ ID NO: 291423 - DNA, 266 bp, Glycine max
  unsure (1)..(266): unsure at all n locations
caacttttcctatcaatgtggaaganactgagatgggttcaaaaaccaagacttttacctttgaagaggtggctaaacacaatcacaggaaggattgttggattatagtcaaagggaaggtgtatgatgtcaccccatttttggatgatcatccaggaggtgatgaagttttagtgactgcaacagagaaggatgccaccactgattttgaagatattggccacagtgattcagcaacacagatgatggaaaaatactttgttggg

SEQ ID NO: 291424 - DNA, 266 bp, Glycine max
ctcagctgcatactacgagcaaggtgcccgtttcgccaaatggcgtactgttgtgagcatccccaacggtccctctgctctggcagttaaggaagcagcctggggtctggctcgctatgctgcaattgctcaggacaatgggttggtcccaattgtggagccagagatcttgcctgatggggagcatggtattgatagaacttttgaagtagcccaaaaggtctgggcagaggttttcttctaccttgctgagaacaatgtccttt

SEQ ID NO: 291425 - DNA, 262 bp, Glycine max
  unsure (1)..(262): unsure at all n locations
cagtacattgaggatgttaagaagtgtctgaactacattaaagatggagaaagctatgagttatgcctcacaactcagataaggaaacctattgaggaattgaattctcttggactttatctgcatttgagagaaaggaatccggcaccttatgctgcttggcttaatttttcaaaggagaatctgagtattngctgttcttctcctgagaggttcctgcagttggntaggangaatatactagaagataagcccatcaggg

SEQ ID NO: 291426 - DNA, 263 bp, Glycine max
  unsure (1)..(263): unsure at all n locations
cnagtgggagtgttagtgtaagatctagtttagaaactgcggggcccacagtcacagtgggacaggtcactgaggttaacaaggacaccttctggccgatcgttaaggctgccggggataaaaccgttgtccttgacatgttcacacaatggtgtggcccttgcaaagtgatggctccaaagtttcaagaattatctgaaaagtatctggatgttgtctttctaaagcttgattgcaaccaagacaacaggccttggcaatag

SEQ ID NO: 291427 - DNA, 262 bp, Glycine max
attcattcaagattcagcaagtgcgtttcggaagcagagaccgaaatacttcgagatggcccgtacaaagcaaactgctcgtaagtcaactggaggaaaagctcccaggaagcagcttgcaaccaaggctgcacgtaagtctgctccaacaactggtggtgtgaagaagcctcatcgttatcgccctggaactgttgctcttcgtgagattaggaaataccagaagagcactgagctcctaatcaggaagcttcctttccag

SEQ ID NO: 291428 - DNA, 261 bp, Glycine max
  unsure (1)..(261): unsure at all n locations
atcaatccttgcatccctcagcnccttccagcagatgtggatttctaaaggtgaatatgatgagtctgggcccatccattgtccacaggaagtgcttctaacttctaagtacaaaatatgcttcaatggtgaattattttcnctccgggtgtttttatgggtctgtgtcgtgtcatgttaacaatattgccatggataaagaggtgaggaagcatcattaaaggagagggtctattcttagcttgatgcatcatattttgt

SEQ ID NO: 291429 - DNA, 262 bp, Glycine max
cgctgaacaaaaaaggttaacactttgtgctgctttgtttctccctcttagaaataccacttacagagaaaagaaagctaagaagattcctgttgttaatcatattatccgggaatctctcaagcggaaagctaaggatgcggaaatggttagtcttctttccttgtagcctaagtaaagttctaaggatgtattataacttgcataatgtaaattattttcagtattacttactctggttgatactttgtgttggttaacg

SEQ ID NO: 291430 - DNA, 266 bp, Glycine max
  unsure (1)..(266): unsure at all n locations
gtcatgtgggaccctgaggaggcaaccaccattaacgagctgaagaagcctgttgtggagaaagaagctccagggcatgccatatgagggcatgcacgtacggcctcggaggggaaccagaaaattatgttaacaaaataatctggaaccctaatgtatcagtgtcatcatcagtgtgtagtttaagctagctttgctatggttacgttctttgagatgagagtctcgatgaacagtaccattctgatgtattgcttnccttgang

SEQ ID NO: 291431 - DNA, 261 bp, Glycine max
tcctgacagaaggatcttcttgcctgacggtctcttggaccgatctgagatcccagagtacttgaccggagaagtccccggagactatggttatgacccatttggtcttagcaagaagccagaagatttttccaaatatcaggcatttgaattgattcacgccagatgggcaatgcttggtgctgctggattcatcattcccgaggccttcaacaaatatggagcaaactgcggtcctgaggctgtttggttcaagactgg

SEQ ID NO: 291432 - DNA, 265 bp, Glycine max
caaacactcataacacaaagcacaaagcaaagctcatccttgagttaaaaaatggcagcagcttcttccatgggctctctcatccccatccttgggctggcaaggccgtgaagctgggcccatcagccccagaagtgggaagggtgagcatgaggaagaccgtcaccaagcaggtctcctcaggaagcccatggtacggcccagaccgagtcaagtacttgggcccattctctggcgagcccccgtcctacctaaccggtgagtt

SEQ ID NO: 291433 - DNA, 238 bp, Glycine max
  unsure (1)..(238): unsure at all n locations
caaggcagaaagcaagctcatcctanagttttaaaaatggcancagcctcctccatggctctctcttccccatccttggctggcaaggccgtgaagctgggcccatcagcccccgaagtcgggagggtcagcatgaggaagaccgtcaccaagcaggcctcctccggaagcccatggtacggcccagaccgcgtcaagtacttgggcccattctctgggcgagcccccgtcctacctc

SEQ ID NO: 291434 - DNA, 259 bp, Glycine max
  unsure (1)..(259): unsure at all n locations
gggagctgagcgcggcggacctgaaggggaagaaggtcttcgtcagggccgaccttcaacgtcccgctncgacgacaaccagaacatcaccnacgacaccagaattcgcgccgccattcccaccatcaaacacctaatccaaaacggcgccaaagttattctctccagccacttggggaggccgaagggtgtcactcccaaatacagcttggcacctcttgtaccccggctttctgagctcattggtatccaggttgtc

SEQ ID NO: 291435 - DNA, 258 bp, Glycine max
  unsure (1)..(258): unsure at all n locations
gaacaagtagttgagaactaagaaggagaagcaaatggcttcctcaatgatctcttccccagctgttaccactgttcaaccgtgccggtgccggcatggttgctccattcactggcctcaagtccatggctggcttccccaccaganagaccaacaatgacattncctccattgcctagcaacggtggaanagtccaatgcntgcaggtttgcccnccantnggnaaagaagaaatntncngacnnntgccccnccgg

SEQ ID NO: 291436 - DNA, 254 bp, Glycine max
ttctttctcagcgagaggacccaacggtttaaaccctcagatacttaaaccggatttcattgctcccggtgtcaacatcctcgccgcctggacccaagctgtcggcccgaccggtttggactccgataccaggagaaccgagttcaacatcttgtctggcacttccatggcttgccctcacgtcagtggcgccgcggctttgctcaaatcggctcaccctgattggagcccgccgccctaaggtccgccatgat

SEQ ID NO: 291437 - DNA, 257 bp, Glycine max
  unsure (1)..(257): unsure at all n locations
gcaacttcaaatcctgatggccaaaagcgagcccttgtggtaggtggaggaatagctaactttactgatgttgctggctacattcagcggcataattcgtgctctgaaggagaaggaacaaaagctaaaagaagcaaagatgcacatctatgtgaggagaggaggtcccaactaccagaagggtctngcaaaaatgagggcactcggngnggaaattgggcattcctattgaggttacancacctgaggnnaacaat

SEQ ID NO: 291438 - DNA, 255 bp, Glycine max
  unsure (1)..(255): unsure at all n locations
gaaccactcaatacactgtgaacaaccagatggtgaatgccaccctcatgaacattgctgataaccccacaaatgttcagcttcctggcatgtacaacaagcaagagaacccccgtgtgccantcatcgtcaccggtaacgatttctcaacactctatgctcctctcatccgtgatgggcgtatggagaagttctactgggcacctacaagggatgaccgagttggtgtctgcaagggaattttccgcactgaca

SEQ ID NO: 291439 - DNA, 253 bp, Glycine max
  unsure (1)..(253): unsure at all n locations
ctttaaagctttgggacctgaacaaaaccagctcttctggtttgtcatctgatgcttgtnccatgacctttaaaggtcatagtaatgaaaagaatttcgtgggattatctgttttggatggatacattgcatgtggttcagaatctaatgaggtgtactgttatcacaaatcactgcctgtgccaattgctactcataaatttgagtcaattgatcacatttctggtcatctaaatagtggtgataataatgg

SEQ ID NO: 291440 - DNA, 218 bp, Glycine max
atagcacaggagggttacatggtgcctccgagcaaatcagcaaaggcagtcccacaggagcgtctgaagagcagaatgatcttccacgacgggcgtttcgtgcagaggccagacccaatgaatgccctcatcaccttcacatggctccctttgggtttcgtcctctccatcataagggtctacttcaacctccctctcccagaacgcatcgtccgcta

SEQ ID NO: 291441 - DNA, 251 bp, Glycine max
  unsure (1)..(251): unsure at all n locations
gtcaatcanaggctggggtcaaaaggtgcagatgaaataaaggctcatccattcttcaaaggtgttgaatgggataagctctatcaaatggaagctgcatttattcctgaggtcaatgatganttagatactcagaattttgaaaagtttgatgagtctgacgccaaaatcaatcatcatcaagatctggtccatggaggaagatgntttcatctaaggncttgaattttgttggatacacttacaagaac

SEQ ID NO: 291442 - DNA, 250 bp, Glycine max
  unsure (1)..(250): unsure at all n locations
gcccaccttggtgggcatggccactcgcaacctcaaatctacacaatgcatttctaaggcttttggcttggaacccgctgcagctaaactcatttgctcccttaagcccgatctcaaagattttgctcaaaaatgtgtcgacgccaccaaaattgcaggattcgcccttgccacctcagctctcgttgtntctggatcgantncagcaggtgttccanagaggntanccttcgncgaaatccagagcaag

SEQ ID NO: 291443 - DNA, 254 bp, Glycine max
  unsure (1)..(254): unsure at all n locations
gagaatgtcgtcctcttcgagagcttgccaaccttacattncttatgggcaacagagatggaattgatgagatgtcaagcacaaatgncttccgttcttctctcggtacttaagctgattgacaagtatgatctgtatgggcaagtggcctatcctaaacatcacaaacaatatgatgttcctgacatatatcgcctagcagcaaagacaaagggtgttttcattaatccagctttcattgagccatttggtct

SEQ ID NO: 291444 - DNA, 256 bp, Glycine max
  unsure (1)..(256): unsure at all n locations
ctctcgcattccgtggagatctagtgcttctgctgcaagacctcgctgaaaattagggnttcgnttcggaggnagacgaagatgttcggaanggctccgnagaaaagcgatagcaccaggtactangaaatcctcggcgtttccaagaacgcttcgccggatgacttaaagaaggcttanaaganagncgccattaagaaccatcctgacaaaggcggggatcccgngaagtttaaagagcttgctcaagcctatg

SEQ ID NO: 291445 - DNA, 256 bp, Glycine max
  unsure (1)..(256): unsure at all n locations
gcacaaaggangtggatgaacagatgatcaatgtgnaaaacaagaactcctcatactttgtcgagtggatacctancaatgtgaagtccagcgtgtgtgatatcccacctaagggtcttaaaatggcnnccacttttattggtanctcgacctcattccnggagttgttcaggagntcngtgangnantncacggccntgtttccagggncnaaggnttttctnggnngtgggnacccccngggcngggtttgnnc

SEQ ID NO: 291446 - DNA, 248 bp, Glycine max
  unsure (1)..(248): unsure at all n locations
gtgactgtgctctgctctcatctcattcatattcatttcaatggcaactcaaggtcaagtcattacctgcaaagctgcggtggcctgggaacccaacaagcccttaaccgtccaagacgttcaggttgctccgcctcaggccggcgaggtccgtgtccaaatcctcttcaccgctctctgccacaccgatgcttacacttggggcggcaaggatcccgaaggtctctcccccngtaatncggggccag

SEQ ID NO: 291447 - DNA, 258 bp, Glycine max
  unsure (1)..(258): unsure at all n locations
agcnataanctagtttatcgtgaggagaatatgaagttgtntgtnttctttgttgctgcagtagtnttggtagcatgngccatgccatggcgcaggctaccaaaggtctccctctccgantgaaaactggctatggngagcgttcttcggaggtaaaatnccgcaanttttaggcttgctgtggaancacacacacatcccgagccnttaaanncatncctggaagagtgctttgnnnccacnaagggccnactttgc

SEQ ID NO: 291448 - DNA, 252 bp, Glycine max
  unsure (1)..(252): unsure at all n locations
gtcttgcccttctctcttcaactccaaacacaagacatncatcatccatggctgcctccgtctccactgtcggagntgtcaacagagctcttttgaacctgaatgggtctggacctggggtttcagctcccagttcatccttctttgggagcagcttgaagaaggttattggctcaagggtccccaacacaaagatttcctctggaagcttcaagattgttgctgtagaagagaagaaagagattgaagaga

SEQ ID NO: 291449 - DNA, 252 bp, Glycine max
  unsure (1)..(252): unsure at all n locations
gaagaacaagtagttgagaactaagaaggagaagcaaatggnttcctcaatgatctcttctccagctgttaccactgtncaaccgtgtcggtgccggcatggttgctccattcactgggcctcaagtccatggctgggcttcccnaccaggaagaccaacaatgacattacctccattgctagcaacggtgnaagagtgcaatgcatgcaggtntngccaccagttggcaagaagacgttcgagncnctttc

SEQ ID NO: 291450 - DNA, 249 bp, Glycine max
  unsure (1)..(249): unsure at all n locations
ccgattctgatgaaaggtcatgagangccattgacgttcctgaaatacaacagggacggcgatctcctcttctcctgcgccaaggaccacaaccctaccgtctggtttgccgacaacggcgaacgcttgggcacttatcgcggccacaacggcgccgtttggacctgcgacgtctcaagagattcggnttcgactcatcacgggaagtnccgatcagaccgccaactatnggacgtgcaaaagcggcct

SEQ ID NO: 291451 - DNA, 253 bp, Glycine max
  unsure (1)..(253): unsure at all n locations
cggctgggacactgctgggctttccgcagacccagaaaccttcgccaagaaccgtgaactcgaagtgatccactccaggtgggccatgctcggagccttgggctgcgtcttcccggagttgctgtcccgcaacggggtgaagttcggagaagccgtgtggttcaaggccgggtcccagatcttcagcgagggtgggctcgactacttgggcaacccaagcctgatccangccagagcatcctcggccatctgg

SEQ ID NO: 291452 - DNA, 266 bp, Glycine max
  unsure (1)..(266): unsure at all n locations
aacactcataacacaaagcacaaagcaaagctcatccttgagttaaaaaatggcagcagcttcttccatggctctctcatccccatccttggctggcaaggccgtgaagctgggccatcagccccagaagtgggaagggtgagcatgaggaagaccgtcaccaagcaggtctcctcaggaancccatggtacggcccagaccgagtcangtantgggcctttcgntggnncccccccgttcntaannnggggtntttccgggggng

SEQ ID NO: 291453 - DNA, 273 bp, Glycine max
  unsure (1)..(273): unsure at all n locations
ctagtttcttacaagcctctactatactgcttcaccttctgctctagaaaattcagtgctgaaacatgggcttcggctactctctctgncagccaaaccagcccttcaggcaaatgggaaaggcttctctgaattctctggcctccgaagctcatcaggcttccttcccttttctagaaaatcttcagnggntttccattctgtcatngccttccagactntgcagttgncaagcagnggannanaaanggggggtgnnaaaganccaatgnt

SEQ ID NO: 291454 - DNA, 259 bp, Glycine max
  unsure (1)..(259): unsure at all n locations
gtggattctgcatgactggagcgacgagcactgcatcaagatcttgaagaactgcaggaaggcaataccagagaagacaggaaaagtcataatcntggatcacgttcttgacccgaaggcaacgaactcttcacagacgttggcatcgcattcgacatgatgcttctcgctcacaacgccggtggcaaagagaggaccgaagagaactggaagtggctgttcaaggaaaccggtttcgcgcgttacaacatcatcaaga

SEQ ID NO: 291455 - DNA, 261 bp, Glycine max
  unsure (1)..(261): unsure at all n locations
ccattggaggtttaggtgaccgtggaaaatttgttgatgacgaacctactactggaggtgttattcctccaggcaaaggcttcagggaagctcttggtcttggttcaggcctttatttggattcacgaaagcaaacgagctatttgtgggaagattggctcaattgggtttcgttttctcantgattggagaaattataaccggaaagggagcactagcccaactcaacattgagactggggtaccaatcaacgaaatcgc

SEQ ID NO: 291456 - DNA, 264 bp, Glycine max
  unsure (1)..(264): unsure at all n locations
caaacctaacgcagcatcgctattctcttcattccatggctttgcccaacgcgcaaaccgtggattacccnagtttcaaactcgttatcgtcggcgatggtggcacagaaagacaaccttngtgaaaaggcnncncacggnatanttcgagaagaaatangagccaacnatgggtgngggggncccccgatgggtttntnnnaagggggggggggaaagattcggttntactgctgggatactgctggacaggngaaattnggt

SEQ ID NO: 291457 - DNA, 263 bp, Glycine max
gtgctctgctcgtgcctctagggttatcatatctccatttccatttcctctctctcagtttccaagaatcttaagctatgggaaagtcttacccaaccgtgagcgctgataccagaaggccgttgagaaggcgaagaagaagctcagaggcttcatcgctgagaagagatgcgctcctcctaatgctccgtttggcatggcactctgctggaacttacgacgtgagctcgaagaccggtggtcccttcggaaccataaagcac

SEQ ID NO: 291458 - DNA, 259 bp, Glycine max
  unsure (1)..(259): unsure at all n locations
caggtactgcgtttcggaagcagacacagatggctcgtacgaagcaaaccgctncgtaagtccacaggaggaaaggctcctaggaagcagcttgcaaccaaggctgcactaagtctgcaccaactactggtggtgtgaagaagccccaccgttatcgtcctggtaccgtngctcttcgtgaattaggaattnccagangantcccgagnttntantcggaaagcnccttncnnaggggtgntnngnaatntccccaggt

SEQ ID NO: 291459 - DNA, 257 bp, Glycine max
  unsure (1)..(257): unsure at all n locations
cccaagaggccctctgacaagcccctcaggcttccccttcaggatgtgtacaanattggaggtattggaactgtggccactgggacntgttganaccggtgtcttgagcctggaatggtggtgacttttgcaccaactggactgacaactgaagtcaagtctgtggagatgcaccatgaatctcttacagaggcacatcctggtgacaatgtgggattcaatgttaagaatgttgctgttaaggatttgaagcgtgg

SEQ ID NO: 291460 - DNA, 196 bp, Glycine max
  unsure (1)..(196): unsure at all n locations
caaagcacaaagcaaagctcatccttgagttaaaaaatggcagcagcttcttccatggctctctcatccccatccttggctggcaaggccgtgaagctgggcccatcagccccagaantgggaagggtgagcntgaggaagaccgtcaccaagcaggtctcctcaggaagcccatggtacggcccagacngnntna

SEQ ID NO: 291461 - DNA, 270 bp, Glycine max
  unsure (1)..(270): unsure at all n locations
cttctagtatttttcaagtaacttaaggtttcaaacctaggangttggaagtcntggcagcaacattgatggcagcaacaagttctggcactcttaaagcaactcctttcctaggccaaggcaagggtgccaatgccaatgctcttagggatgttgtttccatgggaactgggaagtacaccatgggcaatgatttgtggtatggaccagacagagtgaaatacttgggacccttttcagctcagaccccttcatacttgaaaggagaat

SEQ ID NO: 291462 - DNA, 268 bp, Glycine max
  unsure (1)..(268): unsure at all n locations
gttcttctaatgacaatgcagaatgcccctcctggacttgatgatcgagataaaaagttctctaagtccttttaaggaaatggttgctatgtgcctggtgaaagatcaaacaaaaaggccatcagcagagaagttactgaaacattccttcttcaaacatgctaagcntcccgagctctctgtaaagaaattgtttgctgacttacctcctctttggaactgtgtaaaatccctcaagctcaaagatgcagcacaactagcagtgaag

SEQ ID NO: 291463 - DNA, 271 bp, Glycine max
  unsure (1)..(271): unsure at all n locations
tcttcttgatccttcttnttctccttgaactcaaacatggcagatgaggtggttctgctagatttctggccaagtccatttgggatgagggtcaggattgcacttgctgaaaagggtatcaaatatgagtacaaagaanaggacttgaggaacaagagtcctcttctcctccaaatgaacccggttcacaagangattccggttctcatccacaatggcaaacccatttgtgaatccctcattgcngttcantacntngaggaggtttgct

SEQ ID NO: 291464 - DNA, 268 bp, Glycine max
gttgagtgggccatggctgagttgataagaaacccaagggtgcaacaaaaggtccaagaggagctagacagggtaattgggcttgaaagggtgatgactgaagcagacttctcaaatctcccttacctacaatgtgtgaccaaagaagcaatgaggcttcacccaccaaccccactaatgctcccacaccgtgccaatgccaatgtcaaagttggaggctatgacatttcccaaaggtccaatgtgcatgtgaatgtgtgggcggtgg

SEQ ID NO: 291465 - DNA, 272 bp, Glycine max
  unsure (1)..(272): unsure at all n locations
gagagaaagagatcacatagcagaatggcttctactcaatgtttcttgcaccaccatgctcttaccacccctgccagatccccatcacaacgcatcatggttagcaccaagcctaaccagcttgtttgcaaggcacagaagcaagangatattgatgtcagcccaatctttcggccggttagctctaaccgtgctcattggtgctgctgctgttggctccaaagtccaacctgctgatgcagcttatggggaagctgccaatgtgtttggaa

SEQ ID NO: 291466 - DNA, 280 bp, Glycine max
  unsure (1)..(280): unsure at all n locations
anaatgttcctntcatcaatggaagccctcagaaacacctttgttcccaggantgcattgnatctgggccatcaaaaggaatagtttgattggaggagatgactttaagagtggtcagaccaaaatgaaatcggtgttggtggatttccnagtaggggccggcatnnnnccaacatctatngtgngntncaacgnttgggganagaatnatggcangaatctctcngccccgcannccttnngctcgnggganatttcnaagagcnntgttgttgacgnt

SEQ ID NO: 291467 - DNA, 265 bp, Glycine max
ctgctgttgatcttgttaacgagaccaagttggatgacgagatcaagtcatggctagcatttgctgcacaaaaaattgttgaagttaacgcattggctaaggcattgtctggcaacaaggatgtggccttcttctctgctaatgctgcagctcaggcttcaaggaagtcctctccaagagtgaccaacgaggctgttcagaaggctgctgctgcattgaagggttcagatcatcgccgtgcaacaaatgtcagtgccagactgga

SEQ ID NO: 291468 - DNA, 265 bp, Glycine max
  unsure (1)..(265): unsure at all n locations
cgnttgannaataanaccgtncaatntgatgangaattgaaagatgngctactgtatcaatgnnaacaggcatngnagaactattgcaaggctgtaaaagnaggncngcttaaaattctntcnaaaatgggcatctcgttgntntnaagttacngtggtgcacaaatatttganntctatggatnagggaangaagttgttgatcttggantcanagnaagtgtgtcgaaaattggtggattaacttttgatgaggtgnnaagag

SEQ ID NO: 291469 - DNA, 262 bp, Glycine max
  unsure (1)..(262): unsure at all n locations
cnaacctcctcctggacgaacacggcaacctcaaagtctccgacttcggactcaccgctttctccgaacacctcaaggaggacgggctgttacacaccacgtgcggcacgcctgcgtacgtgtcgcctgaagtgatagcgaaaaaaggctatgacggtgccaaggctgatatatggtcatgtggtgtaatcctctacgttctcctcgcaggctttttaccctttcaggatgataatttggttgccatgtataaaaaaattta

SEQ ID NO: 291470 - DNA, 262 bp, Glycine max
  unsure (1)..(262): unsure at all n locations
tcttttttctctctcttgcaaaacctaattttcatttcttccctcaaatttcaaaatnccgtganatccttcacatccagggtggccaatgcggcaaccagatcggcgccaagttctgggaggtggtttgcgcggacacgggatcgaccctaccggaaggtacggtggggactcggagttgcagcttcgagaggatcaatgtctactacaacgaggccancttgcggtcggttcgtgccgcgcgcggttctcatggacctcg

SEQ ID NO: 291471 - DNA, 259 bp, Glycine max
catcaagggttgtgaaagcagagaagtgagatacactaagttatcctcataaatacactctaattaggtggcaagataagtgtctaaccttagtaacattgccacatattgtgttcattttggaattgtgccactaaaattctattcaattcatctatggctgcctcttcttatgctatgcaatcaatcctggcaaaccctttgatccgcatttccagcgggtctagggtgaaccaatttggcgttcctgctttgcaca

SEQ ID NO: 291472 - DNA, 261 bp, Glycine max
ccggctcttgccgctaagaagaagcctgagaaggtcacgaatccgttgttcgagaagcgtccgaagcagttcggaatcggaggggcgttgcctccgaagagagacttgactaggttcgtgaagtggccaaagaatgttcaaattcagaggaagaagaggattctgaagcagaggttgaaggttcccccagctttgaaccagtttaccaaaactcttgacaaaaacctagcaacaagtctgttcaagttgcttctgaagtac

SEQ ID NO: 291473 - DNA, 277 bp, Glycine max
  unsure (1)..(277): unsure at all n locations
ggattctcntctttattccttttgtaattntcattcagtcttaatcnttgtnaaaaataatgttcatcgagaattgtaaggttgagtgtcctaatgtgaagtacaccgagactgngattcagtccgtgtacaactacgaaaccaccgaanttgtncangagaanaggantnnnnnctatnagtggnttgtcaaacccaaatctgtnaaatncgnntttaaaaccnacatccatgttcctaaattaggggtaatgntngtgggtggggttgnnccacc

SEQ ID NO: 291474 - DNA, 177 bp, Glycine max
  unsure (1)..(177): unsure at all n locations
tctaccgtgtcatctgtgacacaaggggtgcctttgtgcagcctgcagtttatgaggcctttgggttgactgtggttgaggccatgacttgtgggttaccaacatttgccacatgcaatggtggtcctnctgagatcattgtgcatggaaaatctggtnaccacntnncncccttnt

SEQ ID NO: 291475 - DNA, 265 bp, Glycine max
  unsure (1)..(265): unsure at all n locations
gcaggtcaagagggagatctcggtcatgaagatggtcaagcacccaaacatcgtcgagctccacgaagtcatgggccagtaagtccaagatctacatctccatcgaactcgtccgcggcggagagctcttcaacaaggtctccaagggacgcttganggaggacctggccagactctacttccagcagttaatctctgccgtcgatttctgccacagccgcggcgtctaccaccgtgacctcaagccggagaatctcctcctgga

SEQ ID NO: 291476 - DNA, 257 bp, Glycine max
  unsure (1)..(257): unsure at all n locations
ggcagatagaaaaaaagagcgacttttganttcaaaagatgactaacttcccattgatcaacttggagaagctcagtggtgaggaaagacacgataccatggaaaaaattaaagatgcttgtnaaaactggggattctttgagctggtgaatcatggcattcctcatgacatattggacactgtggagaggttgaccaaagagcactacaggaaatgcatggnagagaggttcaaggaattagtggcaagcaaaggt

SEQ ID NO: 291477 - DNA, 256 bp, Glycine max
  unsure (1)..(256): unsure at all n locations
gaacttgccaacagttaaaattgtgtatgtggtccttgaggctcagtaccaatcatccctcnctgctgcagtgatagctctcaacagcaagaggnagcatgcttcctatgaggtttnggttacttggttgaggagcttcgggacgcggcgacgtacacgaccttctgcaaggacttggaggatgccaacatcttcattgggtccttgatttttgtggaggagcttgccctcaagataaaggttgcagtggagaaag

SEQ ID NO: 291478 - DNA, 230 bp, Glycine max
  unsure (1)..(230): unsure at all n locations
gngagagtattngcgcttcatcaagatgggtatntctagggattccatgcacaagangcgtgccactggtggcaagaaaaaggcttggagaaagaagagaaagtatgagcttgggcgtcaggcagcaaacnccaagttatcaagcaacaagacnatcaggaggattcgtgttagaggtggcaatgttanatggagggcattgaggctggatactggcaatnactcatggg

SEQ ID NO: 291479 - DNA, 254 bp, Glycine max
ttgtcaagcttgttgacaccttccctggccaatccattgatttctttggtgcactgagggccagagtatatgatgatgaagtgaggaagtggatttctggtgttggtgttgacagtgttgggaagaagcttgtgaactcaaaagatggacctccaacctttgagcagcccaagatgactctggagaagctcttgctgtatggtaacatgcttgtccaagaacaagagaatgtcaagagagtccattggctgaca

SEQ ID NO: 291480 - DNA, 291 bp, Glycine max
atctgatgagtttcagagggcattgtacactgccattcgtgccatcaatgatcctattaagtactatgaaaaggtggtgcgcaatgcaatcaaaaaggttggaaccgatgaggatgcactcactcggtggttgtgagccgggccgagaaggacctgaagataatctcagaggtttactacaagagaaacagcgttcttcttgagcatgctattgccaaggaaatctcaggggactacaagaagttccttctcactctgttggggaaagaagactaaatattttttctctga

SEQ ID NO: 291481 - DNA, 287 bp, Glycine max
  unsure (1)..(287): unsure at all n locations
cccttccatggcttccgcttgtgcttcctctgcaattacagctgttgccatctctacgccgagttccgggcagaagaatggatcaggaggttgttttcttagtggaaggaaattgagngtgaaaaggagagagcagcaattggaggacgatcgatgggcactacagtgtgcgcagttgctgagcctgacagacctctatggttcccaggcagcacccctcctccatggcttgatggcactctacctggagacttcggctttgaccctcttggtcttggatctgaccc

SEQ ID NO: 291482 - DNA, 271 bp, Glycine max
  unsure (1)..(271): unsure at all n locations
cccgtatgggtcccaagagagagctcaagttcgctctcgagtctttctgggatggcaagagcagcgccgaggatttgcagaaggtgtcttctgatctcagggcatccatctggaagcagaggctgatgctgggatcaagtacatccccagcaacactttctctcactatgaccaggttctngacgcnaccgncannctcggtgntgtnccatnaaggnangnntatannggttgtnatnnnggntnnannnttntttccangttntgcagg

SEQ ID NO: 291483 - DNA, 271 bp, Glycine max
  unsure (1)..(271): unsure at all n locations
ttctgtggagagcttgttttctacngttcattcatctcaccttccaattaaggaacaanctttccaccaatttgaatcaccaatggctcgctctttctccaacctcagttctctctgctcttgtcgccgacggattctccaacactctcaccaggcgtgggtacgcagtagcgacacaaagcgcaacaagaggaggagcagcctccatcagcggcaagtcaggggaagacanggtantnggnggagtgcnnaaangntttcgggggnccag

SEQ ID NO: 291484 - DNA, 283 bp, Glycine max
cgaggaacgactgattaatgaagagtacaagatatggaagaagaacagtcctttcttgtatgatctggtcattacgcatgccctcgagtggccttccctcactgtggagtggcttcctgaccccatgaaccacctggcaaagactactccctccagaaggtcatcttgggcacccacacttctgaaaatgagcccaattacctcatgctggcgcaggtccaactccctcttgatgatgctgagaatgatgcccgccactatgatgatgaccgccctgacattg

SEQ ID NO: 291485 - DNA, 247 bp, Glycine max
aaccataatagtcatgggtttgaaggaggattttgagcagtatgctgagaaagcaaaaactttgccaccgactcaatcaaacgaagcttgcttatcctttatggattgtacaaacaggccaccgttggacctgtcaacaccagccgtcctggaatgttcaacatgagggacagagctaaatgggatgcatggaaagctgttgaagggaaatccaaggacgaagcaatgggtgattacatcattaagg

SEQ ID NO: 291486 - DNA, 270 bp, Glycine max
  unsure (1)..(270): unsure at all n locations
cggaaaagcactggcgcantaaccctgaggcttctcttctcttctcttctctgtcgtgagtcaccatggtgagggttagtgtgctgaacgatgctctgaagagcatgtacaatgcgagaaaaggggaaagcgccaagtcatgattaggccatcctccaaagtcattatcaaattccttttggtgatgcaaaagcacggatacntcggagagtttgagtatgttgatgaccacngggctggtaaaatcgtggttgaattgaacggtagact

SEQ ID NO: 291487 - DNA, 275 bp, Glycine max
  unsure (1)..(275): unsure at all n locations
tcaccaacaagtttttctgtaaccatggcatccaccactctatcccctacaaccccttctcagctatgcttcaggaaaaagtgggattttcagttcctcacaggcacttcttgtgaancagtgaagaggcagatgatggggaagagcaagggattgagaattgcatgccaagccaccagcatttccgctgatagantccctgacatgggcaaaagacagctcatgaatcttcttctnntgggtgccatttcactccccagtgctggaatgcttat

SEQ ID NO: 291488 - DNA, 288 bp, Glycine max
tacaatcagaggcttcaaaatcttgctgtcactcttgataaggtaaggtatgttatgcgatgtatttttggtgatccactgaaagctccacctcctcttgagaagctcagtcctgaagcagttttccttcctctggaaaggagaggattcatttgttgaagagcttcttcagtgcctggccccttatgttgaagagtctacattgaatgatcttaagtccaaaattcatgctcatgatccttcaagttctggagatattcaaaaggcagttcaaaaatctctttgtgg

SEQ ID NO: 291489 - DNA, 287 bp, Glycine max
ttttctctacactgcccttcctcgcaacccttcttatcccctggctcgcgcgctcaaacctcacaacacaacacaacgcgcactctctctttttctctctgttttttgttctctcttcgcttaaccctatcgttcttctcgttttcgccgattctcgccatgccgaaagctaaatccgacgccaaagccgccgatagcaggttgaagcggaagggcgctggtgctgggaggaagcaatcgaagaaagctgctaaggaccctaacaagccgaagagacctccaagcgc

SEQ ID NO: 291490 - DNA, 271 bp, Glycine max
  unsure (1)..(271): unsure at all n locations
ctccattcactgctggacacggattggacaagataggtgttgaaactgacaagattggacggattttggtaaacgaacgatttgccacaaatgtctctggtntttatgcaattgagatgtaattccaggcccaatgttggcacacaaggcagaagangacggtgttgcttgtgttgagtacatagctggtaaggtgggccatgtgggattatgacaaagtccccggtgttgtctatacaatgcccgaggttgcatctgggtgggaagacag

SEQ ID NO: 291491 - DNA, 267 bp, Glycine max
  unsure (1)..(267): unsure at all n locations
ctccattcactgctggacttggattggacaagataggtgttgaaactgacaagattggacggattttggtaaacgaacgatttgccacaaatgtctctggtgtttatgcaatggagatgtaattccaggcccaatgttggcacacaaggcagaagaagacggtgttgcttgtgtngagtacatagctggtaangtgggccatgtggattatgacaangtcccnggtgttgtctanacantgccngaggttncatcggttggnnaaat

SEQ ID NO: 291492 - DNA, 272 bp, Glycine max
  unsure (1)..(272): unsure at all n locations
tgagcgtgaaagangccttgggtgaggctttcagagtctccaaggctcgacgttgctattgacatgggtaatccatttctcaatctcactgttgatggtttccttaagatcggacngtcgcagccacgcgatcagctgctgaagatacttatcatattatccaaaaggggaatatctcaagtcgtgatttcgagaaaactttgaagaagatgtgtaaagaaggtgtatattggggaactatagctggcgtttatgttggaatggatatgggg

SEQ ID NO: 291493 - DNA, 276 bp, Glycine max
  unsure (1)..(276): unsure at all n locations
caangacaccggtggcgtgaaacaagcctctcaccttctcaagtacgattcgatcctcggaaccttcgatgctgatgtcaagcctgttggcagcgacatcatctctgtcgatggaaagaaatcaaagttgtctctgaccgcaaccctgccaaccttccttggaaagatttggggatagacttggtgattgaaggaactggggtgtttgtagacagagaaggtgcaaggaaacacattcnagcaggagctaagaaggtgctcattactgctcctggt

SEQ ID NO: 291494 - DNA, 282 bp, Glycine max
acaaggcagaaagcaagctcatcctagagttttaaaaatggcagcagcctcctccatggctctctcttccccatccttggctggcaaggccgtgaagctgggcccatcagcccccgaatcgggagggtggacatgaggaagaccgtcaccaagcaggcctcctccggaagcccatggtacggcccagaccgcgtcaagtacttgggcccattctctggcgagcccccgtcctacctcactggcgagttcccaggtgactacggctgggacactgctgggctt

SEQ ID NO: 291495 - DNA, 278 bp, Glycine max
ccagctcgttcataaattgttgcaagatctgggagaattgaggggcgtaaaggctctattacacaaattccaattctaaccatgcccaatgatgatattacgcacccaactcctgactaacaggatatatcactgaggggcagatatacatcgacaggcagctgtataataggcagatatacccaccaatcaacgtcctcccatcactatctcggttgatgaagagtgctattggtgagggaatgactagaagggatcattctgatgtgtccaaccag

SEQ ID NO: 291496 - DNA, 275 bp, Glycine max
tcaaacctaggaagttggaagtcatggcagcaacattgatggcagcaacaacaagttctggtactcttaaagcaactcctttccttggccaaggcaagggtgccaatgccaatgtcttagggatgttgtctccatgggaactgggaagtacaccatgggcaatgatttgtggtatggaccagacagagtgaaatacttgggacccttctcagctcagaccccttcatacttgaaaggagaattccctggggattatggatgggacactgctggct

SEQ ID NO: 291497 - DNA, 273 bp, Glycine max
  unsure (1)..(273): unsure at all n locations
cattgatgtacaaaagatggcgaacgaaactggactggacttcagtgatcagattctctcattggagaccaagtaccagcaggctttaaaggatctgtatacgcatctgactccattcagcgggtcaacatcgcacggcaccctaacaggccaactttccttgatcatgtctttaacataactgaaaagtttgttgaactccatggtgatcgggcaggttatgnngatcctgctattgttactggtctagggatatagatggtagaagctact

SEQ ID NO: 291498 - DNA, 262 bp, Glycine max
  unsure (1)..(262): unsure at all n locations
gtttctagatctattggtgatgtatatttgaaaaaggccgagttcaatcgagaaccactatatgctaagtttcgacttcgtgaaccatacaagatgccaatnccaagtcagaaccatcaatatcagtgcatcatttgcagccacatgatcaatttattatattcgcatctgatggactctgggagcaccttagcaatcaagaagcagttgntatngttcaaaacagtccccgcagtgtaagagacatntttncnacttngcc

SEQ ID NO: 291499 - DNA, 270 bp, Glycine max
ccaggctgtagctccaattttttctctggtagctcctaggttccaattcaaaggagcaaacaaaaggggcattccagtttcgagggatccagcggctttgttggcgaagtacctgatcctttggtctacacaggacctataagggtacgaactggccacgaaatattgcggatatcctcgtacttaatgcgaaacttcaactctgtgactgtgccattctttgtcctgcacggaactgctgataaggtgactgatccactggcctcacaa

SEQ ID NO: 291500 - DNA, 274 bp, Glycine max
  unsure (1)..(274): unsure at all n locations
agccaatgattttgatctcatgtatgaacaagttaaagctcttaaggatggaattgctgttgaaaaaccaatctacaaccatgtcactggtctcttggatccccctgagctctaaacccccnaaatcttagtcattgaaggtttgcacccaatgtttgattcccgtgtcagagatctcttggactttagcatctacctagacattagcaatgaggtcaaattcgcttggaaaattcagagagacatggcagagcgtggacacagtcttgaaaga

SEQ ID NO: 291501 - DNA, 276 bp, Glycine max
  unsure (1)..(276): unsure at all n locations
ttgacaacgcccagaagtttcnccgaagcttccaagaaggggaacgtcattcctctcttccgctgcatattttccgatcacctcactccggtgcttgccctaccggtgcctggtaaggaggacgagagagatgctccgagttttctctttgaatcggtcgagccaggccaaatttctagcatcggacggtacagtgtggttggagcacagccgtgtatggaaattgtggcgaaagagaacgtggtnactattatggaccacgtggaagggcgcagg

SEQ ID NO: 291502 - DNA, 270 bp, Glycine max
  unsure (1)..(270): unsure at all n locations
acaaaactactcacagagaaagacactcggagaccttgcaagacttcatcaatggctgtcaaagtttatattgtgtactactccatgtatgggcatgttgagaaactagagaagaaataaagaaaggggcttcctctgtggaaggtgttgaggccaaattatggcaggtacctgagacgctgcaggatgaggtgctcggtaagatgagtgcaccacccaagancgntgtncnagttcntnnccccgantgaattaccgggggcggggttt

SEQ ID NO: 291503 - DNA, 271 bp, Glycine max
ctcttttgctgcatcagaggagttgtaaattaagagcatggctgcacaagctcttgtatcatcatcttctcttaccttctcagcggaggctgcaagacaaagtcttggccaagatcactccaatctccatttggcttctccagaaaagcctcctttcttgttaaggcagctgctaccccccctgtcaagcaaggatcagacaggcctttgtggtttgcatcaaagcaaagtctttcttacttggatggcagccttccgggtgactatggat

SEQ ID NO: 291504 - DNA, 257 bp, Glycine max
  unsure (1)..(257): unsure at all n locations
catatctccatttccatttcctctctctcagtttccaagaatcttaagctatgggaaagtcttacccaaccgtgagcgctgattaccagaaggccgttgagaggcgaagaagaagctcagaggcttcatcgctgagaagagatgcgctcctctaatgctccgtttggcatggcactctgctggaattacgacgtgagctcgaagacnggtggtccttcggaaccataaagcacccttcggaantnggttnaggggat

SEQ ID NO: 291505 - DNA, 275 bp, Glycine max
  unsure (1)..(275): unsure at all n locations
ttctcttgaagtttaacagctgagcttttgggattcaacggttacattcgtccatatgcaagggctagaggccgagatatacttagtggagtcaattatgcttctgcagctgccggaattagagaagaaactggacagcaactgggaggccgaatcagttttagagggcaggtgcaaaattaccaaagaacagtgtcccagatggtaatttantggnanntgggaacncantgaatttctgggnaagggcntttttccatgggaagggnaagaat

SEQ ID NO: 291506 - DNA, 219 bp, Glycine max
  unsure (1)..(219): unsure at all n locations
agttgagaactaagaaggagaagcaaatggcttcctcaatgatctcttccccagctgttaccactgtcaaccgtggccggtgccggcatggttgctccattcactggcctnaagtccanggctggnttccccacnagggngnccaanngtgatttgccccnnttttnnnancgggngggnattnttnagtgtggggggnggngcctnnttnccgaanna

SEQ ID NO: 291507 - DNA, 277 bp, Glycine max
  unsure (1)..(277): unsure at all n locations
atgaattagaagtccttgaaataattcatcattttgtggagattcttgaccggtattttggcagtgtctgtgaactggacttaatattcaactttcacaaggcctactatatactagatgaaattctaattgccggtgagcttcaagagtccagcaagaaaacagttgctcgattgatagcagcacaggattcgttggtggagaatgcgaaggaagaagtcagttcattaagtaatatnatngcncaagccactnngggggaaaatanntttttccc

SEQ ID NO: 291508 - DNA, 282 bp, Glycine max
  unsure (1)..(282): unsure at all n locations
cnagaagaagaattggacagtgatgatgatgtttcgagcnacccggtttcaacggcgttgatgaatccagggtcaaaagtggagaacaaaggttggcgtggtgggcatggttgccaatctaaccagtttgcnatgttggatattttgttggctgcgttgaagaagtcgctggtgacttgcagtgtggagagagaggatatttcttcgtnggatattagctggcccacagaggtgcgccatgtctcgcatgtnacctttgataggttcaatggcttcncggtt

SEQ ID NO: 291509 - DNA, 285 bp, Glycine max
  unsure (1)..(285): unsure at all n locations
agaaaagaaaatcctcaattttctgagcagccaaacactctctctctgtctctcgaaaattctcagtttgcagagaaaatctgaatcatgtcgtggcaagcgtatgtcgacgatcaccttctgtgtgacatcgaaggtaaccacctcactcaggntgtattannggccaaaaggggnnnttnggggcanngagtaccgacttccctcagttcaaacctgaggagataactgccatcatgaatgactttaatgagcctggatcacttgctccaatggattgtatct

SEQ ID NO: 291510 - DNA, 278 bp, Glycine max
  unsure (1)..(278): unsure at all n locations
aagggatgaccgcattggtgtctgcactggaatttttcgcaccgattcaattcctgaacaggacgttgtcaagattgttgacaccttccctggccaatccattgatttctttggtgcactgagggccagagtatatgangacgaagtgangaagtggattnctggtgttggtgttgacggcatggggaagaagcttgtgaactcaaaagatggacctccancctttgagcagccnaagangactctngnngantctcttgngttntaaaagnnannna

SEQ ID NO: 291511 - DNA, 244 bp, Glycine max
attgcagcaaggcacacacctcaggctccaacccatttcacgagggatcggattcgctcgccatcatggggaagaagaagaagagagtttcctcgaaggtgtggtgttattactgcgatcgcgaattcgacgacgagaagatcttggtgcagcatcagaaagccaagcactttaagtgccatgtctgccacaagaagctctctaccgctggcggcatggccatccacgtcctccaggtccacaa

SEQ ID NO: 291512 - DNA, 274 bp, Glycine max
  unsure (1)..(274): unsure at all n locations
ccgttaataggcaatgttcatctgggctccaggctgtcgctgatgtagctgctgcnataagggctgggttctatgacattggtattggtgccggtttggaatctatgaccactaatccaatgggntgggatggatcagtgaatcctaaggtaaaaatgtttgancaagcacaaaactgccttcntccgangggaattacctctnaaaatnttgcacagcgcttggggttncnaggaaggannaagnccaggctgcagtgagnctcacnggcgnt

SEQ ID NO: 291513 - DNA, 275 bp, Glycine max
  unsure (1)..(275): unsure at all n locations
ggatttccagttttttgttggggagagcatgaatgatgatgcttgcttggtctttgcatactacaaggatggtgctgctgatccaacattcttatactttgcatatgccttaaaggaggttaagtgctaactgacataatgtaccaagttatctactctcattttacctagtttttttttttaagtnctgnccnaagttacttaaaacttngacttgtnattttgattttaatggtgngacattttgngctacntcgtaatncccatcaatttat

SEQ ID NO: 291514 - DNA, 274 bp, Glycine max
  unsure (1)..(274): unsure at all n locations
gcaatggcgagcgctcccactccacgcgaagagttcgtntacatggcgaantgggcggagcaggccgagcgctacgaggagatggtggagttcatggagaaggtctccgcctccgccgagancgaggagctgaccgtggaggagcgtaacctcctctccgtcgcctacaagaangtgatcggngctcgccgcgcctcctggcgcatcatctcctcaatcgagcagaaggagnagagccgcggcaacgaggaccangtcgccgtcatccggacta

SEQ ID NO: 291515 - DNA, 273 bp, Glycine max
  unsure (1)..(273): unsure at all n locations
gtagaagagaagaaaganattganganacccagcagaccgacaaggacagatggaaggntcttgcctatgatatctcagacgaccaacaagacatcacaagaggaaagggtttggttgactcccttttccaagctccacaggatgctggaactcactatgcagtcatgagctcctacgagtacctcagcactggacttngccantanttggacaacaaantggatggattcnaatgncnnnttttggggacanttttttntgnancncnncag

SEQ ID NO: 291516 - DNA, 278 bp, Glycine max
  unsure (1)..(278): unsure at all n locations
tctcaatgatgttgagatttataagcatcctaaagaagaaagaatagcccgaacttggggaaccactgcccctggcctaccctatgttgaacaaactataaccaatgctggaaattggttgattgggggtgacctagaggtcattgaaccaatccagtacaatgatggacttgatcattttcggctgtctccagcagaactccgtgcagagttcacaaggcgcaatgcagatgctgtgtttgccttccagctcnggaatcctgttcacaatggccacg

SEQ ID NO: 291517 - DNA, 267 bp, Glycine max
  unsure (1)..(267): unsure at all n locations
cttagaacaaagcagaaganatgatcttgagtctcttggntatgnnttgntgtacttcttgagaggaagtcttccttggcagggtcttaaagcgggaacaaagaaacagaagtatganaaaatcagtgaaaaaaaggtttctacctcgattgangccttgtgtcgnggttatccaacagnntttgcatcttacttccattactgccgatcattgaggtntgtgataggccagattntgcgtactcaaaaggtatcccgtnactgttg

SEQ ID NO: 291518 - DNA, 270 bp, Glycine max
  unsure (1)..(270): unsure at all n locations
cgttacaggctcagttttcacagatgaggcctgttgcaataacgccttctgttgcgccccgtatgcctctctaccctcctggtgctcctggtcttggacaacaatttttgtatgggcaaggacccccagccatgatgcctccacaagctggatttggataccagcagcaactagttcntggaatganacctggnggtgggccnatgccaancttnttgntcccangggtnnaaaaggnaaaagggcnncccgggggcccccntannaatt

SEQ ID NO: 291519 - DNA, 270 bp, Glycine max
  unsure (1)..(270): unsure at all n locations
caaaataaganagtttcacctaccagttctgctaaatntagagtgctngcaattaagtctgacaatagcaccatcaacaggctcgagggtctacttaatttggatatcactccattcactgacaagataattgctgagtacatttgnattggggggacaggaattgatgtgcgcagtaaatcaagaacaatatcaaagcctgtngangatccctctgagctccctaaatggaactatgatggatctagcactggacaggcacctggtgat

SEQ ID NO: 291520 - DNA, 272 bp, Glycine max
  unsure (1)..(272): unsure at all n locations
gttttcaaggcattgcttcattttatatactgggactcactaccagacatgcaagagcttactgggttgaactcaaaatgggcatcaaccttgatggctcagcatcttctagcagcagctgatcgatatggcttagagagacttaggctgatgtgtgaagcgagtctctgtgaagatgttgctattaatactgtggctacaactctagccttggcagagcagcaccattgtttccaactgaaagctgtctgtctcaagtttattnctacctc

SEQ ID NO: 291521 - DNA, 274 bp, Glycine max
  unsure (1)..(274): unsure at all n locations
canggcgtcttcataaacgcctttcttctccgtttccgtttccttcgttcaaattcgctttttgatctgcgaaaatgagagagtgcatctcgatccacattggtcaggctgntatccaggtcggaaatgcttgctgggagctctactgcctcgagcacggcatcgggcccgatggcaaatggccaagtgacaagacagtggcggtggtgatgatgcttcnataatttcttcagcgagactggtgctggaaancacgtgccacgtgcatgtttgt

SEQ ID NO: 291522 - DNA, 284 bp, Glycine max
  unsure (1)..(284): unsure at all n locations
ttctcngcaagttnaanaggtaancttataaacnnncaanttccaggntcacaaattgangctgtgaccaatgacaacttgattatcaatgtatacaacagcctggncgaacctttcctcttatcttngaatggagtnctgcagaggagaaactcgtggcaggatggagtgtatggtaccaattgtccaattctaccagggcataacttcacttatgttcttcaagtgaaggatcagataggtagctacttctactacccttcccttgcttttcacaaggcagc

SEQ ID NO: 291523 - DNA, 280 bp, Glycine max
  unsure (1)..(280): unsure at all n locations
ggcaatgactganatgaatggtgtttattgttctagtaggcccatgcgaataggtgttgcaactcccaagaaaacttatggctaccaacaacaatattcttctcaagctgtgctattggccggtggacacgcagctaatggtgctgtggcccaaggttcccattctgaaggggatttaaacaacaccactatatttgttggagggcttgattctgacaccagtgatgaggatctcagacaaccatttttgcaatttggtgaggttgtctctgtgaaaatt

SEQ ID NO: 291524 - DNA, 279 bp, Glycine max
  unsure (1)..(279): unsure at all n locations
agttgagaactaagaaggagaagcaaatggcttcctcaatgatctcttccccagctgttaccactgtccaaccgtgccggtgccggcatggttgctccattcactggcctcaagtccatggctggcttccccaccagaaagaccaacaatgacattacctccattgctagcaacggtggaagagtgcaatgcatgcaggtgtggccaccagttggcaagaagaatttganactctttctnaccngccagnctngatgntncnnattggcaaanggaatt

SEQ ID NO: 291525 - DNA, 276 bp, Glycine max
  unsure (1)..(276): unsure at all n locations
gttgangcatatatggtccagtccaagacgtgaggntcccataccagcagaagcgaatgtttggttttgttacctttgtttatccagagaccgtgaagcttattctatctaaaggaaaccctcattttgtgtgtgatgcacgagtgcttgttaagccttncaaggagaagggcaaagtcccagacannnnnnnnnnnnnnnnnnnngtagatagaggagatttttcaccatgtggtacncctactggattagatgctagagaccatttgatcttcc

SEQ ID NO: 291526 - DNA, 283 bp, Glycine max
accgaaacagtttccatctctctcacaaaatgacaacaatatcaaattgctcccttactcttcctcttcctcttcctctccaccctccacatagcttccaccctctcaacccccaccaacttcatcaagtcctcctgcagcaccacccagtacccagccctctgcatccagtccctctccgtctacgcctccaccatccagcaagacccccacgagctcgtccagacagccctctccctctccctcaaccacaccgaggccaccaaaaccttcgtcgcaaaat

SEQ ID NO: 291527 - DNA, 280 bp, Glycine max
gctcatcctagagttttaaaaatggcagcagcctcctccatggctctctcttccccatccttggctggcaaggccgtgaagctgggcccatcagcccccgaagtcgggagggtcagcatgaggaagaccgtcaccaagcaggcctcctccggaagcccatggtacggcccagaccgcgtcaagtacttgggcccattctctggcgagcccccgtcctacctcactggcgagttcccaggtgactacggctgggacactgctgggtttcggccgacccaga

SEQ ID NO: 291528 - DNA, 275 bp, Glycine max
caattaccagcctccaactgttgttcctggcggtgatcttgccaaggttcagagggctgtgtgcatgatctccaattccaccagtgttgttgaggtcttctctcgcatcgaccacaaatttgacctcatgtatgccaagagggcttttgttcattggtatgttggtgagggtatggaagagggagagttctctgaggctcgtgaagatcttgctgccctggagaaagattatgaggaagtcggtgcagaggcaactgaagaagatggtgatgaag

SEQ ID NO: 291529 - DNA, 277 bp, Glycine max
  unsure (1)..(277): unsure at all n locations
ctttcgttgcgcttctcgaatgcctcccaaggttgccgtctctaaccatccggagcttttggngacataatttggaatttcaatccttgttgccaagaggaatgacattgtcaaacacgttcactgcatcaagcctacgtgtaagtgagggtcaaaattttctctttcgtgttctccctctgttaccccatttgcgcaagtctaatatggtccctcgggcatcaaaggatgtcccaactagctttcgttatcctccaatgaccaagaaaccgcaatg

SEQ ID NO: 291530 - DNA, 272 bp, Glycine max
gaggatgggtgcagaagcaaatggcggcgagaagcaattgaaatttctgatctacggtcgcagcggttggattggtggtctactgggtaagctctgcgaagagcgcgggatccaatatgagtacggcaccggcagattggagaaccggtcgtcgttggaggcggacatagcggctgtgaagcccagccacgtgttcaacgccgcgggtgtcacgggtagacccaatgtggactggtgcgaatctcacaaagttgaaaccatccgaaccaacg

SEQ ID NO: 291531 - DNA, 275 bp, Glycine max
gtggataagaagaggttgattgatgatgtgaggcaggctctgtatgcttccaagatttgtagttatgctcaggggatgaatttgttgagggctaagagtaatgagaaaggatggaacttgaatttgggggagttagctaggatttggaagggagggtgcatcataagggccgtgttcttggaccggatcaagaaggcttatcagaggaaccctaatttggcgagtttgattgtggacccggagtttgcaagggaaatggtgcagagacaggctgc

SEQ ID NO: 291532 - DNA, 273 bp, Glycine max
  unsure (1)..(273): unsure at all n locations
gttgtttctccctcaacacaacacaacatgntcctctttgactggttctatggcattctcgcttccctcggtctctggcagaaagaagccaaaattctcttccttggtctcgataatgccggcaaaaccaccctccttcacatgctcaaagacgagagattagttcagcaccagccgacgcagcaccccacttcggaggaattgagncattgggaagatcaagtttanggctttcgatnnggggggccatnangttgctcgggggtctgaaaa

SEQ ID NO: 291533 - DNA, 272 bp, Glycine max
  unsure (1)..(272): unsure at all n locations
tttcaatcaacggttatacccttttctatttgagcatcatcatgtccaccgcagcgcagccncaaggccaagaaaacggcgtcgtccaagaagcccctctcccatcctaccttcgccgtgatgatagcggaggcgatagcgagtctgaaggagagaaccggttcgagccaatacgcgataaccaaattcatcgaaggcaagcacanggnnttgcctccaacctacaagaagttgttctcgttcatctcaagaagtctttgctgctggcaagt

SEQ ID NO: 291534 - DNA, 272 bp, Glycine max
ttaggactaaagttttccacccaaatatcaacagcaatggtagtatttgtcttgatatcttaaaggagcagtggagcccagcattgacaatatctaaggtgttgctctccatttgctccctattgaccgatccaaacccagatgaccccttggtgcctgaaattgctcatatgtacaagacagacaggtccaagtatgaaacaactgctaggagctggactcagaagtatgcaatgggctagcatgttggaataaggcattgtattatagga

SEQ ID NO: 291535 - DNA, 272 bp, Glycine max
  unsure (1)..(272): unsure at all n locations
gtttgttcaaaggccaactcctctagcagccctcttgaccttcctatggttgccaattggcatcatactctccatncttaagggtctaccttaacatccctttgcctgaaagaattgcttggtataactataagctattaggaatcagagttattgtgaagggtacccctccaccacccccaaagaagggtcaaagtggtgtcctatttgtttgtaaccaccgcacagttttagaccctgtggttactgcagttgcacttggaagaaaaatt

SEQ ID NO: 291536 - DNA, 271 bp, Glycine max
gcaaagctcatccttgagttaaaaaatggcagcagcttcttccatggctctctcatccccatccttggctggcaaggccgtgaagctgggcccatcagccccagaagtgggaagggtgagcatgaggaagaccgtcaccaagcaggtctcctcaggaagcccatggtacggcccagaccgagtcaagtacttgggcccattctctggcgagcccccgtcctacctaaccggtgagttcccaggcgactacggctgggacactgctgggctt

SEQ ID NO: 291537 - DNA, 274 bp, Glycine max
  unsure (1)..(274): unsure at all n locations
gtttcttacaagcctctactatactgcttcaccttctgctctagaaaattcagtgctgaaacatggcttcngcncctctctctgtagccaaaccagcccttcaggcaaatgggaaaggcttctctgaattctctggcctccgaagctcatcaggcttccttcccttttctagaaaatcttcagaggatttccattctgtcattgccttccagacctatgcagttnnaagcagtggaggatacaagaagggtgtgacagaagcaaaactganggt

SEQ ID NO: 291538 - DNA, 275 bp, Glycine max
caaacacgctgttcctacaatcattccaaatgtgcccttccggtcgcaccctcctcccttcctccgtctccgatttccgaccggcattcgacgtcctcgatgccgaccgcgacggcaaaatcagccgcgacgacctccgcgccttctacgccggagtcggcggcggaggagatgacgtgatcggggcaatgatgacagtggctgacaccaataaggacgggttcgtggagtacgaggagttcgagcgcgtggtctcggcggagagaaagcccgtg

SEQ ID NO: 291539 - DNA, 268 bp, Glycine max
  unsure (1)..(268): unsure at all n locations
gaacacctggctttagtggagctgatcttgcgaatctgttgaatgaaagctgctatattagctggtcgccgtggaaagacagctatttcatctaaaganattgatgattctattgataggattgtggctggaatggaaggaacagtgatgacagatgggaagagcaaaagtttagtggcatatcatgaagttggtcatgctatttgtggaactttgactcctggtcatgatgctgtgcaaaaggtaacactagttcctcgcggtcaag

SEQ ID NO: 291540 - DNA, 275 bp, Glycine max
aagaactcaaagaacaagccaaaactcttagcttgtggaacaaaccaaaaatgcacgagtgctccatttgtggacttgaattctctctgggccaggctctgggtggccacatgagaaaacacagagctgctctcaacgaagggtttcctataattccttctatcgaccaagttattgcgaaaatcccggttctgaaaaggtcgaatagcaccagagttatgtgcttggacttggagttacacctgtagagaatgaatgactgaactaccaagtca

SEQ ID NO: 291541 - DNA, 278 bp, Glycine max
  unsure (1)..(278): unsure at all n locations
cgatgctccaactgcggcaaatgctgtcctaatnacaaggctatcaagaggtttctggtgaggaacattgttgaacaggctgcagtcagagatgttcaggaggcttgtgtctatgaacaatacacgcttccgaagctttatgtgaagatgcagtattgtgtttcctgtgctatccactctcatgttgtgagggttcgatcccgcactgataggagaaagcgtgancctccacagcgatttatcagacgcagggatgatgcaccaaggcctggtcanct

SEQ ID NO: 291542 - DNA, 266 bp, Glycine max
  unsure (1)..(266): unsure at all n locations
ccgcttggngcgtgagtncctgcaaacccggtaacggcgtttcctctctccgtgacgacaatctcgaaacttattggcaatccgacggagggcaaccccatttagttaacattcagtttcagaagaaagttagacttcaattaattgtgctgtacgtggatttcaagcttgacgagagttacacgccgagcaaagtttccatccgtgccggtgatggttttcacaacttgaaggagattaagaccgtggaatcgtgaagccaactg

SEQ ID NO: 291543 - DNA, 267 bp, Glycine max
  unsure (1)..(267): unsure at all n locations
cgcaacncaaaagaaagaatcccaggcgaggagaaagatggaggggaaggagcaggatgtgtcgttgggagcgaacaagttccccgagagacagccaattgggacggcggcgcagagccaagacgacggcaaggactaccaggagccggcgccggcgccgctggttgacccgacggagtttacgtcatggtcgttttacagagcagggatagcagagtttgtggccacttttctgtttctctacatcactgtcttaaccgttatggg

SEQ ID NO: 291544 - DNA, 270 bp, Glycine max
  unsure (1)..(270): unsure at all n locations
gtaaccatggcatccaccactctatcccctacaaccccttctcagctatgctcaggaaagagtgggattttcagtccctcacaggcacttcttgtgaagccagtgaagaggcagatgatggggaagngcaagggaatgagaattgcatgccaagccaccagcattcctgctgatagagtccctgacatgggcaaaagacagctcatgaatctgcttcttcttggtgccatttcactcccctctgctggaatgcttattccctacacctac

SEQ ID NO: 291545 - DNA, 271 bp, Glycine max
ttctttccggcatgtctgaacgtggatttcgtgtcacacacacttatggtctctcagaaacctatggcccctctgtctactgtgcctggaaaccagaatgggaatcacttccccctgaaaaccaagcccggctcaatgcaagacaaggtgttaggtacattggcttggaaggcctggctgttgtgaacacaaaaaccatggaacctgttcctgctgatggtaaaactgttggtgagattgtgatgcggggtaattctgtgatgaaaggcta

SEQ ID NO: 291546 - DNA, 268 bp, Glycine max
  unsure (1)..(268): unsure at all n locations
gtcagaaatgcttggnaaccccatcaacctcagtggtgccacaaggccagctncatctgcctctagccctgcctccttcaagactgtggctcttttctccaaaaagaaggctgcacctccaaaaaaagctgcagctgctgctcctgccaatgatgagcttgccaagtggtatggtcctgacagaaggatcttcttgcctgagggtctcttggaccgatctgagatcccagagtacttgaccggagaagtccccggagactatggttat

SEQ ID NO: 291547 - DNA, 270 bp, Glycine max
  unsure (1)..(270): unsure at all n locations
ccaatatattccattctctctgtgtatttccctacctctcccttcaagatgcagatcttcgtcaagaccctcaccggcaagaccatcacccttgaggtggaaagctctgacaccatcgacaacgtcaaggccaagatcnaggacaaggaaggaatccccccggaccagcaacgtctcattttcgccggaaagcaacttgaggacggccgtacccttgctgactacaacattcagaaggagagtactcttcaccttgtcctccgtcnngtg

SEQ ID NO: 291548 - DNA, 266 bp, Glycine max
  unsure (1)..(266): unsure at all n locations
ctctctttctctagtcctgttatttctcancgcgtanagcatggctttgttggtggagaaaaccacgagtggtcgcgagtacaaggtcaaggacctttcccaggccgacttcggccgcctcgagatcgagctggccgaggttgagatgcccggcctcatggcctgtcggaccgagttcggcccctcccagcccttcaagggggcccgcatcaccggctccctccacatnacnaanaaatnncnaantctcattgagaccctcancg

SEQ ID NO: 291549 - DNA, 263 bp, Glycine max
  unsure (1)..(263): unsure at all n locations
ctcgaagaacattgagaagagtcttgttgaagcttttgagcccatcgggatcagcgactggaactctatcttctggatcgcacatcccggtggtcccgcgatcctcgatcaagtcgaggagaagctcnggctcaagccggagaaactccagtccacccggcatgtgctgagtgagtacggaaacatgtcaagcgcgtgtnttttgttcattctggatgaaatgaggaagaagtctnaggaggaagggaagagtaccactggag

SEQ ID NO: 291550 - DNA, 117 bp, Glycine max
  unsure (1)..(117): unsure at all n locations
cgaatttcattttcagaagcctctttgggaatcaaatccgaagcatgatgcattgngcgagcattgtctcggctccgtcctacgcgttcccttttctctctggctccgcttccacaa

SEQ ID NO: 291551 - DNA, 160 bp, Glycine max
  unsure (1)..(160): unsure at all n locations
gccgcacnccaagttctcagcgattgtttatgttttgaagaaagaagncaggtggtaggcattcacctttctttgcagggtataggcctcagttttacatgaggaccaccgatgtgactgggaaggttacgtctatcatgaatgataaggatgaggagtc

SEQ ID NO: 291552 - DNA, 167 bp, Glycine max
atttctcaacactctatgcacctctcatccgtgatgggcgtatggagaagttctactgggcaccaacaagggaagaccgcattggtgtttgcaccggaattttccgcactgatggtattcctgaacaggacattgtcaagcttgttgacaccttccctggccaatcc

SEQ ID NO: 291553 - DNA, 170 bp, Glycine max
ggacaaggccagtcctcagacagttgctgattacaccctcaagctccttcacaggagaattccccctgctgtccctggaattatgtttttgtctggtggacagtctgaggttgaagctaccctcaacttgaatgccatgaaccaatctccaaacccgtggcacgtgtcgt

SEQ ID NO: 291554 - DNA, 171 bp, Glycine max
caagttcaacaaatcatcaaagacattaaggagtttaaggaaagcactaaggttgacaaggtggttgtcctgtggacagccaacacagagaggtacagcaacctagttgtgggactaaacgacaccatggaaaacctctttgcttccttggacaggaacgaggctgagatt

SEQ ID NO: 291555 - DNA, 172 bp, Glycine max
  unsure (1)..(172): unsure at all n locations
gcagaagaacaagtagttgagaactaagaaggagaagcaaatggcttcctcaatgatctcttccccagctgttaccactgtcaaccgtgccggtgccggcatggttgctccattcactggcctcaagtccatggcnggcttccccaccaggaagaccaacaatgacattacc

SEQ ID NO: 291556 - DNA, 166 bp, Glycine max
tagttgagaactaagaaggagaagcaaatggcttcctcaatgatctcttccccagctgttaccactgtcaaccgtgccggtgccggcatggttgctccattcactggcctcaagtccatggctggcttccccaccaggaagaccaacaatgacattacctccattg

SEQ ID NO: 291557 - DNA, 168 bp, Glycine max
  unsure (1)..(168): unsure at all n locations
ctgaaatgcttgtnaatttgggaattccttgggttatnattggtcactctgaacggaggcagcttttgaatgaatcaaatgagtttgtgggagataaagttgcctatgcacttcaacaaggtctgaaagttatagcatgcattggggaaactcttgaacagcgtgaag

SEQ ID NO: 291558 - DNA, 162 bp, Glycine max
  unsure (1)..(162): unsure at all n locations
acgaagtgaggnagtggatttctggtgttggtgttgacggcattgggnagaagcttgtgaactcaaaagatggacctccaacctttgagcagcccaagatgactctggagaagctcttgacgtatggtaacatgcttgtccaagaancagagaatgtcaaga

SEQ ID NO: 291559 - DNA, 161 bp, Glycine max
  unsure (1)..(161): unsure at all n locations
cttcgtctcaaacctcttcgttccttcgattcattccatttcttccnaaatggccaaagacccagttcgcgttctcgtcactggagccgcagggcaaattggatatgctcttgtccctatgattgctaggggagtgatgctgggtcctgaccagcccgtgt

SEQ ID NO: 291560 - DNA, 161 bp, Glycine max
  unsure (1)..(161): unsure at all n locations
ctcggactgaaccggttcgctgatctcaccaacgaggaatacagggccaagtacttgggaaccaagatcgatcccaaccggangctcggaaagaccccgagcaaccgctacgcgccacgtgtcggcgacaaattgcctgattccgttgattggaggaagga

SEQ ID NO: 291561 - DNA, 165 bp, Glycine max
ccagggatactacgatggacgctactggaccatgtggaagctgcctatgtttggttgcactgatgcttctcaggtgttgaaggagcttcaagaggctaagactgcataccccaacggcttcatccgtatcatcggattcgacaacgttcgccaagtgcagtgcat

SEQ ID NO: 291562 - DNA, 164 bp, Glycine max
cgacaagaatccagctttgtatggtgaacttgccaaaggccagagccccaagttcatggtgtttgcttgctcagactcaagggtgtgcccatctcatgtgctagatttccaaccaggagaggcctttgtggtcagaaatcttgccaacattgtcccaccatatg

SEQ ID NO: 291563 - DNA, 165 bp, Glycine max
gcagatagaaaaaaagagcgacttttgagttcaaaagatgactaacttcccatcgatcaacttggagaagctcagtggtgaggaaagaaacgataccatggaaaaaattaaagatgcttgtgaaaactggggattctttgagctggtgaatcatggcattcctca

SEQ ID NO: 291564 - DNA, 272 bp, Glycine max
  unsure (1)..(272): unsure at all n locations
aaagattcaacaatggcctctgcttctgctactcttctcaagtccatctcctgttcttgacaagtgcgagtnngtcaaaggccagacccttcgccaacctctcgtgagatgtaacccttcctcagcatcagctctcaccatcaaagctgcttcctatgctgacgagctcgtcaaaaccgccaaaacagtggctcaccggggcgtggtattttggcgatggatgagtcaaatgcaacctgngggaagcgtttggcatctatngggttaganaa

SEQ ID NO: 291565 - DNA, 270 bp, Glycine max
  unsure (1)..(270): unsure at all n locations
tggcaccgagcgcgtacatatcagcngcgacgctggtggtccacctggggatgantnnggtggcggtgtacgagattgggttggggctgttgggggcgtcgctggtgctgancctgtcgtggtggataatggtgattggacagtacgtgtacatagtgaagagcgagacgtgcaggcncacgtggcaggggttcacgtgggaggcgtttagcggtttgtatgggttcttcaagctctccgctgcgtccgcggtcatgctgtgccctggag

SEQ ID NO: 291566 - DNA, 274 bp, Glycine max
agaaatattgtgttagacctaacactgggagttgtgatgcctaggtctacttgtgatgtcatagtaacaatgcaagcccaaaaggaggcacctcctgacatgcaatgcaaggataagtttctccttcaaagtgtagttgcaagccctggggcaaccacaaaagatatcactccagaaatgttcaataaagaatctggtcatgatgttgaagagtgcaagttgagagttgtttatgttgctcctcctcaaccaccatccccagttcgagaaggat

SEQ ID NO: 291567 - DNA, 221 bp, Glycine max
  unsure (1)..(221): unsure at all n locations
gaaggtcaagaatacctagtgacagatatcggtcattggatgatgagggtttcatgattgttgatcgcacttcactgtatggacctaggaatatgcttgatcgacatagagacatgaggatggacatagacaacatgagttatgaggaactacttgcacttggagagagaataggccatgtgancacaggattgtctgaggntttgcttcccaagtatncc

SEQ ID NO: 291568 - DNA, 270 bp, Glycine max
  unsure (1)..(270): unsure at all n locations
gaagaacaagtagttgagaactaagaaggagaagcaaatggcttcctcaatgatctcttccccagctgttaccactgtcaaccgtgccggtgccggcatggttgctccattcactggcctcaagtccatggctggcttccccaccagaaagaccaacaatgacattacctccattgctagcaacggtggaagagtgcaatgcatgcaggtgtggccaccanttggcaagancctttnganacttttcctacctgccagncttgatgatgc

SEQ ID NO: 291569 - DNA, 192 bp, Glycine max
  unsure (1)..(192): unsure at all n locations
ggaancatgnctcntgttgatgcaaaacgagtaaggaggatgctttctaatagggagtcagccagacgctcaagaagaagaaagcaggctcatttaactgagctggagacacaggtctcccaattaagaagcgaaaattcttcattgttaaagcgtttcacggatgtgagccagaaatacagtaatgctgcc

SEQ ID NO: 291570 - DNA, 272 bp, Glycine max
  unsure (1)..(272): unsure at all n locations
gcgtactgttgtgagcatccccaacggtccctctgctctggcagtgaaggaagctgcctggggtctagctcgctatgctgcaatttcacaggngaacgggttggtcccaattgtggagccagagatcttgcttgatggtgagcatgggattgncaggacattcgaagtagcccaaaaggtgtggtcagaggtattcttctacctggctgagaacaatgtccctgttggaaggtattctcctcaagcctagcatggttactccaggagccgac

SEQ ID NO: 291571 - DNA, 268 bp, Glycine max
  unsure (1)..(268): unsure at all n locations
ctcgatcaactcaacacaaaccaaaactnaagctaaaattctcactctctctctcatctcgagatcatagtatcatattcaatatcatttcataccaaacacatggctttggaagctctcaactcaccaacaacaaccgctnccatcttttccctttgacgacccaactattccatgggcgaaacgaaaacgttcaaagcgttctcgngaccatccttctgaagaagagtactcgcctctgcctcatcatgctggccgngggggaaca

SEQ ID NO: 291572 - DNA, 261 bp, Glycine max
  unsure (1)..(261): unsure at all n locations
tgaganagcaaatgtcgatcccccagagatcattgttgacaaccaagtctancttccacctggacccagtcgtcacaattctcacgatctctactgctccggtggggtggtgttggcttctcgtgatggaaagattgtgtgtgaaaatactcttgatgcacgtcttgatgtagttttccgtaaaaagcttccagagatccgaaagcagctctttggacaaattgttgcttgaagattttgattgtaatgtttggttacccc

SEQ ID NO: 291573 - DNA, 271 bp, Glycine max
  unsure (1)..(271): unsure at all n locations
agangcttgtgaactcanaagntggaccncnaacctttgagcagcccaagatgacttctggagaagctcttgacgtatggtaacatgcttgtccaagancaagagaatgtcaagagagtccaattngctgacaagtacttgaacgaggctgcacttggaaatgcnaacgaggatgctattnacaggggaactttcttccaatcttgaattggaggcaangcaaacttggcaagtaaatatntctgttcctgnggttgtggctgatccaagt

SEQ ID NO: 291574 - DNA, 273 bp, Glycine max
ccagacgcagtgactaaaccaaacctctcactcgccgtcgtagggtttctcctttcgtttagcaacaacaacaatggttgcagccaagaaaaccaagaagacccatgagagcatcaacaacaggctcgctcttgtcatgaagagtggaaaattcaccctcggttacaagacggttctcaaatcacttaggagctccaaagggaaattgattatcattgctaacaactgcccccctttgaggaaatcagagattgaatactatgctatgttggc

SEQ ID NO: 291575 - DNA, 271 bp, Glycine max
ccagacctaaagacccaaagcaccgattctgatttcaagaattacatcatcatatcaagaaaaccttggaactacacaaaaatggtgtcggcgaacaaggagatggtcgtgcactgctttgacaccctcctcgctcactacaacagcacggaagcacctcctcctgccttcgatcaggctcaacatccattgtttgttacatggaagaaagtggtgaatggtggagatcctcgccttcggggatgtattggaactctggaagcacgcagct

SEQ ID NO: 291576 - DNA, 271 bp, Glycine max
  unsure (1)..(271): unsure at all n locations
agaacaagtagttgagaactaagaaggagaagcaaatggcttcctcaatgatctcttccccagctgttaccactgtncaaccgtgccggtgccggcatggttgctccattcactggcctcaagtccatggctggcttccccaccagaaagaccaacaatgacattacctccattgctagcaacggtggaagagtgcaatgcatgcaggtgtggccaccagttggcaagannaagtttgagacttttcctacctgccagacttgatgatgca

SEQ ID NO: 291577 - DNA, 273 bp, Glycine max
  unsure (1)..(273): unsure at all n locations
caaattgattgatcttctcaacggctctgattacgtaccaacctatgaagacaaagatgctgactggatnnccgttggtgacgtaccgtgggaaatgttcgtggaatcatgcaagcgcctgcgtataatgaaaggatctgaggcaatcgggctagcaccaagagcagtggaaaagtgcaagancagaagctagagtcaaatttgtaaattccatttcgacaacaatcngctctatctgttgctctngggcgtccacggaaagcttaatgctnt

SEQ ID NO: 291578 - DNA, 275 bp, Glycine max
  unsure (1)..(275): unsure at all n locations
aaaatctttccaatgtgagcttgtctttgccaagatgggaatcaaccccatcatgatgagtgctggagagttggaaagtggaaatgcaggagagccagcaaaactgatcaggcagagataccgtgaagctgcagacatgatcaagaagggaaagatgtgcgctctcttcatcaacgatcttgatgcaggagctggtcgtcttggtggaaccacacaatacactgtgaacaaccagatggtgaatgccactctcatgaacattgcctgannncccc

SEQ ID NO: 291579 - DNA, 188 bp, Glycine max
  unsure (1)..(188): unsure at all n locations
gacggttccaaatcactgtgactctncatattncccgttgagtacagtcgcgangattatgcagtcncggttgttcacgcggttcagtgtgtgtgcgaccgaagtccgtgaaacacccagttatctgcagcnagagtgggagagccatcgtgtctcatcattcggtcttgatttcgacncggttggca

SEQ ID NO: 291580 - DNA, 268 bp, Glycine max
  unsure (1)..(268): unsure at all n locations
cacatcaatttctatctctcttatactctcactactctctttgctctttcttttctccactatggctgcacaagaaaacaacttccaagactacttgcctgtgatggccaacaagctnggtggggatggcctaattgatgaactgtgcaatgggttcgatcttttgaaggattctgataaaggggtcatcacttttgagagcctcaagaggaattcttacttgcttggtcttcagggtctcagtgatgaggatcttcgctccatggtt

SEQ ID NO: 291581 - DNA, 264 bp, Glycine max
  unsure (1)..(264): unsure at all n locations
caagcnttgtatggttatgatcctgttttgactgaggaagatttggaacctaacattattgnnaagagttgttgcggttctagaaagaagggaaagggtggcaataagaagtacagtgacaagaagaaggcgatgggaagaactgaatccactgtacccatatttaatatggaagacatagaggagggtgttgaaggttatgatgatgaaaggncnctacttatgtctcaaaaganttggagacnctttgggncanncnccatt

SEQ ID NO: 291582 - DNA, 205 bp, Glycine max
  unsure (1)..(205): unsure at all n locations
ccattctctctgtgtatttccctacctctcccttcaagatgcagatcttcgtcaagaccctcaccggcaagaccatcacccttgaggtggaaagctctgacaccatcgacaacgtcaaggccaagatccaggacaaggaaggaatccccccggaccagcaacgtctcattttcgcnggaaagcaanttgagganggccgtncctt

SEQ ID NO: 291583 - DNA, 271 bp, Glycine max
  unsure (1)..(271): unsure at all n locations
agtntgtatagtgtagganttgttggtattcgtgataaaaacacctcatcctattcattttgccatgacgggcgaactccagataaaggttttgaaagtaatgagaaattattaattcatccatgttactggcttggtttgaatctaaatcgtaatgcacttgctccagaggaagcagaggagataaatgacgaatatgatattaatattatttcagataattcagccattagaaataaaacaannggtcaaataactactcatctaganc

SEQ ID NO: 291584 - DNA, 271 bp, Glycine max
  unsure (1)..(271): unsure at all n locations
cgaatatggctgtcttggagcgtgcttgtnatttcttctttcgccatgctgcacagcnttcaggtgttcccttgagaatggtggagagaagcagaaggaacttccctctaagaaaagctcgtgatgctgctgaagagatgctctctgggctactcaaagccaaagttgatggatttatgacattgatcgagaatgtaaattggatgggtgacgaggcacctcagagtggaaatgaatatgtaaacgaggtcataatttatttggaaatttt

SEQ ID NO: 291585 - DNA, 256 bp, Glycine max
  unsure (1)..(256): unsure at all n locations
attcttggtatctggggaggcaagggacaaggaaaatctttccaatgtgagactgtctttgccaagatgggaatcaaccccatcatgatgagtgctggagagttggaaagtggaaatgcaggagagccagcaaaactgatcaggcagagataccgtgaagctgcagacatgatcaagaagggaaagatgtgcgctctcttcatcaacgatcttgatgcaggngctggtcgtcttggtggaaccacacaatacactg

SEQ ID NO: 291586 - DNA, 263 bp, Glycine max
  unsure (1)..(263): unsure at all n locations
aaagaggaagaaccagtatggcggaatccgccagcntccatggggaaagtgggctgctgagattcgcgacccaaganagggggttcgtgtttggcttggaactttcagcactgctgaagaagctgcaagagcttacgatgctgaagcaaggaggatccgtggcaagaaagccaaggtgnatttccctgatgagccttcaggcgctgcttcctcaaaacgtctcaaggcgaatccagaggctcagccaatgaagaaaaatctgt

SEQ ID NO: 291587 - DNA, 260 bp, Glycine max
tttttcgcaccgattcaattcctgaacaggacgttgtcaagattgttgacaccttccctggccaatccattgatttctttggtgcactgagggccagagtatatgatgacgaagtgaggaagtggatttctggtgttggtgttgacggcattgggaagaagcttgtgaactcaaaagatggacctccaacctttgagcagcccaagatgactctggagaagctctgacgtatggtaacatgcttgtccaagaacaagaga

SEQ ID NO: 291588 - DNA, 264 bp, Glycine max
  unsure (1)..(264): unsure at all n locations
ggcagcgtcactacaagcagcagctactttcatgcaacccaccaagttgagcaggagcaacactttgcagcaaaagtctactcagtccatttccaaggcttttggtttggaacctgttggagctaaaaaggtcacatgctcccttcaggctgatcttaaggacttggctcacaagtgtgttgatgctaccaaaattgcaggattcgcccttgnccacctctgccctcgttgtctctggggcaagtgtganggccnncaaaagac

SEQ ID NO: 291589 - DNA, 263 bp, Glycine max
  unsure (1)..(263): unsure at all n locations
caaaggtcaaggaaaatccttccaatgcgagcttgtctttgccaagatgggaatcaaccctatcatgatgagtgctggagagttggaaagtggaaatgcaggagagccagcaaaactgatcagacagagataccgtgaagccgcagacatgatcaagaagggaaagatgtgtgctctcttcatcaacgatcttgatgcaggagctggtcgtcttggtggaactacacaatacactgtcaacaaccagatggtgantgccnccc

SEQ ID NO: 291590 - DNA, 262 bp, Glycine max
caagtacttgggtccattctcggagcagattccatcatacctgaccggagaattccctggtgactacggatgggacactgctggattatcagctgacccggaaaccttcgccaggaaccgggagctggaggtgattcacagcagatgggcaatgcttggtgcccttggctgcaccttcccagagatccttgagaagaatggtgtcaaattcggcgaggcctgtggttcaaggccggtgcacagatcttctcagagggaggcc

SEQ ID NO: 291591 - DNA, 224 bp, Glycine max
  unsure (1)..(224): unsure at all n locations
aaagagtggtacttcttttcaccacgggaccggaaatacccaaacggttcgaggccgaaccgggcggctggcaccggttactggaaggcaaccggggcggataagcccattggtcagcccaaaccggttggncattaaaaaagctttggtgttttacgcagggaaagctcctaaaggggacaaaagcanttggatcatgcagantatcgtctcgnanacttant

SEQ ID NO: 291592 - DNA, 261 bp, Glycine max
  unsure (1)..(261): unsure at all n locations
cagagtcagagagagagattcactgaaacagagcgcagaagaaaatacataaactaatccagaaaatgagcagcggcgctggaaaggtggtgtgtgtcaccggcgcttccggttacattgcttcctggatagtcaaattcctcctcaatcgcggctacaccgttaaggccaccgttcgcgacacaagtgatccgaaaaanataaaccacttggttggcctcgacggtgctaaggagaggctgcncctctacaaggcgatnt

SEQ ID NO: 291593 - DNA, 262 bp, Glycine max
  unsure (1)..(262): unsure at all n locations
cgcaagtnaaaagaaagaatcccaggcgaggagaaagatggaggggaaggagcaggatgtgtcgttgggagcgaacaagttccccgagagacagccaattgggacggcggcgcagagccaagacgacggcaaggactaccaggagccggcgccggcgccgctggttgacccgacggagtttacgtcatggtcgttttacagagcagggatagcagagtttgtggccacttttctgtttctctacatcactgtcttaaccgtt

SEQ ID NO: 291594 - DNA, 259 bp, Glycine max
  unsure (1)..(259): unsure at all n locations
ccggagatcctccgcttcaaggccttcgagccaatcctcctcctcggtcgccaccgcttcgccggcgtggacatgcgcatccgcgtgaagggcggcggtcacacctcccagatatacgccatcaggcagagcatagccaaggctctcgtcgcttactaccagaagtacgtcgacgagcagtccaagaaggagatcaaggacatcctcgtcaggtacgaccgcacctcctcgtcgccgatccccgcngntgngagcnnaa

SEQ ID NO: 291595 - DNA, 260 bp, Glycine max
  unsure (1)..(260): unsure at all n locations
caaaganggcgtcttcataaacgcctttattctccgtttccgtttccttcccggaattcgatttttccatctcngaaaatgagagagtgcatctcgatccacattggtcaggccggtatccaggtcggaaatgcttgctgggagctctactgtcttgagcacggcatcgggcccgatgggcaaatgccaagtgacaaaacagttggcggaggtgatgatgctttcaacatttcttcagtnagactggtgctggaaagcnc

SEQ ID NO: 291596 - DNA, 261 bp, Glycine max
  unsure (1)..(261): unsure at all n locations
aaagagaagcattagcaaaagcaagaagaactagtctaagcagaaatggcctcttcagtgatggcatctgtggccctcaaacctgcccctttcactgttgagaagtcctcagttagaggccttccctccctctcaaggaactcctcttcattcagagttgtggccagtggtggcaagaagatcaagantgacaagccttanggaattaatggtggcatcgctttgagggaagganttgatgctctggcaggaaaggaaagg

SEQ ID NO: 291597 - DNA, 293 bp, Glycine max
gcaatgtctcatttgctgcagttgctgtttctttcactcataccattaaagctcttgagccattcttcaatgctgctgcttcacagttcatacttggccaatcaatccccatcactttgtggctgtcactggctcctgttgttattggtgtgtccatggcatctttgaccgagctctcattcaactgggtcggcttcataagtgctatgatttcaaacatttccttcacgtaccgaagcatctattcaaagaaagccatgactgatatggacagtaccaatatctatgcctac

SEQ ID NO: 291598 - DNA, 219 bp, Glycine max
  unsure (1)..(219): unsure at all n locations
gtcacttcaaggaaatagactaactgggaagattccagaagtgattggtttaatgcaagcccttgcaatattggatttgagtgagaatgagttagtgggctcgattccccccattcttggtaatctgactttcactggcaaattgtaccttcatggaaacatgcttacgggtcctatacctcctganctnggcaatatgtccanncngagccnacctgc

SEQ ID NO: 291599 - DNA, 282 bp, Glycine max
  unsure (1)..(282): unsure at all n locations
tcgacatctgataagccagaagtggtggaaaggggtagcaaggatgaaaaacacanggaagatgatcaagaggaggggaagggtggattcattgagaaggtgaaggatttcattcatgacattggtgagaagattgaggaagctattgggtttgggaagccaactgctgacgttactgcgattcacattccatcgattaatcttcacaaggcagatcttgttgttgatgtgctcatcaagaacccgaatccggtgccaatccctctgattgacatagattnc

SEQ ID NO: 291600 - DNA, 279 bp, Glycine max
gcaattgcaccggcaatggcatgtgcctctccagtggaatttgtgaatgtaaatctggctatactggcattgactgttctactgctgtttgtgacgagcaatgcagccttcatggcggggtttgtgataatggagtttgcgaatttcgctgttctgactatgcgggatacacttgccacaacagctccatgctcttctccagtctttcagtttgcagaaatgtgctgggaaatgatatctccgggcagcattgtgctcccagtgaatctagcatactac

SEQ ID NO: 291601 - DNA, 278 bp, Glycine max
  unsure (1)..(278): unsure at all n locations
aganagtgaagaagaagaaatagagggttttggtgtttggtgtttgaatcgtgaaaatgttcagaaaccagtatgacacggacgtgacgacatggagcccggcggggaggctgttccaggtggagtacgcgatggaggcggtgaagcagggctcggctgcgatagggctccgatccaagacccacgtggtcctcgcatgcgtcaacaaggctaactccgaactttcatcgcaccagaagaagatcttcaaggtcgacaaccacatcggcgtcgccatc

SEQ ID NO: 291602 - DNA, 278 bp, Glycine max
ctaaaattccagaagaagtcagacaggagataggatcttattttgtggattctgatccaattctggaagaggataacagaaaactgactaaacttgacgacaacacagcggattatattcgtaccggtttaagtcctaggtggagtgatctagatatcaatcagcatgtcaacaatgtgaagtacattggctggattctggagagtgctccacagccaatcttggagagtcatgagctttcttccatgactttagagtataggagagagtgtggtagg

SEQ ID NO: 291603 - DNA, 281 bp, Glycine max
  unsure (1)..(281): unsure at all n locations
cctggctctgttccgtcgatgacgatggcgtttagggtgcgaaaccctgacctccgctttctcattcttctctctctcttgtccatcacttccgccaaggtcttcttctcaggagcgtttcgatgacggatggggaaatcgttgggttaaatcagattggaaaaaagatgagaacctggctggggagtggaaccacacctctggccaatggaatggagacgctaacgacaaaggtattcaaaccagtgaggattacagattctacgctatttcagctcngt

SEQ ID NO: 291604 - DNA, 285 bp, Glycine max
  unsure (1)..(285): unsure at all n locations
atttttcaagtaacttaaggtttcaaacctaggaagttggaagtcatggcagcaacattgatggcagcaacaacaagttctggtactccttaaagcaactcctttccttggccaaggcaagggtgccaatgccaatgctcttagggatgttgtctccatgggaactgggaagtacaccatgggcaatgatttgtggtatggaccagacagagtgaaatacttgggacccttctcagctcagaccccttcatacttgaaangngaattccctggggattatggatc

SEQ ID NO: 291605 - DNA, 290 bp, Glycine max
  unsure (1)..(290): unsure at all n locations
catcaggatggagtctcaggtgaagcacgcacttgttgtcaaagtaatgggtcgtactggatccagaggacaggtgacccaggttagagtgaagtttctggatgatcagaaccgtcacatcatgaggnatgttaaaggaccagtgagaganggagacattctcaccctactcgagtctganagggaagctagaangttgcgctaagagggtctttctttcttgaccttcatggtagtcagtcggtgctaaaggttatagccccctatcttgtctgggantatttccatcc

SEQ ID NO: 291606 - DNA, 284 bp, Glycine max
  unsure (1)..(284): unsure at all n locations
gtttgagngagagagagggagacacaanacaagggaaggaaaancaagtggaatcaatagcnatgaagatngttcggaaagacctcgtacccaatggacctggcagcattaagatggttgcagtggattcggatgatctctggtttgcgtataanctgatagctcccggagactctgtcatggccgttantgtcaggaaggttctaagagaagctgctagtggcggacgggaagcagaacgcgtcaagctcaaattggaaattaaagtcnaagagcttgtgatt

SEQ ID NO: 291607 - DNA, 284 bp, Glycine max
  unsure (1)..(284): unsure at all n locations
angaaagctgttgacaatgaatccaacctccaccatcttattttgtccaaggcagcaaccaatgctgtgatggaaacagttgatcccgacattactgccacatgcaaggacctaggagctgtaaaanaggtttatcagcttgctctattatgcacaaagaggcagccagctgataggccaacaatgcacgaagtgacacgtgtactcggaantctcgtgccatcaagcatcccaccaaagcaatagctgacctacccacctgcttcaaatccatctgccanagg

SEQ ID NO: 291608 - DNA, 285 bp, Glycine max
  unsure (1)..(285): unsure at all n locations
ggctcgtcactccttgctcttagcnctcctcctcttcgccgccgtnncnaccgcagcgatggtggtggcagcgttccgacgccgacgacatcntgatccgtcaggtggtgccagatgttggcgaagcgaagaggaggacaanctgatgaacgccgagcaccantttcgcgnancttcaaggnccaagttcgccaagacntacgccagcaaggaggagcacgatcatcgcttnngcgtcttcaagtccaacctccgcagagccaggctgncangccaagctcgacc

SEQ ID NO: 291609 - DNA, 281 bp, Glycine max
  unsure (1)..(281): unsure at all n locations
cacattcttcatcacttcattcaacanttctccccttagcttgtttcaccaatggctgctgcggttagtgctgcagtctcttttccatccaccaagtctacctctcttccaagcaggacctccctcattgccccagagagagttgtgttcaagaaggcttcattgcaaaacagagatgtttctagcagtggacgggtagtttccatcagagctcaagtcaccactgaggcaccagccaaggttgaaaaagagtccaaganacaggatgaaggtgtggttgt

SEQ ID NO: 291610 - DNA, 285 bp, Glycine max
  unsure (1)..(285): unsure at all n locations
aaganaacaanatggaagacanagtttctgcgttgangtctttgatggtttctcactctccgccgctggatgccttagtggtgccctctgaagattatcacctgagngaatatgtgtctgcacgagacaagcgccgcgaattcgtttccggcttcantggaagtgccggcttggcacttataanacagaaagaagcactgctgtggacggatggacggtattttttgcaggctgagaaaganttagtgctggtggnagctaatgcgattggnaagntcctgctcc

SEQ ID NO: 291611 - DNA, 285 bp, Glycine max
  unsure (1)..(285): unsure at all n locations
gacttgacgttatacaacaggcccagtctggaactgggaaaacagcaantttctgctctggaattctgcagcaacttgactatagtgtgactgaatgccaagccttggttttagcaccaactagggagcttgctcagcaaattgaaaaggttatgcgggcactcggagattatctnggtgtgaaggtgcacgcatgtntgggaggnaccagtgttcgngaagccccaacgcatttatcangtngtntccatgtcgtcgtncaccactcggggncgnatantancc

SEQ ID NO: 291612 - DNA, 277 bp, Glycine max
  unsure (1)..(277): unsure at all n locations
tcttgatcnatagacatggcgaccgtcacttctgcagccgttgctattccctcattcantggcctcaaggcaagcgcaggcaaagtgngtgccgcagttaaagtctcagctccccangccanaaggttgggcatcaaggcttcgctgaaagacgttggagtcgctgttntngccactgccgcgagtgcagtgctggctagcaaggccatggccattntcntgttgctgggtggtgatgacgggtctctggttccctcccaacattncccgtggcnnc

SEQ ID NO: 291613 - DNA, 284 bp, Glycine max
  unsure (1)..(284): unsure at all n locations
ccttcgtcaacggcggaggacttcccggacaggccttcttcaactccgctccggtgtgggtcaccgggggcgaccgtctctctgcctcggcctgcgagagggcgaggcagggacacgtgttccggctgcaaaccctggtttgcataccgtccgcgaacggcgtcgttgagctggggtccaccgagntaattttccagacncccggatctgatgancaaggtgaaggttctgtcnantttcagcaacaanaacttngacatgggtnttcttggcccccnacaacc

SEQ ID NO: 291614 - DNA, 276 bp, Glycine max
gtcctttcaacgcattctctcctcgaacacaccgatgttgctgtgcttctcgacaacgaggcaatctacgacatttgcaggagatctcttgacatcgaacgccctacctacaccaacctgaaccgtctcgtttcccaggtgatatcatccctcactgcctctttgaggtttgatggagcactgaatgttgatgtgactgagtttcaaaccaacttggttccttacccaaggatccatttcatgctttcctcgtatgcccctgttatctctgccgag

SEQ ID NO: 291615 - DNA, 279 bp, Glycine max
  unsure (1)..(279): unsure at all n locations
cgtttgcaacaaggcttttccttcttaccaagcactcggtggacacaaggccagccaccgcaaggcctcgtcggaatccaacaccaccgcctccgccgtcgccgtctctgccacagccaacgacagcgtttccgcttcgaccgtcggcggcggaaggatgcacgagtgttccatctgtcacaagagtttccctaccggtcaggccctgggtggccacaagcgctgtcactacgacggcggaaacaanccacagtaacagcaacgccaacggcaacaaca

SEQ ID NO: 291616 - DNA, 277 bp, Glycine max
  unsure (1)..(277): unsure at all n locations
ttgttgtaactcgttcttcttcttttgttgttctgtgtttgtntttgttttttctctcacctgaaaatgtcttgctgcggtgnnaactgtggttgcggaagctcctgcaagtgcggcaacggctgcggaggctgcaagatgtacccagacttgagctagactgagtcaaccaccaccgagacttggtcatgggagtggcactgtnaaggctcaatntgagggtgngaaatgggtgtgcccgcnganaacgatggctggaaangtcgaccanacctcc

SEQ ID NO: 291617 - DNA, 274 bp, Glycine max
gctgcaccaacaccgattcagaaaactgaagaggagtggaaggtcattctctcccccgagcagtttcggatccttcgccagaaaggaactgaattgaagggtacaggagaatataacaagttttatgaagaaggaatttacaactgtgctggctgtgggactcctctttacaagtcttcaaccaagtttgattctggttgtggttggcctgctttctttgagggttttcccggtgccatcgatcgatcccctgacccagatgggaggaggactg

SEQ ID NO: 291618 - DNA, 286 bp, Glycine max
  unsure (1)..(286): unsure at all n locations
cacaaagtgttctggccatagaatctattcacaaacacaactacattcacagagatattaaacctgataaccttcttctggataaaaatggtcacatgaagctctctgattttggtctctgtaagcctctcgattgtaatgccttgtctacactgcatganaatcagaccatagatgatganactttgggcagaaccaatggntgttgatgatgcggnncntcgaagtagctggagacgnccacgtgaacngtttcaanntgggcagntgnagaggggntntnccc

SEQ ID NO: 291619 - DNA, 273 bp, Glycine max
  unsure (1)..(273): unsure at all n locations
tggcagaagtcttaggagtgtaaaacagagacgcaaaatgaagacgattctatcgtccgagaccatgaatattcccgacggcgtgagcatcaaggttcacgctaaggttatcgaggttgagggccctcgtggaaaactcgtgcgagacttccaccatctgancttggacttccaacttattaccgacgatggcggtaaaaggaagctcaagattgattcttggtttggttctcgtaaaacctccgccgccatccgcaccgccctcagccacgt

SEQ ID NO: 291620 - DNA, 273 bp, Glycine max
tctcaagtttttgaagtatagagatggcagagacattcctatttacctcagagtcagtgaacgagggacaccctgacaagctctgtgaccaaatctctgatgctgtcctcgacgcttgcctcgaacaggacccagacagcaaggttgcctgcgaaacatgcaccaaaaccaacttggtcatggtcttcggagaaatcacgaccaaggccaatgttgactacgagaagatagtgcgtgacacctgcaggaacatcggctttgtctcaaacgatg

SEQ ID NO: 291621 - DNA, 272 bp, Glycine max
  unsure (1)..(272): unsure at all n locations
tgccccatcacttcaagatgacttttatttgaatctggtggactggtccacacaaaatgttcttncctgtggggctaggcacttgtgtgtatttatggagcgcttcaaacagcaaagtgactaagttatgtgacttggggccttatgatggtgtctgctctgtccagtggacccgggagggttcttttatatccattggtacaaatcttggtcaagttcaggtttgggatggaatcagtgtaaganggtcagaaccatgggtgggcatcaga

SEQ ID NO: 291622 - DNA, 280 bp, Glycine max
  unsure (1)..(280): unsure at all n locations
cagaagaacaagtagttgagaactaagaaggagaagcaaatggcttcctcaatgatctcttccccagctgttaccactgtcaaccgtgccggtgccggcatggttgctccattcactggcctcaagtccatggctggcttccccaccagaaagaccaacaatgacattacctccattgctagcaacggtggaagagtgcaatgcatgcaggtgtggccaccagttggcaagaagaagtttganactctttcctanctgccagacttgatgatgcaacatt

SEQ ID NO: 291623 - DNA, 288 bp, Glycine max
  unsure (1)..(288): unsure at all n locations
atccattgtggcttcaatacattaaggtccccttaataactttgggatatgaaagtaattatgatgtttttgtcaaagctgagggtggtggcctgtctggtcaggctcaggcaatctctcttggcattgctcgtgccttgctgaaggtgagcgaagatcatagagtacctttgagacaggaaggacttcttacaagagattccagagtggttgagaggaaganagttggtctcaagaaagctcgtaaagcccctcaaatattccaagcgttgaggttgggatgttacc

SEQ ID NO: 291624 - DNA, 278 bp, Glycine max
  unsure (1)..(278): unsure at all n locations
caagtagttgagaactaagaaggagaagcaaatgggcttcctcaatgatctcttccccagctgttaccactgtcaaccgtgccggtgccggcatggttgctccattcactggcctcaagtccatgggctggcttccccaccaggaagaccaacaatgacattacctccattgctagcaacggtggaagantgcaatgnatncaggtgtggcnaccagttggcaagangaagtttgagactctttcctacctgccagacttgatgatgcacaattggca

SEQ ID NO: 291625 - DNA, 275 bp, Glycine max
caaaaagaaagaatcccaggcgaggagaaagatggaggggaaggagcaggatgtgtcgttgggagcgaacaagttccccgagagacagccaattgggacggcggcgcagagccaagacgacggcaaggactaccaggagccggcgccggcgccgctggttgacccgacggagtttacgtcatggtcgttttacagagcagggatagcagagtttgtggccacttttctgtttctctacatcactgtcttaaccgttatgggagtcgccggggcta

SEQ ID NO: 291626 - DNA, 274 bp, Glycine max
tggcaatccccctgaaagactttgtatgccgatagttgatcatattcagtccttgggtggtgaagttcatctaaattcgcgcattcaaaaaattgagctaaatgatgatggaacggtgaagagcttcttacttaataatgggaaagtgatggaaggagatgcttatgtgtttgcaacacctgtggatattctgaagcttcttctaccagacaactggaaagggattccgtatttccagagactggataaattagttggagtcccagtcataaat

SEQ ID NO: 291627 - DNA, 273 bp, Glycine max
  unsure (1)..(273): unsure at all n locations
tcaccatcatagtatttcgttagaaggggaatttggcagattcattagaagaaaatggcgggtggtggaaaggtttcgttcaaagtcacactcacctccgatccaaagttacccttcaaagtgtttagcgttccagangcggcaccttttactgccgttctcaaattcgccgccgaagaattcaaagtcccgccccagaccagcgctatcatcaccaacgatggtgttggcataaatccccagcagagcgcaggcaatgtcttccttaagcat

SEQ ID NO: 291628 - DNA, 268 bp, Glycine max
  unsure (1)..(268): unsure at all n locations
gcagaacagagagagcaaaaccctagagcatccatcacaagcagaggaagaagatggtgaagttcctgaagcctaacaaggcagtgatcgtcctgcagggccgctacgccgggcgcaaggcggtgatcgtgaggnccttcgacgagggaaccagggagcgcccctacggccactgcctcgtcgccggaataaagaagtacccaagcaaggtcatcaagaaggactccgcgaagaagaccgcgaagaatctagggttaaggccttcgtg

SEQ ID NO: 291629 - DNA, 268 bp, Glycine max
  unsure (1)..(268): unsure at all n locations
aaaangttgtgctgtgccgcctcttccgtaggcagcagcaatggcctcaaatcccaaaactttgacctttgaggaggtagctaagcacaacaacaaaaaggattgctggatnattatcaatggaaaggtgtatgatatcacaccatttttggatgagcatccaggaggtgatgaagttttgctgacgtcaacagggaaggatgccaccattgattttgaagatgtgggccacagtgattctgctatagaaatgatggaaaaatacttc

SEQ ID NO: 291630 - DNA, 266 bp, Glycine max
  unsure (1)..(266): unsure at all n locations
cgctccgcaccagtttcaccgcacgaatatcttgttgtttggagcganccgagaaaaactctgtaaacatgttggtttaccaggacctccttacaggtgatgagcttctctctgactccttccgttacaaggaaattgagaatggaatgctgtgggaagttgaggggaagtgggttgttaaaggagcagttgatgtagacattggtgcaaacccttctgctgagggtggaggagaagatgagggagttgatgatgcagctgttaag

SEQ ID NO: 291631 - DNA, 268 bp, Glycine max
  unsure (1)..(268): unsure at all n locations
tgctgttggggttaattcaaatgaaaatgacttccttgaggcattcaagaggccagcagaaattgtcactggttattttggccagtttgctgtgaagcctcttcttggatatctgttttgcatgattgcagtaactgttttangcctaccaacaacagtaggcgcaggaattgtattggtggcttgtgttagtggtgctcagcttcaagttatgctactttcctgactgatccacaaatggcacctttaagcatagttatgacatcac

SEQ ID NO: 291632 - DNA, 275 bp, Glycine max
  unsure (1)..(275): unsure at all n locations
gatgcttctggcctgtctaagggctatggttttnttcaattcgacagtnaagagtctgcacagaatgctattgacaagttaaatggcatgttgatcaatgataagcaggtctatgtaggccattttctgcgaaagcaagatagagagaatgctctcagtaagacaaaatttaataatgtctatgtgaaaaacttatcagagtcaaccacggatgaagagttgatganattttttggagaatatggtaccattactagtgctgtaataatgaggga

SEQ ID NO: 291633 - DNA, 280 bp, Glycine max
  unsure (1)..(280): unsure at all n locations
cnttggctgagacctgatggcaagacccaagtcantgttgagtactacaatgacaagggtgccatggttccaatncgcgtccacantgtgcttcatntncacacagcatgatgagtgngtnanaaatgatgagattgcagctgatcttaaagaacacgtgattaagcntgtgattnctgagaagtaccttgatgagaagaccattttccatttgaacccttntgggcaggtttgtcatggagggccgcatggcgattttggtgtnanggcngnaagatcc

SEQ ID NO: 291634 - DNA, 273 bp, Glycine max
  unsure (1)..(273): unsure at all n locations
cgganaggccgagcgctacgaggagatggtggagttcatggagaaggtctccgcctccgccgagagcnaggagctgaccgtggaggagcgtaacctcctctccgtcgcctacaagaacgtgatcggcgcttcgccgcgcctcctggcgcatcatctcctcaatcgagcagaaggaggagagccgcggcaacgaggaccacgtcgccgtcatccgcgactaccggctccaagatcgaggccgagctctccaacatctgcganggaatcttcaaa

SEQ ID NO: 291635 - DNA, 273 bp, Glycine max
  unsure (1)..(273): unsure at all n locations
tgctactgagtttccacactggcataccttancgtcttccgaattcgaagttaatttgcaagatggctaaggaaaaggctcagatcaacattgtggtggttggtcatgtggaccctgaggaggcaaccaccattaacgagctgaagaagcctgttgtggagaaagaagctccagggcatgccatatgagggcatgcacgtacggcctcggaggggaaccagaaaattatgttaacaaaataatctggaaccctaatgtatcagtgtcatcatc

SEQ ID NO: 291636 - DNA, 269 bp, Glycine max
  unsure (1)..(269): unsure at all n locations
ctctctctcaccaaagccttcctagaacgaaaaaaaaaaagaagagcaattttccctcanccaaagaagaagaagcaaacaatggccgatcaacttaccgatgaacagatctccgagttcaaggaagccttcagcttgttcgacaaggacggcgatggttgcatcacaaccaaggagcttggaactgttatgcgttcattggggcaaaacccaactgaggcagagctccaggacatgatcaatgaagtggatgctgatgggaatggtac

SEQ ID NO: 291637 - DNA, 264 bp, Glycine max
  unsure (1)..(264): unsure at all n locations
aaggcagaagacaagggcactggtaaatcagaaaagatcaccattacaaacgaaaagggacgtcttagccaggaagaaattgagannatggttcgcgaacagaggagtttgcagaggaagacaagaaggtgaaggagaggatcgatgctcgcaacagtcttgaaacctatgtatacaacatgaagaaccagatcagtgacaaggacaagctcgctgacaagttggagtctgatgaaaaggagaaaattgagatgctgtgaaaga

SEQ ID NO: 291638 - DNA, 262 bp, Glycine max
  unsure (1)..(262): unsure at all n locations
cacttaatccaggctcagaagattgcttttaacgagagccagangccggtgtacccattttctgctatagtgggacacgatgagatgaagctttgccttctcctaaatgtaattnatcccaagattggaggtgtaatgatcatgggggacagaggaacggggaaatctacaactgttagatcattggtagatttgcttcctgaaatcaaggttgttgctggtgaccatatattcagacccagaggatccagattcatgggtg

SEQ ID NO: 291639 - DNA, 266 bp, Glycine max
  unsure (1)..(266): unsure at all n locations
tagcccaagccctatacaaccaaaccctaacacacacccatttgattcagtttccatggctagcctcaaggttgcatttttngctgcagtgctctgcatggttgtggtgagtgcacccatggcacatgcagctatcacgtgcgggcaggtgacgagtagcctggccaattgcatcggttacctccagaagggaggaacgccgtcgtcgggatgctgcaacggagtgaagagcctcaatgccgccgccaagaccaccgccgaccgcc

SEQ ID NO: 291640 - DNA, 276 bp, Glycine max
  unsure (1)..(276): unsure at all n locations
ctcacattctctgttttcccatccccaaaggtctctgacacggttntggagccttacaatgctactttgtccgttcaccaactagtggagaatgcagatgagtgcatggttcttgacaatgaagcactctatgacatttgcttcaggaccttaaaactcaccactcctagttttggtgatctgaacccacctgatttctgcgacaatgatggagtgacatgntggctgaggttcccgggacaactgnactccgactgaggaagctagcagtgaacc

SEQ ID NO: 291641 - DNA, 270 bp, Glycine max
  unsure (1)..(270): unsure at all n locations
ttgcaattgaagttgaagtcttgcccttctctcttcaantccaaacacaagacatcatccatccatgggctgcctccgtctccantgtcggagctgtcaacagagctcttttgaacctgaatgggtctggacctggggtttcagctcccagttcatccttctttgggagcagcttgaagaaggttattggctcaagggtccccaacacaaagatttcctctggaagcttcaagattgttgctgtagaagagaagaaagagattgaagaga

SEQ ID NO: 291642 - DNA, 267 bp, Glycine max
  unsure (1)..(267): unsure at all n locations
ccaangattagtaagttgatgcctgancttggttttgctccggaggattctgatagattggtcgcgtctttcagtggagggtggcagatgaggatgtgtctcggcaagattctacttcaggagcccgatttgttgctgttagatgagcctacaaatcaccttgatcttgacaccattgagtggcttgaggactatcttaaccagcaggatgtgccaatggttatcattcccatggatcgagcttttcttgatcagctgtgtacaaaa

SEQ ID NO: 291643 - DNA, 263 bp, Glycine max
ggagagccagcaaaactgatcagacagagataccgtgaagccgcagacatgatcaagaagggaaagatgtgtgctctcttcatcaacgatcttgatgcaggagctggtcgtcttggtggaactacacaatacactgtcaacaaccagatggtgaatgccaccctcatgaacattgctgataaccccaccaatgtgcagcttcctggtatgtacaacaaggaagagaacccccgtgtgcccatcatcgtcaccggtaacgattt

SEQ ID NO: 291644 - DNA, 263 bp, Glycine max
cattgagcaacagagtcctgatattgctcaaggtgtgcacggccacctcacaaagaggcctgaggagattggtgctggtgaccaaggtcatatgttcggctatgccactgacgagactcccgagctcatgcccttgagccatgtccttgccacgaagctcggtgccaagctcaccgaggttcggaagaacgggacatgcccttggctgagacctgatggcaagacccaagtcactgttgagtactacaatgacaagggtgcca

SEQ ID NO: 291645 - DNA, 262 bp, Glycine max
  unsure (1)..(262): unsure at all n locations
aatcttaaaccctcagaagtaatttctgatcctgatgccgaaacagctgaagaacagctccttaagcagttcatgaagaaggacctagaagaggctctggacagtctcaatgcaagagagaggcaggtggtaagatggagatttggtatggatgatggaaggacgaagaccctgcaaganataggggagatgttgggtgtgagtagggagagattaggcaaatcgagtcaagtgcttttaagaagcttaagaacaagaagag

SEQ ID NO: 291646 - DNA, 276 bp, Glycine max
  unsure (1)..(276): unsure at all n locations
cacatatatttcttcagcacttatagtgtggtgagannananattaaggaagagctagcttaattgagtgctgctaattctatggctacccttgttgctccaaaccaaaaatctccggttgaagacgttgaggctctacataaggctttcaaaggatgggggaccgatgagaaaaccgttattgcaatactgggtcatagaaatgttcatcagaggcaacaaatcagaaaggtttatgaggaaatttaccaagaggacctcattaaacgcctggag

SEQ ID NO: 291647 - DNA, 259 bp, Glycine max
  unsure (1)..(259): unsure at all n locations
ttctattcattcaagattcagcaagtgcgtttcggaagcagagancgaaatacttcgagatggcccgtacaaagcaaactgctcgtaagtcaactggaggaaaagctcccaggaagcagcttgcaaccaaggctgcacgtaagtctgctccaacaactggtggtgtgaagaagcctcatcgttatcgccctggaactgttgctcttcgtgagattagganataccagaagagnnctgagtcctaatcaggnagcttcct

SEQ ID NO: 291648 - DNA, 254 bp, Glycine max
cgagtttcacagcagcaatggtgtacgtcaaggctcagaaatcaaaagcctacttcaagagatatcaagtcaagttcaagagaagaagagagggaaaaaccgattaccgtgccaggattcggttgattaatcaggacaagaacaaatataacactccgaaataccgatttgttgttcgctttagcaacaaggacattgttgcacaaataatatctgctagcattgctggcgatattgttcttgctgcagcatat

SEQ ID NO: 291649 - DNA, 270 bp, Glycine max
  unsure (1)..(270): unsure at all n locations
caactccaaacacaagacatncaccatccatgggctncctccgtctccactgtcggagctgtcaacagannctcttttgaacctgaatgggtctggacctggggtttcagctcccagttcatccttctttgggagcagcttgaagaaggttattggctcaagggtccccaacacaaagatttcctctggaagcttcaagattgttgctgtagaagagaagaaaganattgaagagacccagcagaccgacaaggacagatggaagggtct

SEQ ID NO: 291650 - DNA, 268 bp, Glycine max
  unsure (1)..(268): unsure at all n locations
agaaaatcctcaattttctgagcagccaaacactctctctctgtctctcgaaaattctcagtttgcagagaaaatctgaatncatgtcgtggcaagcgtatgtcgacgatcaccttctgtgtgacatcgaaggtaaccacctcactcacgctgctatcatcggccaagacggcagcgtttgggctcagagtaccgacttccctcagttcaaacctgaggagataatgccatcannnatggtttangngccnnnggnncnttgcaccng

SEQ ID NO: 291651 - DNA, 264 bp, Glycine max
  unsure (1)..(264): unsure at all n locations
accgatccactcttctctcgatctgcagatggcaagtnggtttggggaatcaacagggagatcacccccaagcccttcctacttcaacaacaataataacaatgatgctgccaattttgaatgcaacatttgctttgaattagcgcaagacccgataattactttgtgtggtcancttttctgctggccctgtctttacaaatggcttcactttcactcacaatcacgagaatgcccggtgtgcaaggccctcgtggaggagga

SEQ ID NO: 291652 - DNA, 260 bp, Glycine max
  unsure (1)..(260): unsure at all n locations
cctaacctaaaccctactcattctccatacctcaacgaagangttaaagagacggcaacactttgctgtccgccttgaccgagcagagcttcgtcttggccctcgattttgccctaaagtactctcagtcacaacagacacnnnnnnnnnnnnnnnnnnnnnnaatggcaccgaagcagaccaaggctgagaagaagatcgcttacgatgcgaantgtgcgacctaatggaggagtacggccagatcctcgttgtgaatc

SEQ ID NO: 291653 - DNA, 260 bp, Glycine max
cagctattgggatgagtttgtttggggaggggcatggatgtactttgccactggtaattcctcttacctcaagctcgctaccactcctcgcctcgccaaacacgctggcgccttctggggaggccccgactatggcgtcctcagctgggataacaagcttactggtgctcaggttcttctcagtcctttgaggttgttcctcagtcctggttatccctatgaagaaattttaagcacatttcacaatcagaccggcatag

SEQ ID NO: 291654 - DNA, 258 bp, Glycine max
ccaaggtgattcctggtgaatatggtttcgttgcccagcttaacgagggtcgtcacctcaagaagaggccaactgagttccgagttgataaggtccttcaaccctttgatgaaaacaaattcaactttaccaaagtcgggcaagaagaggtcctcttccaatttgaagctagcgaggatggacaagtccagttctttccaaatgctccagttgatgttgacaattctcccagctttgttgccatcaatgtcagtccta

SEQ ID NO: 291655 - DNA, 261 bp, Glycine max
  unsure (1)..(261): unsure at all n locations
atttaattccactacgtacacgcactnctntcctcaaagacaacaatgggcaccaacagccaagactctgacttacctggcccaggagaaaaccctagaatcgagcttcgttcgggacgaggaggagcgtcccaaggttgcctacaacganttcagcgacgagatcccagtgatttntcttggccggaatcgacgaggtggatggacgcagaagagatatttgtgagaagatcgtgggggntgcgagaattggggtatatt

SEQ ID NO: 291656 - DNA, 262 bp, Glycine max
  unsure (1)..(262): unsure at all n locations
tatagcccaagccctatacaaccaaaccctaacacacacccatttgattcagtttccatggctagcctcaaggttgcatttttngctgcagtgctctgcatggttgtggtgagtgcacccatggcacatgcagctatcacgtgcgggcaggtgacgagtagcctggccaattgcatcggttacctccagaagggaggaacgccgtcgtcgggatgctgcaacggagtgaagagcctcaatgccgccgccaagaccaccgccg

SEQ ID NO: 291657 - DNA, 252 bp, Glycine max
tgctggagagttggaaagtggaaatgcaggagagccagcaaaactgatcaggcagagataccgtgaagccgcagacttgatcaagaagggaaagatgtgtgctctcttcatcaacgatcttgatgcaggagctggtcgtcttggtggaaccacccaatacactgtcaacaaccagatggtgaatgccaccctcatgaacattgctgataaccccaccaatgtgcagcttcctggtatgtataacaaggaaga

SEQ ID NO: 291658 - DNA, 264 bp, Glycine max
  unsure (1)..(264): unsure at all n locations
cttggcatcgcttctcctctctcccaaganagaatcatcaatggcgattgaacacgaagacgatctcaaagacgagaagaaccctcgactctcgacgaggatgacatcgccctcctcaagacctacggtttgggaccttactccacaagcataaaaaaggcggagaaggaaatcaaagatatggccaagaaagtgaatgacttatgtggtataaaggagtctgatactggtttagctgcaccaagccagtgggatcttgtttct

SEQ ID NO: 291659 - DNA, 266 bp, Glycine max
  unsure (1)..(266): unsure at all n locations
ctggatcacacattcaagccctaatcatggaaatngtgaccacatataccatggtgttcatttccatggccgtggccactgactcaaacgcgacaggacagctatcaggagtagcagtaggttcttctgtttgcatagcaagcattgtanccggaccaatatcngggggatcaatgaatccagcaaggacattaggtcctgcaattgcgacatcatactacaagggactttgggtatattttgttggncctattacnggggcggtt

SEQ ID NO: 291660 - DNA, 267 bp, Glycine max
  unsure (1)..(267): unsure at all n locations
gtgnatcttctgaaggttgcttcaagtgctcttggatttgggcctcagatggctatgcaactagctgaacggttgtatactcaaggttttatcagctatccacgcacggaaagcaccgcataccctccttcatttgactttcgtggtgtactctctgcacaaacaaataatgccaacttggggtaattatgtacaagggctacttaccaatggttatcaaaaacctcncttgggaacagatgtaggtgaccatcctcccattactcc

SEQ ID NO: 291661 - DNA, 266 bp, Glycine max
  unsure (1)..(266): unsure at all n locations
gttgaacnagggtttctctntctgcttcttcactttctctcgttnccaatcgaaaccaaaacaaaatcatgggcagaaaattcttcgttggtggcaactggaaatgcaatgggaccactgangaggtaaagnagattgttactactttgaatgaggctaaagtccctggagaagatgtcgtagaagttgttgtgagccctcctttgtgttccttcctgttgtaaaaagtttgctgcgccctgatttccatgtttcggcananactg

SEQ ID NO: 291662 - DNA, 265 bp, Glycine max
  unsure (1)..(265): unsure at all n locations
cagattttaatcctcatctttccgacagtggattggcaagctatattccaaatgcaaaccaggtattgaacaataatgctggatctggatatgaagctcccgaagttnncttgtctggtcattatactcttaagagtgatgtttatagctttggagttgtcatgttggaacttcttagtggacggaaaccattgatagctcaaggccgaggtctgaagcaggctttggttcgatgggcaacactcaantccagnatatngatgcc

SEQ ID NO: 291663 - DNA, 266 bp, Glycine max
  unsure (1)..(266): unsure at all n locations
gcaaataaaattgctcttctcagcgtgactgnnggattacagaatgntggtcggcattatgaaacatgggaggcagggatcactggtccagttttgctccatggtcttgaccaaggacagaaagatttgacgtggaacaagtggtcatataaggttggcctaagaggagaggctatgaattgggnatcncccaanggagtcncgncctgtaaacngggcccaaganccaaannctnntaagggggggccaatnaaaggggnggngt

SEQ ID NO: 291664 - DNA, 269 bp, Glycine max
  unsure (1)..(269): unsure at all n locations
tgaagtcttgcccttctctcttcaactccaaacacaagacatcatgatccatggctnccctccgtctccactgtcggagctgtcaacagagctcttttgaacctgaatgggtctggacctggggtttcagctcccagttcatccttctttgggagcagcttgaagaaggttattggctcaagggtccccaacacaaagatttcctctgnaagttcaagattgttgnngtagaagagagaaagagntgaagagacccagcagncggaaag

SEQ ID NO: 291665 - DNA, 262 bp, Glycine max
  unsure (1)..(262): unsure at all n locations
cgcaacttttctgaggnagttgctattcttgatggctactttggcaagcttagtgcaggaagcaatgcttatattttgggtggccaagacaaatcacagaactggcatgtctactctgcttctgcagattctgtaactccatgcgacaatgtttacactctagagatgtgcatgactggcctggatagagagaaagcacnggttttctacaaagaccatctgcttcagctgccattatgactgttattcnggcattagannc

SEQ ID NO: 291666 - DNA, 265 bp, Glycine max
  unsure (1)..(265): unsure at all n locations
cagaaaaacaagtagttgagaataaagaagaaggaaatgggcttcctcaatgatctccttccccagctgttaccancgtcaaccgtgccggtgccggcatggttgtccattcaccgggcctcaaatccatggctggcttccccacgaggaagaccaacaatgacattaactccattgtagcaacggtggaagagtacaatgcatgcaggtgtggncnccatnggcaagaagaattcganatntttcnattngcnaactcgangtc

SEQ ID NO: 291667 - DNA, 263 bp, Glycine max
  unsure (1)..(263): unsure at all n locations
ctggttctcactttgaccccagcagtgacttgttcgttcccaatgaaaganaagatgttattacttccacagcttgttgggctnctatgttgggattgcttgttggattggggtttgtaatgggtccaattcaacttcttaagctttatggtgttccctangttgtaagtttctnccccttttccatcattnccagggtnctttttgactcangatgaatgangtcccccattngaattcctggaatngnanattcggtnang

SEQ ID NO: 291668 - DNA, 261 bp, Glycine max
  unsure (1)..(261): unsure at all n locations
taacacaaggcagaaagcaagctcatcctagagttttaaaaatggcagcagcctcctccatggctctctcttccccatccttggctggcaaggccgtgaagctgggcccatcagcccccgaagtcgggagggtcagcatgaggaagaccgtcaccaagcnaggccttcctcgggannccccttggtanggcccaacncgttnaaantttggggcnttttggggncccccccatntaaaaggggggcngangggggggggnt

SEQ ID NO: 291669 - DNA, 248 bp, Glycine max
  unsure (1)..(248): unsure at all n locations
tcataacacaaagcacaaagcaaagctcatccttgagttaaaanatggcagcngcttcttccatggctctctcatccccatccttggctggcaaggccgtgaagctgggcccatcagccccagaagtgggaagggtgagcatgaggaagaccgtcaccaagcaggtctcctcaggaagcccatggtacggcccagccngattcagtantgggcccantnttgggaaaccccnttcnacnangggggtt

SEQ ID NO: 291670 - DNA, 259 bp, Glycine max
  unsure (1)..(259): unsure at all n locations
tctggggaaatttgcgttgtttttcgcggtacagctcacacacactgaacggtaagtatggcggacaaggctgttacaatccgaacccgaaagttcatgaccaacaggcttctttccaggaagcagtttgtcgtngatgttcttcatccagggagggcaaatgtttccaaggctgaacttaaggagaagctagctaggatgtatgatgtgaaagaccctaatactgtatttgtcttcaaattccgaacacatntgggag

SEQ ID NO: 291671 - DNA, 259 bp, Glycine max
caaacacaactttgcccccttgtaaaacttcttattgtgatgtctaaaagcgaagacttgaagcttttgggaggctggttcagcccatttgccctgagggtgcagattgcccttaacctcaagggtctagaatatgaggttgttgaagagaccttgaatcccaaaagtgacctgcttcttaagtccaaccctgtgcacaagaaaatcccagttttcttccatggagataaagtcatttgtgaatctgcaatcatagttg

SEQ ID NO: 291672 - DNA, 268 bp, Glycine max
  unsure (1)..(268): unsure at all n locations
ctctactatactgcttcaccttctgctctagaaaattcagtgctgaaacatggcttcggctactctctctgtagccaaaccagcccttcaggcaaatgggaaaggcttctctgaattctctggcctccgaagctcatcaggcttcttcccttttctagaaaatcttcagaggatttccattcggtcatcgccttccaagaccnaangcaattngccaagcantggagggttcnaaaanggntngnnaannanncaacntctgggngtc

SEQ ID NO: 291673 - DNA, 264 bp, Glycine max
  unsure (1)..(264): unsure at all n locations
ggggttcaattctagctagttctattacatcgtccgcccaccatgaacatggcgatcgtgcttctgttcatggttttcgcagtttcatcagctttagacatgtcaataatatcacatgacaacgctcatgcggatagggccacgaggcgcaccgacgacgaggtgatgtcaatgttcgaggagtggctggtgaaacangacagggtgncacaagcgctcggtnaaanggagaagnttttncanntcttcaagaatatcngggtt

SEQ ID NO: 291674 - DNA, 256 bp, Glycine max
  unsure (1)..(256): unsure at all n locations
tgcaatggccgtttctttggcagtgaaccgtcctctgcttggtcttcacgagaatgtaccattagctgttgctcatccccaattcctcccgttcaaatggccacccaagtccaaactcccctccgtcgtcggaattcgatgctcctcctcccctttcaacgacaaaaccctcatttccatcacacctaacacttcccacctcaatcccaaccctctcgcttgtcgtttcangcttcccagtttggagaacaggaga

SEQ ID NO: 291675 - DNA, 257 bp, Glycine max
  unsure (1)..(257): unsure at all n locations
gcaaggtcaagatcggaatcaacggatttggaaganttggccgtttggtggccagggtggctctgcagagagacgatgttgaactcgttgccgttaacgatccttcattaccaccgattacatgacatacatgtttnaatacgacatgttcacgggcactggnagcatcacgatgtcaccgttaaggatgagaagaccttctctncgtgacaagccagtccatgttttnggacacagganccctnaagagatccctg

SEQ ID NO: 291676 - DNA, 257 bp, Glycine max
  unsure (1)..(257): unsure at all n locations
cgcaaagagaagagatctgcctcctttttatcaaatctatctcttcttcaagaatagttgaaaatggggctgtctttcaccaagttgttcagccgactgtttgccaagaaagagatgcgtatactgatggtgggtctcgatgctgcgggtaagaccaccattctgtacaagctcaagcttggagagattgtcaccaccattcccaccattgggttaaangtggaacctgnggaatataagancatcagctccagtgt

SEQ ID NO: 291677 - DNA, 264 bp, Glycine max
  unsure (1)..(264): unsure at all n locations
gaaacccccgtgtgcccatcatcgtcaccggtnaacgattttctcaaacactgtatgctcctnctcatccgtgatgggcgtatggagaagttctactgggcacctacaagggacgatcgtgttggcgtctgcaatggaattttccgcactgacaatgttcctaaggatgacattgtcaagcttgttgacaccttccccggccaatctattgattttctttggtgcactcagggctagagtatatgatgcngnggnaaggagttt

SEQ ID NO: 291678 - DNA, 261 bp, Glycine max
  unsure (1)..(261): unsure at all n locations
cgggtggtgcctctcttccatctccccagccaaaacctctctcaggaaggccacattacgcccttccgtcttcgcaacccttaacactccttcttctccttcctcttcatcttccttcccctctctcattcaagacaggcctgtttttgctgcccctgcccccatcatcaccccaactgtgagagaggatatggcaaaggaatacgagaaagtattgaagaattcagaattgtngagggagaagagtgacctcanagcgac

SEQ ID NO: 291679 - DNA, 276 bp, Glycine max
  unsure (1)..(276): unsure at all n locations
anaagaaaatcctcacccattttcttcgtagccaaacactctgaaattctcagttatgtcgtggcaagcgtatgtggatgatcacctactgtgtgaaatcgaaggtaaccacctcactcacgccgctatcatcgggccaagacggaagcgtttgggctcagagcaccaacttccctcagttcaaacctgaggaaataactgccatcataatgactttantgagcctggatcacttgctccaactggattgtatatcggtngcacaaaatacatggc

SEQ ID NO: 291680 - DNA, 276 bp, Glycine max
  unsure (1)..(276): unsure at all n locations
tgagngattgagncagtnanggtgcttcggngactcctcgagacaccaggggttcaccaggggccagcctgtttcgacgctctgggtgcgaanttcatagaatccgctggcttcccctactgcatcaccagtgggcttctccatcgccgcttccaggttggctctgcccgacaccggcttcatctcctacggcgaaatgctggagcagggccaactcatcacccaagccgtttccattcccgtcattggcgacgccgacaacggctacggcaatgc

SEQ ID NO: 291681 - DNA, 264 bp, Glycine max
  unsure (1)..(264): unsure at all n locations
aattatgtctgatgctaacatcctaatcaatactgctagagtcccaggcacagcgctacacgtatgcttaccaagagccaatgccggttgagcngttggttcaatctctttgtgacactaagcaaggttacacacaatttggtggtcttcgtccatttggagtctcgttcctctttgctggctgggacaagaattttggctttcaactttacactagtgaccccagtggaaattatggtggttggaaagctgcagctattggtg

SEQ ID NO: 291682 - DNA, 268 bp, Glycine max
  unsure (1)..(268): unsure at all n locations
cacagacaccgacacagatctgtcttccgaagcaggaactaaatatggctgacttgttggaatggtcaaagcaagataaganacgaatgcntcatgtcgtctaccgtgttggtgaccttgatcgcaccatcaaattttacacagaatgtttaggaatgaagcttttgangcaaagagatatcccanaggagaaatatgctaatgcttttcttggatttggccctgaagaatcccattttgttgttgaattaacatataattatggggt

SEQ ID NO: 291683 - DNA, 272 bp, Glycine max
  unsure (1)..(272): unsure at all n locations
gcgaatcccaccactgggatgccagaagangctcgagatcgacgacgatctgaaactncgagcattttgggacaagangncctcacaggaggtcatcggagatgcactcggtgaggnntttaagggctatgtcttcaaaattaccggaggttgtgacaaacaaggatttccaatgaagcagggagtgctgactcctggtcgtgttagacttttgcttcacaggggaactccttgcttccgtggatatngaaggcgtaatggagagcntagga

SEQ ID NO: 291684 - DNA, 279 bp, Glycine max
  unsure (1)..(279): unsure at all n locations
cttgaangtggaaagctctgacacnatcgacaacgtcaaagncaagatccaggacaaggaaggaatccccncnggaccaggnaacgttctcattttcgcnggaaagcaacttgaggacggccgtacccttgctgactacaacattcagaaggagaggactcttcacctcgtcntccgtctccgtggtggnnatgcagatcttggttaagacactcacngggnaagaccataannntagaggttgaaagctcganaccatggataacgtcanggccaagt

SEQ ID NO: 291685 - DNA, 276 bp, Glycine max
  unsure (1)..(276): unsure at all n locations
cnagacaagagaattagggtcacgagggtttcatcctncggcatcagnccatgggaggaggcaatgggcaaaaggcaaagatggctcgcgagaagaacatcgagaagcagaaggccgcctcaaagggaagccagctggattcaaacaagaaagcaatgtcgatccagtgcaaggtgtgcatgcaaacatttatgtgcaccacatcggaagtgaagtgtagggaacatgctgaagccaaacaccctaaatctgatgtttatgcttgtnttcctcatc

SEQ ID NO: 291686 - DNA, 274 bp, Glycine max
  unsure (1)..(274): unsure at all n locations
ganaagaaaatcctcacccattttcttcgtagccaaacactctgnaattctcagttatgtcgtggcaagcgtatgtggatgatcacctantgtgtgagatcgaangtaaccacctcactcacgctgntatcatcggccaagacggaagcgtttgggctnagagcaccaattcnctnagntcnnncctggggaaataactgacatnaatnatgactttnctgagccnggatcacttgctccantggattgtatatcggtggaacaaaanacatgg

SEQ ID NO: 291687 - DNA, 274 bp, Glycine max
  unsure (1)..(274): unsure at all n locations
ccatccnccagcgccagaccgacntcccattcctcctcgccgtcgangacgttttctccatcaccggccgtgggaccgtcgccaccggccgcgtagagcgtggcaccgtcaaagtaggggaaactgttgaccttgtangattgagagagacaagaaacacaacggtcacaggtgtggaaatgttccagaagattctagacgaagccctcnccggggacaacgtggggctgtngctgagaggggttcaaaagacggacatccaganagggatggt

SEQ ID NO: 291688 - DNA, 273 bp, Glycine max
  unsure (1)..(273): unsure at all n locations
gcgcgnaagancacacattttagttgctactaatgggaactgttgaagctggcaaacaaggatgcaaatggaagtctcctacaganaaatccttcagttgtttttntgttaggtggcccaggaagtggaaagggtacccaatgtgcaaacattgtccaaaattttgggtatactcatctcagcgctggtgatcttctgcgagcagaantcaaatctggttctgaaaatggtanaatgattnagaatatgattnangaaggnaaatttnttccc

SEQ ID NO: 291689 - DNA, 269 bp, Glycine max
ccccaagccctatacaaccaaaccctaacacacacccatttgattcagtttccatggctagcctcaaggttgcatttttcgctgcagtgctctgcatggttgtggtgagtgcacccatggcacatgcagctatcacgtgcgggcaggtgacgagtagcctggccaattgcatcggttacctccagaagggaggaacgccgtcgtcgggatgctgcaacggagtgaagagcctcaatgccgccgccaagaccaccgccgaccgccagacg

SEQ ID NO: 291690 - DNA, 268 bp, Glycine max
  unsure (1)..(268): unsure at all n locations
ctcgtgggaggcaggagccgtcgatcccaccggtgtggcgcagagagctcctgaacgcgcggnacccaccttcgagtcacatgcacccaccgcgaatacgaacatgtccctgacaccaaaggcaccatcatccccttagaccacatggcccatcgctctttcttcttcggccccagtgaagtcgccgccatccgctccctcatcccccaaactgatcaacgctgctccaacttcgaggtcctcaccgcatgcctctggcgctgccgca

SEQ ID NO: 291691 - DNA, 270 bp, Glycine max
  unsure (1)..(270): unsure at all n locations
gcagacttnacaacagcacanagcgggttactgtctgttcaangctacgatctctgtctctgttatcttagtgcctaccttgccagaagnnannatggcccaatnaantttccnattcacatctgantcantgaacnatgggcaccctganaanctctgtgnccagatctccgatgctgtgctcgatgcatgcttggagcaggaccctganagcnaggttgcntgtnaaacctgnaccaagaccaacatggtgatggtnttcggagagat

SEQ ID NO: 291692 - DNA, 268 bp, Glycine max
  unsure (1)..(268): unsure at all n locations
agaaccgtgaaantcgaagtgatccactccaggtngggcatgctcggagccttgggntgcgtcttcccggagttgctgtccgccancggggtgaagttcggagaanccgtgtngttcaaggccgggtccagatcttcagcgagggtgggntcgactantgggcaacccaaccctgatccacgccagagaatcntcgccatctngggcaacacaagtatctaatgggtgccgttgaaggttacgtattgtggtggcccctcggtgaggt

SEQ ID NO: 291693 - DNA, 275 bp, Glycine max
  unsure (1)..(275): unsure at all n locations
aaaatgaggttttttacagtgaaagtagctctgtgctgtgtggtggttatgctactaaccctctcagatgcacagctagataactctttttncaaggacacgtgtccaagagtgcattctattgtgcgtgaagttgtcagaaatgtttccaaatctgatccccgcattcttgccagtctcataaggctccactttcatgattgtttcgttcaagggtgtgatgcatcaattctgttggaacgacacagtacgatcgtgagcgagcaaagtgcacc

SEQ ID NO: 291694 - DNA, 271 bp, Glycine max
  unsure (1)..(271): unsure at all n locations
ctcttccataaacgggtggtgnatctcttccatctccccagccaaaacctctctcaggaaggccacattacgcccttccgtcttcgcaacccttaacactccttctncctccttcctcttcatcttccttccctctctcattcaagacaggcctgtttttgntgcccctgcccccatcatcaccccaactgtgagagaggatatggcaaaggaatacgagaaagctattgaagaacttcagaaattgttgagggagaagagtgaactcaaa

SEQ ID NO: 291695 - DNA, 262 bp, Glycine max
  unsure (1)..(262): unsure at all n locations
cagtgggaaaactttctttatatacagcacttggaggagtcngcccttcagcttgtttacccattacaactcgatgtgggcacaaacaatgagaagctgctgaatgatgaattatntattgggctaaacaaagacgagcaactgggcaggaatatgctgaacttatgcacgaatttatgacaggcagtcaagcaaacttatggggaaaaggtcctaatncagtttgaagactttgcaaaccanangctttnaatcggctgga

SEQ ID NO: 291696 - DNA, 264 bp, Glycine max
  unsure (1)..(264): unsure at all n locations
ctgcccaacatcaaggttcctctcattcttggtatctggggaggcaagggacaaggaaaatctttccaatgtgagcttgtctttgccaagatgggaatcaaccccatcatgatgagtgctggagagtggaaagtggaaatgcaggagagccagcaaaactgatcaggcagagataccgtgaagccgcagacttgntcangaggggaaaggttgtgtcccctttanataancntttttgatncnngcncngnccnnnnggggncc

SEQ ID NO: 291697 - DNA, 260 bp, Glycine max
  unsure (1)..(260): unsure at all n locations
ggcaaaactaactgttggaccaccagaggatgactgtgatatcaccccggttgtgtcagaatcatccgccaatttcattgaaggcctggtcttggatgctaaggagacaggagcaacattctgtcaggatacaaaagagaaggcaatctcatttggcctttgcnactggacaatnttaggccagacatgagatttgcatgggaagncccattgggnccggtttcccggtatgggnncttncnntngaagggggccccnct

SEQ ID NO: 291698 - DNA, 263 bp, Glycine max
  unsure (1)..(263): unsure at all n locations
caagaatgcaagangctttgcaagttgatagactgccagangctgtctcaagaagcaagcaaccatgcagcccaaaatgacaggcttccactgcagatggtggtgcaagtcctgtacttcgagcagctcgtttgaagaatgcaatgtctggcagtttgggagatgggctgctgtcgcagagaataagcagtggtgttccaagtgcagccatgtcccctagggacaactacgcttctctgcggagagagaaccgggaatgaagc

SEQ ID NO: 291699 - DNA, 254 bp, Glycine max
  unsure (1)..(254): unsure at all n locations
cagaggnactggggaaagtgggtggntgagatcagactncccaagaaccggancaggctgtngctgggaacttngagcaccgcnnaggaagccgctctggcatacgacatgnccgcgtacaagctcgaggtgacttcgccaggctcaanttccnaaacctggganaccagggttctcngtcggtggtgattncggggagtaaaagcntcttatnnngttgttgannnnaagtttaagntttttgaagggccggg

SEQ ID NO: 291700 - DNA, 264 bp, Glycine max
  unsure (1)..(264): unsure at all n locations
aagaaattcttgctcatgcagttggggaagatgtcattatgaatgacagtaatgttgtngattttgttgatcatggagacaaggtaacagtggagctggagaatggtcanagcatatgatggagatcattggttggagcagatgggatatggtccaaggtgaggaaaaagttatttggccaaacagaagctacttactctggctatacttgttacactggtattgcagattttgtgcctgcggacattgaatcngttgggtacc

SEQ ID NO: 291701 - DNA, 265 bp, Glycine max
  unsure (1)..(265): unsure at all n locations
caggtactgcgtttcggaagcagacacagatggctcgtacgaagcaaaccgctcgtaagtccacaggaggaaaggctcctaggaagcagcttgcaaccaaggctgcacgtaagtctgcaccaactactgtggtgtgaagaagccccaccgttatcgtcctggtaccgttgctcttcgtgaaattaggaaataccagaagagtaccgagcttttgatccggaagctccccttccagaggctggttcgtgaaattgcncaggacttc

SEQ ID NO: 291702 - DNA, 263 bp, Glycine max
  unsure (1)..(263): unsure at all n locations
tcanatcctaggaagttggaagtcatggcagcaacattgatggcagcnacaagttctggcactcttaaagcaactcctttcctaggccaaggcaagggtgccaatgccaatnctcttagggatgttgttccatgggaactgggaagtacaccatgggcaatgatttgtggtatggaccagacagagtgaaatacttgggacccttttcagctcagacccnttcatacttganaggagaattcccaggggattatggatgggat

SEQ ID NO: 291703 - DNA, 256 bp, Glycine max
  unsure (1)..(256): unsure at all n locations
gagaaaagagaattagggtcacgagggtttcatcctgcggcatcagacatgggaggaggcaatgggcaaaaggcaaagatggctcgcgagaagaacatcgagaagcagaaggccgcctcaaaggaagccagctggattcaaacaagaaagcaatgtcgatccagtgcaaggtgtgcatgcaaacatttatgtgcaccacatcggaagtnaatgtagggagcatgctgaagccaaacaccctaaatctgatgtttat

SEQ ID NO: 291704 - DNA, 264 bp, Glycine max
  unsure (1)..(264): unsure at all n locations
caaggcagaaagcaagctcatcctagagttttaaaaatggcagcagcctcctccatggctctctcttccccatccttggctggcaaggccgtgaagctgggcccatcagcccccgaagtcgggagggtcgcatgaggaagaccgtcaccaagcaggcctcctccggaagcccatggtacggncccagaccgcgtcaagtattgggcccattctctggcgagccccgtcntacctcactggggattcccaggtgnttagggtggg

SEQ ID NO: 291705 - DNA, 285 bp, Glycine max
  unsure (1)..(285): unsure at all n locations
cttgtcattcagagatatactagggaagctggtgtgcganacttagagagaaatctagctgccttggctcgagctgctgcagtaatagttttagagcaagaacaagtagttccattaaacaaagggatgcngggacttgctacaccacttgtggaaaacagacttgctgatgggactgaagttgaaatggaagtgatacccaatgggtgtcatagtcgggacntctcaagcacgtttagatgcctctccattggttgttgacgaaactatgcttggaaaaagtgc

SEQ ID NO: 291706 - DNA, 276 bp, Glycine max
  unsure (1)..(276): unsure at all n locations
ctgncagctgccattgcntatggtcttgatangaaggccacgagtgtcggtgagaagaatgtgttgatttttgaccttggtggtgggacatttgatgtgtctttactcaccattgaggagggtatctttgaggtgaaagccactgctggtgacacccatcttggaggtgaagattttgataacaggatggtgaaccactttgttcaagagttcaagagaaagaacaagaagacattagtggaaaccccagagcacttagaaggttgaggactgctt

SEQ ID NO: 291707 - DNA, 254 bp, Glycine max
  unsure (1)..(254): unsure at all n locations
tatgttcctgaaacagttaatcgggtgatancaacattannaacaagttgaaccaaaggatgccactgatatatgtgaaactctatacataccagatctttagggcattatcttatattcatcgttgtattggagtctgccatcgggatatcaagcctcaaaatctattggtcaatccacacactcaccaggttaaattatgtgacttggaagtgcaaaggttttggttccaaggtgaaccaaatatatcatac

SEQ ID NO: 291708 - DNA, 275 bp, Glycine max
cagaagaacaagtagttgagaactaagaaggagaagcaaatggcttcctcaatgatctcttccccagctgttaccactgtacaaccgtgccggtgccggcatggttgctccattcactggcctcaagtccatggctggcttccccaccaggaagaccaacaatgacattacctccattgctagcaacggtggaagagtgcaatgcatgcaggtgtggccaccagttggcaaaagaagtttgcgactctttcctacctgccagacttgatgatgca

SEQ ID NO: 291709 - DNA, 274 bp, Glycine max
  unsure (1)..(274): unsure at all n locations
aaaaagacaacacagagagaagcgtcttaataaacgctcttctctgaaaaacctggatttcttctcttcttctcttctctttcgtttcnctcttcgatctctgaaaatgagagagtgcatttcaatccacatcggtcaggccgntattcaggtcggaaacgctgctgggagctctactgcctcgaacacggcattcagcctgatgggcagatgccaagtgataagactgtggtggaggtgatgatgctttcaacacttcttcagtgaaatgggg

SEQ ID NO: 291710 - DNA, 277 bp, Glycine max
  unsure (1)..(277): unsure at all n locations
gcaaagcaatggcatcgtcactacaagcagcagctactttcatgcaacccaccaagtttttgcagctaaagtctactcaggccatatctaaggcttttggtttggaacctgctggagttaataaggtcacatgctcccttcaggctgatcttaaggacttggctcacaagtgtgttgatgctaccaaaattgcaggctttgcccttgccacctctgctctcgttgtttctgggcaagtgctgaaggagtaccaagcgggctaancttngacgaaatc

SEQ ID NO: 291711 - DNA, 283 bp, Glycine max
  unsure (1)..(283): unsure at all n locations
cttcaagcacngagttgagtcagtcagatatgtttgaccctcgattgcaagcaaaaatattgaatgtggtagatgtttcttatggtggggaaaatggattcaatcaagctattgagctatctgcagagattttatcaaatgtgaagttcattcaagagaaacgcttgatagggaaatattttgaagagatcagccaggacactgggaaatatgtctttggggttgaggacactttgaggcactggagatgggtgcngtggaaacactcatgttatnggaaaat

SEQ ID NO: 291712 - DNA, 273 bp, Glycine max
  unsure (1)..(273): unsure at all n locations
ctatttttcaagtaacttaaggtttcaaacctaggaagttggaagncatggcagcaacattgatggcagcaacaacaagttctggtactcttaaagcaactcctttccttggccaaggcaagggtgccaatgccaatgctcttagggatgttgtctccatgggaactgggaagtacaccatgggcaatgatttgtggtatggaccagacagagtgaaatattgggaccctctcagctcagaccccttcatactgaaaggagaattcctggggt

SEQ ID NO: 291713 - DNA, 274 bp, Glycine max
  unsure (1)..(274): unsure at all n locations
ccatcatcaaagtttttncctttctctgctctttgccttctctgacacatttggtgccttgtagagcgtgttttggcaggaaggtggtatggcgaaggacgttgaggttgctgagcgtggctccttctctgggaaggactaccaggaccctccaccagcaccactcattgatgctgcggagctcacaaagtggtccttttacagggctctcattgctgaattcattgcactttgctctnccctctacattactgtgctcacagtcatagggtac

SEQ ID NO: 291714 - DNA, 274 bp, Glycine max
  unsure (1)..(274): unsure at all n locations
ggttaatgactttgtgtgcttatcagacattgcttatgttagtgaacaagtgttgatgatggagaaaacaattcttaggaagcttgaatagtacttaacagttccaacatcctatgtctacttggtttggtatatcaaaggctccactccacctgttaaagagatggaacacatggcatttttcctgctgaagtttctttgatccacaatccctacgtatcntttactgccttctctaatcgcggcttctgcngtattgatggctccgtgtaac

SEQ ID NO: 291715 - DNA, 273 bp, Glycine max
  unsure (1)..(273): unsure at all n locations
tttcgganagatcggcgatnactgcctccaaggatcgcgagancttcgtctacatcgccaaactcgccgagcaggccgagcgttacgaagagatggtggaatcaatgaagaacgttgcgaatctcgacgttgaactgacggtggaggagcggaatttgctttctgttgggtacaagaatgtgattggtgctcgcagagcgtccctggaggatcctgtccttccattgacagaaggaagaaacaaaagggaacgagttgaatncgaagggattt

SEQ ID NO: 291716 - DNA, 272 bp, Glycine max
gtttctattcctcactaggagctcctctccactggttcttcatctgcatgcacacagttgcatagttttggaaaccaagaattcctgaagaagggtagcatcaacaagcagttctgaaaatggagatcaccaatgtcagtgagtatgaggctattgcaaagcagaagttgccaaagatggcgtttgactactacgcatctggtgcagaggaccagtggactctgcaaagaacagaaatgccttttccagaattttgtttcggccacgtattc

SEQ ID NO: 291717 - DNA, 273 bp, Glycine max
  unsure (1)..(273): unsure at all n locations
tgaaatgttatcgctacctggggcctgacaaggaccttccgtcagaggaaatgggtgttggtactcgggaaatgggatatctttttggacagtataggcgtctcgcaggtcattttcagggaagttttacagggccaaggatattttggtctggctccagtcttcgacctgaagccactggctatgggctggttttctttgcccagctcatggttgctgacatgaatangaacttaaaggattaanatgtgttgtgantggttctgggaagac

SEQ ID NO: 291718 - DNA, 276 bp, Glycine max
  unsure (1)..(276): unsure at all n locations
gttgttgtgaatgatgcatgctaccatcaaatcattagccattgggctaaacactcatgcggttgttgagccattcgtcatagcgacaaacaggcatctgagcgtggttcaccctatttacaaacttctgtttcctcactatcgtgacaccatgaacattaattcactggccgcaaattccttggtcatggcagacggtatatagagganaacattcttgtgggggtaggtaccttganaatgtnggtgatnttcnaagggnttgggttctcncgg

SEQ ID NO: 291719 - DNA, 283 bp, Glycine max
  unsure (1)..(283): unsure at all n locations
accttngtnccnatncgacatctnnnaagggctagggttttagcgcantnncttgctatnatttaaggaagatgggtaaggaaaaggttcacatcagtattgtggtcattngccatgtcgactctgggaaatccactaccactggtcacccgatttacaagcttggaggcatganaagcgtgttattgagangtttgagaaggaagctgctganntgaacaagaggtcttccaagtatctgggtgtggacaaactttaaggctgagcgtgaaagangaatcac

SEQ ID NO: 291720 - DNA, 274 bp, Glycine max
  unsure (1)..(274): unsure at all n locations
ctcaaagagcatgtgatcaagcctgtgatcccagagaagtaccttgatgagaagaccattttccacttgaacccttcaggccgttttgtcattggtggccctcatggcgatgctggtctcaccggccgcaagatcattatcgatacttatggaggatggggtgctcatggtggtggtgctttctccgggaaggaccctaccaaggttgataggagtggtgcttacattggagacaggctgctaagagcattgtngcaagtggattgccagaagg

SEQ ID NO: 291721 - DNA, 266 bp, Glycine max
agattctgacccacaatagcaagggaatcaaattccagattctatcaaaccctgaattccttgcagagggaactgcaatcaaagatctctttaacccagaccgtgttcttattggaggcagggaaaccccagagggccaaaaagctattcaaacattgaaggatgtttatgctcaatgggtccccgaagaaagaatactgaccacaaatctttggtcggcagatgtctaagcttgctgctaatgccttcttagcacaaggatttct

SEQ ID NO: 291722 - DNA, 266 bp, Glycine max
gaagttggaagtcatggcagcaacattgatggcagcaacaacaagttctggtactcttaaagcaactcctttccttggccaaggcaagggtgccaatgccaatgctcttagggatgttgtctccatgggaactgggaagtacaccatgggcaatgatttgtggtatggaccagacagagtgaaatacttgggacccttctcagctcagaccccttcatacttgaaggagaattccctggggattatggatgggacactgctggctt

SEQ ID NO: 291723 - DNA, 269 bp, Glycine max
  unsure (1)..(269): unsure at all n locations
cttaaattactctcatttctgcaagtatgcttgctctgaagaaaatcctgagctcctggacatgggaggtccagttgaaggtggatttagtgtcgcatttgatccccttgatggctccagcattgtggacacaaatttcacagtaggcaccatctttggtgtgtggcctggagataagttgactgggatcaccggaagagatcaagttgctgcagccatgggggtttgggtcctagaacaacntctgtgcttgctctaaaagacttccc

SEQ ID NO: 291724 - DNA, 269 bp, Glycine max
  unsure (1)..(269): unsure at all n locations
gccactcaggcttccattgcaggatgtctacaaaattggtggtattggtaccgtgccagtnggacgtgttgagactggtgtcgtgaagcccggtatggtggtgacttttggtcccactgggctgacaactgaggttaagtctgttgagatgcaccatgaggctctcacagaggctcttccaggtgacaatgttggcttaatgtgaagatgttgcagtcaaggantcaagcgtggtttgttgcatccaactccaaggatgaccctgccca

SEQ ID NO: 291725 - DNA, 273 bp, Glycine max
  unsure (1)..(273): unsure at all n locations
gggcaaaggcttatgttgttgtgaatgatgcatgctaccatcaaatcattagccattggctaaacactcatgcgnctgttgagccattcgtcatagcgacaaacaggcatctgagcgtggttcaccctatttacaaacttctgtttcctcactatcgtgacanggtgaacattaattcacttgcccgcaaatccttggtcaatgcagacggtattatagagaaaacatttgtggggtaggtactctttggaaatgtctgtgttatttacaagg

SEQ ID NO: 291726 - DNA, 265 bp, Glycine max
  unsure (1)..(265): unsure at all n locations
tttttcnagtaacttaagntttcaaacctaggnagttggaagtcatggcagcaacattgatggcagcaacaacaagttctggtactcttaaagcaactcctttccttggccaangcaagggtgccaatgccaatgctcttagggatgttgtctccatgggaactgggangtacaccatgggcaatgatttgtggtatggaccagacagagtgaaatacttggacccttctncgctcagaccccttcatacttgaaaggagattcc

SEQ ID NO: 291727 - DNA, 270 bp, Glycine max
  unsure (1)..(270): unsure at all n locations
atgaatttcctttctgtgtccatctggttagttgggagaaggaaaacgtttctagtgangccctggaagctgctcgtattgcttgcaacaagtacatggccaaatttgctggaaaggatgctttccacttgagagtcagggtgcacccattccatgttcttaggatcaacaagatgctttcgtgtgccggagctgataggctccaaactggaatgagaggtgctttggaaagcccacagggtattgtgctagagtggctattggacaggt

SEQ ID NO: 291728 - DNA, 288 bp, Glycine max
  unsure (1)..(288): unsure at all n locations
ggaagatgggtaaggaaaaggttcacatcagtattgtggttattggccatgttgactctgggaagtccactaccactggccacctgatctacaagcttggaggcattgacaagcgtgttattgagagatttgagaaggaagctgctgagatgaacaaaggtctttcaagtatgcctgggtgcttgataagcttaaggctgaacgtgaaagaggatcccattganatnnccttngggaantttaaaccccccnttnntttngcnagtcttgnnccccggnacnnggttt

SEQ ID NO: 291729 - DNA, 290 bp, Glycine max
  unsure (1)..(290): unsure at all n locations
ggctcgaagaattaaaatgctgcatcagccaagcaaggtcatggatatggaacatgagcttcgagcattgagggctcaactcgcagagaagactagacagtatcttagacttcagaaggagttaacaaggacgaagaaaggtggggaaaatgtncanatttatatgantnccaagggantgaaacnttaggttcttatttgcaaattcaaccttgctctgataatgcccctgaagtttcaagatgtgcaattcagtggtattgtgtgtcgtctgatggtgccaaaaaaga

SEQ ID NO: 291730 - DNA, 158 bp, Glycine max
  unsure (1)..(158): unsure at all n locations
aaaattctcaaaatctcttcacctctgtgangaccatggaatacagaaccttagaactcaacatcatatccgcaaaggacatcaagncacgttaacctcttctccangatggacgtatacgccgtcgttangctctngggcgaccctctccanctggg

SEQ ID NO: 291731 - DNA, 288 bp, Glycine max
  unsure (1)..(288): unsure at all n locations
ctttttcttctctctcaacaacttcaccttcttcttcctcgatcatgtctcacttcaagggcaagtaccatgatgagcttatcgccaatgctgcgtacattggcactcctggaaagggtattcttgctgctgatgagtcaacagggacaattgcaagcgtttggccagcatcagtgtagagaacattgaatccaacaggcgagctcttagggagctgttttacactgctcctggtgttcttnaatanctcagnggtgncatccttttngaggnannccctctannagg

SEQ ID NO: 291732 - DNA, 237 bp, Glycine max
  unsure (1)..(237): unsure at all n locations
gtgttcttggttcacttggcaaccatccccatcaccggaactggtatcaaccctgctcgtagtcttggtgctgctatcatcttcaacaaggaccttggncgggatgaacactggatcttctgggtgggaccattcatcggtgcagctcttcagcactctaccaccaggtcgtaatcagggccattcccttcaagtccaagtgattcaatcaaacggttcatgcttaatcaagttggg

SEQ ID NO: 291733 - DNA, 204 bp, Glycine max
gtttcttacaagcctctactatactgcttcaccttctgctctagaaaataccagtgtgaaacatggcttcggctactctctctgtagccaaaccagcccttcaggcaaatgggaaaggcttctctgaattctctggcctccgaagctcataggcttccttcccttttctagaaaatcttcagaggatttccattctgtcattgc

SEQ ID NO: 291734 - DNA, 282 bp, Glycine max
ggttcatccaaactcttatgccttagtggtgagcatggagaacatcactctcaactggtattttggcaacaacaggtcaatgctagtctcaaattgtctcttcagaatgggtggagctgcagttctactctccaacaagtcttctgatccagaagagccaaataccaactgatccatacagtgcgtactcacaagggtgcagatgacagatcatatggttgtgtcttccaagaagaagatgagaagaaaacattggtgtggcctctcaaaggattaatggct

SEQ ID NO: 291735 - DNA, 275 bp, Glycine max
  unsure (1)..(275): unsure at all n locations
agatgaagttgatccaatggtctctgttatgaaggttgaaaaggcacctttggaatcatatgctgatattggtggtttagatgctcagatacaggaaattaaagaagcagtcgaacttcccctgangcatcctgaactgtatgaagattggtannaagcccccntnngggantctttnanngggcaacccngnatggggaagactgnnnnnagaaggggtggcncncnccaancaccnacctttnggggggggggncnaanagnacnnaancgnc

SEQ ID NO: 291736 - DNA, 282 bp, Glycine max
  unsure (1)..(282): unsure at all n locations
gccggaagacgccaagctcttcgttgggaacttgnccttacgacgttgatagccagaaattggccatgcttttcgaacaggccggaaccgttgaaatcgctgaggttatttataacagggaaactgaccagagtcgcgggtttgggttgtgacgatgagtactgttgaagaagctgaaagcgctgtggagaaattcaaccgctatgatatcgatggaagactgctgactgttaataaggcttctccaagaggaactcggcccgaacgcccaccacctcgtcg

SEQ ID NO: 291737 - DNA, 283 bp, Glycine max
caagaacaacgcaggtttcccccacaacgttgtgttcgacgaggacgagattcctagcggcgtggatgcagggaaaatctccatgagcgaagaagaccttctcaatgcggctggtgagacttacagcgttactttggatgccaagggacctacagtttctactgttcgcctcaccaaggagctggtatggtgggaaaagtcaccgttaattaattatatattgtctcctacgtctaagttctcatatgcttgttttcctagaagagcctaattcatctttctt

SEQ ID NO: 291738 - DNA, 278 bp, Glycine max
  unsure (1)..(278): unsure at all n locations
gctcgccaaacgcccctctctctcctccaatggccgaccagctcaccgacgaccagatcgccgagttcaaggaggccttcagcctcttcgacaaggacggnnatggttgtattactactaaggaanttgggactgtgatgcggtnnagggcaaaccccctactgnggcagnnctgnaggatatccattactgaggttnatnctgangncaatggaaccatcgtttnccagattcctcatcctgntgncccccnaagtgaaanncccgctccggggggg

SEQ ID NO: 291739 - DNA, 280 bp, Glycine max
  unsure (1)..(280): unsure at all n locations
gtgatgatagtgaagtaatcctatatcctcaagcaattttcaaagatcctttccgtggtggtaacaatattttggtcatttgcgattcttacaccccacaaggtgagcctnctncctacaaacaagagagnaagagctgctgaaatttcagtaacccaaaggtccaagcagaagttccatggtatggaatagaacaagagtacaccttacttcaaacaaatgtgaaaatggcnattaggttggcccgttggtggctatcnnggtcctcagggtcttntgg

SEQ ID NO: 291740 - DNA, 271 bp, Glycine max
  unsure (1)..(271): unsure at all n locations
caaatctttgtcaagaccctcactggaaagaccatcacccttgaggtggagagctctgacactattgacaatgtcaaagctaagattcaagacaaagaaggtatcccaccagaccaacagaggctcatttttgctgaaaacagcttgaagatggccgaaccttggcagattacaacatccagaaagaatctaccctccanttnnnnnctccgtcttcgcggtggtatgcaaatctttgtgaagacccttactgggaagaccattatttggg

SEQ ID NO: 291741 - DNA, 276 bp, Glycine max
ggtgggtaactcagagacacagtgccctggtcaatgcgcgtggccgttccaccaacccatttacggtccccagaacccagcacctttggttgcacccaacaacgacgtgggtctcgacggcatggttatcaacgtggctagtttcttgctgggactgtcactaacccttttggaaatggctactttcaaggacccaaagaagctcctttggaagctggttcggcttgcactggggtttatggtaagggcgcgtatcctggctatgcagggaatctc

SEQ ID NO: 291742 - DNA, 273 bp, Glycine max
  unsure (1)..(273): unsure at all n locations
caacaagggagctagcacagcagatcgagaaagatatgcgagctcttggtgattacttgggagttaaggtccatgcttgtgttggtgggacaagtgttcgtgaggatcagcgcattctccaagctggtgtccatactgttttggcactcctgggcgagtgtttgacatgctgcggaggcagtctcttcgcccagattgcataaagatgtttgttttggatgaggctgatganatgctttcacgtggtttcaaggatcagattatgacatcttc

SEQ ID NO: 291743 - DNA, 273 bp, Glycine max
  unsure (1)..(273): unsure at all n locations
gaaaacactggtccaatcaacattgggaacccaggtgaatttacaatgattgaacttgccgagaatgtgaaagagcttatcaatccaaaagtgcagataaatatggttgagaacactcctgacgatcctcgtcagagaanccagacnttacncaagcaaaggaattgctgagatgggnaccaaaggtcaagttgtatgatggccttcctctcatggaagaggatttccgtcagaggcttggagttcccaagagcaataagctcttttatcctt

SEQ ID NO: 291744 - DNA, 274 bp, Glycine max
  unsure (1)..(274): unsure at all n locations
gaacataccaatctacaataaacgatgattctcattatctccctcattttttctcttctctctttctcccatgcttctgtcctagatttctgtgttgcagattatgcaggtcctattggacctgcaggatattcctgcaagaagccttcaaaggtcacagcagatgattttgcttacagtggccttggcattgcncgtaacacctcaaacattatnaaagctgnagtgacccctgcatttgatgctcagtttgctgncntcaagggtctggaca

SEQ ID NO: 291745 - DNA, 266 bp, Glycine max
  unsure (1)..(266): unsure at all n locations
gtgattcctggtgaatatggtttcgttgcccagcttaatgagggtcgtcacctcaagaagagaccaactgagttccgagttgacaaggtccttcaaccctttgatgaaaacaaattcaactttaccaaagttgggcaagaagaggtcctcttccaatttgaagctagcgaggatggacaagtccagttctttccaaatgctccagttgatgttgacaattctcccagctttgttnccatcatgtcagncctattgagtangggcat

SEQ ID NO: 291746 - DNA, 263 bp, Glycine max
  unsure (1)..(263): unsure at all n locations
gttgaaggtctagcaccttttgttccctttgatcaggccacacttctgaactcancgaatgttccttgatcaatggattaactcagccacccaaagccttattcattttgtccgacaagaaatggatggttatcgcctttacacagtggttccttaccttctgaagtttcttgataaccttacaaatatttatgtaaggttcaatcgtaaganacttaaaggtcgttcggggaagaagactgcaggatagcatatcactcttt

SEQ ID NO: 291747 - DNA, 261 bp, Glycine max
  unsure (1)..(261): unsure at all n locations
gcgcaaagcattctccactacgattcgctcttccagaancttccagaanactccagatggcgcgtacaaagcaaacagcccgtaagtcgaccggcggcaaggctccccggaagcagctggcgactaaggccgcccgcaagtctgctccggngaccggcggagtgaagaagccacacaggttcaggcaggaaccgtgnccctgaggganatcaggaattacagaagagcanggnnttctganccgaancnncngtttnnggt

SEQ ID NO: 291748 - DNA, 260 bp, Glycine max
  unsure (1)..(260): unsure at all n locations
gttttcactgatcaagcccttcctgcggatcttatcaagagaggaatggcagtggaggatccatcctctccctatggccttcgccttgtgatagatgactacccttatgctgttgatggactagagatatggagtgctatccagacatgggttagggatacgtctccttgnactatgccacggatgatgcagttaagaaagactcaganctccaanttggtggaaggaagctgttganaagggncacggtgattnaaana

SEQ ID NO: 291749 - DNA, 275 bp, Glycine max
  unsure (1)..(275): unsure at all n locations
ttttgcaacaaccatggttgcaatgggcagcagcaacagcatccacccagttgattttctcaaagccttgttccccttcacgtctatgccccttccaactatgtgtctttgacactaaacaagtgctatcaagtggcagganaaggcatgtggggggttctggagttaggtgcatggctgtgggggaagcagcaaccactgggacaaagaananaagtggatatgagcttcaaacactcactagtggttgctgaanaggagcaagctggggtgnt

SEQ ID NO: 291750 - DNA, 258 bp, Glycine max
  unsure (1)..(258): unsure at all n locations
ggggttttggcgctttggaaaggtgctgggcctactgttgtaaganccatggcattgaacatgggcatgcttgcatcttatgatcaaagtgttgagttcttcagggattctgttggtctggtgaaggtgctactgtgctaggtgcaagttctgtttctggatttttcgcagcagcttgcagtttaccatttgactatgtcaagacccagatccagaagatgcaacctgangccgatgggaaanaccatacacngcccc

SEQ ID NO: 291751 - DNA, 259 bp, Glycine max
  unsure (1)..(259): unsure at all n locations
ctgtaacccagagctccttcgcctcatcgatagtttncaagtctcgttttgacaatggtgagggttagtgtgttgaatgatgctctgaagagcatgtacaacgccgagaagcgcgggaagcgccaggtcatgattaggccatcctccaaggtcatcataaaattcctattggtcatgcagaagcacgggtacattggtgagttcgagtangttgatgaccacagggtgggaaaatcgtggtngaatngatgggcggctg

SEQ ID NO: 291752 - DNA, 257 bp, Glycine max
  unsure (1)..(257): unsure at all n locations
tgagaactaagaaggagaagcaaatggcttcctcaatgatctcttccccagctgttaccactgtcaaccgtgccggtgccggcatggttgctccattcactggcctcaagtccatggctggcttccccaccaggaagaccaacaatgacattacctccattgctagcaacggtggaagagtgcaatgcatgnaggtgtggccaccanttgncaagaanaattggannctnttccctacnnnnaancncttgaggcna

SEQ ID NO: 291753 - DNA, 262 bp, Glycine max
  unsure (1)..(262): unsure at all n locations
ctctccactcattctcttcttnagcacactgatgtggctgtcctgcttcgacaatgaagccatttatgacatctgcaggcgttcactggacattnagaggccaacctacaccaaccttaatcgtttagtttctcaggtgatatcatcactgactgcttcccgaggtttgatggagccttgaatgttgatgtcaatgaattccagaccaaccttgtgccataccccaggatncattgangctnacatctnagcccnngnaatc

SEQ ID NO: 291754 - DNA, 273 bp, Glycine max
ggaactcttttacaggggctgctgttcagggggcattggctgatatatttttacgaggcagtaatcttataacagatgttcagggaatggcatcattgaccggtgtgctgcctccatttgttccatttgctcaggcatttgcagctgtacttactgctgtccttactggttctctctattacatggctgcctctcctaaagatcctacttatgttgttgcacctgttttacaatctcgctctggtcgccaagatttgaaaaagctatttgaag

SEQ ID NO: 291755 - DNA, 273 bp, Glycine max
  unsure (1)..(273): unsure at all n locations
gagtacaatacaacnctgccatggctgcctcagtctccactattggagctgtcaacagagctccactgagcttgaacagctctgaagctggagattcggttcccagttcagccttctttggcacaagcttgaagaaggttactgcctcaagggtccctaacgtcnagatttcttctggaagtttcaaaatcgttgcggcggagaaagagattgatgagcaacaacagacaaacaaggacagatggaaaggtcttgcctatgatatttcagatg

SEQ ID NO: 291756 - DNA, 272 bp, Glycine max
cgacattcccaaagacgttcagcagcaactcgccgtgcctaattgggacgagcccgttaacctccccggttacctcgccaggctgcccaggccccccgccgaggcccaattggaacacattgtcagactcatcatggaggcccaaaagcccgttctctacgtcggcggtggcagtttgaattccagtgctgaattgaggcgctttgttgaactcactggtattcccgttgctagcactttaatgggtcttggaacttttcctattggtgatg

SEQ ID NO: 291757 - DNA, 270 bp, Glycine max
  unsure (1)..(270): unsure at all n locations
anaaaaaaccctagccaacacaaccatcatggccacctctgctattcagcaatcagcattcactggtcaaactgctctgaagcagctcaatgagttcgtccgcaagaccggtggcgccggcnaaggtcgcactaacatgcgccgcaccgtcaagagtgctcctcagagcatttggtatggccctgaccgtcccaagtacttgggtccattctcggagcagattccatcatacctgaccggagaattccctggtgactacggatgggacac

SEQ ID NO: 291758 - DNA, 269 bp, Glycine max
  unsure (1)..(269): unsure at all n locations
ggnaatggcttcctcaatgatctcctccccagctgttaccaccgtcaaccgtgccggtgccggcatggttgctccattcaccggcctcaaatccatggctggcttccccacgaggaagaccaacaatgacattacctccattgctagcaacggtggnagagtacaatgcatgcaggtgtggccaccaattggcaagaagaagttcgagactctttcctacttgccagacctcgatgatgcccaattggcaaaggaagtcgaataccttc

SEQ ID NO: 291759 - DNA, 275 bp, Glycine max
  unsure (1)..(275): unsure at all n locations
gtggtgtttcatttgtgaaactaacaacaacacaaggccatcatcatggcagctgcttccccaatggcaagccaacttcaagtccaccttcactaggactcttgtagctcccaagggcctnctctggcctcttcaccacttcacctcgtgccttctagaaggcaatttagcttcactgttaaggccatccaatcagagaagccaacctatcaagtgattcagccaatcaacggtgacccattcattggaagcctggaaaccccagttacatccag

SEQ ID NO: 291760 - DNA, 215 bp, Glycine max
  unsure (1)..(215): unsure at all n locations
tgattgaagaagatgccgatcagaaacatcgccatcggaaggntgaagaggctactcancccgacacgttgaaggcggggttggctgagttcatctccaccttgatcttcgtgttcgccggttcaggttccggcatcgcctacaacaagctcaccgacaacggcgccgccactcccgccggcctcatctccgcttccatcgcccatgctttcgcc

SEQ ID NO: 291761 - DNA, 274 bp, Glycine max
  unsure (1)..(274): unsure at all n locations
gaacaagtagttgagaactaagaaggagaagcaaatggcttcctcaatgatctcttccccagctgttaccactgtcaaccgtgccggtgccggcatggttgctccattcactggcctcaagtccatggctggcttccccaccagaaagaccaacaatgacattacctccattgctagcaacggtggaagagtgcaatgcatgcaggtgtggccaccagttggcaagaannagtttgagactctttcctacctgccagaccttgatgatgcacaa

SEQ ID NO: 291762 - DNA, 270 bp, Glycine max
  unsure (1)..(270): unsure at all n locations
cttctgcaatacagcaaaggggaattgttcctttctgcaagggtctggatgtgattcagcaggctcagtctggaactggaaanacagcaacgttctgttcggggattttgcagcagcttgactatggattggtccagtgtcaggctttggttttggcaccaacaagggagcttgcacaacagattgagaaggttatgcgagctctaggtgattaccttggtgtcaaggttcatgcttgtnttggtgggaccagtgttcgtgaggntcagc

SEQ ID NO: 291763 - DNA, 266 bp, Glycine max
gcagaagggttcctcactctcttcatctgattgaacaaaatgtacacctcgaggaagaaaattcacaaggataaggatgccgagcccactgaatttgaggagacagttggacagtacttgttcgacttggagaacaccaatcaggatctgaaaagtgacttgaaagatctctacataaaccaagctattcaaatggatgtggctggtaatcgcaaggctgtagtcatctatgtgcctttcagattgaggaaggcattccgcaagat

SEQ ID NO: 291764 - DNA, 266 bp, Glycine max
  unsure (1)..(266): unsure at all n locations
caagcaaaaaganagaatcccaggcgaggagaaagatggaggggaaggagcaggatgtgtcgttgggagcgaacaagttccccgagagacagccaattgggacggcggcgcagagccaagacgacggcaaggactaccaggagccggcgccggcgccgctggttgacccgacggagtttacgtcatggtcgttttacagagcagggatagcagagtttgtggccacttttctgtttctctacatcactgtcttaaccgttatggga

SEQ ID NO: 291765 - DNA, 252 bp, Glycine max
  unsure (1)..(252): unsure at all n locations
gttgaacaagggtttcnctgtcnccttcnncactttctctccgtttcaatcgaaaccaaaacaaaatcatgggcannaaattcttcgttggtggcaantgganatgcaatgggaccactgaggaggtaaagnagattgttactactttgaatgaggctaaagtccctggagaagatgtcgtagaagttgttgtgagccctcctttngtgttccttcctgttgtaaaaagtttgctgcgccctgatttccatg

SEQ ID NO: 291766 - DNA, 267 bp, Glycine max
  unsure (1)..(267): unsure at all n locations
cngatgggcaatgcttggngctgctggattcatcattcctgaggccttcaacaaatatggagcaaactgtggtccagaagctgtttggttcaagactggagctctgcntcttgatgggggtacgctgaactactttgggaaacccatccccatcaatcttattgtggctgtcattgctgagattgttcttgtgggaggtgcagagtactacagaattattaatggcctgaacttcgaagacaaacttcatccaggtggtccatttga

SEQ ID NO: 291767 - DNA, 268 bp, Glycine max
  unsure (1)..(268): unsure at all n locations
ctcgcttggnccactgacgaccaagctctcgagananccttctcncccgtacggcgaaatcgttgaaacgaagattatcaacgatcgtgagactggaagatccaggggttttggatttgtaaccttcgcctcggagcagtccatgaaagacgccatcgaagggatgaacggccaaaaccttgacggccgtaacatcactgttaacgaagctcagtcccgtggtggcggtggcggcggtggaggtggtggatatggtggtggtcgcggt

SEQ ID NO: 291768 - DNA, 264 bp, Glycine max
  unsure (1)..(264): unsure at all n locations
ctcgccaaacgcccctctctctcctccaatggccgaccagctcaccgacgaccagatcgccgagttcaaggnggccttcagcctcttcgacaaggacggcgatggttgtattactactaaggaacttgggactgtgatgcggtcactagggcaaaacccaactgaggcagaactgcaggatatgattaatgaggttgatgctgatggcaatggaaccatcgacttcccagagttcctcaacctgatggctcgcaagatgaaaga

SEQ ID NO: 291769 - DNA, 266 bp, Glycine max
  unsure (1)..(266): unsure at all n locations
gcncttggnatccaannntgnnaganatcatcagcattcacataggtcaggccgggatccaggttggcaactcctgctgggaactctactgcctggaacatggcatccngcccgatggcatgatgccaagtgactcctccttcggtgtagcccacgacgccttcaacacctncttcagcgaaaccggatccggcaagcacgtccctcgcnccgtcttcgtcgatctcgagcccaccgtcatcgacgaagtccgttgtggcacttac

SEQ ID NO: 291770 - DNA, 264 bp, Glycine max
  unsure (1)..(264): unsure at all n locations
cnaggntttggcaaaagcttttatccaggttcttggtaatgagaaggccagcaaggnagtattcaacatctcgggagataagtatgtcacatttgatggattagcaagagcatgtgctaaggctggtgggttcccagagccagagatcattcactacaaccctaaagattttgattttgggaaaaagaaatcatttccattccgtgaccagcatttctttgcatcagttgagaaagcaaagagcgtgcttggattggaacctga

SEQ ID NO: 291771 - DNA, 264 bp, Glycine max
ccagcaagtagcaaagcctctatatgatcagaaggtacaaccaactactctgattccaaagcaagttggaaacatgtacacggcgtctctttatgcagcatttgcctcccttattcacaacaaaaatagcacattggcaggtaagagggtgatattattctcatacggtagtggcttaactgccaccatgttttcgttgcaattacgagacagtcaacatccgtttagcttgtcaaacattgctagagtgatggatgtcgatgg

SEQ ID NO: 291772 - DNA, 262 bp, Glycine max
  unsure (1)..(262): unsure at all n locations
ganacaggcatagcatgctacactcgcgggcctttcctgcctagtgtttcttccaagcactctccaccctccatctctccatcttttggcttgaggagtctgaaatcgagctctttatttggagaatctctaagagtggcatccaaatcaacactaaaggtttcaaagacaaagaatacttcactcgtgaccagatgtgaaattggtgacagtctggaagaattcctcacaaaagcaacaccagataaggggttgatcaggt

SEQ ID NO: 291773 - DNA, 259 bp, Glycine max
  unsure (1)..(259): unsure at all n locations
tcgacaagggtttggtaccccttgctggttccaacgacgagtcatggtgccaaggtcttgatggtcttgcctctcgctcggctgcatactaccagcaaggtgcccgtttcgccaaatggcgtactgttgtgagcatccccaacggtccctctgctctggcagttaaggaagctgcctggggtctgnctcgctatgcagcaattgctcaggacaatggattggtcccaattgtggaaccagagatcttgcttgatgggga

SEQ ID NO: 291774 - DNA, 258 bp, Glycine max
  unsure (1)..(258): unsure at all n locations
ccctagctagccacaatgcagatattcgtgaaanccctaacggggaagacgataaccctagaggtagagtcttcggacacgatcgacaatgtgaaggcgaagatccaggacaaggagggcatcccgccggatcagcagcgcctgatcttcgccggaaagcagctggaggacgggcgcacccttgccgactacaacatccagaaggagtccaccctccacctcgtcctccgcctccgcggcggcgccaagaagcgcaag

SEQ ID NO: 291775 - DNA, 222 bp, Glycine max
  unsure (1)..(222): unsure at all n locations
tacagatctgtttgaccaaaacccctcacaacacataaattcngacagacancaaganagaaagaagagaacaacagagcaatggaaggaggaggagctgctccgccggccgacaccgtgatgtccgacgcggcgccaccgccgcagcagcctccggtggcgatggggatcgagaatattccggcgacgctgagccacggtggcaggttcatccaatacaat

SEQ ID NO: 291776 - DNA, 258 bp, Glycine max
  unsure (1)..(258): unsure at all n locations
cngaaatgtggaacaatatccaaatgcaaatcatattcctggaatcctaattcttgaaattgatgcacccatttactttgccaatgcaagctatttaagggaaaggatcacaaggtggattgatgaagaggaagatagaatcaaagctacagagcaaaccagtttgcaatatgttataatggacatgaccgctgttgctaacattgatacaagtngaatangcntgcttgnagagtgcaagangactgttgacagaag

SEQ ID NO: 291777 - DNA, 279 bp, Glycine max
  unsure (1)..(279): unsure at all n locations
acttctgctacttcctactccaaccgcacttctgttccgcaattatcatgggccaggtcaagatcggaatcaacggatctggaagaattggccgtttggtagccagagtggctctgcagagagacgatgttgaactcgttgccgttaacgaccctttcatcaccaccgattacatgacatacatgtttaaatacgacagtgttcatggacactggaagcatcacgatgtcaccgttaaggacgagaagaccttctcttcggcgacaagccagtcantnt

SEQ ID NO: 291778 - DNA, 278 bp, Glycine max
gttcttctttcctcaaccttctttcttcttatatatcgaacatggctaagtatcattcaagtgggaaaagctcttccatgactgctatagccttcctgtttatccttctaatcacttatacaggcacaacagatgcacaatccggggtatgttatggaagacttggcaacaacttaccaacccctcaagaagttgtggccctctacaatcaagccaacattcgcaggatgcgaatctacggtccaagcccagaagtcctcgaagcactaagaggttcc

SEQ ID NO: 291779 - DNA, 254 bp, Glycine max
  unsure (1)..(254): unsure at all n locations
gttcggggccggtcggttgctttaacgtggccacagcgcgtacttagttgtgcttggtacanttntgttatggttcggctggtacggcttcaaccctggttcgtttctgacaatagccaaggggtatgaaagtggagggtattatggtcaatggagcgctatagggaggacagctgtcacgacgacattggctggnagcatgcggctctgacgacgttgttcagcaagcggttattggctggccatggaacgtg

SEQ ID NO: 291780 - DNA, 272 bp, Glycine max
  unsure (1)..(272): unsure at all n locations
tctgctctagaaaattcagtggtgatacatggcttcggctactctctctgtagccaaaccagcccttcaggcaaatgggaaaggcttctctgaattctctggcctccgcagctcatcaggcttnccttcccttttctagaaaatcttcagangatttccattctgtcattgccttccagacctatgcagttgnaagcagtggaggatacaagaagggtgtgacagaagcaaaactgaaggttgccataaacggatttggaaggattggaagg

SEQ ID NO: 291781 - DNA, 271 bp, Glycine max
  unsure (1)..(271): unsure at all n locations
ctgcaattcactctgtacaattcttcgttcgttctctgcagttatatcctttttgagcttcaatggcggacgctgaaaccttcgctttccaggctgagatcaatcagcttctaagtctcatcatcaacacattctacagcancaaggagacntcttgcgtgaactcatcagcaatgcttctgatgctttggataagattcgattcgagagcttaaccgacaagagcaagctcgatgctcagccagagctcttcattcgtctgtgcctgaca

SEQ ID NO: 291782 - DNA, 277 bp, Glycine max
  unsure (1)..(277): unsure at all n locations
gcagaaagcaagctcatcctagagttttaaaaatggcagcagcctcctccatggctctctcttccccatccttggctggcaaggccgtgaagctgggcccatcagcccccgaagtcgggagggtcagcatgaggaagaccgtcaccaagcaggcctcctccggaagcccatggtacggcccagaccgcgtcaagtacttgggcccattctctggcgagcccccgtctacctcactggcgagttcccaggtgactacggctgggacntgctgggtttc

SEQ ID NO: 291783 - DNA, 276 bp, Glycine max
  unsure (1)..(276): unsure at all n locations
ggttatttaganaagcaaaatggtgaagatttgctgcattggtgctggatatgtggggggtcctactatggcagtcattgcacttaagtgcccatccattgaagttgctgttgttgatatctctaaatcccgcattgcagcctggaacagtgcaccngcttcctatctatgaacctggccttgatggtgttgtgaagcaatgccgtggcaagaacctcttcttcagcactgatgttgaaaagcntgtctttgaggctgacatagtgtttgtctctg

SEQ ID NO: 291784 - DNA, 272 bp, Glycine max
  unsure (1)..(272): unsure at all n locations
ctgaaaaggcttttccgtgaccttttcattcgtgaaggattccaanntgattatgtctttgattggaccattttgaaatatcagcaatcncnaattgccacacctgttcgtgttattgttcctgctgctggacaaagttctgggctgccaccagctgttgtaaatgctgatagacagacaggtggggtgaacagtaggcatactggttggtcttcatctgatcctgctcgaagaagaaactctggacctattgcaaatgatggaatgtcgtc

SEQ ID NO: 291785 - DNA, 276 bp, Glycine max
  unsure (1)..(276): unsure at all n locations
gcttctatattgctccncncatttatggacaagattgttgttcacatcaccaagaactttttgaacttgccaaatattaaggtccctcttattttgggtatttggggaggcaaaggtcaggggaaatcatttcaatgtgagcttgtctttgccaagatgggaatcaaccccatagtgatgagtgctggagaattggaaagcggaaatgctggagaactgcaaagttgattaggcaaaggtatcgcgaggcagcagacattatcagaaaaggaaagt

SEQ ID NO: 291786 - DNA, 272 bp, Glycine max
  unsure (1)..(272): unsure at all n locations
cgtgaagtcatcgctattctgatgcagagacntgttcttgttgatggaaaagtcaggactgacaagacttaccctgctggtttcatggatgttgtttcaatcccaaaaaccaatgagaacttccgcctgctctatgacactaaaggccgattccgtctccattctgtcagggatgatgaggcaaagttcaagctctgcaaggttaggtcagtgcagtttggccaganaggtatcccatacctgaacacctatgatggtcgcaccatccgtta

SEQ ID NO: 291787 - DNA, 271 bp, Glycine max
  unsure (1)..(271): unsure at all n locations
atgccaccattcgtgccaatattgcatatggaaagaaaggtaatgaaactgaagcagaaatcataactgcagcaaaactagccaatgcacatgggtttattagtggtttacaacagggttatgatacagtagtgggaganaggggaatccaactatctggtgggcagaaacaaagggtggccattgcacgtgcaataattaanagtccaaagatattgctactggatgaggccacaagtgcactagatgccgagtcagagagattgttcaa

SEQ ID NO: 291788 - DNA, 153 bp, Glycine max
  unsure (1)..(153): unsure at all n locations
ccttatctgacacactctatctttaacatgtaccaaactgagcatgagttgcttaggtacttgtataagctacaatcaaaagatctctcactatgccacagtatgattccacttggatcttgtnccatgangctgaatgcaacaactganntg

SEQ ID NO: 291789 - DNA, 270 bp, Glycine max
  unsure (1)..(270): unsure at all n locations
gcgttggattgaggtatgancatgggatattctatngcatccaagacgttttatgatncagaataaggagaggagagttttgtggggttggattggggagtctganagtgaatatgctgatgtggctcaaggttgggcttcagttcagagtattcctagaactgtggagctngataggaagactggcagcaacttacttcagtggcctgttgctgagatcnagagtttgagattgagaagtgannntttaaaanntttgaaggctanacc

SEQ ID NO: 291790 - DNA, 270 bp, Glycine max
ccagctgttcctcttggagctaactataggcttattgatattcctgttagcaactgcttgaatagcaatgtctccaagatcctatgttctcactcaattcaattctgcgtcgttaaaccgacacctttctcgtgcttatgcaagcaacatgggtggctacaaaaatgagggatttgttgaggttctgctgctcagcagagtcctgagaatcctaattggttccagggtactgcagatgctgtgcaggcagtatttgtggctttttgaaga

SEQ ID NO: 291791 - DNA, 266 bp, Glycine max
  unsure (1)..(266): unsure at all n locations
cactccctcctcttcacacattttcttagctctctccaacaatccctctcgttcacactttcagattgtgtgaagatgggggctggtggccgaactgctgttcctcctgccaacaggaagtcagaggctgaccctttgaagcgggtaccatntgaaaaacctcagtttagtctcagccagattaagaaggccattccacctcactgtttccagcgctctgttctccgctcattctcctatgttgtttatgacctcaccatagcctt

SEQ ID NO: 291792 - DNA, 149 bp, Glycine max
  unsure (1)..(149): unsure at all n locations
ttcaaaanactcataacacncaagcacaaagcaaagntcatcnttgagttaaanaatggcagcagcttcttccatggctctctcatccccatccttggctggcaaggccgtgaagctgggcccatgcagccccagaagtgggaagggtg

SEQ ID NO: 291793 - DNA, 261 bp, Glycine max
  unsure (1)..(261): unsure at all n locations
cgcacaagtaaaaganaaccaatgtcaaattgctgtngaagatgttatgtacttgctgattttttacaagtnttctgagatcagggtccctatngttccaaagctttctagttgtctttataatggcaggctagagatattgccttctaaggactggnaactagagtctattcatagctcggaagttttggatatgataagggaacacataactactgtaactggcttgagagcaaaatctagtgtaactgagtgttgggc

SEQ ID NO: 291794 - DNA, 267 bp, Glycine max
  unsure (1)..(267): unsure at all n locations
ctgacattaaaaccatcataacanagcttgagcttcctgtacatgattggnatgagaaatggatagacgtgtacttggacattagtgtgaagttgctagatatatgcattgcatttagctctgaattatcacgcctgaaccagggtcatcttttacttcagtgtgcattgcacaatttaggttcttcctcttcagagcagtatgttcgggcatgttcttcacttgatggttggaaacagcatattggttctggaaaccctaggattg

SEQ ID NO: 291795 - DNA, 264 bp, Glycine max
  unsure (1)..(264): unsure at all n locations
cgacagtattccaganaagagaagaaaccttttccagttcccattgtaganctgcgacgagcagntagggagaggatgaagaagatgaaagatgagccgagaaaaccaatgtcagcacctnagaatgggttgctggtgaagagcctcataccgactgcatataatgtgtataatgctaggntcacttgatcaacaatctgaagaagctgctcaaagtagtgcctgtacatgcttgtgggtggtgcagtgaaatccatgtaggac

SEQ ID NO: 291796 - DNA, 267 bp, Glycine max
gcaacttcaacctcaccaaaggaactaagaatttcattgaggctagagaaagtggtgatcaatatgtcaaagaatccagaagttttctttgatattctaattggaaagatgaaagctggacgagtagtgatggagttgtttgccgatgcaaccccaaaaacagctgaaaacttcagggctctctgcactggggaaaaggggattggacgatctgggaaacctttacactacaaaggttctgtatttcatcgtattattccagaattt

SEQ ID NO: 291797 - DNA, 258 bp, Glycine max
  unsure (1)..(258): unsure at all n locations
cttgaggntgccaggnattatgggtgggagtngagtgaganagttgacttcaattggnagangctcttgcaaaanaagacagatganataaacagattaaatggactttacaagcggatgtnatccaattggggggttaaattatttgaaggcgagggaaagatagttggtccaaatgaagttgaggtgacacaattggatggcactaaattgtcctacacagcaaagcacntattgattgcnactggcagcagggct

SEQ ID NO: 291798 - DNA, 263 bp, Glycine max
  unsure (1)..(263): unsure at all n locations
cttcaaatttgcattaggntanaaaagaggctcccaaagttgcaggtncatggccaatacttggtccacctaccactattgagtggttcagatacaccccataaggttttggatgctttggctgataagtatngacccatattcaccatcaacaatagtgtcaaaaaggttttggtaatcagcaactgggaaattgctaaggaatgcttcaccacaaacgacatcgccgtttcgtctcgccccaagcttctggccattgaact

SEQ ID NO: 291799 - DNA, 263 bp, Glycine max
  unsure (1)..(263): unsure at all n locations
gcaattgaagttgaagtcttgcccttctctcttcaactccaaacacaagacatcatcatccatggctgcctccgtctccactgtcggagctgtcaacagagctcttttgaacctgaatgggtctggacctggggtttcagctcccagttcatccttctttgggagcagcttgaagaaggttattggctcaagggtccccaacacaaagatttcctctggaagcttcaagattgttgctgtagaagagaagaaagagntgaaga

SEQ ID NO: 291800 - DNA, 198 bp, Glycine max
aggcagaaagcaagctcatcctagagttttaaaaatggcagcagcctcctccatggctctctcttccccatccttggctggcaaggccgtgaagctgggcccatcagcccccgaagtcgggagggtcagcatgaggaagaccgtcaccaagcaggcctcctccggaagcccatggtacggcccagaccgcgtcaagta

SEQ ID NO: 291801 - DNA, 190 bp, Glycine max
  unsure (1)..(190): unsure at all n locations
ttatacctgtctcagcacatggtanaaatcctgcnagtgntgcnangtntngnatgaaaattgtctctgttggaactgacgccaaggntaacattaatatagaagaattgagaaaggctgccgaaacacataaggacaacttatctgcacttatggtaacatatccttcaactcacggtgtttatgagga

SEQ ID NO: 291802 - DNA, 182 bp, Glycine max
  unsure (1)..(182): unsure at all n locations
gagataactagaaacagtgtgatgaaaatgaaggtccttgttttcttcgttgctacaattttngtagcatggcaatgccatgcgtacgatatgttccctctccgaatgaacactggctatggtgcccgtactccggaggtgaaatgcgcaagttggaggcttgctgtggaagcacacaacat

SEQ ID NO: 291803 - DNA, 188 bp, Glycine max
  unsure (1)..(188): unsure at all n locations
ctgcagctgccattgcatatggtcttgataagaaggccacgagtnttggtgagaagaatgtgttgattttngaccttggtggtgggacatttgatgtgtctttactcaccattgaggagggtatctttgangtgaaagccactgctggtgacacccatcttggaggtgaagattttgataacaggatg

SEQ ID NO: 291804 - DNA, 182 bp, Glycine max
tagccttaaaatttgagcatagaagcagcaaagggtgcaattatggacctccatatgagtggcaggtttacaatgcactaggtggtagtcatggtgttccgcaagctcattataacggacggcaaggtgactactatattatggtcatggatatacttggccctagtctgtgggacgtttgg

SEQ ID NO: 291805 - DNA, 191 bp, Glycine max
  unsure (1)..(191): unsure at all n locations
gtttacaggaataatatatcnagatttgaagccaganaatgtgttantccagagcnggtgggcatgtgtccctaacagattttnatttgtcatgtttaacatctagcaagccacagcttataattccagctaccaattcaaanaagaagaaaaagaagaaacaganaagtcaagaggttccaatgtttatg

SEQ ID NO: 291806 - DNA, 182 bp, Glycine max
gcgcggagaagatgtggttcaccctctcaaggtctctctggaggacctttatctcgggacttctaagaagctctccctctccagaaatgtcatatgctccaagtgcactggtaagggttctaagtctggtgcttcgatgaagtgtgctggttgtcaaggaactggtatgaaggtttctataa

SEQ ID NO: 291807 - DNA, 184 bp, Glycine max
  unsure (1)..(184): unsure at all n locations
caaaacactcataacacaaagcacaaagcnaagctcatccttgagttaaaaaatggcagcagcttcttccatggctctctcatccccatccttggctggcaaggccgtgaagctgggcccatcagccccagaagtgggaagggtgagcatgaggaagaccgtcaccaagcaggtctcctcagga

SEQ ID NO: 291808 - DNA, 177 bp, Glycine max
  unsure (1)..(177): unsure at all n locations
ggatgcaccttttgctgagttgtgctcacactgtgagaaggaagctgtgaatgtttcccttggaaaccttctaacatacccatttgttagagatggcttggtgaacaagacattgtcactaaaaggaggatactatgactttgttaagggatcttttgagctctggggccttcantt

SEQ ID NO: 291809 - DNA, 182 bp, Glycine max
  unsure (1)..(182): unsure at all n locations
gaacatccagaccatgtggttgtcatnaagtacgtgccttatgtaggggacagcaagagggccatggatgagtacacttctgagatattcatgggtggaaagaacacaattgtgttgcacaacacatgtgaggattcactgttagctgctcctattatcttggacttggtccttcttgctgt

SEQ ID NO: 291810 - DNA, 183 bp, Glycine max
  unsure (1)..(183): unsure at all n locations
ggnagtnccctagctcctcctttnaagntgcagatcttcgtcaanaccctcaccggaaagaccatcanccttgaggtngaaagctctgacaccatcgacaacgtcaaggncaagatccaggacaaggaaggaattcccccggatcagcaacgtctcatcttcgccggaaagnagatcgaggat

SEQ ID NO: 291811 - DNA, 174 bp, Glycine max
  unsure (1)..(174): unsure at all n locations
gaacatccagaccatgtggttgtcattaagtacgtgccttatgtaggggacagcaagagggccatggatgagtacacttctgagatattcatgggtggaaagaacacaatngtgttgcacaacacatgtgaggattcactgttagctgctcctattatcttggacttggtcctt

SEQ ID NO: 291812 - DNA, 183 bp, Glycine max
  unsure (1)..(183): unsure at all n locations
cgcagttccctanctctcctttcaagatgnagatcttcgtcaanaccctcaccggaaagancancanccttnnngtgganagctctgacaccatcgacaacgtcaaggccaagatccangacaaggnaggaattcccccggatnagcaacgtctcatcttcgccggaaagcagctcgnggatg

SEQ ID NO: 291813 - DNA, 180 bp, Glycine max
cagagtcccaacaggagtcggctgtagttcctcctaactcagccgtgtattttgaagttgagctagtgtcatttgagaaagagaaggagtcctgggatctgaacactgaagagaaacttgaagctgctggtaagaagaaagaagagggaaatgtcttgtttaaagctagtaaatatgcaa

SEQ ID NO: 291814 - DNA, 172 bp, Glycine max
caaggtcaggagtgaaggttgcaaaattcagagccgatggagagcagaaggaatatgcaaagagtgaactgcagttgggaagcttccccacaatacttctcttccccaagcactcttctcaaccaattaagtacccttcagaaaagagagatgttgattcattgacggcatt

SEQ ID NO: 291815 - DNA, 262 bp, Glycine max
  unsure (1)..(262): unsure at all n locations
aacaattgtttaatcgtgaactccgacttgatttagctcgggaaaggggtgcatatacccccaacagcagcaactggaacaactcatcccagaaaagtggangaggccagtctcaaacagtatttgtaaggggtttcgatataatcccttggagaagatgagatacgagggagtttgcaagancattttggatnntgtggggacattatnagggtgtcgattcctaaagattatgagtctggtgctgtcaaggggtttgctt

SEQ ID NO: 291816 - DNA, 257 bp, Glycine max
  unsure (1)..(257): unsure at all n locations
tcacattgttctcggctgcaagttcgtctgctctgctgttaacaaggcgggtcttgctaagcttattggacttgcaggagagacaaatgttcagggtgaagagcaaaaganattggatgtcctatccaatgatgtcttcatcaaggcattgatcagcactggacgaacatgcatcttggtgtctgaagaagatgaggaagcaacatttgtggaaccttctaagcgtggaaaatactgtgttgtttttgacccgctng

SEQ ID NO: 291817 - DNA, 257 bp, Glycine max
tcaaaacactcataacacaaagcacaaagcaaagctcatccttgagttaaaaaatggcagcagcttcttccatggctctctcatccccatccttggctggcaaggccgtgaagctgggcccatcagccccagaagtgggaagggtgagcatgaggaagaccgtcaccaagcaggtctcctcaggaagcccatggtacggcccagaccgagtcaagtacttgggcccattctctggcgagcccccgtcctacctaacc

SEQ ID NO: 291818 - DNA, 260 bp, Glycine max
  unsure (1)..(260): unsure at all n locations
agcagacttaacaacagcacaaagcgggttactgtctgttcaagctaccannnnnnnnnnnnnnnnntagtgcctccttgccagaagttaaaatggcccaagaaactttcctattcacatctgaatcagtgaacgaggggcaccctncacaagctctgtgaccagatctccgatgctgtgctcgatgcatgcttggagcaggaccctgacagcaaggttgcctgtgaaacctgcaccaagaccaacatggtgatggtttt

SEQ ID NO: 291819 - DNA, 261 bp, Glycine max
  unsure (1)..(261): unsure at all n locations
cataaacgggtggtgcctctcttccatctccccagccaaaacctctctcaggaaggccacattacgcccttccgtcttcgcaacccttaacactccttcttctccttcctcttcatcttccttcccctctctcattcaagacaggcctgtttttgctgcccctgcccccatcatcaccccaactgtgagagaggatatggcaaaggaatacgagaaagctattgaagaacttcagaaattgttgagggagaagagtnaccc

SEQ ID NO: 291820 - DNA, 264 bp, Glycine max
  unsure (1)..(264): unsure at all n locations
cntcgctccgcaccagtttcaccggcacgaatatcttgttgtttggagcgatccgagaaaaactctgtaaacatgttggtttaccaggacctccttacaggtgatgagcttctctctgactccttccgttacaaggaaattgagaatggaatgctgtgggaagttgaggggaagtgggttgttaaaggagcagttgatgtagncattggngcaaacccttctgctgagggtggaggagaagatgagggattgatgatgcaccnt

SEQ ID NO: 291821 - DNA, 265 bp, Glycine max
  unsure (1)..(265): unsure at all n locations
tgnaattgaagttgaagtcttgctctnctctcttnaactccanacanaaganatcaagatccatggctnatcnccgtctccantgtcggagctgtnaacagagntcttttgaacctgaatgggtctggacctggggtttcagctcccagttcatccttctttgggagcagcttgaagaaggttattggctcaagggtccccaacacaannatttnctctggaagcttcaagattgttgctgtagaagagaagaaagagattgaag

SEQ ID NO: 291822 - DNA, 233 bp, Glycine max
  unsure (1)..(233): unsure at all n locations
cagaagtccataatccatacaaaagagcttancctggcatgnatatttgtcttcatggaacaaatgatgatattgttgattggtctcatggcaagcgattgtgggaactctccaaggaaaaatatgatcccttgtgggttaagggtgggggtcattgcaaccttgaaacattcccggagtacatcaagtacttgcgcaagttcattaatgcaatggagaaactctcactcaca

SEQ ID NO: 291823 - DNA, 261 bp, Glycine max
  unsure (1)..(261): unsure at all n locations
tatctctctgttctcttctacctctcaagtttttgaagtatagagatggcagagacattcctatttacctcagagtcagtgaacgagggacaccctgacaagctctgtgaccaaatctctgatgctgtcctcgacgcttgcctcgaacaggacccagacagcaaggttgcctgcgaaacatgcaccaaaaccaacttggtcatggtcttcggagaatcacgaccaaggccaatgtngantacgagaagatatgcgtgaccc

SEQ ID NO: 291824 - DNA, 265 bp, Glycine max
ctcagagaattactgcgaaagatgcacttgatgctgagtatttctggacagatccattaccgtgcgatcccaagagtttacccaagtacgaatcatcacatgagtttcagacaaagaaaaagcgccaacaacaacggcaaaatgaagaaatggctaagcgtcagaaaattcagcacccacagcctcacactcgtcttccccccattcagcagcctggacaacatggccaaatgcggtcaggaccaaaccaaccagttcatggttc

SEQ ID NO: 291825 - DNA, 260 bp, Glycine max
  unsure (1)..(260): unsure at all n locations
ctgcaaganctgcaaaatccgctggcatggctaaggaaaactacaccatgaatgcacttggaccttgcctcgctcgacagtgtccgccaatttgttgataacttcagaagatcagaaatgccgttagatgtgctggtttgccatgctgctgtttacttgccaactgctaaggaacctaccttcactgctgagggctttgaacttagtgttgggacaaatcatctggggcatttcctcctctcgcgcctgttgcttgagga

SEQ ID NO: 291826 - DNA, 256 bp, Glycine max
gtgaaaatggcggtacccttgctctccaagaagatcgtgaagaagcgcgtcaagaagtttatacgcccccagagtgatcgcaagatctccgtcaagccaagctggcgcagacccaagggtattgattctcgtgtcaggagaaagttcaaaggatgcactttgatgcccaacattggttatggctcagacaagaaaacccgccattatctaccaaatggtttcaagaaatttgtcgtgcacaatgtgaaagacctgg

SEQ ID NO: 291827 - DNA, 258 bp, Glycine max
  unsure (1)..(258): unsure at all n locations
ctctgacactattgacaatgtcaaagctaagattcaagacaaaganggtatcccaccagaccaacagaggctcatttttgctggaaaacagcttgaagatggccgaaccttggcagattacaacatccagaaagaatctaccctccacttggtgctccgtcttcgcggtggtatgcaaatctttgtgaagactcttactgggaagaccattactttggaggtagagagctctgacacaattgacaatgtgaaggccaa

SEQ ID NO: 291828 - DNA, 260 bp, Glycine max
  unsure (1)..(260): unsure at all n locations
caaaaagnaagaatcccaggcgaggagaaagatggaggggaaggagcaggatgtgtcgttgggagcgaacaagttccccgagagacagccaattgggacggcggcgcagagccaagacgacggcaaggactaccaggagccggcgccggcgccgctggttgacccgacggagtttacgtcatggtcgttttacagagcagggatagcagagtttgtggccacttttctgtttctctacatcactgtcttaaccgttatgg

SEQ ID NO: 291829 - DNA, 256 bp, Glycine max
tgaagaggtacttagagaaaggaggagaaacagcatcggcggtggatgggttgcctccgaggtttctggaaccgttaataatgaacgctcttaaggtcgatctcatcgaaactggtcgcgttgtctgctccatgaagatacctccgcgtttactcaatgctgggaattcgttacacggtggcgccatcgctgctctggtcgacgtggtggggtccgctgcgattcccaccgttggatattcggctcccaatactgg

SEQ ID NO: 291830 - DNA, 249 bp, Glycine max
  unsure (1)..(249): unsure at all n locations
caaattcacactctctttggctctggtgttgtgttgtgttgaggtacttgancaagagaaaatggtgtcgtcgcaggttgtgaatacgtacccgttgtcgagctacacgttcggcacgaaggagcccaagatggagaaggatacctccgtcgcggatcgtctcgctcgcatganagtcaactatatgaaggagggaatgaggaccagtgtggaaggaattttactggtacaagagcacaatcatcctca

SEQ ID NO: 291831 - DNA, 256 bp, Glycine max
  unsure (1)..(256): unsure at all n locations
ccctgatttccatgtttcggcacaaaactgttgggttcgcaaaggtggtgcttataccggtgaggttagtgctgaaatgcttgttaatttgggaattccttgggttattattggtcactctgaacggaggcagcttttaaatgaatcaaatgagttngtgggagataaagttgcctatgcacttcaacaaggtctaaaagttattgcatgcattggggagactctcgaacaccgtgaagctgntacnacaacgggt

SEQ ID NO: 291832 - DNA, 257 bp, Glycine max
  unsure (1)..(257): unsure at all n locations
ttcttccaantncaaccacactagttntnaggnantcatgggcaagatcaagatcggaatcaacggatatngaagaattggccgtttggttgccanantcgctctgcaaagagacgatgtggagctcgttgncgttaacgaccctttcattatcacngattanntgacatatatgttnaantacnnnagtgttcaggganactggaagnatnangatgtcatgttaaaggangannagaccttttnttcggtnaaat

SEQ ID NO: 291833 - DNA, 258 bp, Glycine max
  unsure (1)..(258): unsure at all n locations
gcattggggagactctcgaacagcgtgaagctggtacaacaacggctgttgtttctgagcaaacaaaagcaattgcagctaaaatatcaaattgggacaatgtcgttttggcctacgagccagtttgngccattggaacaggaaagnttgctactcctgctcaggctcaagaggtccatgcggatttgaggaaatgggttcatgacaatgtgagtgctgaagttgctgcatcggtaanatttatctanggaggtctgt

SEQ ID NO: 291834 - DNA, 260 bp, Glycine max
caaacttgttgttcacattaccaagaacttcatgaccctgcccaacatcaaggttcctctcattcttggtatctggggaggcaagggacaaggaaaatctttccaatgtgagcttgtctttgccaagatgggaatcaaccccatcatgatgagtgctggagagttggaaagtggaaatgcaggagagccagcaaaactgatcaggcagagataccgtgaagccgcagacttgatcaagaagggaaagatgtgtgctctct

SEQ ID NO: 291835 - DNA, 255 bp, Glycine max
  unsure (1)..(255): unsure at all n locations
aaatttgcaggtgatactgcagagcttggtatcatcagagcagggacattncatgaaaactaaagttgttttaaactcacgagttcatttggtnccctatcacattgatgaaggtctgccttcctatctaataattgcnggtttagtattcacacccctctcagagccattgattgaggaagaatgtgaagactctatagggctaaaattattggcaagggcacgttattcattggcaaagtttaaaggggagca

SEQ ID NO: 291836 - DNA, 256 bp, Glycine max
  unsure (1)..(256): unsure at all n locations
agagagacgcttcgcaaatctcaatcgaatctcagaaaaatgagaganatcatcagcattcacataggtcaggccgggatccaggtcggaaactcctgctgggaactctactgcctcgaacatggcatccagcccgacggcatgatgccttctgactccaccttcggtgtagcccacgacgccttcaacaccttcttcagcgaaaccggatctggcaagcacgtcccccgtgctgtcttcgtcgacctcgaaccca

SEQ ID NO: 291837 - DNA, 254 bp, Glycine max
  unsure (1)..(254): unsure at all n locations
aacactcataacacaaagcncaaagcaaagctcatccttgagttaaaaaatggcagcagcttcttccatggctctctcatccccatccttggctggcaaggccgtgaagctgggcccatcagccccagaagtgggaagggtgagcatgaggaagaccgtcaccaagcaggtctcctcangaagcccatggtacggcccagaccgagtcaagtacttgggcccattctctggcgagcccccgtcctacctaaccg

SEQ ID NO: 291838 - DNA, 254 bp, Glycine max
  unsure (1)..(254): unsure at all n locations
cgaanagtaccaaggctgagaagaagatcgcttacgatgnnaantgtgcgacctaatggaggagtacggccagatccncgttgtgaactccgataacgtgggatcgaaccagctccagaacattcgcaagggtctccgtggcgactccgtcgtcctcatggggaagaacaccatgatgaagcgctcagtcaggatgcacgctgagaaaaccggaaacaacgcctatctcaaccttatcccgctccttgttggca

SEQ ID NO: 291839 - DNA, 252 bp, Glycine max
  unsure (1)..(252): unsure at all n locations
tcaggacctccttacaggtgatgagcttctctcggactccttccgttacaatgaaattgagaatggaatgctgtgggaagttgaggggaagtgggttgttaagggagcagttgatgttgacattggtgcaaacccttctgctgagggtggagaagatgagggagtcgatgacgcagctgttaaggttgttgacattgttgatacattcagacttcaggagcaacccgcttttgataagaaacantttgttac

SEQ ID NO: 291840 - DNA, 256 bp, Glycine max
taaaagttgggctttccttagaggaacataaatccagactgaaggaaaaactaggatgtgaaccctctgatgatcaaatggcaacttctttgaagatttctcgcactgaactacgagcaagaatgatagagtgctctctggcaagagaaaagttggctatgagcaatgtacgcttagttatgtctattgcccaaaagtatgataacctgggtgcagaaatgggtgaccttgttcagggtggcttgattggattact

SEQ ID NO: 291841 - DNA, 250 bp, Glycine max
  unsure (1)..(250): unsure at all n locations
ctgaacggaaaagcactggcgcantaccctgaggcttctcttctcttctcttctctgtcgtgagtcaccatggtgagggttagtgtgctgaacgatgctctgaagagcatgtacaatgctgagaaaaggggaaagcgccaagtcatgattaggccatcctccaaagtcattatcaaattccttttggtgatgcaaaagcacggatacatcggagagtntgagtatgttgatgaccacagggctggtaaaa

SEQ ID NO: 291842 - DNA, 251 bp, Glycine max
  unsure (1)..(251): unsure at all n locations
acaaaagcccgtggccgaggtgtggcgcaagatccacggggaggacaactgggccgggcttctggacccgatggacccggttatgcgaggcgagctgacccgctacggcgagatggcccaggcctgctacgncgcattcgacttcgacccgtactccaaatactgcggcagctgcaggttccccttgcccgaattcttcgactccctgggcatgaccaacgtgggctacaccatgacgcggtacctctacg

SEQ ID NO: 291843 - DNA, 256 bp, Glycine max
cagaaatgattcttgtgtatgaatacatggctaatggacccctccggagtcatttgtatggtacagacctgccgcctctgtcatggaagcagcggcttgagatttgcattggagcagcaagaggccttcattatctccacactggtgcagctcaaagcattattcatcgagatgtaaagacaacaaatatcctgttagatgagaactttgttgctaaagttgctgattttggcctctccaagactggtccttctct

SEQ ID NO: 291844 - DNA, 252 bp, Glycine max
  unsure (1)..(252): unsure at all n locations
ctttcttcttcttctcttaaaagagcctnttgctttttctttaggccttccgnattaagtacttgtctcattttctctcgaagcaagaaaaatgttcatcgagagtttcaaggttgagagtcctaacgtgaagtacacagagactgagattcagtccgtgtacaactatgaaaccactgancttgttcacgagancaagaatggcattatcagtgggttgtcagcccaaaactgtcaaatatgattttnaac

SEQ ID NO: 291845 - DNA, 253 bp, Glycine max
  unsure (1)..(253): unsure at all n locations
gccatttgaaaaacctccatttagtctcagccaaatcaagaaggtcattccacctcactgtttccanccgttctgttttccgctcattctnctatgntgtttacgacctcaccatagccttctgcctctattatgttgccacccattacttccacctccttcccagccctctctctttcttggcatggccaatctactgggctgtccaaggttgcatccttactggagtttgggtcattgcccatgagtgtgg

SEQ ID NO: 291846 - DNA, 257 bp, Glycine max
cacgcgattccgttgtcccaacagttgagttatttcaaggaataccaaggcaagctggccaaggtagctggcagtaaaaaagcagcctcaatcatcaaggatgcgttgtatgtgctcagtgctggaagcagtgactttgtgcaaaattattatgtcaatccttggatcaacaaagtctacactcctgatcagtattcgtcctacttaattggttcattctcaagttttgttaaggattgtatggattgggaagcagg

SEQ ID NO: 291847 - DNA, 258 bp, Glycine max
  unsure (1)..(258): unsure at all n locations
tcaaggncttgctccgcaaagggtacatgttacttgtgccttggtgtatggtccaactcccactggtagaattcacaaaggagtatgttcaacctggatgaagaatgctattcccttagaaaaaagtcccgactgttgctgggctcctatttttattaggccatcgaatttcaagctaccagttgatcattcaattcctattattatggttggaccgggtatggtcttgcacctttcaggggtttttncnggaaantt

SEQ ID NO: 291848 - DNA, 270 bp, Glycine max
  unsure (1)..(270): unsure at all n locations
gttgncattctcatcntcttctttctctctctaccattgccatggatccctacaagcaacggccatgccagcgccttacaattctcccttctggactacaaattctggtgctcctatttggaacaacaactcctctttaaccgttggagctagaggtccacttctgctggaggattatcatcttgtggagaagcttgcaaattttgatanggnacgtatcccagaacgtgttgtccatgccaggggngctagtgcaaagggtttctttga

SEQ ID NO: 291849 - DNA, 267 bp, Glycine max
  unsure (1)..(267): unsure at all n locations
gnacaagtcgtngagnactangnaggagaagcaaatngcttcctcaatgatgtcttcacccagctgttancantgncanncgtnccggtnccggcatggttgctccantcactggcctcaagtccatgcgctggcntccccancaggnanaccaacaatgacattacctcnattgctaggnacggtggaaganngcaatgcatgcanntgtggncaccagttggcaanaannagtttgagactctttcctacngccagnccttgntg

SEQ ID NO: 291850 - DNA, 267 bp, Glycine max
  unsure (1)..(267): unsure at all n locations
cctccttcgagccagtnttgtgcattgatcaagggtttggcggatttggaagctgcactttgcctatgcaccgcaattaagagcaatgtgcttggaatcaacttgaacgtacctgtgacgctcagcgtgatccttagtgcttgtcaaaagactgtccctcctggtttccaatgtccctcctgagataatcaaattaggntcatgagatatctctcgtcatcagagaaatgtttagatatgcacttaacatgaaattgattgactgcc

SEQ ID NO: 291851 - DNA, 269 bp, Glycine max
  unsure (1)..(269): unsure at all n locations
ggagaacaggaattaaacttgttccagttatgtgcgatanttcaaacaatttcaagttgacanagcaagcattggaagatgcgtatgagaaggccaaagaggataatataagagtaaagggcttgctcatcaccaatccatcaaacccattaggcacagtcatggacagaaacacactaagaaccgtgatgagcttcatcaacgagaagcgtatccaccttgtatctgatganatatactctgcaacagtttttagncaccccagtttc

SEQ ID NO: 291852 - DNA, 268 bp, Glycine max
  unsure (1)..(268): unsure at all n locations
gtcgagctgagaataccagttgctccagtagccggcactaaacaacatggcggacaaggcagtcaccatccgaaccaggaagtttatgacaaacaggcttctctccagaaagcagttcgtcgttgatgtccttcatccagggagggctaatgtttccaaggctgaactgaaggagaagctgggaagaatgtatgacgtgaaagacaccaacactgtatttgtcttcaagttccgaactcannntggtggtggcaagtccactgggttt

SEQ ID NO: 291853 - DNA, 196 bp, Glycine max
  unsure (1)..(196): unsure at all n locations
tgaccaganacagagcagcactcacattcacaacgaaggtttcctantcatcagacatggtgaaggcaatcagagttcacgaactcggtggccctcaagttctgaagtgggaggntgtggaaattggagatccaaaagaaggcgaggtccgtgtgaggnacaaagccattggggttaatttcattgatgtctactt

SEQ ID NO: 291854 - DNA, 269 bp, Glycine max
  unsure (1)..(269): unsure at all n locations
attgcaatcaaattagttcattctctttggcgcagttccctacctctcctttcaagatgcagattcttcgtcancaccctcaccggaaagaccatcacccttgaggtggaaagctctgacaccatcgacaacgtcaangccaagatccaggacaaggaaggaattcccccggatcagcaacgtctcatcttcgccggaaagcagctcgaggacggccgtaccctcgccgactacaacatccagaaggagtcaacccttcaccttgtctt

SEQ ID NO: 291855 - DNA, 268 bp, Glycine max
  unsure (1)..(268): unsure at all n locations
tgnaattgaagttgaagtcttgcccttntcncttcaantccaaacacaaganatcatgnatccatggcgcatccgtctccactgtnggagctgtctacagagntnttttgaacctgaatgggtctggacctggngtttcagctcncagttcatccttctttgggagcagcttgaagaaggttattggctcaagggtnnccaacacaaagatttnatctggaagcttcaagattgttgctgtagaagagaagaaagagattgaagagac

SEQ ID NO: 291856 - DNA, 269 bp, Glycine max
gaagaacaagtagttgagaactaagaaggagaagcaaatggcttcctcaatgatctcttccccagctgttaccactgtcaaccgtgccggtgccggcatggttgctccattcactggcctcaagtccatggctggcttccccaccagaaagaccaacaatgacattacctccattgctagcaacggtggaagagtgcaatgcatgcaggtgtggccaccagttggcaagaagaagtttgagactctttcctacctgccagaccttgatg

SEQ ID NO: 291857 - DNA, 268 bp, Glycine max
  unsure (1)..(268): unsure at all n locations
ctttcctggaaaaaaattggaacctgcctctcttaaagtttgtanttttttgagtgggtgggttgattgagagtactgtgcaagctttggaactttgtcccaacctgctacttcaatggctactgaagaggttaacaaacctcaatcacttcctccataccctgagatgatagtgaaagcacttgaagcactgaatgagccaaatggatcgaacaagtcagcaatatcaaagtacatagaaaccacctacggtgagttgccagacgca

SEQ ID NO: 291858 - DNA, 266 bp, Glycine max
  unsure (1)..(266): unsure at all n locations
cgaatctgttgaatgaagctgctatattagctggtcgccgtggaaagacagctatttcatctaaagaaattgatgattctattgataggattgtggctggaatggaaggaacagtgatgacagatgggaagagcaaaagtntagtggcatatcatgaagttggtcatgctatttgtggaactttgactcctggtcatgatgctgtgcaaaaggtaacactagttcctcgcggtcaagctcgtggacttacatggttcattcctaac

SEQ ID NO: 291859 - DNA, 268 bp, Glycine max
  unsure (1)..(268): unsure at all n locations
gacgnacacagtccgaggaacaacnatgtgtatggganggagttccagtccntgctggcaggnctcgangaagaagggtgcgtggaagangcagggcaccantctgagaagaaacgacgactaaacgtagntcnngtgaaggccttggagaanaacttcnaagtagagaacaaactggannnngaccgnaacgtgaagntcgngcaagaaatcggcttgnaaccaagacaagttgcggtttggntnaaaaccgccgtggcagatngac

SEQ ID NO: 291860 - DNA, 271 bp, Glycine max
  unsure (1)..(271): unsure at all n locations
gtcagagacaganacgcagccatggggcggagacctgcgaggtgttataggcaaattaagaacaagccataccccaagtcacgtttctgccgtggtgttcctgatcccaagatcaggatttatgatgttggtatgaagaagaagggtgttgatgagtttcctttctgtgtccatctggttagttgggagaaggaaaatgtntcaagtgaggccctggaagctgctcgcattgcttgcaacaagtacatggccaaatttgctgganaggatg

SEQ ID NO: 291861 - DNA, 274 bp, Glycine max
  unsure (1)..(274): unsure at all n locations
caagaagagaatctcaatggaggcccaggagctgaagcgcgtgttccagatgttcgaccgcaacggcgacgggagantaacgaagaaggagctgaacgactcgctggagaacctgggcatcttcatctctgacaaggacctgagccaaatgatccagaggatcgacgtcaacggcgacggttgcgtggacatggacgagtttgggnagctgtatcagaccataatggacgagcgcgacaatgaggaggacatgagggaggccttcaacgtcttc

SEQ ID NO: 291862 - DNA, 263 bp, Glycine max
  unsure (1)..(263): unsure at all n locations
tttggccctgtctcagcagntggctgtnactgttcctgttggcagcgatttgtctctcagaagatctgcggttaaggcacctaactttaacttttgggataaatcatgggcaccagtatttactttgtacttgaaggcaaacaactcaagtttaagaagtcgtcatgtggtattcatgtcagtgcaacaagcaagtgtacccaaagttaatgtatcacctttagagttggaagatgctaaagaacctccattgaacttacaca

SEQ ID NO: 291863 - DNA, 267 bp, Glycine max
  unsure (1)..(267): unsure at all n locations
acctctccgaactgcaccgttttgaagacgaancgacccgctangttggacatacccgtttcctccctcacctttgcggttccgcccacgccctccgtngcgncgcgtgacgtggttgacgctgaggaagatgggtttggggtgtcctgcaagacanggaggagggagtatatggaggatcgttacacagctggggataatcttcgcggagaacacaaactggcttttnttggcatatttgatgggcacggtggtgcaaaagctncc

SEQ ID NO: 291864 - DNA, 263 bp, Glycine max
  unsure (1)..(263): unsure at all n locations
ccccattcaatatgtttcaatattccgcaggtgacatggaatttaagcagaataggttcctttctgctgaaaagcaaatggtgacagccaatccagacatcaatactgtngaactttgtgatgaagatgaatttatagtgctggcttgtgatggcatatgggattgcttgtcaagccaacaattggtagattttgtacgtcaacaactgctcttggaaagtaaactttctgcggcttgtgaaagagtactagatcgatgtttg

SEQ ID NO: 291865 - DNA, 266 bp, Glycine max
gtttatttgccaaggcaaggcaaaagaactgtccaaaaggtagcaatggaacaccaaaggacaacaatgtagcaccactagacttcaaaactcctaaccattttgacaacgagtacttcaagaacctcatcaacaaaaagggtctccttcattctgatcaagagctcttcaatggaggatccacagattcactagtgagagcttacagcaacaatcaaaaggcctttgaggctgactttgtcactgcaatgattaagatgggaaac

SEQ ID NO: 291866 - DNA, 257 bp, Glycine max
  unsure (1)..(257): unsure at all n locations
aaattgtttttgtggatgctggggttgctcaaattgacattgaaactaagaagatganagaagagcaaaaaatgaaagaagcacaggcaagagcagtggcagagcatggagagttagcactaattactgtagaaggtatccagtctgccaaggaagaaagaatagcattgaggccaccaatgttgcaggtggttcggttggcttcatttcagcatgctccttcagttccacctttcatatcangaccaaaacaatct

SEQ ID NO: 291867 - DNA, 258 bp, Glycine max
  unsure (1)..(258): unsure at all n locations
ctcataacacaaagcacaaagcaaagctcatccttgagttaaaaaatggcagcagcttnctccatggctctctcatccccatccttggctggcaaggccgtgaagctgggcccatcagccccagaagtgggaagggtgagcatgaggaagaccgtcaccaagcaggtctcctcaggaagcccatggtacggcccagaccgagtcaagtacttgggcccattctctggcgagcccccgtcctacctaaccggtgagttc

SEQ ID NO: 291868 - DNA, 260 bp, Glycine max
  unsure (1)..(260): unsure at all n locations
agaagatcatggcttctctagcaaccttggctgctgttcaaccagctacgatcaatggccttgctggaagttccctcnctggaactaagctctctttcaagccctctcgccacagtgtcaaatccaagaacttcaggagtggtgccgtggtagcaaagtatggtgacaagagtgtgtactttgatttggaggatctgggcaacactacagggcagtgggacttgtatggctcagatgcaccttcaccctacaacccttct

SEQ ID NO: 291869 - DNA, 259 bp, Glycine max
  unsure (1)..(259): unsure at all n locations
gccatctcagccttcccatctctcctttcctcctcaaaatccagatttgccgcagcagttcctctttccagctttgttgtcaccaatgcctcttcttctcgcttttccatgagtgctgattggatgcctggccagcctagacccccctaccttgatggttcagcacctggtgactttggattcnaccctcttcgtcttggtgaagtaccagagaatcttgagaggttcaaagagtcagaactcattcactgcagatggg

SEQ ID NO: 291870 - DNA, 262 bp, Glycine max
  unsure (1)..(262): unsure at all n locations
cggatattaaagacacctctaaagaangatatagttttgaagagatatgccatcaagaaagaagcgtttgagggagaagagaagttttgtgcaaaatccttgggaacagtaattggttttgccatttcaaagctgggaaagaacattcaagtactttcaagttcctttgtcaataagcaagagcaatacactgtggaaggagtgcagaatcttggagacaaagcagtgatgtgtcatgggctaaatttcagaactgcagtat

SEQ ID NO: 291871 - DNA, 253 bp, Glycine max
  unsure (1)..(253): unsure at all n locations
aagattatatttactantnttggcaanccacatgcattnggacanaaaccactgagcttccctcgtcaggttgttgncttntgccaagctccattcctacttgatgatcctaatgttggactgctattccctgctgatgcaattgcaagagctaaacactatctttcattgacctcgggcggtttaggcgcttatagtgactcccgcggccttccaggagtgaggaaggangtggctgagttcatactcaggc

SEQ ID NO: 291872 - DNA, 262 bp, Glycine max
  unsure (1)..(262): unsure at all n locations
ggcagatancaaaaaagagctncagttttgagttcaaaanatgactaacttcccagtgatcaacttggagaagctcaatggtgaggagagaaacgacaccatggagaaaataaaggatgcttgtgaaaactggggattctttgagctggtgaatcatggcataccccatganttattggacactgtggagaggttgaccaaagagcactacaggaaatgcntggnaganaggttcaaggnatttatggcaagcnaaggtcta

SEQ ID NO: 291873 - DNA, 263 bp, Glycine max
  unsure (1)..(263): unsure at all n locations
caaagaacttgccgagtctgtcagtcttaaggatggaacagttgttcttcagtttgagactcgccttcagaatggcctcgaatgtggtggtgcatatattaaatatcttcgaccccaggagagcggntggaaaccaaaggaatttgacaacgaatctccatattctatcatgtttggtcctgataagtgtggtgctacaaacaaggttcacttcattttcaagcataagaacccaaagagtggggagtatgttgagcatcatc

SEQ ID NO: 291874 - DNA, 255 bp, Glycine max
  unsure (1)..(255): unsure at all n locations
ctttgcgcagttccctacctctcctttcaagatgcagatactcgtcaagaccctcaccggaaagaccatcacccttgaggtggaaagctctgacaccatcgacaacgtcaaggccaagatccaggacaaggaaggaattcccccggatcagcaacgtctcatcttcgccggaaagcagctcgaggacggccgtaccctcgcngactacaacatccagaaggagtcaacccttcaccttgtcctccgtctccgtgg

SEQ ID NO: 291875 - DNA, 253 bp, Glycine max
tcagggggaagaccagaaaaagcttgatgttgtttcaaatgaggttttctcaaactgcttgaggtcaagtgggaggacagggataatagcatcagaggaggaagatgtgccagtggcagtagaagagagttattctggaaactacattgtggtgtttgacccacttgatgggtcatccaatattgatgctgcagtgtcaactgggtccatttttgggatatacagccccaatgatgagtgtctgctgacattg

SEQ ID NO: 291876 - DNA, 254 bp, Glycine max
  unsure (1)..(254): unsure at all n locations
agtagttgagaactaagaagaaggaaatggcttcctcaatgatctcctccccagctgttaccaccgtcaaccgtgccggtgccggcatggttgctccattcaccggcctcaaatccatggctggcttccccacgaggaagaccaacaatgacattacctccattgctagcaacggtggaagagtacaatgcatgcaggtgtcgccaccaattggcaagcngaagttcgagactctttcctacttgccagacctc

SEQ ID NO: 291877 - DNA, 257 bp, Glycine max
  unsure (1)..(257): unsure at all n locations
cactcactcgcaagcaaaaagaaagaatcccaggcgaggagaaagatggaggggaaggagcaggatgtgtcgttgggagcgaacaagttccccncgagacagccaatncggacggcggcgcagagccaagacgacggcaaggactaccaggagccggcgccggcgccgctggttgacccgacngagtttacgtcatggtcgttttacagagcagggatagcagagtttgtggccacttttctgtttctctacatcac

SEQ ID NO: 291878 - DNA, 255 bp, Glycine max
  unsure (1)..(255): unsure at all n locations
cnaagacgcttcacgaacaagtttgaagcaatctccatccatatcatggctagaccccaacaacgctatcgaggtgtccgccagaggcactggggctcttgggtttctgaaattcgccaccctcttttgaagactagaatatggctgggaacgtttgaaaccgcagaggntgcagctagagngtacgntgaagcggnaaggttgatgtntgggcnaaaagcaggnacnattttncccccncaatccnattgagca

SEQ ID NO: 291879 - DNA, 255 bp, Glycine max
  unsure (1)..(255): unsure at all n locations
ccagaacccagcacctttggttgcacccaacaacgacgtgggtctcgacggcatggttatcaacgtggctagtcttcttgctgggactgtcactaacccttttggaaatggctactttcaaggacccaaagaagctcctttggaagctggttcggcttgcactggggtttatggtaagggcgcgtatcctggctatgcagggaatctcttggtggaccccancancggtgccagttacaacgcgaatggggtcac

SEQ ID NO: 291880 - DNA, 256 bp, Glycine max
  unsure (1)..(256): unsure at all n locations
cctcttagntcccaattttctagggttttattcattttccgnnggcttctgcagatgttgagtaccgttgctttgtcggtgggctcgcttggnccactgacgaccatgccctcgagaganccttctctcagtacggcgaaatcgttgaaacgaatattatcaacgatcgtgagactggcagatccaggggttttggatttgtgaccttcgcctcggagcagtccatganagnngcgatcngagcgatgaatggaca

SEQ ID NO: 291881 - DNA, 254 bp, Glycine max
  unsure (1)..(254): unsure at all n locations
anacactcataacacaaagcacaaagcaaagctcatccttgagttaaaaaatggcagcagcttcttccatggctctctnatccccatccttggctggcaaggccgtgaagctgggcccatcagccccagaagtgggaagggtgagcatgaggaagaccgtcaccaagcaggtctcctcaggaagcccatggtacggcccagaccgagttcaagtacttgggcccattctctggcgagcccccgttcctacctaa

SEQ ID NO: 291882 - DNA, 255 bp, Glycine max
  unsure (1)..(255): unsure at all n locations
caaggcagncaagcaagctcatcctagagttttaaaaatggcagcagcctcctccatggctctctcttccccatccttggctggcnaggccgtgaagctgggcccatcagcccccgaagtcgggagggtcagcatgaggaagaccgtcaccaagcaggcctcctccggaagcccatggtacggcccagaccgcgtcaagtacttgggcccattctctggcgagcccccgtgcctcaccttcactggcgagttccc

SEQ ID NO: 291883 - DNA, 253 bp, Glycine max
  unsure (1)..(253): unsure at all n locations
tgnagatcggagaaccctctctttcttctccttcttcagcagttgaaaataaaaaatggcagatggtgaggatattcaaccactcgtctgcgataatgggacaggaatggtgaaagctggatttgctggggatgatgctccgagggctgtgtttcccagcattgttggtcgtccccgtcacacgggagtgatggttggcatgggccaaaaagatgcatatgttggggatgaagctcagtccaagagaggtata

SEQ ID NO: 291884 - DNA, 251 bp, Glycine max
  unsure (1)..(251): unsure at all n locations
agcnanngngnctaagtngataggnnttaaggatatgaagttngggaaattcgatgnagggttacagagaannagatgatagagcacatgaaggacttggcctcaaagaacaaggttttcaagtcctanattggaatggggtactacaacactcatgttcnacaagtgatacnaanaganattatggagaancctgnttggtatantnagtanagagcttancaggntgagatatnttcaggggaggttga

SEQ ID NO: 291885 - DNA, 252 bp, Glycine max
  unsure (1)..(252): unsure at all n locations
aacactcataacacaaagcncaaagcaaagctcatcctngagttaaaaaatggcagcagcttcttccatggctctnctcatccccatccttggctggcaaggccgtgaagctgggcccatcagccccagaagtgggaagggtgagcatgaggaagaccgtcaccaagcaggtctcctcaggaagcccatggtacggcccagaccgagtcaagtattgggcccattctctggcnnagcccccgtcctacctaa

SEQ ID NO: 291886 - DNA, 251 bp, Glycine max
  unsure (1)..(251): unsure at all n locations
cacaagcaaaactcaaggcacgtcaaggagtggcccatgttgggatggaagacctagatgtgaaagatcctcacacaatgaagagtgtaccagctgatgctaaaaccatgggtgaggtgatgttcaggggcaacactgtgatgnatggatatctgaaggacttgaaagcaacacaagaggcatttaaaggtggatggttttggactggtgatttgggagtaaagcatcctgatggatacatagagcttaag

SEQ ID NO: 291887 - DNA, 255 bp, Glycine max
  unsure (1)..(255): unsure at all n locations
gtacccaatactgatcaaagaggacatgactatagcgagatggcagtagcttataggcctcccatgcagatgctacctatgacatgaagtatggtgtcagatcagttcagggtggtggtagatcttctgcaagagaaacaattggnagggttgcttctggtgctgttgctaagaaaatccttaaagaattttctggaactgagattctggcctatgtctctcaagttcataagattgttcttccagaggacctga

SEQ ID NO: 291888 - DNA, 271 bp, Glycine max
  unsure (1)..(271): unsure at all n locations
gttaaaagccttagccttccctacaactccaaacancaagacatcatcatccatggctgcctccgtctccactgtcggagctgtcaacagagctcttttgaacctgaatggttctggagctggagcttcagctcccagttcagccttctttgggaccagcttgaagaaggttattgcctcaagggtccccancagcaaggtttccggttggaagcttccaagattgttnctgtagaagnncngnaagngnntnnnnagncccngccagacc

SEQ ID NO: 291889 - DNA, 267 bp, Glycine max
  unsure (1)..(267): unsure at all n locations
tcccactccacgcgaagagttcgtntacatggcgaactngcggagcagggccgagcgctacgaggagatggtggagttcatggagaaggtctccgcctccgccgagagcgaggagctgaccgtggaggagcgtaacctcctctccgtcgcctacaagaacgtgatcggcgctcgccgcgcctcctggcgcatcatctcctcaatcgagcagaaggaggagagccgcggcaacgaggaccacgtcgccgtcatccgcgactaccgctc

SEQ ID NO: 291890 - DNA, 261 bp, Glycine max
ggcagaatttgtggccactttcttgtttctttatgtcactgttttgactgtgatgggtgttgcaaaatctcccagcaagtgctccactgttggtgtccaaggcattgcttggtcatttggtggaatgatctttgcccttgtctattgtactgctggtatctcagggggtcacattaacccagctgtgacatttgggctgtttttggcacgcaagttatctctcactaggacagtgttctacatgatcatgcagtgcttggg

SEQ ID NO: 291891 - DNA, 261 bp, Glycine max
  unsure (1)..(261): unsure at all n locations
attcgatgtgtggtacattagagtacanggcacctgaaattattcttggcaaaggccatgataaggctgctgattggtgccngtgtaggngttctactgtttgagatgcttnctngaaagccgcctttctgtggtggaaaccgtgacaaaattcagcagaagatagttaaagacaagattaagctgccagcatttttgtcaagtgaagcacattcactgttgaaagggctgctacagaaggaacaagctaggcgcttaggt

SEQ ID NO: 291892 - DNA, 260 bp, Glycine max
  unsure (1)..(260): unsure at all n locations
cacaaagagaagcattagcactaggagcagcaacaactagtctcagcccaaatcgcctcttcnctgatggcatctgtggccctcaaacctgcccctttcactgttgagaagtcctcagtgagaggccttccctctctctcaaggaactcttcttcattcagagttgtggccagtggcaagaagatcaagactgacaaaccttatggaattaatggtggcatggctttgagggatggaactgatgcatctggcaggaaagg

SEQ ID NO: 291893 - DNA, 263 bp, Glycine max
  unsure (1)..(263): unsure at all n locations
ctgttctcttctgtcattgcttctcctccacacacgcacagannccanacacttttgcagtcacattgagaatggggcgtgttcgcacgaagacggtgaagaaatcctcgcggcaagtgatagagaggtactactcccgcatgacgctggacttccacacgaacaagaaggttctggaagaggtggccatcattccctccaagaggctccgcaacaagatcgcggggttctccacccatctcatgaagcggatccagaagggt

SEQ ID NO: 291894 - DNA, 257 bp, Glycine max
  unsure (1)..(257): unsure at all n locations
ggtgctgggaaatccagcctcgttttgcgctttgtcaagggtcaatttctcggatttcaggaatcaacaataggggcagcnttcttttcacagacgctggcagtaaatgacgcgacggtaaagtttgagatatgggacacagcaggacaagagaggtaccatagcttggctcccatgtattacagaggtgctgctgctgctatcattgtctatgacatcactagctcggactccttacccgagctaagaagtgggtc

SEQ ID NO: 291895 - DNA, 257 bp, Glycine max
tgcactggtctcctgttggcccgaagagtcctcaatacacttgaaatggatgaggagtatgaaggaaatgttgaggctactggagaggattattccgtggaacctgctgagagcaggaggccattccgtgctctccttgatgttggtcttattaggactacaaccggtaaccgtgtgtttggtgcccttaagggagctctggatggggggttggatattcctcacagtgataagaggtttgctgggtttgataagga

SEQ ID NO: 291896 - DNA, 266 bp, Glycine max
atttttcaagtaacttaaggtttcaaacctaggaagttggaagtcatggcagcaacattgatggcagcaacaacaagttctggtactcttaaagcaactcctttccttggccaaggcaagggtgccaatgccaatgctcttagggatgttgtctccatgggaactgggaagtacaccatgggcaatgatttgtggtatggaccagacagagtgaaatacttgggacccttctcagctcagaccccttcatacttgaaaggagattc

SEQ ID NO: 291897 - DNA, 266 bp, Glycine max
  unsure (1)..(266): unsure at all n locations
ctttttcgctatgatgttaccgcctgtnaaaccaaggtgattnctggtgaatatggtttcgttgcccagcttaatgagggtcgtcacctcaagaagagaccaactgagttccgagttgacaaggtccttcaaccctttgatgaaaacaaattcaactttaccaaagttgggcaagaagaggtcctcttccaatttgaagctagcgaggatggacaagtccagttcttccaaatgctccagttgatgttgacaattctcccagcttt

SEQ ID NO: 291898 - DNA, 259 bp, Glycine max
  unsure (1)..(259): unsure at all n locations
gcggagaatataggttatgtcattccaacgccagtnatcatgcattttatccaggattatgagaagaatggaggatatactggattccctattcttggggttgagtggcaaaaaatggaaaatcctgatctgcgaatggcaacgggcatganacctgaccagaaaggtgtgcgtattagaagaattgatcctactgctccagaatctaaggttttgaagccatcagatgttattcttagttttgatggggttgacattg

SEQ ID NO: 291899 - DNA, 245 bp, Glycine max
  unsure (1)..(245): unsure at all n locations
gaaattttaattgacttttctcccntcataaaanaaacctaccaatggcacncgcaaaggcagagaagaagcccgcggagaagaagccggcagagaaggccccagcggagaagaagccgaagggncagaagaagatatcgaaggaaggaggaagcgnnnnnnnnnnnnnnnnnnnnnnnnnnagcgttgagacctacaagatctacatcttcaaggtgttgaagcaagtgcaccccgacatcggg

SEQ ID NO: 291900 - DNA, 259 bp, Glycine max
  unsure (1)..(259): unsure at all n locations
ccactccagagccaaggtaggttaaacaatcttcttcatcgtcgtcgccgcaatgggacgtgtgatccgtgcgcangtaagggagcaggctcggtcttcaagtcccacacgcaccaccgcaagggccctgcccgcttccggagcctggatttcggagagcgcaacggctacctgaagggtgtcgtcactgacgtcatccacgatcctggccgtggcgcgcctctcgctaaggtcgccttccgccacccgttccgctaca

SEQ ID NO: 291901 - DNA, 266 bp, Glycine max
  unsure (1)..(266): unsure at all n locations
ataacacaaagcacaaagcaaagctcatccttgagttaaaaaatggcagcagcttcttccatggctctctcatccccancccttggctggcaaggccgtgaagctgggcccatcagccccagaagtgggaagggtgagcatgaggaagaccgtcaccaagcaggtctcctcaggaagcccatggtacggcccagaccgagtcaagtacttgggcccattctctggcgagcccncgtcctacctaaccggngagttcccaggcgata

SEQ ID NO: 291902 - DNA, 263 bp, Glycine max
  unsure (1)..(263): unsure at all n locations
gaagaacaagtagttgagaactaagaaggagaagcaaatggcttcctcaatgatctcttccccagctgttaccactgtcaaccgtgccggtgccggcatggttgctccattcactggcctcaagtccatggctggcttccccaccaganngaccaacaatgacattacctccattgctagcaacggtggaagagtgcaatgcatgcaggtgtggccaccagttggcaagacgaagtttgagactctttcctacctgccagacc

SEQ ID NO: 291903 - DNA, 260 bp, Glycine max
gccaccctcatgaacattgctgataaccccaccaatgtgcagcttcctggtatgtataacaaggaagagaatccccgtgtgcccatcatcgtcaccggtaacgatttctccacactctatgcgcctctcatccgtgatgggcgtatggagaagttctactgggcaccaacaagggatgaccgcattggtgtctgcactggaatttttcgcaccgattcaattcctgaacaggacgttgtcaagattgttgacaccttccc

SEQ ID NO: 291904 - DNA, 255 bp, Glycine max
atcgcagagaagaacagagagagatccatccatcaattccaatggccgatcagctcaccgacgaacagattctccgagttcaaggaagccttcagcctcttcgacaaggacggggatggttgtattaccaccaaggaacttgggaccgtgatgcggtcacttggccagaacccaactgaggcagagctgcaggacatgataaatgaggttgatgctgatgggaatggtaccattgatttcccagattccgaatcc

SEQ ID NO: 291905 - DNA, 261 bp, Glycine max
  unsure (1)..(261): unsure at all n locations
atcatggcattcctcatgacatattgganactgtggagaggttgaccaaagagcactacaggaaatgcatggaaganaggttcaaggaattagtggcaagcaaaggtctagatgctgtccaaactgaggtcaaggatatggactgggagagcaccttccacttgcctcacctccctgaatctaacatcctccagagatccctgatcctcattggatgagtacaggaaggtgatgaaggattttgctttgaggttaaagaac

SEQ ID NO: 291906 - DNA, 260 bp, Glycine max
  unsure (1)..(260): unsure at all n locations
ccttttgattatgctgatgtagttactaccacaactcacaagtcacttccgaggaccacgtngagctatgatattctacagaaaaggggttaaagaaattaacaaacaaggaaaagaggtattgtatgactacgaagacaaaatcaaccaagctgttttccctggactgcaaggtggccctcacaaccacactattactggtttanctgttgcgttgaagcaggccactactcccgaatatagagcatatcaagagcaag

SEQ ID NO: 291907 - DNA, 259 bp, Glycine max
gttcaggttccggcatcgcctacaacaagctcaccgacaacggcgccgccacttcccgccggcctcatctccgcttccatcgcccatgctttcgccctcttcgtcgccgtctccgtcggcgccaacatctccggcggccacgtcaaccccgccgtcaccttcggcgccttcgtgggcggcaacatcaccttactccgcggcatcgtctacgtcatcgcccagctcctcggctccatcgtggcctccctcctcctcgcct

SEQ ID NO: 291908 - DNA, 257 bp, Glycine max
ttctcacaaaacaactttcaaactctgagaaagaatggctgccaacacattgatgagtactgctatctcagccttcccatctctcctttcttcctcaaaatccagatttgccaccgcagttcctctttctagctttggtgtcaccaatgcctcttcttctcgcttttctatgagtgctgactggatgccaggccagcctagacctccttaccttgatggttcagcacctggtgactttggattcgaccctcttcgtc

SEQ ID NO: 291909 - DNA, 256 bp, Glycine max
cactcataacacaaagcacaaagcaaagctcatccttgagttaaaaaatggcagcagcttcttccatggctctctcatccccatccttggctggcaaggccgtgaagctgggcccatcagccccagaagtgggaagggtgagcatgaggaagaccgtcaccaagcaggtctcctcaggaagcccatggtacggcccagaccgagtcaagtacttgggcccattctctggcgagcccccgtctacctaaccggtgag

SEQ ID NO: 291910 - DNA, 255 bp, Glycine max
  unsure (1)..(255): unsure at all n locations
cacaatacactgtgaacaaccagatggtgaatgccactctcangaacattgctgatanccccaccaatgtgcagcttccaggtatgtacaacaaggaagagaacccccgtgttcccatcattgtcaccggtaacgatttctcaacactctatgcacctctcatccgtgatgggcgtatggagaagttctactgggcaccaacaagggaagaccgcattggtgtttgcaccggaattttccgcactgatggtattc

SEQ ID NO: 291911 - DNA, 256 bp, Glycine max
  unsure (1)..(256): unsure at all n locations
gaagcacatcaaaatgagatcaggattgaaaatgaagctgatgttgctgatgcaaaagaagcaggatatgaaaaatccttggttgctagactggttttaaagaatgagaagcttgcaagtactgctaacaacattcgaattattgcaaacatggaagatccaattggtcgagtgttaaaacgaactgagcttgcagannngctgatttntggagaaaacatcatctncccccnggagttcttttaattgtttttga

SEQ ID NO: 291912 - DNA, 254 bp, Glycine max
  unsure (1)..(254): unsure at all n locations
ctcattcttcatccatagacatggccaccgtcacttctgcagccgttgctattccctcattcactngcctcaaggcaagcgcaggcaaagtgagtgccgcagttaaagtctcagctccccaagccacaaggttgggcatcaaggcttcgctgaaagacgttggagtcgctgttgtggccactgccgcgagtgcagtgctggctagcaacgccatnnccattgaagtgttgctgggnggtgatgacgggtctctg

SEQ ID NO: 291913 - DNA, 255 bp, Glycine max
  unsure (1)..(255): unsure at all n locations
tnngctnnannnnnaatgatcnggngttacggactcacaagcctttatccgtggagttgggacctggaatactggggaatattttcgatggaattcagaggcctttgaaaactattgtcnaacgatctggtgatgtctatnttcctcgtggtgtctctgttccagcactcgacaaagatcacactttgggaatttcaacctaaganaattggtgaaggcgaccttttaactggtggagatttatatgctactgtt

SEQ ID NO: 291914 - DNA, 253 bp, Glycine max
  unsure (1)..(253): unsure at all n locations
gacccaatctacccaggtggtagctttgacccattgggccttgctgatgacccagaggcttttgctgagttgaaggtgaaagagctcaagantggtaggttggccatgttctccatgtttggattctttgttcaggcaattgtgacaggaaagggacccttagaaaaccttgctgatcaccttgctgacccagtgaacaacaatgcttgggcctatgccacaaactttgtccccggaaagtgagggaaaaaaa

SEQ ID NO: 291915 - DNA, 252 bp, Glycine max
  unsure (1)..(252): unsure at all n locations
cactatgtggggancnctttcattnagnccctctcagaagattagggactttggtgtgaagctgaagctatcacctgttcgtgcncgtgcttgaaggtaaacgtgntgtggttgtggatgattccattgtgagaggaaccacctcgtccaagattgttaggctgttgaaggaggctggtgctaaggaggttcacatgaggattgcgagtcctccgattattggttctgttactatggtgtggatactcctag

SEQ ID NO: 291916 - DNA, 251 bp, Glycine max
  unsure (1)..(251): unsure at all n locations
cacttctggaggatttggttttactaagcagaacgagctctttgtnggtcgtgttgctatgcttggttttgcagcatcactgttgggtgaaggaataactgggaaaggaattctagcacaattgaatctggaaactggaattcccctttatgaagcggagcctcttcttctgtttttcatcctcttcaccctgctaggagccattggaggtttaggtgaccgtggaaantctnctgatgacgaacctacta

SEQ ID NO: 291917 - DNA, 252 bp, Glycine max
  unsure (1)..(252): unsure at all n locations
agtgctcttatatggacctccangaactggaaaaacactaattgcccgtgcttgtgcagcacaaacaaatgccacttttctgaagttggcaggtccacagctggtccanatgtttataggagacggagcaaaacttgtccaggatgcctttcagctggcaaaagagaagtctccatgcattatatttatagatganattgatgcaattggaacaaagcgtttcgatagtgaagtaagtggagacagggaggt

SEQ ID NO: 291918 - DNA, 253 bp, Glycine max
  unsure (1)..(253): unsure at all n locations
aagcacaaagcaaagctcatccttgagttaaaaaatggcagcagcttcttccatggctctctcatccccatccttggctggcaaggccgtgaagctgggcccatcagccccagaagtgggaagggtgagcatgaggaagaccgtcaccaagcaggtctcctcaggaagcccatggtacggcccagaccgagtcaagtacttgggcccancctctggcgagcccccgtcctacctaaccggtgagttcccaggc

SEQ ID NO: 291919 - DNA, 250 bp, Glycine max
  unsure (1)..(250): unsure at all n locations
ctcgaggacatgatcgactttgccacctctgttttgggccgaaacgtcgccgttcggactacccagaacgtgaacgggtccancaagagtgtggtggtggggcccgttaggggaatcaacggtggtaaagtcacccaatccgtgtcgtgccaccagagcctgttcccttatctgctttactactgccacgcggttcctaaggttcgggtcnacgaagcggatcttctcgacccgaaaacaaaggtcaaga

SEQ ID NO: 291920 - DNA, 249 bp, Glycine max
  unsure (1)..(249): unsure at all n locations
ctcttcatgaccgaaatgnggttcacagggatattaaatgtgcaaatatattggtggatgcaagtcgatctgtacaagcttgcagattttggattggcaaaggcaaccaaattgaatgatgttaaatcaatgaaggggacagcattctggatggcgcctgaggttgtnaaaggnaagaacaagggttatggccttccagctgatatttngngtctgggatgcactgtactggagatgttaacaggccaa

SEQ ID NO: 291921 - DNA, 251 bp, Glycine max
  unsure (1)..(251): unsure at all n locations
gtcattgccttccagacctatgcagttgnaagcagtggaggatactagaagggtgtgacatgaagcaaaactgaaggttgccataaacggatttggaaggattggaaggaacttcttgaggtgctggcacggtcgcaaagactcccctcttgatgtcattgccatcaacgacaccggtggcgtgaaacaagcctctcaccttctcaagtacgattcgatcctcggaaccttcgatgctgatgtcaagcctg

SEQ ID NO: 291922 - DNA, 249 bp, Glycine max
cttcctcactaggagctcctctccactggttcttcatctgcatgcacacagttgcatagttttggaaaccaagaattcctgaagaagggtagcatcaacaagcagttctgaaaatggagatcaccaatgtcagtgagtatgaggctattgcaaagcagaagttgccaaagatggcgtttgactactacgcatctggtgcagaggaccagtggactctgcaagagaacagaaatgccttttccagaattt

SEQ ID NO: 291923 - DNA, 247 bp, Glycine max
  unsure (1)..(247): unsure at all n locations
taaattaagaaatcaaagagacagaaagttgagagagaagtgttcacgtctttgagaaatgggtgcttcggcatcggtcacagaaaaatccatccatgaattcatggtcaaggatgctaagggcagagacgtgaacctcagcacctacaaagggaaggttcttcttgtagttaacgtcgcttcaaaatgtggatttacaaattccaattacacccagttaactgagctttacagcaaatataaanac

SEQ ID NO: 291924 - DNA, 251 bp, Glycine max
  unsure (1)..(251): unsure at all n locations
gganntgatgtggagtggtgtcggaatcgacgagtggtggaggantgaacagttttgggtcatcggtggtgtctcggcacatctctttgctgttttccaaggcttgctcaaagtgcttgctggaattgacaccaacttcactgtcacctccaaggcctcggatgangacggagactttgccgaactatacatgttcaaatggaccaccctcttattcctccaacaacccttctcataataaacttggtggg

SEQ ID NO: 291925 - DNA, 241 bp, Glycine max
  unsure (1)..(241): unsure at all n locations
gangatggcagacactgaggatatncaacctcttgtttgtgacaatggaacaggaatggttaaggctggatttgctggngatgatgccccacgtgctgtgtttcccagcattgtaggtcgtcctcgtcacactggtgtgatggttggcatgggccaaaaagatgcatatgttggtgatgaggcacaatctaagaggggtattttgactctcaagtaccccattgaacatggaattgtgagc

SEQ ID NO: 291926 - DNA, 247 bp, Glycine max
  unsure (1)..(247): unsure at all n locations
ttgttgtaactttttgattcctaaattctctaaaattcgaaattctaatttcgttaggggaaagagattgtttgtgtgtgagtnagtatggctggnaaaggcgagggtcctgctatcggaatcgatttgggaacgacgtactcttgcgtcggcgtgtggcaactcgatcgtgttgaaatcatagccaacgatcagggtaacagaactaccccatcctacgtggctttcaccgacacagaacggttgt

SEQ ID NO: 291927 - DNA, 247 bp, Glycine max
  unsure (1)..(247): unsure at all n locations
tgcaatgcatgcaggtgtggccaccagttggcaagaagaagtttgagactctttcctacctgccagaccttgatgatgcacaatnncgcaaaggaagtagaataccttcttaggaagggatggattccttgcttggaattcgagttggagcacggtttcgtgtaccgtgagcacaacaggtcaccaggatactacgatggacgctactggaccatgtggaagctgcctatgtttggttgcactgatg

SEQ ID NO: 291928 - DNA, 240 bp, Glycine max
  unsure (1)..(240): unsure at all n locations
aaaccttcgccaganaccgtgagctcgaagtgatccactccaggtgggccatgctcggggccttgggctgcgtcttccccgaactattgtcccgcaacggggtcaagtttggagaagctgtgtggttcaaggccgggtcccanatcttcagcnagggtgggctggacanggcttgggttgcccaagtagtccagcccaccctcgctgaagatctgggcaacccaagccttgtccacgccc

SEQ ID NO: 291929 - DNA, 246 bp, Glycine max
  unsure (1)..(246): unsure at all n locations
gttatgttgaatttcttgaaggattttgaaacaaagctcggcatcaagatcacatgttctcaggaaactgaaccattgggaanagnaggtcctctggctcttgccagggataagctgatagangactctggagaacccttttttgtnngcaacagtgatgttatcagtgagtatccactcaaagaaatgattgaattccataaaaaccatggaggagaggcttccataatggtaaccaaggtaatc

SEQ ID NO: 291930 - DNA, 251 bp, Glycine max
  unsure (1)..(251): unsure at all n locations
cttctnctctgatctaancaaagcntcaaattctcctnaagtttggttcgtcctgtgantntngagtgtatgtccgccgccgacgctggtaacggaggaggaggggcggagcaccgtggcgtccgattcttcgcaatccttggactgtttctctcagaatggtgctggattganagaacggaattacttagggttgtctgattgctcatcagtggatagctgtgcctctactgtgccaagcttgtgtgatg

SEQ ID NO: 291931 - DNA, 282 bp, Glycine max
caggacatcacaagaggaaagggtttggttgactcccttttccaagctccacaggatgctggaactcactatgctgtcatgagctcctacgagtaccttagcactggacttcgccagtacttggacaacaacatggatggattttacattgctccagcttttatggacaaacttgttgttcacattaccaagaacttcatgaccctgcccaacatcaaggttcctctcattcttggtatctggggaggcaagggacaaggaaatctttccaatgtgagcttg

SEQ ID NO: 291932 - DNA, 279 bp, Glycine max
  unsure (1)..(279): unsure at all n locations
ggccttgtgccgtttgtgttgttttcgggacgaagaagaagatggtgtcaggttctggaatctgcgcaaagcgggtggtggtggacgcgcgccaccacatgctgggtcgtctagcctccatcgtggcgaaggagcttctgaacggccagaaagtggtggtcgttcgctgttnagagatttgcatctcgggcgggctggtgaggcagaagatgaaatacttgaggttccttcgcaaacgcatgaacaccaaaccctcccaggccccatccacttccgtgc

SEQ ID NO: 291933 - DNA, 284 bp, Glycine max
  unsure (1)..(284): unsure at all n locations
gcagcggcttcttcttccgttttcctgaatcggtgtgaacaatggcgacgtacgctgcgatgaaacccaccaagcccgggttggaggagtcccaggaacagatcnctangataaggatcaccctttcttccaagcacgtcaaaaacctcganaaggtttgtgcggacttggttcgtggtgcaaaggacaagcgcctcagggttaagggacctgttaggatgcccactaaggttcttcacatcactaccaggaagtccccctgtgtgaaggtaccaacacatggg

SEQ ID NO: 291934 - DNA, 279 bp, Glycine max
gtcgttctcagtggctaacgtgtccaaggaaggatttgtcaactggttggcttcactgtgatcctggtccactgtttaagccggaatcttatcccttacaaggatggatttcccactggtttgcttggaaagagatatcaatcctaccaattcaatggcattctttatgtcttggcttgtttgcttcaattattgcaccttttggaggcttctttgcaagtggttttaaaagggcttttaaaataaaggattttggtgaagtattccaggacatggtgg

SEQ ID NO: 291935 - DNA, 276 bp, Glycine max
  unsure (1)..(276): unsure at all n locations
aggagttgctgttaaggatccatctgctccccatggagttcgacttttgatcgaggactatccttatgcttctgatgggctagagatatgggatgctatcaagtcttgggtggaagaatatgtctcattctactacaagtcagatgaggaacttcaaaaagaccccganctccaagcttggtggaaagaacttgtagaggtgggtcatggggatttgaaggataagccatcgtggcaaaanatgcaaactcgtgaaattggttgangcttccgcta

SEQ ID NO: 291936 - DNA, 274 bp, Glycine max
atggtgtcccattgaaggcatttgtggatagtggagctcagtctaccattatatcaaaaagctgtgctgagcgtcttggattgttgagacttttagatcagcgttacagaggaattgctcatggagttggccaatcagaaatattgggtcgtatacatgtagctccaatcaagattgggagtatattttacccttgctcattcttggtgctggattctcccaatatggagtttctctttggactggatatgctcgaaagcaccagtgtataatt

SEQ ID NO: 291937 - DNA, 272 bp, Glycine max
  unsure (1)..(272): unsure at all n locations
agcagctcgaggacggccgcaccctcgccgactacaacatccagaaggaatcaacccttcacctcgtctccgtctccgtggtggcatgcagatcttcgttaagaccctcaccggcaagactattaccctagaagtcgaaagctccgacaccatcgacaacgtcaaggctaagattcagganaaggagggaatccccccagaccagcagaggctgatcttcgccgggaagcagctcgaggacggacgcacccttgctgactacaacatccaga

SEQ ID NO: 291938 - DNA, 269 bp, Glycine max
  unsure (1)..(269): unsure at all n locations
atccantccgatgatgttgggtctctgggagaaaagcccaccatcctggtctccgagaaacttctcngaggcagggctgcaggtnttacgtggcgttgggcanctggaatgcgcgtatgagctctcacaggaggagctatgcacgaagatctcgtgctgtgacgctctgntagtcangagcgggacgaaggtgacgagggaagtgtttnaagctgggaaagggaggttgaaggtcgtgggaagagccgggtggggattgacaacgtgga

SEQ ID NO: 291939 - DNA, 283 bp, Glycine max
atctgtcttccgaagcaggaactaaatatggctgacttgttggaatggtcaaagcaagataagaaacgaatgcttcatgtcgtctaccgtgttggtgaccttgatcgcaccatcaaattttacacagaatgtttaggaatgaagcttttgaggcaaagagatatcccagaggagaaatatgctaatgcttttcttggatttggccctgaagaatcccattttgttgttgaattaacatataattatggggttacctcgtatgcattggcgatggctttggaca

SEQ ID NO: 291940 - DNA, 280 bp, Glycine max
  unsure (1)..(280): unsure at all n locations
ctcattcaagacagnncctgtttttgctgcccctgcccccatcatcaccccaactgtgaganaggatatggcaaaggaatacgagaaagctattgaagaacttcagaaattgttgagggagaagagtgaactcaaagcgacagtgctgaaaaagtggagcanataacagcttctctagggacatcatcatctgatggcatcccatcatcagaagcctcagacaggatcaaagctggtttcattcacttcaagaaggagaatacgacaagaatccagcttt

SEQ ID NO: 291941 - DNA, 279 bp, Glycine max
  unsure (1)..(279): unsure at all n locations
agttttctgtgtcaccggaactgcntttctttcaaaacacttcaaacatctcgaacgctctctttccggcaactangttnaagttcatcaatggcaggtcgcggcaaaaccctaggatctagcgccgccaagaaggctacctcaaggagcagcaaagccggcctccaattccccgtcggccgtatcgcccgtttcctcaaggccggaaaatacgctgagcgtgtcggcgccggcgcccctgtctacctcgccgccgtatcgaatatctcgcggctgagg

SEQ ID NO: 291942 - DNA, 275 bp, Glycine max
  unsure (1)..(275): unsure at all n locations
tttccttcactttcccgagaaaaaaaaaacactctttcactttcttgactacggtctcacttcgacatggctcgtactaagcaaactgctcgcaagtccaccggcggcaaggcgccacgtaagcagttggcgaccaaggccgcccggaagtccgctcccgcgaccgnncnagtgaagaagccccaccgcttcaggccgggaaccgtggcgctgagggaaatcagaaagtctcagaagagcaccgagcttctcatcggaagcttccgtttcagaga

SEQ ID NO: 291943 - DNA, 270 bp, Glycine max
  unsure (1)..(270): unsure at all n locations
tctcgttgtagcgtangcagcagttgaatttggaaaacaagatgtctcaccgcaagttccgagcacccgagacacggttcccttggctttctcccaaggaagcgagcttctcgtcatcgcggaaaggtgaaggctttcccaaaagacaatcctagtcaaccatgcaggttgactgcctttgtgggctacaaagctggaatgacccacattgttagagaggttgagaaacctggatcaaagcttcacaagaagagacatgtgaagctgtta

SEQ ID NO: 291944 - DNA, 267 bp, Glycine max
cgagttggagcacggtttcgtgtaccgtgagcacaacaggtcaccaggatactacgatggacgctactggaccatgtggaagctgcctatgtttggttgcactgatgcttctcaggtgttgaaggagcttcaagaggctaagactgcataccccaacggcttcatccgtatcatcggattcgacaacgttcgccaagtgcagtgcatcagcttcatcgcctacaagcccccaggcttctaagtgtgaaaatttgcaaagcatttgta

SEQ ID NO: 291945 - DNA, 274 bp, Glycine max
  unsure (1)..(274): unsure at all n locations
tngagatggccatggcatccgtcgcgtgacatcattctcgctttcatgcaaaacggcgagccgttngcgccggatcatggatttcccgtgcgcatgattattccggggttcatcggtggaagaatggtgaaatggctcaaacgcnttgtcgtnactgagcatgagtgcgatagtcattatcattataaggataatngagtactcccttcccatgttgatgcagaacttgctaatgacgaaggttggtggtacaaccagantacatcatcagcgc

SEQ ID NO: 291946 - DNA, 271 bp, Glycine max
  unsure (1)..(271): unsure at all n locations
ctgnacaggctacttacagctacaattgcctggccttttccttcattaattaaaattgganttattctttcaactatgggtgcngctcttcagagcctgactggngccccacgtctgcttgcagcaatagccaatgatgatattttacctattttgaantactttaaagttggagatggcggtgaaccacatgttgctaccttttttantgctttcttatgtattgggtgtgtcgtnattgggaatctgganttatcactccaatgtaact

SEQ ID NO: 291947 - DNA, 268 bp, Glycine max
ctcatgtaaagtttagcataaagtctataaggataccagagctttatattgaggttcctgaaacttcaactgttggttcactaaagaggacaatcatggaggcagtgatggctatacttggaggtggtgcacatgttggtgttcttcttcaggggaaaaaagttagagatgacaatagaacacttgtgcagactggtatatcttgcaatgaaaatttggataccctgagtttcatgttggagcccactcactacgagcctcttccaac

SEQ ID NO: 291948 - DNA, 266 bp, Glycine max
  unsure (1)..(266): unsure at all n locations
aaagtttcttcctttctctgctctttgtcttctctgacacatttggggccttgttgagtgtgtttttgcaagagggtatggcgaaggacgttgaggtngctgagcgtggctccttctcngggaaggactaccaggaccctccaccagcaccactcattgatgctgaggagctcacaaagtggtccttttacagggctcttattgctgagttcattgccactttgctcttcctctacattactgtgcnacagtnataggntacaagc

SEQ ID NO: 291949 - DNA, 260 bp, Glycine max
  unsure (1)..(260): unsure at all n locations
attgaagttgaagtcttgcccttntctcttcaactccaaacacaatancntgctcatccatggctnnctncgtctccantgtcggagntgtcnacagagntcttttgaacntgaatgggtctggacntggggtttcagntcccagttcatcnttntttgggagcagcttgaagaaggttattggctcaagggtccccaacacaaagatttnctntggaagcttnaagattgttgntgtagagagaagaaagagattgaag

SEQ ID NO: 291950 - DNA, 266 bp, Glycine max
  unsure (1)..(266): unsure at all n locations
ggcagaaagcaagctcatcctagagttttaaanatggcagcagcctcctccatggctctctcttccccatccttggctggcaaggccgtgaagctgggcccatcagcccccgaagtcgggagggtcagcatgaggaagaccgtcaccaagcaggcctcctccggaagcccatggtacggcccagaccgcgtcaagtacttgggcccattctctggcgagcccccgtcctacctcantggcgagttccaggtgactacggctgggac

SEQ ID NO: 291951 - DNA, 274 bp, Glycine max
  unsure (1)..(274): unsure at all n locations
ctggtgtcttggcatggaattctcgcattttggcttcagggagcagagataggaacatacttcagcatgacatgagggttccaggtgactttgttatnaagcttgttggtcacaagtctgaggtatgtggattgaaatggtcctgtgatgacagggaacttgcttctggtggtaatgataatcagctcctggtatggaatcaacactctcagcaaccagttttgagacttaccgagcacactgctgctgtgaagccattgcttggtcacctcac

SEQ ID NO: 291952 - DNA, 297 bp, Glycine max
gtgggatggaaaggaaatcaaagttgtttctgaccgcaaccctgccaaccttccttggaaggacttggggatagacttggtgattgaaggaaacggggtgtttgtagacagagaaggtgcagggaaacacatttcaagcaggagtaagaaggtgtcatcatgtcctggtaaaggagatatccccactacgtggttggtgtcaatgagtatgactacagcctgatgaacccatcatcagcaatgcctcttgcaccataatgcttgcaccctttgtcaaggtccttgatcagaaattcg

SEQ ID NO: 291953 - DNA, 293 bp, Glycine max
  unsure (1)..(293): unsure at all n locations
agactgtagaactgaggagggtacgccgtgagttcaaggctaacaagatcctccgaggaagagtatgttaagtccaattaaggaggaaattcgcaaagttgttgaacttcaagaagagcttgatattgatgttcttgttcatggagaaccagagagaaatgatatggttgagtacttcggtgagcaattntnaggctttgccttcactgttaatggntgggtgcantccatggttcccgttgtgtgaagcaacaatnnaccaaggnnattaacccgcccaaagccattgactt

SEQ ID NO: 291954 - DNA, 295 bp, Glycine max
  unsure (1)..(295): unsure at all n locations
cttctcccgccggcaacttcacactgtcttcctttctctagggttttanagctcctccaaattcnttcgcccaacatggttcttcaaaatgatattgatttgctaaatcccccggctgagcttgagaagaggaaacacaagctcaagcgtcttgttcagtcaccaaactctttcttcatggatgttaagtgccagggtgcttcaacataaccactgtctttagccactctcagactgttgttgtatgcggaaattgccagaccgtcttgtgccagccgacagcggccgggcaang

SEQ ID NO: 291955 - DNA, 283 bp, Glycine max
  unsure (1)..(283): unsure at all n locations
anagattcaacaatgggcctctggcttctgctactcttctncaagtcatctcctgttcttgacaagtgcgagtgggtctcaggccagacccttcgccaacctctcgtgagatgtaacccttcctcagcatcagctctcaccatcaaagctgcttcctatgctgacgagctcgtcaaaaccgccaaaacagtggctcaccggggcgtggtattttggcgatggatgagtcaaatgcaactgcgggaagcgtttggcatctattgggttagagaacacagaagta

SEQ ID NO: 291956 - DNA, 284 bp, Glycine max
aggagttgtaaattaagagcatgggctgcacaagctcttgtatcatcatcttctcttaccttctcagcggaggctgcaagacaaagtcttggaccaagatcactccaatctccatttggcttctccagaaaagcctcctttcttgttaaggcagctgctaccccccctgtcaagcaaggatcagacaggcctttgtggtttgcatcaaagcaaagtctttcttacttggatggcagccttccgggtgactatggatttgaccctctgggactttcagaccctga

SEQ ID NO: 291957 - DNA, 289 bp, Glycine max
  unsure (1)..(289): unsure at all n locations
ggggggtcctactatgggcagtcattggcacttaantgcccatccattgaagtcgctgttgttgatatctctaaatcccgcattgcagcctggaacagcgaccagcttcctatctatgaacctgggccttgatggtgttgtgaagcaatgccgtggcaagaacctcttcttcagcactgatgttgaaaagcatgtcttgaggctgacatagtgtttgtctctgtcaacaccccaaccaaaactcagggtcttggagctggcaaagcagcagatttgacatattgggaga

SEQ ID NO: 291958 - DNA, 288 bp, Glycine max
ctcgaacgctctctttccggcaactaggttaaagttcatcaatggcaggtcgcggcaaaaccctaggatctagcgccgccaagaaggctacctcaaggagcagcaaagccggcctccaattccccgtcggccgtatcgcccgtttcctcaaggccggaaaatacgctgagcgtgtcggcgccggcgcccctgtctacctcgccgccgtactcgaatatctcgcgactgaggttttggaattggctggaaacgtgcgagagacaacaagaagactcgaattgtgccgcg

SEQ ID NO: 291959 - DNA, 292 bp, Glycine max
  unsure (1)..(292): unsure at all n locations
gagaaaagttagggttcacaacttttccttttccttttgcttgcgaatctgaatcaaataatcaatcatccattcattattcatcatgnccgtcggcgaagaaaatcacgctgaagagttcggacggcgaggctttcgaggtggaggaggcggtggcgctggagtcgcagacgattaaagcacatgatcgaggacgactgcgccgacagcggcatccctctgccgaacgtgacgagcaagatcctggcgaaggttatcgagtactgcaagaagcacgtcgaggccgcgaatc

SEQ ID NO: 291960 - DNA, 281 bp, Glycine max
  unsure (1)..(281): unsure at all n locations
gtaaagactgatcatatggctcgtgccttgtccaacgacatatagatcaccantggtggatacaatacaatctcctgccacatcatcagcagattgtactctgctcttctatgaaacattttcgtggagccaagaaagatgcnatccttggagagttgtataaatcgtatgtgggggtatgcaaatcttgtttaattcctccagcgggaatcttagaattttcaaacatgtgcagagtgctaaatgaccagggccttattaaacttggacaatctcgagag

SEQ ID NO: 291961 - DNA, 283 bp, Glycine max
  unsure (1)..(283): unsure at all n locations
caaagtttgacaaactcagccattagagaacgttcaaatcaattgttaaatcgtctttctcagaaactggatcccatagactggcttacgtatgagccatatctctgggagaatgagagacagtcttacctacgacatgnntgttctctttggtttctttgtgcaactcaaccgtatgtacacagatactgttcagaaactgcctactaattcagaatctaatattctgaggtgttctacagttccccgatttaaatacctccccatcagtgctccagcattg

SEQ ID NO: 291962 - DNA, 282 bp, Glycine max
  unsure (1)..(282): unsure at all n locations
ctctaatcactctagctgttgcaaatntctactatttttcaatggcttctgcagatgttgagttccgttgctttgttggtgggcttgcttgggtcaccggcaacgatgccctcgagaaagccttttcaatctacggcgacatcgttgaatcgaaggttatcaacgaccgtgagactggaaggtccagaggattcggatttgtgaccttcgcctcagagcagtcaatgaaagatgcgatcgcaggaatgaacggccaggaccttgacggccgtaacatcactg

SEQ ID NO: 291963 - DNA, 295 bp, Glycine max
  unsure (1)..(295): unsure at all n locations
acgggttctaagtcattcgcaggcatttgaattgagtgatgatttcctgactaaattaggtgttgccaganagaacgttgatgacacagctggtgctgctcagattatagcttcaaatggtctgtatgatgccggtgcgattgctagcattcgagctgcagaaatctatgggcttaatgtactcgcagaacgaatccaagatgattctgaaatcatcagtcgttatctcggngcttgcaagggatccataattccaaaggctgataagccctttaagacaagtattgtnntcacc

SEQ ID NO: 291964 - DNA, 283 bp, Glycine max
  unsure (1)..(283): unsure at all n locations
cctagcctcattattatcatagtanatattcattccccttatctttctctcttctctctgccccgcccaaaccctaactnccctaccctattccgctttctctcatccatcatgaaaggaggaaagtccaagaccgaatctaagagagccgatgccaaacttgctgtgaataagaagggcgccgccaccaagactaggaaacccgccggaaaggggaaggcagcgaaagatcctaacaagccaaagagggctccaagtgctttcttcgttttcatggaggant

SEQ ID NO: 291965 - DNA, 277 bp, Glycine max
gcaggtcaggagcttctttctgggcaaccccttcattgttaataagccagatgcttctgcagacaaattatttccagatgttggcctgtggttgtcccagaaaattaaggatcactttgaaaaacgtcaaaaaatggctataaatctgaagtacatagatcctacttacatgatccgtgctatcccaagtaatgcatctgataatgtatactgcaccctccttgcccaaagtgctgttcatggtgcaatggcaggatacacaggcttcaccgtgggc

SEQ ID NO: 291966 - DNA, 285 bp, Glycine max
  unsure (1)..(285): unsure at all n locations
agcaacagcaagaagaactagtctaaagcagnaatgggctcttcagtgatggcatctgtgggcctcaaacctgccccctttcactgttgagaagtcctcagttagaggccttccctccctctcaaggaactcctcttcattcagagttgtggccagtggtggcaagaagatcaagactgacaagccttatggaattaatggtggcatggctttgagggaaggagttgatgcatctggcaggaaaggaaagggaaagggcgtttaccagtttgtagacaaatacgg

SEQ ID NO: 291967 - DNA, 292 bp, Glycine max
  unsure (1)..(292): unsure at all n locations
attgaagttaaaagccttagccttccctacaactccaaacanccaagacatcatcatccatgggctgcctccgtctccactgtcggagctgtcaacagagctcttttgaacctgaatggttctggagctggagcttcagctcccagttcagccttctttgggaccagcttgaagaaggttattgcctcaagggtccccaacagcaaggtttccggtggaagcttcaagattgttgctgtagaagagaagaaagagattgaagagacccagcagaccgacanngacagatgga

SEQ ID NO: 291968 - DNA, 286 bp, Glycine max
  unsure (1)..(286): unsure at all n locations
ctccggaggtgaaatgcgcaagttggaggcttgctgtggaagcacacaacatctttggctttgagaccattcctgaagagtgcgttgaagcaacaaaggaatacatccatggcgaacaatatagatcagactccaaaacagttaaccaacaagcttacttttatgccaganacctcgaagtccatcccaaggacacatttgtgttcagtatagatggcaccgtactctctaatattccatactacaaaaaactggatatggggtggagaaatttaactcgacttgt

SEQ ID NO: 291969 - DNA, 283 bp, Glycine max
  unsure (1)..(283): unsure at all n locations
gtttttctttttttcatttgnattgcaaagcaaaaaccttgcaaattgcaatggcttccaacaaggttattgccaccatcttggttctttctctccttgcctactcaacatcattcaccaatgcatgtggcacatgccacccaaaacctactccttctccccctcctccatcagggaagtgccccaaggacacattgaagctaggggtgtgtgctgatgttctaggacttgttaatgttgttgttggttcccctgtctctagcaagtgttgtgcattgcttga

SEQ ID NO: 291970 - DNA, 278 bp, Glycine max
  unsure (1)..(278): unsure at all n locations
gaaaaacaagtagttgagaactaagaagaaggaaatggcttcctcaatgatctcctccccagctgttaccaccgtcaaccgtgccggtgccggcatggttgctccattcaccggcctcaaatccatggctggcttccccacgaggaagaccaacaatgacattacctccattgctagcaacggtggaagagtacaatgcatgcaggtgtggccaccnattggcaagaagaagntcgagactctttcctacttgccagacctcgatgatgcccaattgg

SEQ ID NO: 291971 - DNA, 275 bp, Glycine max
gcaattgaagttgaagtcttgcccttctctcttcaactccaaacacaagacatcatcatccatggctgcctccgtctccactgtcggagctgtcaacagagctcttttgaacctgaatgggtctggacctggggtttcagctcccagttcatccttctttgggagcagcttgaagaaggttattggctcaagggtccccaacacaaagatttcctctggaagcttcaagattgttgctgtagaagagaagaaagagattgaagagacccagcaga

SEQ ID NO: 291972 - DNA, 273 bp, Glycine max
gaagagagagggagattctttgtttgctaccttctctcggaaaaatggttacgttcaggtttcaccagtaccaggtggttgggagggctcttcccacggaagcagatcagcaccccaagatctaccgaatgaagctctgggccaccaacgaggttcgcgccaagtccaagttctggtattttctgaggaaactgaaaaaggtgaagaagagcaatggccaagtgcttgccatcaacgagatttttgagaagaacccaaccaaaattaagaata

SEQ ID NO: 291973 - DNA, 247 bp, Glycine max
  unsure (1)..(247): unsure at all n locations
atgcaacccaccaagacttggcatagcctctcncaacctcaaatctacacaangcatttctaaggcttttggcttggaacctgctgcagctaaactcacttgctcccttcagcctgatctcaaagaatttgctcaaaaatgtgtcgacgctaccaaaattgcaggattcgcccttgccacctctgctctcgttgtttctggagcaagtgcagaaggtgttccaaaaaggctaaccttcgacgaaatc

SEQ ID NO: 291974 - DNA, 281 bp, Glycine max
  unsure (1)..(281): unsure at all n locations
atttcatcgtgcattcaatgggccaccacagcagctctatccggaaccatggtgagcacctccttcatgaggaggcaacctatgaccaccacaagcctaaagacattccccaacgttggtgaagctctttttggtctgaaaagtggacgaggtggtcgtgtcacttgcatggcctcgtacaaggtgaagctcataaccccagaaggagaagtggagtttgaatgcccagatgatgttttcattgttgacaaggcagangacgaaggcattgaacttcccta

SEQ ID NO: 291975 - DNA, 281 bp, Glycine max
  unsure (1)..(281): unsure at all n locations
ggggtgatgaagaatgtttgtggaccatttacagctgcaaaaactgtttatgaggacgaacaaggtttcttgatcattatcagtctgccattcgtggatcttcctagtgtgaaagtttcatggaggaacactgttactcatggtatcataaaggtttcttgtgtgagcatatcttgcaagccatttattaaaaganacgataggacattcaagctttcagagccatcgtcagagcactgccctcctggtgagtttgttcgtgaaatcccactttcaactcg

SEQ ID NO: 291976 - DNA, 277 bp, Glycine max
  unsure (1)..(277): unsure at all n locations
atggtggccaatgctggcnactgcagagcagttctctgtcgcanagnagaggccattgacatgtctcaagatcacaggcctatttatccatcaganaggaggcgagttgaagaattgggtggctacatagaagatggttatctcaatggggttttatcagttactcgagcactgggggactgggacatgaagttacctaagggtgctccctcacctttgattgcagagccggagttccggcaagtggctctaacagatgatgatgaattcctcatca

SEQ ID NO: 291977 - DNA, 276 bp, Glycine max
ctcagcagagggatttgatgttgtttatgacataaatggacgcgtcgcagatgaagttgaacccatactggatgctctgcctaatctggagcagtttatttactgctcttctgccggtgtctatctcaaatctgatctattacctcacgcagagactgatgcagttgatcctaagagcagacacaagggaaagcttgagacagagagtttgctacaagcaaggggtgttaattggacatctataaggccagtctacatctatggaccttgaactac

SEQ ID NO: 291978 - DNA, 273 bp, Glycine max
  unsure (1)..(273): unsure at all n locations
caatatagcccaagccctatacaaccaaaccctaacacacacccatttgattcagtttccatgggctagcctcaaggttgcatttttngctgcagtgctctgcatggttgtggtgagtgcacccatggcacatgcagctatcacgtgcgggcaggtgacgagtagcctggccaattgcatcggttacctccagaagggaggaacgccgtcgtcgggatgctgcaacggagtgaagagctcaatgccgccgccaagacaccgccgaccgccaga

SEQ ID NO: 291979 - DNA, 276 bp, Glycine max
ctgggacgccgtttgattacggtgccggacacgtcgatcccgtggccgctcttgatcctggtctcgtctacgatgccaacgtggacgattacttagggtttttctgcgcactaaactactcgtcatttcaaatcaagcttgctgcgaggagggactatacgtgtgacccgaagaaggattacagagtggaggattttaattatccttctttgcggttcctatggatacagcttcggggattgggggaggttccgatactctgaagaccgtgaagta

SEQ ID NO: 291980 - DNA, 252 bp, Glycine max
  unsure (1)..(252): unsure at all n locations
ttgcatttcagcaactatacaatgtaggggcaagagtgttctggattcataacacaggtccaattggatgcttgccctacagttacatttattatgagcccaagaagggtaacatagatgcaaatggctgtgtgaaacctcagaatgatcttgctcaggaatttaacagacagctcaaggaccaagtgtttcagctaaggagaaagttcccacttgcaaaatttacatatgttgatgtgtacactgccanta

SEQ ID NO: 291981 - DNA, 249 bp, Glycine max
tcttgcccttctctcttcaactccaaacacaagacatcatcatccatggctgcctccgtctccactgtcggagctgtcaacagagctcttttgaacctgaatgggtctggacctggggtttcagctcccagttcatccttctttgggagcagcttgaagaaggttattggctcaagggtccccaacacaaagatttcctctggaagcttcaagattgttgctgtagaagagaagaaagagattgaagag

SEQ ID NO: 291982 - DNA, 253 bp, Glycine max
cttttggaaattgcacaagtcccagatgaacatgtcaatgagttcaagtcaatagagaagttcaaaattttcaacacaaataatttgtgggtgaacttaaatgcagttaaaaggcttgttgaagctgatgctcttaagatggaaattattcccaatcctaaggaagttgatggaataaaagttcttcagctggaaactgcagctggtgctgcaataaggttctttgacaaggctattgggattaatgttcctc

SEQ ID NO: 291983 - DNA, 253 bp, Glycine max; identical to SEQ ID NO: 115740

SEQ ID NO: 291984 - DNA, 254 bp, Glycine max
  unsure (1)..(254): unsure at all n locations
cgttttnctttttctcttctcactgcatcgcttcaggttcttctgaaaagatgtctcgcgtgtatgtnggtaacttggattcacgagtcaccgagaganatctcgaagacgaattccgcgttttcggagttattcngagtgtttgggttgcacgtagaccacctggtcatgcttttattgactttgatgaccgcagagacgcacaggatgctatccgtgaattggatggcaagaaggttggagggttgagcttt

SEQ ID NO: 291985 - DNA, 245 bp, Glycine max
  unsure (1)..(245): unsure at all n locations
ttagaagtagagaagaaaatgaaagtcattgttttcttcgttgctataataattttaggtgcagaatggcaatgcaatgggtcagagcatgagcatgagcatgagcatgagcatggccacagctaccaaattttccctctgcgaatgaaaaccggccccggtggccactacattccggaggtatcgtgcaaaagttggaggcttggtgtggaagcacacaacgcgnttgactggagaaccattcc

SEQ ID NO: 291986 - DNA, 248 bp, Glycine max
attcattcaagattcagcaagtgcgtttcggaagcagagaccgaaatacttcgagatggcccgtacaaagcaaactgctcgtaagtcaactggaggaaaagctcccaggaagcagcttgcaaccaaggctgcacgtaagtctgctccaacaactggtggtgtgaagaagcctcatcgttatcgccctggaactgttgctcttcgtgagattaggaaataccagaagagcactgagctcctaatcagga

SEQ ID NO: 291987 - DNA, 250 bp, Glycine max
  unsure (1)..(250): unsure at all n locations
aagaacaagtagttgagaactaagaaggagaagcaaatggcttcctcaatgatctcttccccagctgttaccactgtccaaccgtgccggtgccggcatggttgctccattcactggcctcaagtccatggctggcttccccaccaggaagaccaacaatgacattacctccattgctagcaacggtggaagagtgcaatgcatgcaggtgtggccaccagttggcaagaagaagttcnagactctttcc

SEQ ID NO: 291988 - DNA, 251 bp, Glycine max
gccccacatcgatgcaactcaaagccatcctccactacgcgacctctcagattgtccctcaacaatctctttccgagattacaataaccttcgacgtgctccaaagcctccaccgccccgccaacttcctcgtgtttgggctgggccgcgattctctcatgtgggccagcctcaacccccacggcaccacgctgttcctcgaggaggaccctaaatggttcgggatcgtcaccaaggaggcgccctacctc

SEQ ID NO: 291989 - DNA, 257 bp, Glycine max
  unsure (1)..(257): unsure at all n locations
cacccagcagaccgacaaggancagatggaagggtcttgcctatgatatctcagacgaccaacaagacatcacaagaggaaagggtttggttgactcccttttccnagctccacaggatgctggaacaccactatgcagtcatgagctcctacncagtacctcagcactggacttcgccagtacttggacaacaaaatggatggattctacattgctccagcttttatggacaagcttgttgttcacatctccaaga

SEQ ID NO: 291990 - DNA, 246 bp, Glycine max
tttattctctttctctgccctctcatcttcgagctccgatggcgagcctgtggcgcgcggcaaccggcatgacggacaacgccaccgattacgacggcgtcgagttctggtcgaaccccgagcggaccggctggctcaccaagcagggcgagtacatcaagacctggcgccgccgctggttcgtcctcaagcaaggcaagctcttctggttcaaggactcccgccgtcacgcgtgcgtctcgtcca

SEQ ID NO: 291991 - DNA, 249 bp, Glycine max
  unsure (1)..(249): unsure at all n locations
gtgggaagagcaccttcatgaggaggctgaccagtgtgtttggnggagcagcaganccaccaaagggtggcaaccctgactccaacactctcatcagtgacaccaccactgtcatatgcttggatgattaccactctttggacacaactggaagaaagganaaggntgtcactgcccttgaccctagagccaatgattttgatctcatgtatgaacaagttaaagctcttaaggatgganttgctgttg

SEQ ID NO: 291992 - DNA, 243 bp, Glycine max
  unsure (1)..(243): unsure at all n locations
aagaatcccaggcgaggagaaagatggaggggaaggagcaggatgtgtcgttgggagcgaacaagttccccgagagacagccaattgggacggcggcgcagagccaagacgacggcaaggactaccaggagccggcgccggcgccgctggttgacccgacggagtttacgtcatggncgttttacagagcagggatagcagagtttgtggccacttttctgtttctctacatcactgtcttaa

SEQ ID NO: 291993 - DNA, 249 bp, Glycine max
  unsure (1)..(249): unsure at all n locations
ctgcntcaacttgctccctgcaganncgaancaagaagccacagagnactagtctncctactctcacccgcaananaaaaatggcatctcacatncgttggatanccccgtatgggtcccaaganagagntcaagttcgctctcgagtctttctgggatggnaagagcagcgccgaggatttgcagaaggtgtnttctgatctcagggnatncatctggaagnagatggctgatgntgggntcaagtac

SEQ ID NO: 291994 - DNA, 245 bp, Glycine max
agcctagaatagaaaacgctgtgctgtggctgagaaggggaaaggcgcggttgaaagattgaaagctcgacatgtcagggaaaggcgcaaagggtttgataactgctaaggacaaagataagaaaaaaccaatttctcgctcctcaagagccggtcttcagtttcctgttggacgcattcatcgtcttctgaagtcaagggtgacagcacatggaagagttggggcaacagctgcagtttattct

SEQ ID NO: 291995 - DNA, 253 bp, Glycine max
  unsure (1)..(253): unsure at all n locations
cttgctcnntnaganncgaagaagaagccacagaggactagtctncntactgctcacccgcaagaaaaaaatggcatctcanatccgttggatacccccgtatgggtcncaanagagagctcaagttngctgctcgagtctttctgggatggcaatagcagngccgangatttgcagaaggtgtcttctgatctcagggcatccatctggaatcagatggctgatgcngggatcaagtncatccccagcaaca

SEQ ID NO: 291996 - DNA, 253 bp, Glycine max
  unsure (1)..(253): unsure at all n locations
tttattccaaacactggtcgtggtatccaaggtgcaacttctcattgtttgggccaaaattttgctaaaatgtttganataaactttgaaaatgaaaagggagagaaagcaatggtctggcaganttcatgggcctatagtactcgaactattggggtcatggtgatggttcatggtgatgacaagggattggtactacctcctaaagtagcatcagtacaagttattgtgattcctgtgcctacaaagatgc

SEQ ID NO: 291997 - DNA, 248 bp, Glycine max
  unsure (1)..(248): unsure at all n locations
cttacaagcctctactatactgcttcancttctgctctagaaaattacagtgctgaaacatggcttcggctactctctctgtagccaaaccagcccttcaggcaaatgggaaaggcttctctgaattctctggcctccgaagctcatcaggcttccttcccttttctagaaaatcttcagaggatttccattctgtcattgccttccagaccnatgcagttggaagcagtggaggatacaagaagggt

SEQ ID NO: 291998 - DNA, 244 bp, Glycine max
  unsure (1)..(244): unsure at all n locations
gtcttgcaattgaagttgaagtcttgccnttctctcttnaactccaaacacaaganatcatcctccatggctgcctccgtctccactgtcggagctgtcaacagagctcttttgaacctgaatgggtctggacctggggtttcagctcncagttcatccttctttgggagcagcttgaagaaggttattggctcaagggtccccaacacaaagatttncctctggaagcttcaagattgttgct

SEQ ID NO: 291999 - DNA, 242 bp, Glycine max
ctagtatttttcaagtaacttaaggtttcaaacctaggaagttggaagtcatggcagcaacattgatggcagcaacaagttctggcactcttaaagcaactcctttcctaggccaaggcaagggtgccaatgccaatgctcttagggatgttgtttccatgggaactgggaagtacaccatgggcaatgatttgtggtatggaccagacagagtgaaatacttgggacccttttcagctcag

SEQ ID NO: 292000 - DNA, 245 bp, Glycine max
  unsure (1)..(245): unsure at all n locations
aaaaaaacccttagccaacacaaccatcatggccacctctgctattcagcaatcagcattcactggtcaaactgctctgaagcagctcaatgagttcgtccgcaagaccggtggcgccggcaaaggtcgcactaacatgcgccgcaccgtcaagagtgctcctcagagcatttggtatggccctgaccgtcccaagtacttgggtccattctcggagcagattccatcatacctgaccggngaat

SEQ ID NO: 292001 - DNA, 246 bp, Glycine max
aggtttgctgggtttgataaggagaagaaggagcttgatgctgaggtgcatcgcaaatatgtttttggtggacatgttgctgcctatatgaagatcttggcggaagatgaacctgagaaatatcagtcacacttcagtgaatacatcaagcgtggaatagaagctgatggtattgaggcactgtacaagaaggttcatgctgccatccgtgctgatccttctctcaagaaatctgagaagcagccc

SEQ ID NO: 292002 - DNA, 245 bp, Glycine max
  unsure (1)..(245): unsure at all n locations
tttcttacaagcctctactatactgcttcaccttctgctctagnaaattcagtnctgaaacatggcttcggctactctctctgtagccaaaccagcccttcaggcaaatgggaaaggcttctctgaattctctggcctccgaagctcatcaggcttccttcccttttctagaaaatcttcagaggatttccattctgtcattgccttccagacctatgcngttggaagcagtggaggatacaaga

SEQ ID NO: 292003 - DNA, 249 bp, Glycine max
  unsure (1)..(249): unsure at all n locations
accaagganaccgtgccaacaacgtgatcaagggcacaaagaaagaacaagttcaanaaatcatcaaaganattaaggacntttaaggaaagcactaaggttgacaaggtggttgtcctgtggacagccaacacagagaggtacaggcaacctagttgtgggactaaacgacaccatggaaaacctctttgcttccttggacaggaacgaggctgagatttccccttccaccttgtatgccatncntgt

SEQ ID NO: 292004 - DNA, 252 bp, Glycine max
  unsure (1)..(252): unsure at all n locations
gcaaaacgattggagaattattatcccgttcttttccgtggagtcaatggaacagttgctcatgaattcatcattgacctgagaggcnttaagaatactgctggaattgagcctgaagatgttgcaaagcgcctcatggactacggttttcatgcaccaacaatgtcatggcctgtgcctggcacactcatgattgagccaactgagagtgaaagcaaggctgaactagacaggttctgtgatgctcttatt

SEQ ID NO: 292005 - DNA, 240 bp, Glycine max
  unsure (1)..(240): unsure at all n locations
gctaaagcaaagacgagcaactgggcaggaatatgctgaacttatgcacgaatttatgacagcagtcaagcaaacttatggggaaaaggtcctaattcagtttgaagactttgcaaaccacaatgcttttaatctgcttgagaaatatagatctacacatctggtctttcatgatgatattcagggnccagcatccgtggttcttgctggactagttgcatctctgaagttggttggggg

SEQ ID NO: 292006 - DNA, 239 bp, Glycine max
  unsure (1)..(239): unsure at all n locations
cgttcttcttcttttgttgttctgtgtttgtgtttgtnttttctctcacctgaaaatgtcttgctgcggtggtaactgtggttgcggaagtcctgcaagtgcggcaacggctgcggaggctgcaagatgtacccagacttgagctacactgagtcaaccaccaccgagaccttggtcatgggagtggcacctgttaaggctcaatttgagggtgctgaaatgggtgtgcccgctgagaa

SEQ ID NO: 292007 - DNA, 243 bp, Glycine max
ttgggtcattttggaaattgcttccactagatcttcacttgacctcctaaaggcaaaacaagcatatcaagcccgtttcaaaaagtcccttgaagaagacgttgcctatcatactaaaggggacatccgcaagctattggttcctcttgtgagcacattccgttatgagggggatgaggtgaacatgacattggcaaaatctgaggctaaactgcttcaccagaagattgcagcgaaggccta

SEQ ID NO: 292008 - DNA, 247 bp, Glycine max
  unsure (1)..(247): unsure at all n locations
ctcataacacaaagcacaaagcaaagctcatccttgagttaaaaaatggcagcagcttcttccatggctcnctcatccccatccttggcttgcaaggccgtgaagctgggcccatcagccccagaagtgggaagggtgagcatgaggaagaccgtcaccaagcaggtctcctcaggaagcccatggtacggcccagaccgagtcaagtacttgggcccattctctggcgagcccccgtcctacctaa

SEQ ID NO: 292009 - DNA, 252 bp, Glycine max
  unsure (1)..(252): unsure at all n locations
gctcactcaggaggagaacgtgaaattcaaaggaccatgctagagttgctgaaccagttagatggttttgattcaagaggagatgtgaaagtnattctggcaaccaacagaattgaaagtcttgatccagctttgctacgacctggtcgaattgacaggaagatagaatttcctcttcctgatatcaaaacaaggagacgcatcttccagatacacacgtcaaggatgacattagctgatgatgtcaacttg

SEQ ID NO: 292010 - DNA, 287 bp, Glycine max
  unsure (1)..(287): unsure at all n locations
tggatgcggtttattttgccatgaatagattgggtnttccgggcgttcggatcttcatcgcggaaacgggttggcccaatggtggcgacttggaccagattggagccaatattttcaacgctgccacttacaaccgaaacttcataaagaaggttactagaaaaccgtggctggggacaccggtcgaccgggttcggctcttcgttttttaatccgcttggtcnatnnaaatcaaaacccggnnccggcanagaacagnttntggnttnccccncnagnggggggng

SEQ ID NO: 292011 - DNA, 275 bp, Glycine max
  unsure (1)..(275): unsure at all n locations
aggaagcagctgttctgagcacctgcaacagaatggaaatatatgttgttgctctgtccaagcaccgtggtgttaaagaagtcactgaatggatgtccaaaacangtgggattccagttgcagatctttgccagcatcagtttctgctatacaacaaagatgccacacaacacctttttgaagtatctgcaggtcttgattctctagtgttgggagaaggtcaatccttgcccaggtgangcaggttgtcaatttggacaaggnttaangncttc

SEQ ID NO: 292012 - DNA, 279 bp, Glycine max
  unsure (1)..(279): unsure at all n locations
ttcctatttacctcagagtcggtgaacgagggacaccctgacaagctctgcgaccaaatctccgatgctgtcctacgacgcttgcctcgagcaggacccagacagcaaagttgcctgcgaaacatgcaccaaaaccaacttggtcatggtcttcggagaaatcacgaccaaggccaacgttgactacgagaagatagtgcgtnacactggagganacatgggcttcgtctnaaatgntgngggactggatcccganaantgaaggtcncgaaaatntga

SEQ ID NO: 292013 - DNA, 278 bp, Glycine max
  unsure (1)..(278): unsure at all n locations
cgaccactgcgttttcagtttcagcacccaaaaaaaccatggttcttctgcagctagatccgtttctcaatgagcttaccagcatgtttgagcgcagcaccaagcttggctctgtttgggttactcttaaacgatcatctttgaaatctaaggtgcagaggaataaattggccactggctggtgaagcaattgagtatagatgccttatacgtgccactgatgggaaaaagacatttctacttcggttggaccaaggatcatcagcgnttcaagcttc

SEQ ID NO: 292014 - DNA, 277 bp, Glycine max
  unsure (1)..(277): unsure at all n locations
gcacaacaactcttcgttatccagggtacatgaataatgacttggttggtcttcttgcctctttgattccaacaccaagatgccanctttctaatgacaggatatacgcctttgactgtagaacgtcaggctaatttaattcgtaagactactgtacttgatgttatgagaagacttctgcaggcaaagantattatggtctcttcttangctcggaccacagatgctagcccagcaaaatatatatcaatnctgaatncctccgggggngtncccc

SEQ ID NO: 292015 - DNA, 286 bp, Glycine max
gtaccaatgtcggcatcattgtcttggccgagggtcgtttgatgaacttgggatgcgccacaggacaccctagttttgtgatgtcctgctccttcaccaaccaggtcattgctcagcttgagttgtggaaggagaagagtaccggcaagtacgagaagaaagtttacgttttgcccaagcaccttgatgacaaggtggctgcacttcaccttggcaaacttggagctaagctcaccaagcttagcccggcccaggctgattacatcagtgtgcctgttgagggtcc

SEQ ID NO: 292016 - DNA, 280 bp, Glycine max
  unsure (1)..(280): unsure at all n locations
gaattctccagagagaagaagaaacttaatcgatcatcacntcacttcactaatacatcatggcagacgagacccagaacaagtatgagagctctgaggttgaggtccaggatcgtggtgnttttgactttctcggtaagaaaaaggatgaagaagacaagcctcatcctcaggaggacggtcatcgccaccgagtttcaaaaagtcactgtctcagaccaaggagagaacaagcacagcctcttagaaaagcttcaccgatctgacagcagnctagctc

SEQ ID NO: 292017 - DNA, 279 bp, Glycine max
  unsure (1)..(279): unsure at all n locations
ttgaagttgaagtcttgcncttctctcttcaactccaaacacaagacatcatccatccatggctgcctccgtactccactgtccggagctgtcaacagagctcttttgaacctgaatgggtctggacctggggtttcagctcccagttcatccttctttgggagcagcttgaagaaggttattggctcaagggtccccaacacaaagatttccctctggaagcttcaagattgttgctgtagaagagangaaagagnttgaagagaccagcnacccgnc

SEQ ID NO: 292018 - DNA, 277 bp, Glycine max
  unsure (1)..(277): unsure at all n locations
ctgctctaaacctctgttttggtgctatgaaattgcatgttggggactggttgtactatatggtggtactgccttcttcttgaggagaaaggcagccacaattcttgacgagggaaattttagtggtcgaaatctagggttggaaatgctggaagcgagccccctggaagtcacaccagaggtggaaaggcgtgttaatgaagggtttaaggcatggatgggtccatcccttctttcttctgatgaagaagannccccctgacanctntgnngcccc

SEQ ID NO: 292019 - DNA, 280 bp, Glycine max
  unsure (1)..(280): unsure at all n locations
ganttctccagagagaagaagaaacttaatcgatcatcacttcacttcactaatacatcatggcagacgagacccagaacaagtatgagagctctgaggttgaggtccaggatcgtggtgtttttgactttctcggtaagaaaaaggatgaagaagacaagcctcatcctcaggaggaggtcatcgccaccgagtttcaaaaagtcactgtctcagaccaaggagagaacaagcacagcctcttagaaaagcttcaccgatctgacagcagctctagctc

SEQ ID NO: 292020 - DNA, 281 bp, Glycine max
  unsure (1)..(281): unsure at all n locations
gtagaagttgttgtgagccctccttttgtgttccttncttttgtaaaaagtttgctgcgccctgatttccatgtctcggcccaaaattgttgggttcgcaaaggtggtgcttatactggagaggttagtgctgaaatgcttgtnaatttgggaattcctgggttattattggtcactctgaacggaggcagcttttgaatgaatcaaatgagtttgtgggnccataaagttgcctatgcacttcaacaaggtctgaaattatagcatgcattgggccaacc

SEQ ID NO: 292021 - DNA, 272 bp, Glycine max
  unsure (1)..(272): unsure at all n locations
ccaaatggtaaaacaccaggactagcaatatctagagcttttggagaccactgcatgaaggactttggactaatctccgtgcctgatgtcacacacagaaaaattaccaccagggatcaatttgtcatcttggcaacagatggggtatgggatgttatatccaaccaggaagcagtgaagattgtttcagcaacgtcacataaggaaaaagctgctcaaaggttgtgaatgtgccatncntgnntggaaccggaaaanagtggcntgcgatg

SEQ ID NO: 292022 - DNA, 282 bp, Glycine max
  unsure (1)..(282): unsure at all n locations
tcccacacgcttcctactcctccctttcaccacttttctgctcccccttgaganagaatttgaatcatcaaaattaaaaactcgcaccaacaatggccccaagagacagccgagccaccgcgttcgccggaccaggcccaggcccatcaccggcccacaaagagatccgctaccgaggcgtccggaaacgcccctggggccgctacgccgccgagatccgcgaccccggcaagaaaacgcgcgtctggctcggcaccttcgacacagccgaggaagccgctc

SEQ ID NO: 292023 - DNA, 284 bp, Glycine max
  unsure (1)..(284): unsure at all n locations
gtcatantattatcattcattctcatctttctctcttctctctccacccaaaccctaactcccgaccctgttcccctctcgtatccgtcatgaaaggaggaaagtccaagaccgaatctaagagagccgatcccaaacttgctgtgaataagaagggagccgccaccaaggctaggaaacccgccggcaaggggaaggcagcgaaagaccctaacaagccaaagaggcctccaagtgctttcttcgttttcatggaggagttcaggaaggtattcaacaaagaa

SEQ ID NO: 292024 - DNA, 278 bp, Glycine max
cagaaaaacaagtagttgagaactaagaagaaggaaatggcttcctgcaatgatctcctccccagctgttaccaccgtcaaccgtgccggtgccggcatggttgctccattcaccggcctcaaatccatggctggcttccccacgaggaagaccaacaatgacattacctccattgctagcaacggtggaagagtacaatgcatgcaggtgtggccaccaattggcaagaagacttcgagactctttcctattgccagacctcgatgatgcccattgg

SEQ ID NO: 292025 - DNA, 180 bp, Glycine max
  unsure (1)..(180): unsure at all n locations
cacaaatcntagccgccattgatttttcctcttccatttctcttactttcnccagcctttttcgattacccatttggttatttcgccctaatggctcttgctccatccaaagtttccacntttctggtttgtnnnctcaaacccagtgttgggggtgctcagaaaaacccaacttgctnt

SEQ ID NO: 292026 - DNA, 276 bp, Glycine max
gacctcttgtcccgcttcatgaggaagaaagaatcctactcggaggagttcctccaacacgtggcactcaacttcatcctcgctgggcgcgacacgtcatcggtcgcgctcagctggttcttctggctctgcgtcaagaacccgcgcgtggaggaaaacatcctaaacgaactctgtactgttcttctgtccacgcgtggagataacatctccacgtggctgaacgagcctcttgtgttcgatgacgtagaccgtttggtctacctcaggcagctt

SEQ ID NO: 292027 - DNA, 275 bp, Glycine max
  unsure (1)..(275): unsure at all n locations
caagattcagcaagtgcgtttcggaagcagagaccgaaatacttcgagatggcccgtacaaagcaaactgctcgtaagtcaactggaggaaaagctcccaggaagcagcttgcaaccaaggctgcacgtaagtctgctccaacaactggtggtgtgaagaagcctcatcgttatcgccctggaactgttgctcttcgtgagattaggaaataccagaagagcactgagctcctaatcaggaagcntctttccagaggttggttcgtgaaattgcc

SEQ ID NO: 292028 - DNA, 273 bp, Glycine max
  unsure (1)..(273): unsure at all n locations
aagaatttgctcaaaaatgtgtcgacgctaccaaaattgcaggattcgcccttgccacctctgctctcgttgtttctggagcaagtgcagaaggtgttccaaaaaggctaaccttcgacgaaatccagagcaagacatacttggaagtgaaggncaactggaactgctaaccagtgcccaaccattgaaggtggagtggactcattcgccttcaagccagggaaatacaacgcccagaagttgtgccggaaccaattccttcaggtgaaggca

SEQ ID NO: 292029 - DNA, 247 bp, Glycine max
ggcctgtggcccagcccaagaggatcaagtttacccctcttctaaaaaatcctagaagatcatcactgtattatgtgaacttggtggctattagagttggccggagaattgtggatacccaccggaggctctagcgttcaatgctaacaccggcgccggcaccgtttttgattcgggtacggtattcacccgactggttgaaccggcctacaacgccgtccgaaatgagttccggcgacgaattgcc

SEQ ID NO: 292030 - DNA, 244 bp, Glycine max
atcctggaaccacagctatagctactgcccagggagaagaactgaagaaggcaattggtgctgctgtgtacatagagtgcagctcaaagactcagcagaatgtgaaggccgtgttgatgctgcaatcaaggttgttttgcaaccacctaagtccaagaaaaaaggaaagaagaagaacacgccttgtgttttcctctgattcaagttgttgaattgcaattgcagttgcagtggtattgttcaa

SEQ ID NO: 292031 - DNA, 250 bp, Glycine max
  unsure (1)..(250): unsure at all n locations
gtagttgagaactaagaaggagaagcaaatngcttcctcaatgatctcttccccagctgttaccactgttcaaccgtgcccggtgccggcatggttgctccattcactggcctcaagtcatggctggcttccccaccaggaagaccaacaatgacattacctccattgctagcaacggtggaagagtgcaatgcntgcaggtgtggccaccagttggcaagaagaagtttgagactctttcctacctgcc

SEQ ID NO: 292032 - DNA, 245 bp, Glycine max
  unsure (1)..(245): unsure at all n locations
ctttttttatgatcaattgaagtctccctgctttttttgtctgtnttttcataacagaatgcttttcagctggctttcttcgcatggtctgcgcttcagtttgggattaaatcctgttccattcgcacacggaggacgtggtgatcagaatcacaatgggggtccttattcaaatcctctgcagctacgttactcttcctctctacgctctagtgacacagatgggttcaacaatgaagccaacg

SEQ ID NO: 292033 - DNA, 246 bp, Glycine max
  unsure (1)..(246): unsure at all n locations
gngtttttcatttcatcgtgcattcaatggcaaccacagcagntccnggcncnnaccatggtgagcacctcnttcatgnggaggcaacctatgancancacaagcctaaagacatncccacngttggtgaagctctttttggtctgaaaagtggacgaggtggtcgtgtcacttgcatggcctcgtacaaggtgaagctcataaccccagaaggagaagtggagtttgaatgcccagatgatgttt

SEQ ID NO: 292034 - DNA, 247 bp, Glycine max
  unsure (1)..(247): unsure at all n locations
cttcctgancccagggannctgngngactcctataattcctgctttggaagnaatttggcagaactntgctggaaaaggactgtcagattttaattttcgtagtgtcacagganagtnnaccagttggtttacaattatcccattcgaatcccagaaaggttttcacttgtaattcgttcnttattgacccaagaaggcatctgttttaccatgaaacctgacttcaaatttcttgaggttgcctat

SEQ ID NO: 292035 - DNA, 246 bp, Glycine max
gtagttgagaactaagaagaaggaaatggcttcctcaatgatctcctccccagctgttaccaccgtcaaccgtgccggtgccggcatggttgctccattcaccggcctcaaatcctggctggcttccccacgaggaagaccaacaatgacattacctccattgctagcaacggtggaagagtacaatgcatgcaggtgtggccaccaattggcaagaagaagttcgagactctttcctacttgcca

SEQ ID NO: 292036 - DNA, 241 bp, Glycine max
ggcagaaagcaagctcatcctagagttttaaaaatggcagcagcctcctccatggctctctcttccccatccttggctggcaaggccgtgaagctgggcccatcagcccccgagtcgggagggtcagcatgaggaagaccgtcaccaagcaggcctcctccggaagcccatggtacggcccagaccgcgtcaagtacttgggcccattctctggcgagcccccgtcctacctcactggcga

SEQ ID NO: 292037 - DNA, 243 bp, Glycine max
  unsure (1)..(243): unsure at all n locations
gcagcactcacattcacaacgaaggtttcctnttcatcagacatggtgaaggcaatcagagttcacgaactcggtggccctcaagttctgaagtgggaggatgtggaaattgggatccaaaagaaggcgaggtccgtgtgaggaacaaagccattggggttaatttcattgatgtctactttcgcaaaggagtttacaaagccccttcttttcccttcactccaggtatggaagctgttgggg

SEQ ID NO: 292038 - DNA, 244 bp, Glycine max
  unsure (1)..(244): unsure at all n locations
agtttggacacatttccatatgctggnacaaccacgacttgtgaatctttatacatgggagttccatgtgttacaatggctggttcagtgcatgcacacaatgttggtgttagttccttagcaaagttggtctgggcaatttgattgccaaaaatgaagatgaatatgtaaaattggctgtgaagttggcctctgatatttcggcactacaaaatttgagaatgagtcttcgagagctcatgtc

SEQ ID NO: 292039 - DNA, 246 bp, Glycine max
cgcaagcaaaaagaaagaatcccaggcgaggagaaagatggaggggaaggagcaggatgtgtcgttgggagcgaacaagttccccgagagacagccaattgggacggcggcgcaggccaagacgacggcaaggactaccaggagccggcgccggcgccgctggttgacccgacggagtttacgtcatggtcgttttacagagcagggatagcagagtttgtggccacttttctgtttctctacatc

SEQ ID NO: 292040 - DNA, 240 bp, Glycine max
ggaggatactcctttggaattttctgtgtgaaattctcaaaagatgggaaagaattagttgcaggaagtagtggtgattctatatatgtatacgatcttgaagcaaataagcctcacttcgaattttagctcacacgtgtgatgtgaacactgtatgttttgctgatgaaactagccatcttatttactctgggagtgatgatagtttctgcaaggtctgggatcggcgttgcttgattg

SEQ ID NO: 292041 - DNA, 252 bp, Glycine max
ggtgccctgagatcacattgaacaatggtgaaggctgtggccgttcttggcagcagtgagggtgtcactggaactattcacttcgttcaggagggaagtggtccaaccaccgtaactggtctcttgctggtcttaagcctggtctccatggtttccatgtccatgccttgggggacactaccaatggttgcctctcaactggatcacatttcaatcctaataacaaggagcatggtgcccctgaggatgaga

SEQ ID NO: 292042 - DNA, 244 bp, Glycine max
  unsure (1)..(244): unsure at all n locations
aacaagtagttgagnnctaagaaggagaagcaaatggcttcctcaatgatctcttccccagctgttaccactgtacaaccgtgccggtgccggcatggttgctccattcactgnctcaagtccatggctggcttccccaccaggaagaccaacaatgacattacctccattgctagcaacggtggaagagtgcaatgcatgcaggtgtggccaccagttggcaagaagaagtttgagatctttc

SEQ ID NO: 292043 - DNA, 242 bp, Glycine max
gtgcaatcctatggttcccgttgcgtgaagccaccgatcatctatggtgatgtgagccgcccaaagccaatgaccgtcttctggtcatctctggctcagagctttaccaagccccaatgaagggaatgcttaccggtcctgttaccattctcaactggtcctttgttagaaatgaccaacctagatctgagaccacctaccagattgctttgtctatcaaggacgaatggaagaccttgaaa

SEQ ID NO: 292044 - DNA, 243 bp, Glycine max
  unsure (1)..(243): unsure at all n locations
cttgaatcttcgttatccttctttttttctccttgaactcgaatattcactatggcagatgaggtggttctgctagatttctggccaagtccatttgggcnnagggtcaggatgcacttgctgaaaagggtatcaaatatgagtccaaagaagaggacttgcagaacaagagccctttgctcctcaaaatgaacccggttcacaagaaaatcccggttctcatccacaatggcaaacccattt

SEQ ID NO: 292045 - DNA, 241 bp, Glycine max
  unsure (1)..(241): unsure at all n locations
gtgctttcagagantggcctgctgaaaagatgaaagatattaagcttgctgatgcattaaagcatcccatatggagtttggggagaaaaataactattgactctgctaccctttcaataagggtctagaagtaattgaagcacattacttgtttggagcaagctatgacgatattgagattgntattcatcctcaatctatcatacatnccttggttganacgcaggattcatctgttatt

SEQ ID NO: 292046 - DNA, 135 bp, Glycine max
gtgaaataaaaataggtgtttcttacttttgaatatttggtttgtgttgttccataatcattcttgagatcaaactcaaacgacaatatttgtgtcttgagatcaaactaaacaataatatttgtgttatctggc

SEQ ID NO: 292047 - DNA, 239 bp, Glycine max
  unsure (1)..(239): unsure at all n locations
gatcatgggttctggatccggattgactgtaatcgacaatctgcntcagatgagccagtctctaggattcgacaatgcacatatatttgtttccatgatcagtatttggaattccttggccgtgtcggaggaggttacatatctgagcttgttgtgagggatcatgcatatccaaggccagttgcattggctgtatttcaactcattatgactcttgggcatgttttccttggtatggg

SEQ ID NO: 292048 - DNA, 252 bp, Glycine max
atcgccggcctcaccgccgacggccgcgtcctctcccgctacatgcgatccgagtgcatcaactataactacacctacgagtcaccgctccccgtagggagactcgtcgttcagctcgcgataaggctcaggtttgcacccagcggtcatggaaacggccttatggagttggactcctggtagctggattagatgaatcgggagctcacctctattacaactgtcccagtggaaactattttgaatatcagg

SEQ ID NO: 292049 - DNA, 244 bp, Glycine max
gggagttttggtaagagaaggaacaagactcacactctctgtgtgaggtgtggccgccgcagcttccatctccagaagagtcgttgcgccgcttgtgctttccccgccgcacgactaggaaatataactggagcgtcaaggcaatccgcagaaagaccaccggaactggcaggatgaggtacttgcgtaacgtgcctcgccgattcaagagtggcttcagagaaggtaccgaagctgcacctag

SEQ ID NO: 292050 - DNA, 241 bp, Glycine max
  unsure (1)..(241): unsure at all n locations
ttagactggagctctgcttcttgatgggggtaccttgaactacttcgggaaacccatccccatcaatcttattgtggctgtcattgctgagattgttcttgtgggaggtgcaagtactacagaattattaatggcctgaatttcgaaganaaacttcatccaggtggtccatttgacccattggggcttgcaaatgatccagaccaagctgcactgctaaaggtgaagganataaaaatgg

SEQ ID NO: 292051 - DNA, 243 bp, Glycine max
  unsure (1)..(243): unsure at all n locations
ttatttcgtatctcactaaccgcgctgctgtctatttggaaatgggaaagtatgaggaatgcataaaagnttgtgacaaggctgttganagaggaagagaactaagatcagatttaanatgntagcaagagctttgacaaggaaaggaaatgccttggtgaaaatggcgaagtgctcgaaggattacgagtctgccattgagacttatcaganagcactcactgagcaccgcaaccctgacac

SEQ ID NO: 292052 - DNA, 243 bp, Glycine max
gtaatttgggagggtttaccaggactattgtgatgccatgagcaatctttctttggggataatggaacttttgggaatgagtcttggagttggtaaagcatgttttagagagtctttgaagagaataactcaataatgaggctcaattactaccctccttgtcaaaagcctgacctcactttgggcactggacctcactgtgacccaacatctttgaccattcttcaccaagaccaagtggga

SEQ ID NO: 292053 - DNA, 280 bp, Glycine max
cgcaagcccactcccaccgaaatctcttggattgatctcttcctcaacttcaatcccctctttcaagaagcgtgcagagagtgatacttctgttcctgatgctgcagctaaagctgaaaaatttgctcaaagatatgctgatatacttgaagatttgaagaaagatcctgaaagtcatggtgggcctcctgattgcattcttctctgcagacttcgtgaacttgtgcttagagaattgggattcagagatatcttcaaaaaagtcaaggatgaagaaaat

SEQ ID NO: 292054 - DNA, 216 bp, Glycine max
tagtgcctccttgccagaagttaaaatggcccaagaaactttcctattcacatctgaatcagtgaacgaggggcaccctgacaagctctgtgaccagatctccgatgctgtgctcgatgcatgcttggagcaggaccctgacagcaaggttgcctgtgaaacctggcaccaagaccaacatggtgatggttttcggagagatcacaaccaaggcca

SEQ ID NO: 292055 - DNA, 278 bp, Glycine max
  unsure (1)..(278): unsure at all n locations
aacaattccattctctttgcctgcntagtttcaattctgtccaatttccaaaaccaaaacaagctacacaagttcatggcncactcccaataacagacnctctcttgccatggagagaactgggcaatgggttttctctcaagacataccaactgatgttatagtggaagttggagaaacaactttctctctgcacaagttcatgctngtggcaaaaagcaactacataagaaaactgatattggaatcagatgagagcgaatcaccagaatcgacct

SEQ ID NO: 292056 - DNA, 278 bp, Glycine max
caagaatttggataaggctattgaccacaaggccttacatgatactttttcttcttttggactcattctttcttgcaaaatagcaactgatgcttctggtctgtctaagggctatggttttgttcaatttgacaatgaagaggctgcacagaatgctattgacaagttaaatggcatgctgatcaatgataagcaggtctatgtaggccatttcctgcgaaagcaagatagagagaatgctctcagcaagacaaaatttaataatgtctatgtgaaaa

SEQ ID NO: 292057 - DNA, 282 bp, Glycine max
  unsure (1)..(282): unsure at all n locations
cagtttcgggggaagagatccagcagcaatggtgtacgtcaaggctcagaaatcaaaagcctacttncagagatatcaagtcaagttcaagagaagaagagagggaaaaaccgattaccgtgccaggattcggttgattaatcaggacaagaacaaatataacactccgaaataccgatttgtggttcgctttagcaacaaggacattgttgcacaaataatatctgctagcattgccggcgatttagttcttgctacagcatattcacatgagctgccacg

SEQ ID NO: 292058 - DNA, 281 bp, Glycine max
  unsure (1)..(281): unsure at all n locations
cttgtntcattttctctcgaagcaaganaaatgttcatcgagagnttcaaggttgagagtcctaacgtgaagtacacagagactgagattcagtccgtgtacaactatgaaaccactgancttgttcacgagaacaagaatggcacttatcagtgggttgtcaagcccaaaactgtcaaatatgaatttaaaaccaacacccatgtccctaaactaggggtaatgcttgtggggtggggtggaaacaatggctcaaccctcaccggtggtgttattgctaa

SEQ ID NO: 292059 - DNA, 273 bp, Glycine max
  unsure (1)..(273): unsure at all n locations
aataaattcaagcatataatgagggagcnnccagggggctataattattggcnccgctttccaaactttaacttgnaaagnctggacttatgtcgctgttagtaaggctgatcaatcctgtagncatatccccaactattgctgcagttggactttcattctacagttatggcttcccattanttggtacatntantgagatcggtgcagtacaaatattagtggttattgnttnttctctttatcttcgtaagatatctgttcttggacatc

SEQ ID NO: 292060 - DNA, 274 bp, Glycine max
  unsure (1)..(274): unsure at all n locations
tcgtggaattgctactttagagtcgttgcaatttgatttggctaccattatagcagcaactaataaattctcagaccagaataaaataggcaaaggtggatttggagaagtttataagggtattcttcttgatggttcacaaatngccgtaaagagattatcaaaaagttcaaagcaaggatcaaatgagttcaagaatgaagttttattaatagccaaacttcaacaccgaaatctagtgactctaattggtttttgctttgaggaagaagaa

SEQ ID NO: 292061 - DNA, 276 bp, Glycine max
cagagtcagagagagagattcactgaaacagagcgcagaagaaaatacataaactaatccagaaaatgagcagcggcgctggaaaggtggtgtgtgtcaccggcgcttccggttacattgcttcctggatagtcaaattcctcctcaatcgcggctacaccgttaaggccaccgttcgcgacacaagtgatccgaaaaaaataaaccacttggttggcctcgacggtgctaaggagaggctgcacctctacaaggcgaatcttcttgaagaaggtt

SEQ ID NO: 292062 - DNA, 263 bp, Glycine max
  unsure (1)..(263): unsure at all n locations
ttctcagcataatcttgctaccaacngttggaaatgcagccgaacatgcaggagcaatcactatttgctttcaagaacaagctggacatttcattgggtgttgcattgggttcagcaactcagattgccatgtttgtggtcccattatgtgtaatcgttgcttggataatgggtatcgatatggacctgaacttcaacctcctagagacaggttcccttgcgttggcataatagtcacaggcttcactttacaggatgggact

SEQ ID NO: 292063 - DNA, 271 bp, Glycine max
ctaagtgcctaacacctgcagtgaacaatggcctctgcatcagcatctcttctcaagtcttcacttgttcttgacaagtctgagtgggtgaagggacaaacacttcgccaaccttctgctgcatcagttgtgagatgcaaccccaccaccccatcaggcctcaccatcagagctggttcctatgctgatgagctcgttaagaccgcgaaaacagtggcttcaccagggaggggtattttggccatggatgagtccaatgctacctgtggga

SEQ ID NO: 292064 - DNA, 275 bp, Glycine max
  unsure (1)..(275): unsure at all n locations
caaggnggacttgcctgaggaactcatctttcacatcaactatcttgntgctgatcaacccaccttcacccttacacttctccaaaggttctagccaagtcattgctcaatactaccaactaattcgccttggttttgagggatatagaaacgtgatggaaaactgcagagacaacatgttggtgctgaaagaaggactagagaaaacagggagattttcaattgtgtccaaagacaatggagtgcctttggtggcattcacactgaaagaccac

SEQ ID NO: 292065 - DNA, 269 bp, Glycine max
ctagtttcttacaagcctctactatactgcttcaccttctgctctagaaaattcagtgctgaaacatggcttcggctactctctctgtagccaaaccagcccttcaggcaaatgggaaaggcttctctgaattctctggcctccgaagctcatcaggcttccttcccttttctagaaaatcttcagaggatttccattctgtcattgccttccagacctatgcagttggaagcagtggaggatacaagaagggtgtgacagaagcaaaa

SEQ ID NO: 292066 - DNA, 267 bp, Glycine max
gtccggaaatcgttcctatcatcacttcttaaatctcgaaccctctcgttcgtgccgatcactaggtcacacttcatcaatggcgggtagaggcaaaaccctaggatccagcgccgctaagaaggccacctcaaggagcagcaaagccggcctccaattccccgtcggtcgtatcgccaggttcctcaaggccggaaagtacgccgagcgcgtcggcgccggagcccccgtctacctcgccgccgttctcgaatatctcgctgctga

SEQ ID NO: 292067 - DNA, 265 bp, Glycine max
  unsure (1)..(265): unsure at all n locations
gttaacgcattggctaaggcattgtctggcaacaaggatgtggccttcttctctgctaatgctgcagctcaggcttcaaggaagtcctctccaagagtgaccaacgaggctgttcagaaggctgctgctgcattgaagggttcagatcatcgccgtgcaacaaatgtcagtgccagactggatgctcaacaaaagaagctcaaccttccaatccttccaaccaccactattggntccttccctcagactgtagaactgaggaggg

SEQ ID NO: 292068 - DNA, 269 bp, Glycine max
ctaactggcaactaattaacgtgtttgggactcgcgagttgtgcattcctaacacccatttcaggaagcccaagcattgggagatgactagaaagaggatacagatcaagaaaatcgacaacatcagttcgaggcaagtgactttctccaagagaaggaaagggcttttcaagaaggctcaggagttgtcaaccctttgtgatgcagacatagctctcatagtcttttctgcaactagcaagctctttgagtatgccagttcaagcatg

SEQ ID NO: 292069 - DNA, 271 bp, Glycine max
  unsure (1)..(271): unsure at all n locations
cgaganatggcgatggcaatggcgcttcgcaggctttcatcttcaattgacaagcctctgcgccctctcttcaatgccggttccctctactacaagtcgtctttgcctgatgaagctgtttacgacaaggagcgacccggagttacatggccgaagcagttgaatgctccacttgaggtcgtggatcctgagattgctgatattatngagcttgagaaagctaggcaatggaaggggctagaattgataccgtcagagaatttcacctctg

SEQ ID NO: 292070 - DNA, 264 bp, Glycine max
  unsure (1)..(264): unsure at all n locations
cggagactgagctttgcctcggtttgcctggcgggggctctgaagtggaaactccaagggccactgggaagagagggttctctgagaccgttgatctgaagcttaatcttcagaccaaggaagatctgaatgagaatctgaagaatgtctcaaaggagaagactctccttaaagatcctgctaagccgccggctaaggctcaagtggttggttggccaccagtgagatcatacaggaagaacatgatggcagtacaganggtta

SEQ ID NO: 292071 - DNA, 263 bp, Glycine max
  unsure (1)..(263): unsure at all n locations
tgatcgaaaatggcgacgttgaaggttcctggctcaacttccttnctccagtggaagacagtnagcaattgcgaaaagcttttcaagggtggggaacgaatganggattgataatatcaatcctgggtcatagaaatgcagctcagcgtaagtngattcgtgaagcttatagtgcaactcatggagaagatctttttaaagatttagacaaagaactttcaagtgactttgagcgggctgtgttggtttggacattggatcct

SEQ ID NO: 292072 - DNA, 263 bp, Glycine max
gcttctctagcaaccttggctgctgttcaaccagctacgatcaatggccttgctggaagttccctctctggaactaagctctctttcaagccctctcgccacagtgtcaaatccaagaacttcaggagtggtgccgtggtagcaaagtatggtgacaagagtgtgtactttgatttggaggatctgggcaacactacagggcagtgggacttgtatggctcagatgcaccttcaccctacaaccctcttcagagcaagttctt

SEQ ID NO: 292073 - DNA, 264 bp, Glycine max
gtccaagtgggtcatggtgatttgaaagataagccatggtggcaaaagatgcaaacttgtgaagagttgattgaagcctcggccaccctcatatggatcgcttcagcccttcatgcagctgttaactttggacagtatccatatggaggtttaatcttgaacaggccaaccattagcaggagattcatgcctgagaaagggtctgctgagtatgctgctttggctaagaaccctgagaaggagtttttgaaaactattactggc

SEQ ID NO: 292074 - DNA, 281 bp, Glycine max
  unsure (1)..(281): unsure at all n locations
cgcaagcccactcccaccgaaatctcttggattgatctcttcctcaactcaatcccctctttcaagaagcgtgcagagagtgatacttctgttcctgatgctgcagctaaagctgaaaaatttggctcaaagatatggctgatatactgaagatttgangaaagatncctgaaagtcatggtgggcctcctgaattggcattcttctctgccagacttcgtgaaacttgtgcttagagaattgggattcagagatatctcaaaaaagtcaaggatgaagaa

SEQ ID NO: 292075 - DNA, 279 bp, Glycine max
  unsure (1)..(279): unsure at all n locations
aagtagttgagaactaagaaggagaagcaaatggcttcctcaatgatctcttccccagctgttaccactgtcaaccgtgccggtgccggcatggttgctccattcactggcctcaagtccatggctggcttccccaccaggaagaccaacaaatgaccattacctccattggnaagccaacggtggaagagtgccaatgcatgccaggtgtggccaccagttggcaagaagnagtttgagactctttcctaacctgccagaccttgatgatgcacaatt

SEQ ID NO: 292076 - DNA, 273 bp, Glycine max
  unsure (1)..(273): unsure at all n locations
cagattctctccttccttctctctatccaaattttgattctttcgatcaaacccgcaacacccacctcaccaaaaccctacgcaacccatccatgacgcttggcttaggaggatccagtgtcgtggttcctaggaactncagantgctgggaggagcttgaacgtggagaaaaaggaattggagatggcacagttagctatggaatggatgatggngatgacatttacatgcgctcttggactggcaccattattggcccccataatactgta

SEQ ID NO: 292077 - DNA, 273 bp, Glycine max
  unsure (1)..(273): unsure at all n locations
anaccctcttttttctctctcttgcaaaacctaattttcatttcttccctcaaatttcaaaatgcgtganatccttcacatccagggtggccaatgcggcaaccagatcggcgccaagttctgggaggtggtttgcgcggagcacgggattcgaccctaccggaaggtacggtggggatcggagttgcagctcgagaggatcantgtctactacaacgaggccanttgcggtcggttcgtgccgcgcgcggttctcatggacctcgaaccggg

SEQ ID NO: 292078 - DNA, 273 bp, Glycine max
  unsure (1)..(273): unsure at all n locations
gaatcagagaatggcaactatgactggtgtgagcctttcatgccccagggttttcttcaacgcatcagcctcaccgcaaaacgcgcatgctgtaaagttctcacttccacccagccaagcagtccgaccgggtagtatcaagttgggtcgcgtgatgaggatccgacccgttcgngtgcgcctgagcgcatatcggagaaggtggaggagagcataaagaacgcgcaggaggcgtgcgccggcgatccgacgagcggcgagtgcgtggcggcg

SEQ ID NO: 292079 - DNA, 280 bp, Glycine max
  unsure (1)..(280): unsure at all n locations
agaagaacaagtagttgagaactaagaaggagaagcaaatggcttcctgcaatgatctcttccccagctgttaccactgtcaaccgtgccggtgccggcatggttgctccattcactggcctcaagtccatggctgggcttccccaccaggaagaccaacaatgacattacctccattgctagcaacgggtggaagagtggcaatgcatgcaggtgtggccaccagttggcaagaagaagtttgancactctttcctacctgccagaccttgatgatgcc

SEQ ID NO: 292080 - DNA, 269 bp, Glycine max
ctctttgggaatcaaatccgaagcatgatgcattgtgcgagcattgtctcggctccgtcctacgcgttcccttttctctctggctccgcttccactactccaactgcgatctcgctcactaagcgcagttggaagccacctccgagcatggcaaaaggcccagtcagagccacgtttctatagagaaagataccccggaggccaatcgtcccgaaacgtttctcagaggagtggacgaggcccagtcttccacttcggttcgggcccgc

SEQ ID NO: 292081 - DNA, 274 bp, Glycine max
  unsure (1)..(274): unsure at all n locations
gtacaggattggcttcctacggagagaaagagtggtacttcttttcaccacgggaccggaaatacccganccggttccaggccgaaccgggctngcgggaaccggttactggaaggcaaccgggggcggataagccccattggccaccccaaaccggttgggataaaaaaagctttggtgttttacgcagggaaagctccgaaaggggacaagagcaattggatcatgcacgagtntcgtctcgccgatgtagatcgctccgttcgcaaaaaga

SEQ ID NO: 292082 - DNA, 271 bp, Glycine max
  unsure (1)..(271): unsure at all n locations
caaaccttggtgcaaagttgttctttggtggtgttggcgtgcaaaagacggggacagaaattgcaacagctttgaataatatggatgttagcagtgaatatgttctgaagctaaaacatgaaattgaagaacagtgtgctgaggtatttcctgcaccggctgatcgagaanaggtaaaatcttgtttgactgagttggcagatagcagcaatgctttcaagcaagctttgaatgctggcatagaacaacttgtggcaaccatcacacctcg

SEQ ID NO: 292083 - DNA, 275 bp, Glycine max
  unsure (1)..(275): unsure at all n locations
agccaagtnaacgttcctcatatggaatcaccatgaacagatcaagcacatagatactgttagagcttacacctttggtgcacattactttgtggaagttgacattgtgttgccggaagacatgcttctccaccaaggcacacaacattggtgacacactgccaagagcaagctggagcagcttccagaagtcgaaggggcttttgtgcacgtagattttgagtccactcacaggccagagcacaagaccatggtgtgatgatatgccatgggac

SEQ ID NO: 292084 - DNA, 261 bp, Glycine max
  unsure (1)..(261): unsure at all n locations
gaaaaataaaatacattggtctgtctgaggcctcggnttcaacaatcagaagagcacatgcagttcatccgataacagctgtgcagttggagtggtccctatggtcaagagatgtggaggaagaaatagtnccaacatgccagggaacttggtattggaattgttgcatatagtcctcttggacgaggattcttgtcatcaggaccaaagttgcttgagaatttgacacaggatgatttccgacagagtctacctagattc

SEQ ID NO: 292085 - DNA, 271 bp, Glycine max
gaacaagtagttgagaactaagaaggagaagcaaatggcttcctcaatgatctcttccccagctgttaccactgtcaaccgtgccggtgccggcatggttgctccattcactggcctcaagtccatggctggcttccccaccaggaagaccaacaatgacattacctccattgctagccaacggtggaagagtgcaatgcatgcaggtgtggccaccagttggcaagaagaagtttgagactctttcctacctgccagaccttgatgatgc

SEQ ID NO: 292086 - DNA, 271 bp, Glycine max
  unsure (1)..(271): unsure at all n locations
ctaaggagaacattgtggaacctatgcgggatatcaggagagctctcttagaagctgatgttagtcttcctgttgtcagaaggtttgtgcagtctgtcagtgaccaggctgtgggtgttggtgtcattcgtggagtgagaaccagntcagcaattggttaagattgtacatgaggaacttgtacaattgatgggtggagaggtttctgaactggtttttgccaaatctgggcccactgtcattttattggctggacttcagggagttggga

SEQ ID NO: 292087 - DNA, 272 bp, Glycine max
  unsure (1)..(272): unsure at all n locations
actgagcatgagttgcttaggtacttgtataggctacaatcaaaagatctctcactatgccacagtatgatcccacctggatcttgtacaatgaagctgaatgcaacaactgaaatgatgcctgtgcacatggcccagctttagtgatattcaccctttgcaccagttgancaggctcaaggttatcagggaaatgttcaacaatttgggtgaactgttgtncaccatcactgggttcgactccttctctttgcaaccaaatgctggtgctg

SEQ ID NO: 292088 - DNA, 268 bp, Glycine max
  unsure (1)..(268): unsure at all n locations
gtagttgagaactaagaagaaggaaatggcttcctcaatgatctcctccccagctgttaccaccgtcaaccgtgccggtgccggcatggttgctccattcaccggcctcaaatccatggctggcttccccacgaggaagaccaacaatgacattacctccattgctagcaacggtggaagagtacaatgcatgcaggtgtggncaccaattggcaagaagnagttcgagactctttcctacttgccagacctcgatgatgcccaattg

SEQ ID NO: 292089 - DNA, 271 bp, Glycine max
  unsure (1)..(271): unsure at all n locations
gaagaaattgatatactagangaatatggaggtgatttcagtggggattcagaggttccctgctnctattttattaaacaggcactttcatttcttgtccccatgttattggagacactgctgaagcaagaagaagatcnagaaccaggatgaangagcatggaanattgtaatnngctggaggtacctgncttgggaattagttgcacggacagttggtgatgacattgtanctttggttatgccgtttattgaagagatataaccaaac

SEQ ID NO: 292090 - DNA, 269 bp, Glycine max
gcaaaaagaaagaatcccaggcgaggagaaagatggaggggaaggagcaggatgtgtcgttgggagcgaacaagttccccgagagacagccaattgggacggcggcgcagagccaagacgacggcaaggactaccaggagccggcgccggcgccgctggttgacccgacggagtttacgtcatggtcgttttacagagcagggatagcagagtttgtggccacttttctgtttctctacatcactgtcttaaccgttatgggagtcgcc

SEQ ID NO: 292091 - DNA, 259 bp, Glycine max
  unsure (1)..(259): unsure at all n locations
gtggatcattcatgaatttataaaggaacataatcatgaacttttaccagctttggcatatcattttcggattcatagaaatatgaaattagctgaaaagaataatattgatatcctgcatgctgttagtgaacgcaccaganagatgtatgtnganatgtctaggcaatctagtggctgtcaaaacattgggtctttcatgggtgatataaactatcagtttgacagangccagtatttggctttggatgagggagat

SEQ ID NO: 292092 - DNA, 271 bp, Glycine max
  unsure (1)..(271): unsure at all n locations
cttacaaggctctactctactgcttcaccttctgctctagaaaattcagtggtgatacatggcttcggctactctctctgtagccaaaccngcccttcaggcaaatgggaaaggcttctctgaattctctggcctccgcagctcatcagggctccttncccttttctagaaaatcttcagaggatttccattctgtcattgccttccagacctatggcagttggaagcagtggaggatacaagaagggtgtgacagaagcaaaactgaagg

SEQ ID NO: 292093 - DNA, 282 bp, Glycine max
  unsure (1)..(282): unsure at all n locations
aaacactcataacacaaagcacaaagcaaagctcatccttgagttaaaaaatggcagcagcttcttccatggctctctcatccccatccttggctggcaaggccgtgaagctgggcccatcagccccagaagtgggaagggtgagcatgaggaagaccgtcaccaagcaggtctcctcaggaagcccatggtacggcccagaccgagtcaagtacttgggcccattntctggcgagcccccgtctacctaaccggtgagttcccaggcgactaggctgggac

SEQ ID NO: 292094 - DNA, 273 bp, Glycine max
gtggtggcatgcagatcttcgttaagaccctcaccggcaagactattaccctagaagtcgaaagctccgacaccattcgacaacgtcaaggctaagattcaggacaaggagggaatccccccagaccagcagaggctgatcttcgccgggaagcagctcgaggacggacgcacccttgctgactacaacatccagaaggagtcaactctccacttggtgttgcgtcttcgtggtggtatgcagattttcgtgaagatcttacgggtaagatat

SEQ ID NO: 292095 - DNA, 272 bp, Glycine max
tctcaaaacacttgctccattattattttctcattcattcgttcatcatggttcggttcagcaacaacgtgatcggactcctgaacttcctgaccttcctcctctccatcccgatcctggtggccggagtgtggctgagcaagcagggcgccaccgagtgcgagcggtggctggagaagccggtgatcgcactcggcgtcttcctcatgctcgtctcactcgccggcctcgtcggcgcgtgctgtcgcgtgtcgtggctcctctggctctac

SEQ ID NO: 292096 - DNA, 273 bp, Glycine max
  unsure (1)..(273): unsure at all n locations
tcaggcgtcttcataaacgcctttcttctccgtttccgtttcctcgttcaaattcgctttttgatctgcgaaaatgagagagtgcanctcgatccacattggtcaggctgntatccaggtcggaaatgcttgctgggagctctactgcctcgagcacggcatcgggcccgatgggcaaatgccaagtgacaagacagttggcggtggtgntgatgctttcaatacttcttcagcgagactggtgctggaaagcacgtgccacgtgcagtgttt

SEQ ID NO: 292097 - DNA, 279 bp, Glycine max
  unsure (1)..(279): unsure at all n locations
cactgatgccggtggaattatccttctcttccaggatgacaaggtcagtggactgcagcttctcanagatggccagtgggntgatgtgcctcctntgcgccactccattgtngttaacattggtgatcagcttgnggttatcaccaatggtaagtacaagagtgtggagcaccgtgtgatancacaaacagatgggaccagaatgtccattgcctcattccataaccctggcnatgagnnntcanntaacccggnccnaaatttttggnnaagagggcc

SEQ ID NO: 292098 - DNA, 277 bp, Glycine max
  unsure (1)..(277): unsure at all n locations
tcnntntnggtcngcangtgggtgtcaacaacanntgnanngggtaagtcangactttgcattngacatggatgnggnnanangtncatannntnnngttgcactcggagtgctgaagggcaggctgggtngtgcatctctcatggaggtggangccgttgtcagtaccaagaatgtaataagggtgcacaagggagcactatgtattgcaaagcacatggtggtgggaaacgatgctcatttgcagggtgtaccaaaggtgctgaaggaagcaccc

SEQ ID NO: 292099 - DNA, 269 bp, Glycine max
  unsure (1)..(269): unsure at all n locations
aggttgcttggcggggataagattaaagattcaacaatggcctctgnttctgctactcttctcaagtcatctcctgttcttgacaagtgcgagtnggtcaaaggccagacccttcgccaacctctcgtgagatgtaacccttcctcagcatcagctctcaccatcaaagctgcttcctatgctgacgagctcgtcaaaaccgccaaaacagtggcctcaccggggcgtggtattttggcgatggatgagtcaaatgcaacctgcgggaa

SEQ ID NO: 292100 - DNA, 271 bp, Glycine max
aggcagaaagcaagctcatcctagagttttaaaaatggcagcagcctcctccatggctctctcttccccatccttggctggcaaggccgtgaagctgggcccatcagcccccgaagtcgggagggtcagcatgaggaagaccgtcaccaagcaggcctcctccggaagcccatggtacggcccagaccgcgtcaagtacttgggcccattctctggcgagcccccgtcctacctcatggcgagttcccaggtgactaacggctgggacatg

SEQ ID NO: 292101 - DNA, 267 bp, Glycine max
  unsure (1)..(267): unsure at all n locations
ttttgtcagnngangacatcattgctttgattggtgatngagtgcgatggagttattggacagttcgnntgaagcactgggganaanagttgttctctggtttnagcaaagcggcgangcaaagctttcagtaacatngctgtnngttataacaacgtggattttgatgctgcaaacaagtatggtgttgctgttgganatactcctggagtgctcactnnagncaacagcaganttggnagcttcactaactttgggcagctgcnc

SEQ ID NO: 292102 - DNA, 258 bp, Glycine max
  unsure (1)..(258): unsure at all n locations
tcaaacataacttctgcttcagctgttatcttgaaaggngggtcaattggaacttcaaggctttctgatgttaccactctagctattggatatgtttttatattgactctaattttctgctactttggaattgttgctttaattcgttacacaaagggtgagcctttgaccatgggaaggttatatggctttgcttctatagcagagacaattccatctctcttcaggcagtttttggctgcgatgaggcatttgatg

SEQ ID NO: 292103 - DNA, 208 bp, Glycine max
  unsure (1)..(208): unsure at all n locations
gcaacgtctcatcttcgccggaaagcaacttgaggacgggcgcaccctcgccgactacaacatccagaaggaatcaacccttcacctcgtcctccgtctccgtggtggcatgcagatcttcgttaagaccctcaccggcaagactataaccctagangtcgagagctccgacnccatcgacaangtcaaggctaagntccanganang

SEQ ID NO: 292104 - DNA, 266 bp, Glycine max
  unsure (1)..(266): unsure at all n locations
tcgcaattaaaaacacttngcaagtctcatgtagctttcaagtttcaaacaactgcacccaagagttgttatatgcnccctccgggtggtattcttgcacctggtgaaagtataattgcaactgngtttaagtttgtggagccnaccngagaccaatnngaaaccattgntcagaaaagncngggttaagtttaaaatcatgagcttaaaagtgaaagggcgaaatggactatgtaccagaactgtttgatgagcaaggggatcnt

SEQ ID NO: 292105 - DNA, 209 bp, Glycine max
  unsure (1)..(209): unsure at all n locations
ctcnggggatgcaanggacaatgaaaatctttccaatgtnagcntgtctttgtcaagatgggaatcaaccccatacatgatgagtgctggagagttggaaagtgganatgcaggagagccagcaaaactgatcaggcaganataccgtgcaagctgcagncatgatcaataagggaaagatgtgcgatctcttcatcaacgatcttgnt

SEQ ID NO: 292106 - DNA, 261 bp, Glycine max
  unsure (1)..(261): unsure at all n locations
cattgccacatattgtggncattttggaattgtgccactaaaattctattcaattcatctatggctgcctcttcttatgctatgcantcaatcctggcaaaccctttgatccgcatttccagcgggtctagggtgaaccaatttggcgttncctgctttgcacatganaaggaatgttggcctgagagttaggnccatggctaagggagaacanncaagtgngcctgcaaccccagttacnccgccaccatcagtngaacc

SEQ ID NO: 292107 - DNA, 196 bp, Glycine max
  unsure (1)..(196): unsure at all n locations
caaaaacgctttggaaaactatgcatacnacatgaggaacaccgtgaaggatgacaagattggtgagaaacttgacccggctgacaagaagaagattgaggatgcaattgagcaggcaatccagtggttagacagcaaccagcttgcagaagcagatgagtttgaggncaaaatgaaggaattggaaagcatctnc

SEQ ID NO: 292108 - DNA, 259 bp, Glycine max
  unsure (1)..(259): unsure at all n locations
gtattcaacatgatgcttcagatcctggaagatggaagattaacagacagcaaaggaagaactgtggacttcaagaacacgcttcttataatgacatcaaatgttggaagcagtgtgattgagaaaggaggccgtaaaataggatttgaccttgattatgatgagaaggatagcagttacaaccgaatcaagagcttggtgactgaggaactgaagcaatacttcaggccagagttcttgaataggntggatgantgnt

SEQ ID NO: 292109 - DNA, 257 bp, Glycine max
cacattgatacggttcgggcatacacatttggatctcactactttgttgaggttgatattgtcctgccatcggatatgcccttgcaagaggctcatgatattggggaatcattgcaagagaagcttgagcttttgcctgagattgagcgtgcttttgttcatcttgattatgagtatagtcacaaacctgagcatgctcaagcacactcttagcagcaatcaggaaaagcaatgcctttgttgttcattcctttccc

SEQ ID NO: 292110 - DNA, 268 bp, Glycine max
  unsure (1)..(268): unsure at all n locations
ggngaaaagatgatgatgtttgaagatatggggttttgtggcgatttggatatgttatgtgtttctctggagagggggatattgctgtgagacaaactgaaccggatcctgtagttgaggatgactacagtgatgaagaaattgatgtggatgaacttgagaagaggatgtggagggacaaaatgcgttcacaagcgatganagaacaaaccaagtccaagggnaggactgatgcaacaaagcaaaggcaatcccaagagcaggcaag

SEQ ID NO: 292111 - DNA, 252 bp, Glycine max
  unsure (1)..(252): unsure at all n locations
gncaattgaagttgaagtcttgcccttctctcttcaactccaaacacaagancatcagccatccatggctgcctccgtctccactgtcggagctgtcaacagagctcttttgaacctgaatgggtctggacctggggtttcagctcccagttcatccttctttgggagcagcttgaagaaggttattggctcaagggtccccaacacaaagattncctctggaagcttcaagattgttgctgtagaagagaa

SEQ ID NO: 292112 - DNA, 255 bp, Glycine max
gtgatgtcaagaaaccccttgtcaacaagcacaaacccaaaccagctaagctcagggctagcattacccccggaacagtgttgattcttcttgctggtagatttaagggaaagagggtagtgtttttgaagcagctaccttctgggttgcttcttgtaacaggtcctttcaaggttaatggagttcctttgagacgtgtgaattcagggcctatgttattggcacattcaaccaaagtagatgtctcgctgttaa

SEQ ID NO: 292113 - DNA, 278 bp, Glycine max
  unsure (1)..(278): unsure at all n locations
gnagtttgtcacaagtgcctcatttttagccactgtctactctgactaccttgcttcatctggtagaaacctgagatgcagttcagggaatgtcccccctgctgagcttctctcccttgcaaagtctcaggtggactaccttcttggggacaacccaagagctactagttacatggtgggctatggaagcaacttcccacaaagggttcatcacagaggttcatccattgttccatcaagggtaaccctttcattgtcanctgccgtggagggtatgc

SEQ ID NO: 292114 - DNA, 269 bp, Glycine max
  unsure (1)..(269): unsure at all n locations
ttctcttaaaagagcctttgctttttctttaggcctttcccgaattaagtacttgtttcattttctctcgaagcaaganaaatgttcatcgagagtttcaaggttgagagtcctaacgtgangtacacagagactgagattcagtccgtgtacaactatgaaaccactganttgttcacgagaacaagnatggcantatcagtgggttgtccagcccaaaactgtcnaatntgatttaaaaccaacacccatgtccctaaaataggggt

SEQ ID NO: 292115 - DNA, 256 bp, Glycine max
  unsure (1)..(256): unsure at all n locations
gcaagaaggctgttgagaactccccattcttggagaagttgaagaagaaagggtatgaggttcttttcatggttgatgccattgatgaatatgctgttggccagctcaaggaatttgagggcaagaagcttgtctctgccaccaaggagggtctcaaacttgacgagagtgcaagatgagaagaagaagcaagaggagttgaaggagaagtttgacaaccctgcnaggtgatccangatgttttgggtgacaaggc

SEQ ID NO: 292116 - DNA, 269 bp, Glycine max
  unsure (1)..(269): unsure at all n locations
ttggatttcttctgggacttttcttaatggtcactcatgtcnaggggtatggttttggaggttggaccaatgcacatgccaccttctatggaggtggtgatgcttctgggacaatgggtggggcttgtggttatggaaatctgtatagccaaggttatggaactgatacaacagcactgagcactgctctgttcaacaatggcctgnnctgtgntgcatgcnatcaannncatgtgtgatgatccacatgggggcctccgggccnccac

SEQ ID NO: 292117 - DNA, 269 bp, Glycine max
  unsure (1)..(269): unsure at all n locations
gcatttcctcgtttttntcttcccttttctctttctccggcgacgatctcagattccggccactcctctcgccggcgagcccttactcttccctcctccgtcgagccctctccgattcgaatcgttcccagcctcgcaccaccatgaatcccgaatacgattatttgttcaagcttttgctgattggagattctggtgtaggcaagtcatgtcttctcctgaggtttgcngaatgattcataccttgacagctatatnagtaccattgg

SEQ ID NO: 292118 - DNA, 248 bp, Glycine max
  unsure (1)..(248): unsure at all n locations
cttccttttgacttctgggagagatcctggaattgtccccagaaattcaagnccttcctgaatttgatgaaacatgtgatatacctaccccttccatggagtggattaatggcacaacccctcatctgaaactacctcgnactaaagatgttgttgttaatggtcacatagtgaaagtaaagttcngtgatacgtgcttgctttatcggcctcctcgtattctcatgttctatatgcaacaattgtgt

SEQ ID NO: 292119 - DNA, 248 bp, Glycine max
  unsure (1)..(248): unsure at all n locations
tctcttgtttcaatttcaacaacggttactcctttttcgttttgagtttcantcaagccatcatcatgtctaccgcatcgcaacccaaggccaagaaaacggcgtcgtccaagaagcccctctcccaccctcccttcgccgtgatgatagcagaggcgattgcnagtctgaaagagagaaccggttcgagccaatacgcgataaccaaatacatcgaagggaagcacaaggngttgcctgcaacctac

SEQ ID NO: 292120 - DNA, 249 bp, Glycine max
  unsure (1)..(249): unsure at all n locations
gnacttggaatccaaaaatgagagaaatcatcagcattcacataggtcaggccgggatccaggttggcaacttcctgctgggaactctactgcctggaacatggcatccagcccgatggcatgatgccaagtgactcctccttcggtgtagcccacgacgccttcaacaccttcttcagcgaaaccggatccgggcaagcacgtccctcgcgccgtcttcgtcgatctcgagcccaccgtcatcgacga

SEQ ID NO: 292121 - DNA, 250 bp, Glycine max
  unsure (1)..(250): unsure at all n locations
cttgtatgccattgcctgtgtgatggaaaatgttcctttccattaatgnnagccctcagaacacttttgtaccagggctgattgatcttgccatcgcncggnacactttgattggtggagatgattcaagagtggtcagaccaaaatgaaatctgtgttggttgattttctgtgggggctggtatcaagccaacatctatagttagttacaaccatctgggaaacaatgatggtatgaatctctcggctc

SEQ ID NO: 292122 - DNA, 248 bp, Glycine max
  unsure (1)..(248): unsure at all n locations
gttaaaagccttagccttcnctacaacttncaaacannaagacatnagacatccatggctgcctccgtctccactgtcggagctgtcaacagagntcttttgaacctgaatggttctggagctggagcttcagctcccagttcagcnttctttgggaccagcttgaagaaggttattgcctcaagggtccccaacagcaatgtttccggtggaagcttcaagattgttgctgtagaagagaagaaaga

SEQ ID NO: 292123 - DNA, 249 bp, Glycine max
  unsure (1)..(249): unsure at all n locations
ggcaccctgaaggaacaggagggttcattgagccgaaatggctagcatatggtgagataatcaatggtcgttatgcaatgttgggtgcagttggtgcaatagcacctgaaattctaggcaaggctggtctgatcccttcaggagacagcactcccatggttcagaaccggtgtgttcccacctggcaggaacctacaactactgggcagactcctacacactgttcgtgtttganatggcactgatggg

SEQ ID NO: 292124 - DNA, 273 bp, Glycine max
  unsure (1)..(273): unsure at all n locations
ctcttcccattctagggtttccaaatggacgctggcggaaagatcaagaagggcgccggaggaagaaagggcggcggccctaagaagaagccggtttcaaggtccgtcaaggccggtctccaattccccgtcggaagaattggccgttatttgaagaaaggaaggtacgcccagcgtgtcggtaccggtgctcccgtttacttggccgcagttctcgagtacctagctgctgaggtgcctganttggctgggaatgctggcacgtgacaacaa

SEQ ID NO: 292125 - DNA, 244 bp, Glycine max
  unsure (1)..(244): unsure at all n locations
agccttagccttccctacaactccaaacancaagacatcatcatccatggctgcctnccgtactnccactgtcggagctgtcaacagagctcttttgaacctgaatggttctggagctggagcttcagctcccagttcagccttctttgggaccagcttgaagaaggttattgccttnagggtccccaacagcaaggtttccggtggaagcttcaagattgttgctgtagaagagaagaangag

SEQ ID NO: 292126 - DNA, 260 bp, Glycine max
  unsure (1)..(260): unsure at all n locations
gngaagcattagcaaaagcaagaagaactagtctaagcagaaatggcctcttcagtgatggcatctgtggccctncaaacctgcccctttcactgttgagaagtcctcagttagaggccttccctccctcttcaaggaactcctcttacattcagagttgtggccagtggtggcaagaagatcaagactgacaagcctatggaattaatggtggcctggctttgagggaaggagttgatgcatcgggcaggaaaggaaag

SEQ ID NO: 292127 - DNA, 108 bp, Glycine max
  unsure (1)..(108): unsure at all n locations
gtnacgaaatgacttttgagagtttttagatttgtgtttggtgaagtacttcagataatgtgaattatcttgtgtatccgaatccaacttaatgttacttgcttttac

SEQ ID NO: 292128 - DNA, 250 bp, Glycine max
  unsure (1)..(250): unsure at all n locations
gttaaaagcnttanccttncntacaactncaaacagggaagagatntagcatncatggctgnatccgtctncaatgtagganctgtcaacagaggtcttttgaanctgaatggttntggagtggagcttcanctnccagttcancnttctttgggaccagcttgaagaaggttattgnctcaagggtccccaacagcaaggtttccggtggaagcttcaagattgttgntgtanaagagaagaaagagat

SEQ ID NO: 292129 - DNA, 247 bp, Glycine max
  unsure (1)..(247): unsure at all n locations
gtaggatgtctgagatccttgccccaatcaaaacggtgcggttaactagaaaccgcgacgaggatgcgaaaatgatgaaaaatttgctggggcaaggggacctggtggtttgtcctgaagggaccacatgtagagaaccttatttattgaggttcagccctctgttctcagagatgtgcgatgagattgtccccgttggcagttgattcccagttatatgttccacggaaccactgctggtgganta

SEQ ID NO: 292130 - DNA, 249 bp, Glycine max
  unsure (1)..(249): unsure at all n locations
gtccctcgttccatttccccctttcctncgcccggcgagaaaatnngagaaatccttccaacatnccagggcggccnatgcgggcaaccagatcggagccaagttctgggaagtaatctgcgacgagcacggcatcgaccacaccggaaagtacagcggcgaatccgaactccaattggaangncatncaatgtctactacaacgaggccngcggcggaaggtacgtttcctcgcgccgtcctcatgga

SEQ ID NO: 292131 - DNA, 246 bp, Glycine max
  unsure (1)..(246): unsure at all n locations
gtaaattaagngcatggctgcacaagctcttgtatcatcatcatntcttaccttctcagccgaggctacaagacaaagtcttggaccaagatcactccaatctccatttggcttctncaagaaaagcctcctttcttgttaaggcagctgctacttccccctgtcaagcaaggatcagacagacctttgtggtttgcatcaaagcaaagtctttcctacttggatggcagccttccgggtgactat

SEQ ID NO: 292132 - DNA, 262 bp, Glycine max
  unsure (1)..(262): unsure at all n locations
aataatganagccaaganagaattctattccacctcagatgtgcttnnaaatatttcgtcagctttgtgcaggactcaagcacatgcacagttttgatcctccttatgcacataatgatgtcaaacctggtaatgttctcataacacacagaaaaggacaaccacctcttgccatactgatggattttggcaggctcgtcccgtnaggaagcaaatttagntccaaggnnagaggccctcagttgcaggaatgggcatctga

SEQ ID NO: 292133 - DNA, 269 bp, Glycine max
gtctgctccaacaactggtggtgtgaagaagcctcatcgttatcgccctggaactgttgctcttcgtgagattaggaaataccagaagagcactgagctcctaatcaggaagcttcctttccagaggttggttcgtgaaattgcccaggatttcaagactgatctgcgtttccagagccatgctgtgcttgcattgcaagaggctgctgaggcataccttgttgggctctttgaggacactaacttgtgtgccattcacgccaagcgtg

SEQ ID NO: 292134 - DNA, 267 bp, Glycine max
  unsure (1)..(267): unsure at all n locations
attgangttgaagtcttgcccttctcttcttcaactccaaacacaagacatcatcatccatggctgcctccgtctccactgtcggagctgtcaacagagctcttttgaacctgaatgggtctggacctggggtttcagctcccagttcatccttctttgggagcagcttgaagaaggttattggctcaagggtccccaacacaaagatttcctctggaagcttcaagattgttgctgtagaagagaaganagagattgaagagaccc

SEQ ID NO: 292135 - DNA, 264 bp, Glycine max
  unsure (1)..(264): unsure at all n locations
gaagnacaagtagttgagaactaagaaggagaagcaantggcttcctcaatgatctcttcccccagctgtnaccactgtccaaccgtgacggtnccggcatggttgnnccattcactggcctcaagtccatggctggcttccccaccagnnagaccaacnatgacattacctccattgctagcaacggnggaagagtgcaatgcatgcaggtgtggccaccagttggcaagaagaagnttgagcactctttctacctgccagac

SEQ ID NO: 292136 - DNA, 260 bp, Glycine max
cctaaatcggagtttcagtttcacccctcttttctcatctctaacatcatagtcctcagaggctagtcttcctattatcacaaacaatgtctgacagtcaagaatctgacaagaacattgagatatggaagatcaagaaattgatcaaggctctggaagctgctcgaggtaatggtaccagcatgatttctctgataatgcctccacgcgatcaaatttcccgggtcactaagatgttgggagatgaatttggaatgctt

SEQ ID NO: 292137 - DNA, 256 bp, Glycine max
gtgcttttactctgctaccttgtgacaatggtgagggttagtgtgttgaatgatgctcttaagagcatgtacaatgctgagaaacgggggaagcgccaggtcatgattaggccatcctcaaaagtgattataaaattccttttggtgatgcaaaagcatgggtacattggagagtttgagtacgttgatgatcacagagctggaaaaattgttgttgaattgaatggtagactgaacaaatgtggggttattagtc

SEQ ID NO: 292138 - DNA, 258 bp, Glycine max
  unsure (1)..(258): unsure at all n locations
ggcttcttcaatccctaatgcgccttctgcgttcaattctcagagctacgttggtctcagagcgccactgaggaccttcaacttttcttctcctcaagctgccaaaattcctcgctcccaacgccttttcgtcgtcagagcctccgattcggagttcgaagccgccgttgtcgccggtaaggttccgccggcgcctcccgtgncgcccagaccggcggctccggttggaacaccggtggttccttcattccattcacc

SEQ ID NO: 292139 - DNA, 254 bp, Glycine max
  unsure (1)..(254): unsure at all n locations
tgcaatgggagatgaagtattgaaggcagaagctggtgctaaggttcaaaagtttactgaatgggctctgaaatgtataggcatccattcacgactgcaggatgatagggaaaatgtgatacacagctcagctgttgaaatccagctccggttatctgccttcaagatgttcctcgatcttgctggcaaccgccttacagggaaggacttcagcgaggcctttgatgcggcttgttttcctcttactcnttctc

SEQ ID NO: 292140 - DNA, 251 bp, Glycine max
  unsure (1)..(251): unsure at all n locations
cnagaccccatcttcaagcaatacagcttgcccccacatgagtgtggataccctggtagtgtgttcaaccccttgaactttgcacctactttggaggccaaggagaaggaacttgccaatgggagattggctatgttggcattcttgggattcatagttcaacacaacgtgacaggcaaaggaccatttgagaacctcttgcagcacctctctgacccgtggcacaacaccatcatcaatacattcgtggc

SEQ ID NO: 292141 - DNA, 247 bp, Glycine max
  unsure (1)..(247): unsure at all n locations
ggacactctacaatcagggaggttaangctttgaacattggtcagcttgtaagantttctggtattgtgacacgntgttctgatgttaaaccattgatgaaagtggctgtatacacatgcgaggattgtggatttgaaatttaccaggaagtaactgctcgagtcttcatgcccttgtttgaatgcccatcaaagcgctgtgatacaaatagaagaaaggggaatgttatccttcaacatagagcac

SEQ ID NO: 292142 - DNA, 265 bp, Glycine max
  unsure (1)..(265): unsure at all n locations
aaantttggaatatccaaaggtgattggttctttggctgagtacactgctgcagnagagaggctattggctcacaagccacagaatctgagctttgctgaggctgctagccttcctttaacacttgagactgcttatgaaggccttgaacgaaccgggttttctgctgggaaatctatccttgtgcttggaggtgctggtggagttggaacccatgttattcagcttgccaagcatgtttatggagcatccaaggtagcagctac

SEQ ID NO: 292143 - DNA, 239 bp, Glycine max
  unsure (1)..(239): unsure at all n locations
ccggtaacgatttctcaacactctatgcacctctcatccgtgatgggcgtatggagaagttctactgggcaacaacaagggaagaccgcattggtgtntgcaccggaattttccgcactgatggtattcctgancaggacattgtcaagcttgttgacaccttccctggccaatccattgatttctttggtgcatgnnggnccacatntanccngntnactgaggagtgnattctggtc

SEQ ID NO: 292144 - DNA, 241 bp, Glycine max
  unsure (1)..(241): unsure at all n locations
ctgggagtaggantantagtngaattggggactctcacatcattgaagctggaaatctaaggatatcagttcaggttctgaggnaagtgaccgagaactttgcgcctgagaatgagcttggccgtggtggatttggggttgtttataagggggagttggatgatggtactaaaattgcagtgaaacgaatggnagcaggtgtgattagtagtaaggccttggatgaattccagtctgagat

SEQ ID NO: 292145 - DNA, 248 bp, Glycine max
  unsure (1)..(248): unsure at all n locations
atcttgctgttngcaaaattgnntcctgcggtggattgctggaaactncattgtgctcaagcctccaactcagggagctgtttctgcctcttcatatggttcactgctttcactnggctggntttcccaaaggcctaatccaactgtgtcactggcaaaggctcagaaattggtgacttccttacaatgcatccaggagtgaactgtataagctttactggtggtgatactggcattgcaatttcaaa

SEQ ID NO: 292146 - DNA, 281 bp, Glycine max
  unsure (1)..(281): unsure at all n locations
tnnaattnangttgaagtcttgaccttctctcttcaactccaaacacaagacatcatcatccatgggctgcctccgtctcccactgtccggagctgtcaacagagctcttttgaacctgaatgggtctgganctggggtttcagctcccagttcatccttctttgggagcagcttgaagaaggntnttggctcaagggtcnccaananaaagatttcctctggaagcttcaagnttgttgcngtagaanagaagaaaganatgaagagacncagcagacgc

SEQ ID NO: 292147 - DNA, 280 bp, Glycine max
  unsure (1)..(280): unsure at all n locations
cttaactcaacttctgctacccactctcttcttccaagtccaaccacgcttttctctacagtcatgggcaaggtcaagatcggaatcaacggatttggaagaattggccgtttggttgccagagtcgctctgcaaagagacgatgtggagctcgttgccgttaacgaccctttcattaccaccgattacatgacatncatgtttaaatacgacagtgttcacggacactggaagcatcacgatgtcaccgttaaggacgagaagacccttctcttcggtg

SEQ ID NO: 292148 - DNA, 277 bp, Glycine max
  unsure (1)..(277): unsure at all n locations
gtagcccaagatgactctgggagaagctcttgacgtatggtaacatgcttgtccaagaacaagagaatgtcaagagagtccaattggctgacaagtacttgaacgaggctgcacttggaaatgctaacgaggatgctattaacaggggaactttcttccaatcttgaattggaggcaaagcaaacttggcaagtaaatatttctgttcctgaaggttgtgctgatccaagtggctagaagttgtgatgggacttgcgtgtaacatcttagantctca

SEQ ID NO: 292149 - DNA, 276 bp, Glycine max
agccccactcaaccaccacaccactctctctgctcttcttctacctttcaagtttttaaagtattaagatggcagagacattcctatttacctcagagtcagtgaacgagggacaccctgacaagctctgcgaccaaatctccgatgctgtcctcgacgcttgccttgaacaggacccagacagcaaggttgcctgcgaaacatgcaccaagaccaattggtcatggtcttcggagagatcaccaccaaggccaacgttgactacgagaagatcgt

SEQ ID NO: 292150 - DNA, 274 bp, Glycine max
  unsure (1)..(274): unsure at all n locations
cntaccttcactgctgagggctttgancttantgttngngacaaattcatctggggcatttcctcctctcgcgcctgttgcttgaggacttggaaaaatccgattacccttcaaagcgcttgatcatcgttggttcaataacagggaacacaaacacattggctggtaatgtactcccaaggctaaccttggtgacttgaggggacttcagggtggtttgaatgggctaaacagctcagccatgattgatggtggagattcgatggtgccaagc

SEQ ID NO: 292151 - DNA, 284 bp, Glycine max
  unsure (1)..(284): unsure at all n locations
ctggccttgnngatnangtaaaagtttnnnctgccagtnatacactgtgccagnngcaatcantcccaccatcanagggttccttcaaatctgattntagaggagcatatcttgatggtgtcatcagatttctagtggacaataatggccccattaatggttatgtgtactcttacttcgcttacatgcaaaccctaaggacattagtcttgactatgcatttttaggttccttcggtggtagtgcaagatggttcacttggttaccgtaactctttgagcttc

SEQ ID NO: 292152 - DNA, 283 bp, Glycine max
  unsure (1)..(283): unsure at all n locations
cngtcatcgacgaggtccgctgcggcacctaccgtcaactcttccaccccgaacaacttcatctccggcaaggaagacgcccgccaacaattcgcccgcggccactacaccgttggcaaagagatcgtagatctgtgcttggatcgcgtccgcaagctccgccgacaactgcaccggcctacaaggcttcctcgtcttcaacgccgtcggggtggcaccggttccggtctcggatctctcttatcgagcgtctctccgtcgattacggcaaaaaatccaanta

SEQ ID NO: 292153 - DNA, 279 bp, Glycine max
  unsure (1)..(279): unsure at all n locations
cncgcggccacgatgaggaggagccaccgaaacctgtggttctgatcacaggatgttccacgggagggataggccacgcgcttgcacgcgccttcgctgagaagaagtgcagggtggtggccaccagcaggtcgcggtcgancatggcggagctggaacacgaccaaaggttctttttggaaganttggatgttcagtccgatgagagcgtgcgtaaggtggttgatgctgttgtcgacaagtacggtcgcatcgacgtgctcgttaacaacgccggtg

SEQ ID NO: 292154 - DNA, 272 bp, Glycine max
  unsure (1)..(272): unsure at all n locations
cacttttaagttaaatagtttttcattgtttcatttaatctacaatgggctgcttcaacaatggctctctcttcatcatcattggctggccaagctatcaagcttgccccctccacccctcagcttggtgttggaagggttagcatgaggaaaacagcctccaagactgtttcttctggaagcccatggtacggcccagaccgtgtcaagtattgggncccatctctggtgagcccccatctactcatggtgantcccaggtgactaggttg

SEQ ID NO: 292155 - DNA, 267 bp, Glycine max
  unsure (1)..(267): unsure at all n locations
gtttgtnttttctctcacctgaaantgtcttgctgcggtggtaatgtggttgcggaagctcctgcaagtgcggcaacggctgcggaggctgcaagatgtacccagacttgagctacactgagtcaaccaccaccgagaccttggtcatgggagtggcacctgttaaggctcaatttgagggtgctgaaatgggtgtgcccgctgagaacgatggctgcaatgtggaccaaatgctcctgcaaccctgcattgcaatgagtgttggga

SEQ ID NO: 292156 - DNA, 280 bp, Glycine max
  unsure (1)..(280): unsure at all n locations
tgaagaaagattcgaaacgaagaaagaaagcgttgtgaagaatgggcggaagagggacaantgatcggtgtccacagcgtagaggagtggaaggnacatctcaagaagggagaagagtccaagaaattgattgtggtggatnttacngcttctggtgcggtccangccgtttcattgccccaattcttgcagagtttgctaaaaagttgccgcntgtcaccttcctcaaggtggatgnggatgantggagactgtttccanggagtggggaatgaggcta

SEQ ID NO: 292157 - DNA, 278 bp, Glycine max
  unsure (1)..(278): unsure at all n locations
ttgccagtctttgtcattctttttcattcttaaatccatcaaatgaacctattgatatgactgaaacctttggattaaccaatactaaagctactccacttgagattttaattaagccacgattatcttctagttgttatgtatgaaagcatgtgattctgtcttagcggtttgtggaaaattcattgttaaactatgtgatctttttnnagtttcgacataatttancacgcaaacctgcattcccctnananacgatcacatagtttaacangtga

SEQ ID NO: 292158 - DNA, 278 bp, Glycine max
  unsure (1)..(278): unsure at all n locations
attgaagttaaaagccttagccttccctacaactccanacatccaagacatcnctcatccatggctgcctccgtctccactgtcggagctgtcaacagagctcttttgaacctgaatggttctggagctggagcttcagctcccagttcagccttctttgggaccagcttgaagaaggttattgcctcaagggtccccaacagcaaggtttccggtggaagcttcaagatgttgctgtagaagagagaaagagttgaagagacccagcagacgnnaag

SEQ ID NO: 292159 - DNA, 274 bp, Glycine max
  unsure (1)..(274): unsure at all n locations
atcaccccaactgtgagagaggatatggcaaaggaatacgagcaagctattgaagaactccagaaattgttgagggagaagagtgaactcaaagccacagctgctgagaaagtggagcagataacagcttctctgggaacatcatcatctgatggcatcccatcatcagaagcctcagacaggatcaaagctggtttcattcacttcaagaaggagaatcngacaagaatccagctttgtanggtgaattgccaaagccagagccccagtttnt

SEQ ID NO: 292160 - DNA, 272 bp, Glycine max
  unsure (1)..(272): unsure at all n locations
cttgggctcacagaatctcaccagacactcattgaacntggacttagananagggntattctcanagttgatngtgggtttagaagtggagtagatgtcatgatggcagcaataatgggtgctgatgaatatgggtttggttcagtggcaatgattgctactggatgtgttatggcccgcatttgccacaccaataattgccncagttggtgttgccagtccagagggaagagttgcgtgcacctttcctggtgttctgggggatcttgtca

SEQ ID NO: 292161 - DNA, 231 bp, Glycine max
  unsure (1)..(231): unsure at all n locations
tctatctatctataaagatggcgttgttggtngagaanacaagcagtggaagggagtacanngtgaaggatatgacgcaagccgatttcggaagattggaaatcganctggcggaggttgaaatgcccggcctcntgtcctcccgcaccgagttcggcccctctcaacccttcaagggcgctangatcaccggctccctccacatgacnatccaaancgncgttctcatcg

SEQ ID NO: 292162 - DNA, 277 bp, Glycine max
  unsure (1)..(277): unsure at all n locations
cttgctccctccagaagacgaagaagaagccacagagaatagttctcctactctncacccgnaaganaaaacatggcatctcacatcgttggatacccccgtatgggtcccaagagagagctcaagttcgctctcgagtctttctgggatggcaagagcagngccgaggatttgcagaaggtgtctctgatctcagggcatcccatctggnagcagatggctgatgtgggatnngtacatcccagcaacatttctcncatcngacangttctcgacg

SEQ ID NO: 292163 - DNA, 267 bp, Glycine max
  unsure (1)..(267): unsure at all n locations
gtcagttgaagacatcattgctttngattgntgataagtgtgatngagttattggacagctgactgaagactggggagaacagntgttcctctactttgagcaaagccggaggaangctttcagtaacatggctgttggttataacaacgtggatgttgatgctgcaaacaagtatggtgttgctgttggnaatactcctggagtgctcatgagacaacagctgagttggcagntcatgtcttggcagctgctagaaggatagttga

SEQ ID NO: 292164 - DNA, 267 bp, Glycine max
  unsure (1)..(267): unsure at all n locations
tgattgctagaatggaatttcgatgctcagtcatctcttttaccattctcttctctcttgctcttgcaggagagagccatgtccatgcatcgctacctgaggaagattattgggaagctgtttggccaaacactcccattcccactgcactgcgagagttctaaagcctctccctgcaggtnttgaaatcgatgaactccctaagcaattgatgatacacagtacccaaaaacatcttctataaagaagacttcatccaggcaaaac

SEQ ID NO: 292165 - DNA, 269 bp, Glycine max
  unsure (1)..(269): unsure at all n locations
cagtttgccaattttacttgcaaccaagccctcattgaagctgtggaaaggtttgaccganttcatgttattgattttgatattgggtttggagtacagtggtcatcttttatgcaagagcttgccttgagaagtagtggggcaccttcactcaaggtcactgccattgtgtcaccctccanttgtgatgaggttgagntcaatttcactagagagcntttgatccaatacgccaaggacatcaacgtgtcatcgagttaatgttttta

SEQ ID NO: 292166 - DNA, 283 bp, Glycine max
  unsure (1)..(283): unsure at all n locations
tactcttgttgccttcatggccaagccagtgtccattgaggtatggaacccaagtgggcaaatacagagttgtccagcaccacaccaatgcctggaactccgttggatcaatcttctcattcaaaatgatgttcgccttganatatgtaccgagaagaaaacgattttgtcagttgaagacatcattgctttgattggtgataagtgcgatggagttattggacagttgactgaagatggggagagagttgntctctgtttgagcaaagcggggangcaaagc

SEQ ID NO: 292167 - DNA, 268 bp, Glycine max
  unsure (1)..(268): unsure at all n locations
ttgccattctcatcctcttctttctctctctaccattgccatggatccctacaagcaccggccnctccagcgccttcaattctcccttctggactacaaattctggtgntcctatttggaacaacaactcctctttaaccgttggagctagaggtccaattctgctggaggattatcatcttgtggagaagcntgcaaattttgatagggaacgtatcccagaacgtgttgtccntgccagggcgctagtgcaaagggtttctttgag

SEQ ID NO: 292168 - DNA, 270 bp, Glycine max
  unsure (1)..(270): unsure at all n locations
aaaacaaaganaaaaaaaaccctagccaacacaaccatcatggccacctctgctattcagcaatcagcattcactggtcaaactgctctgaagcagctcaatgagttcgtccgcaagaccggtggcgccggcaaaggtcgcactaacatgcgccgcaccgtcaagagtgctcctncagagcatttggtatggccctgnaccgtcccaagtattgggtccattctccggagccagattccatcatacctgaccggagantccctggtgata

SEQ ID NO: 292169 - DNA, 243 bp, Glycine max
  unsure (1)..(243): unsure at all n locations
aagttaaaagccttagccttcactacaantccaaacacaaagacatcatcatccatggatgcctccgtctccactgtcggagctgtcaacagagctcttttgaacctgaatggttctggagctggagcttcagctcccagttcagccttctttgggaccagcttgaagaaggttattgcctcaagggtccccaacagcaaggtttccggtggaagcttcaagattgttgctgtagaagagaag

SEQ ID NO: 292170 - DNA, 270 bp, Glycine max
  unsure (1)..(270): unsure at all n locations
cagaaagcaagctcatcctagagttttaaaaatggcagcagcctccttccatggctctctcttccccatccttggctggcaaggccgtgaagctgggcccatcagncccccgaagtcgggagggtcagcatgaggaagaccgtcaccaagcaggcctcctccggaagcccatggtacggcccagaccgcgtcaagtacttgggcccattctctggcgagcccccgtcctacctcatggcgagttnccaggtgattacggctgggacatgc

SEQ ID NO: 292171 - DNA, 161 bp, Glycine max
caaggcagaaagcaagctcatcctagagttttaaaaatggcagcagcctcctccatggctctctcttccccatccttggctggcaaggccgtgaagctgggcccatcagcccccgaagtcgggagggtcagcatgaggaagaccgtcaccaagcaggcctc

SEQ ID NO: 292172 - DNA, 123 bp, Glycine max
  unsure (1)..(123): unsure at all n locations
cagtgtcatcatcagtgtgtagtttaagctagctttgctatggttacnnnctttgagatgagagtcttgatgaacagtaccattctgatgtattgctttccttgaaagttaatgcatgcttct

SEQ ID NO: 292173 - DNA, 168 bp, Glycine max
  unsure (1)..(168): unsure at all n locations
gnagcagcctggggtctggctcgctatgccgcaattgctcaggacaatggattggtcccaattgtggagccagagatcttgcttgatggggagcatggtattgacagaacttttgaagtagcaaaanaggtctgggcagaggttttcttctaccttgctgagaacaat

SEQ ID NO: 292174 - DNA, 167 bp, Glycine max
actggatgaacgatcccaatggtcctatgtactacaagggatggtatcactttttctaccaatacaacccgaacggtgcagtttggggtgacatagtttggggacatgcagtttcaagggacatgatccattggcttcaccttccactggcaatggtggccgatcaa

SEQ ID NO: 292175 - DNA, 160 bp, Glycine max
  unsure (1)..(160): unsure at all n locations
ggatctcttccgcaagtgcatggnaccagttgagaagtgtttaagagatgctaagatggacaagaggactgtccatgatgttgtacttgttggtggttccaccagaattcccaaggtgcaacaacttcctgcaagatttctttaatgggaaggagctctg

SEQ ID NO: 292176 - DNA, 175 bp, Glycine max
  unsure (1)..(175): unsure at all n locations
cagccgacaaccctatgcagtcagccgccgcgccggccaccagacttccgccgagtcctggggaaccggttcgtgcngttctcccgtatcccccgtgttnccggcggcggaacccatcgngccggccagggagccttcggaaacatgtgtcgtggaggacgcatgtttgccccga

SEQ ID NO: 292177 - DNA, 162 bp, Glycine max
gaccaacttactcatgtttacacatttatcctccgtccggatgcaacctacagcatcctgattgataatgtggagaagcaaactggtagtctctactctgattgggatcttctccctccaaagacaatcaaagatcccgaggctaaaaaaccagaagattgg

SEQ ID NO: 292178 - DNA, 160 bp, Glycine max
  unsure (1)..(160): unsure at all n locations
caagtagttgagaactaagaaggagaagcaaatggcttcctcaatgatctcttccccagctgttancantgtcaaccgtgccggtgccggcatggttgctccattcactggcctcaagtccatggctggcttccccaccaganagacnaanaatgacatt

SEQ ID NO: 292179 - DNA, 166 bp, Glycine max
  unsure (1)..(166): unsure at all n locations
gacgattggntcctgtgttgcctaccnaccaaacggtattcgtgtngctagtcagacncattccatccaggcctctttgttggggacgctgnnggatttcaaagtcgnacacgtganccacntnagtcgtccatcataanggcntcctgtggnacacgtntggnga

SEQ ID NO: 292180 - DNA, 164 bp, Glycine max
  unsure (1)..(164): unsure at all n locations
aataaaccgaatgagagnattaacctcttcttcttccactttnattccaaagnagttattccttnttcttcttcctctccattctcttcgctcttngatcctcgtcngggggctgctncgaatacnacnancannacgcgcngatggcnacgataggaggntta

SEQ ID NO: 292181 - DNA, 163 bp, Glycine max
  unsure (1)..(163): unsure at all n locations
aaaacactcataacacaaagcacaaagcaaagctcatccttgagttaaaaaatggcagcagcttcttccatggctctctcatccccatcnttggctggcaaggccgtgaagctgggcccatcagccccagaagtgggaagggtgagcatgaggaagaccgtca

SEQ ID NO: 292182 - DNA, 194 bp, Glycine max
  unsure (1)..(194): unsure at all n locations
ggacacagtgcttgtggtggtattaaggggcttctgtctttcccatatgatggaacctactctactgattttattgaggagtgggtcannttggcttgcctgcaaaggcaaaggtgaagacacaacatggggatgcaccttttgctgagttgtgctcacactgtgagaaggaagctgtgaatgtttcccttgga

SEQ ID NO: 292183 - DNA, 191 bp, Glycine max
  unsure (1)..(191): unsure at all n locations
gcagaatatccaacaaggattgcnggtgaaatcaagtctttctcaactgatggctgggtagcaccaaaactttctaagagaatggataaatttatgctctatatgctgacagctggcaaaaaagccttggttgatggtggaattactgatgatgtaatggatgagtnaaataangaaaagtgtggagttct

SEQ ID NO: 292184 - DNA, 196 bp, Glycine max
tcttcactttaaagttacatagtttttcattgttttacttaatctacaatggctgcttcaacaatgactctctcttcatcatcattggctggccaagctatcaagcttgccccctccacccctgagcttggtgttgggaagggttagcatgaggaaaacagcctccaagactgtttcctcaggaagcccatggtac

SEQ ID NO: 292185 - DNA, 192 bp, Glycine max
  unsure (1)..(192): unsure at all n locations
agaacaagtagttgagaactaagaaggagaagcaaatggcttcctcaatgatctcttccccagctgttaccantgtcaaccgtgccggtgccggcatggttgctccattcactggcctcaagtccatggctggcttccccaccagaaagaccancaatgacatnacctccattgctagcaacggtggaagag

SEQ ID NO: 292186 - DNA, 186 bp, Glycine max
  unsure (1)..(186): unsure at all n locations
ggtaattggtntgagagatgttattcctccacncnngcgtannagagtttaatgatgtctacatagccactgaactcatggatactgatcttcaccatatcattcgctccaatcaaaatctgtcagaggagcactgccaatactncttgtaccagattcttcgtgggttaagtatatacatnctgc

SEQ ID NO: 292187 - DNA, 263 bp, Glycine max
  unsure (1)..(263): unsure at all n locations
ctcttcaaaagggagaagaaaaggaaaganaactctcaaaaaactattatagcaatggcagaacaaaaccaaaaccaaacaactgaagctggaaggcaccaagaggttggtcacaagagccttctccagagtgatgctctttaccagtatattctggagacaagtgtctacccaagagaacctgaatccatgaaagaactgagagagttgacagcaaaacacccatgggaacatctgacaacctctgcagacgagggcagttc

SEQ ID NO: 292188 - DNA, 269 bp, Glycine max
gggaatcaaccccatcatgatgagtgctggagagttggaaagtggaaatgcaggagagccagcaaaactgatcaggcagagataccgtgaagccgcagacttgatcaagaagggaaagatgtgtgctctcttcatcaacgatcttgatgcaggagctggtcgtcttggtggaaccacccaatacactgtcaacaaccagatggtgaatgccaccctcatgaacattgctgataaccccaccaatgtgcagcttcctggtatgtataaca

SEQ ID NO: 292189 - DNA, 269 bp, Glycine max
  unsure (1)..(269): unsure at all n locations
ggnagttgtaaattaagagcatggctgcacaagctcttgtatcatcatcatctcttaccttctcagccgaggctacaagacaaagtcttggaccaagatcactccaatctccatttggcttctcaagaaaagcctcctttcttgttaaggcagctgctactccccctgtcaagcaaggatcagacagacctttgtggtttgcatcaaagcaaagtctttcctacttggatggcagccttccgggtgactatggattgaccctctgggac

SEQ ID NO: 292190 - DNA, 267 bp, Glycine max
  unsure (1)..(267): unsure at all n locations
caattttcttctttctctctcccttagtcaaagggactcattgttcttctcccaggttatttngaaaagcaaaatggtgaagatttgctgcattggtgctggatatgtggggggtcctactatggcagtcattgcacttaagtgcccatccattgaagttgctgttgttgatatctctaaatcccgcattgcagcctggaacagtgaccancttcctatctatgaacctggccttgatggtgttgtgaagcaatgccgtggcaagaa

SEQ ID NO: 292191 - DNA, 274 bp, Glycine max
gttacatagtttttcattgttttacttaatctacaatggctgcttcaacaatggctctctcttcatcatcattggctggccaagctatcaagcttgccccctccacccctgagcttggtgttggaagggttagcatgaggaaaacagcctccaaaactgtttcctcaggaagcccatggtacggcccagaccgtgtcaagtacttgggcccattctcaggtgagcccccattcctatctcactggtgaattcccaggtgactatggttgggaca

SEQ ID NO: 292192 - DNA, 268 bp, Glycine max
  unsure (1)..(268): unsure at all n locations
caacaganctccactgagcttgancagctctgaagctggagattcggttcccagttcagccttctttggcacaagcttgaagaaggttactgcctcaagggtccctaacgtcaagatttcttctggaagtttcaaaatcgttgcggcggagaaagagattgatgagcaacaacagacaaacaaggacagatggaaaggncttgcctatgatatttcagatgaccagcaagacatcacaagaggaaagggtatggttgattccctcttc

SEQ ID NO: 292193 - DNA, 268 bp, Glycine max
gtgtttggaaagccaaagacagacacagatttcctgccatacaatggagatggattcaaactatcgattccctcaaagtggaacccaagcaaagaggttgagtacacaggtcaggttgttagatatgaggataactttgattcaaccaccaacgtggttgtcaccatcactccgactgataagaagtctatcactgactatggttcacccgaagagttcctctctaaggtggattatttactaggaaaacaggccttcttcggcgaaa

SEQ ID NO: 292194 - DNA, 268 bp, Glycine max
tcccacaagcttcccttgctcgccagaagtacaccgatgagtctgaggctactatcaacgaacagatcaatgtggagtacaatgtttcgtacgtttatcatgcgatgtttgcctacttcgatagggacaatgttgcgctcaagggtcttgccaagtttttcaaggagtcaagcgaggaggaaagggagcatgctgagaaattgatggaatatcagaacaagcgaggtggaaaggtgaagttacaatctatagtgatgcctcttactga

SEQ ID NO: 292195 - DNA, 267 bp, Glycine max
aagaggattacccttaccgtggtgttgatggtagatgtgacacatataggaaaaatgctaaggttgtttctattgatgactacgaagatgttcctgcctatgatgagttagctttgaaaaaggctgttgcaaatcagcccgtcagtgtagctattgaaggagggggcagggaatttcaattatatgtatctggtgtattcactgggagatgtggcacagcactagatcatggtgtcgtggctgttgggtatggtacagctaatggtc

SEQ ID NO: 292196 - DNA, 269 bp, Glycine max
ctcttagtcccaattttctagggttttattcattttccgatggcttctgcagatgttgagtaccgttgctttgtcggtgggctcgcttgggccactgacgaccatgccctcgagagagccttctctcagtacggcgaaatcgttgaaacgaaggtctgtttgttgcaggcatcacatctgatctcacacgattcggattcggaattttctcgatcccgttctgatctgtgatctctgatctgtttgcgttacttgatctatgatacttg

SEQ ID NO: 292197 - DNA, 272 bp, Glycine max
  unsure (1)..(272): unsure at all n locations
gattctgaggaggagctgaaagaggcattccgggttttcgacaaggaccagaatgggttcatctctgctgctgagctccgccatgtgatgaccaacctcggggagaagctcaccgatgaagaggttgatgagatgattcgcgaggccgatgttgatggcgatggccaaataaactacgaggagttcgttaaggtgatgatggccaagtgatcatcacattatggccacaaaaacctaaatgaagaaatgttgattaanagganacgacanaa

SEQ ID NO: 292198 - DNA, 265 bp, Glycine max
  unsure (1)..(265): unsure at all n locations
tggatgagacagccaaaattggcgagggatgcctcattggacctgatgttgctattggtcctggctgcgttattgagcaaggtgttagactcaaaagctgcncaataatgcgtggagtccgagttaagaagcatgcttgtgtatccagcagtattgttgggtggcattcaactgttgggcaatgggctcgagtggataatatgaccatcctggagaagatgtccatgtangtgatgaaatttacagcaatggtggtgttgttttg

SEQ ID NO: 292199 - DNA, 246 bp, Glycine max
  unsure (1)..(246): unsure at all n locations
aattgttgtaactttttgattcctaaattctctaaaattcganattctaattcncgttaggggaaagagattgtttgtgtgtgagtgagtatggctggaaaaggcgagggtcctgctatcggaatcgatttgggaacgacgtactcttgcgtcggcgtgtggcaacacgatcgtgttgaaatcatagccaacgatcagggtaacagaactaccccatcctacgtggcttcaccgacacagaaggtt

SEQ ID NO: 292200 - DNA, 268 bp, Glycine max
  unsure (1)..(268): unsure at all n locations
cacaagccaccccctcccgacaactacaccatcgccctccacaaggccctcctcttcttcaacgcccagaaatccggaaagctccctncgccacaacaatgtttcctggagaggcaactccgggttgcaggacggcaagggtgacggcgtgccgcccgtcattaaggatctggtgggcggttactacgacgccggcgacgccataaaattcaacttccccatgtccttctccatgaccatgctgagcttggaacgtgatcgagtacag

SEQ ID NO: 292201 - DNA, 267 bp, Glycine max
ggcaggaactggtttctccacctcctgtctttcctcttccagggaaactacctggaactgtaaggagaagattgtcattcataaaagcagaagtgaagtatgtgaacgctgaaaaggctaaggaacttgtggaagctgatggatatactgctcttgatgtgcgggacaaaactcagtttgagcgagctcacataaaatcttgttctcatgtgcctctttttgttgaaaacaaagacaatgatcccggtactattataaaaaggcagc

SEQ ID NO: 292202 - DNA, 265 bp, Glycine max
ttgtgtaccacttgcttcttgcaatgaacttatatgtaaagatttctttctttacatggagagtaatcaattgggactgtttgctacttcaacggctcaaattcatgatgctcctgctgttggaggagctgtccatggtgttccttcaattgagaagataactttcctcctcttgagactggaagatggagagatcttggacaagaaggtcttcagtaatgacttcgttaatttaacccataatatgggtgtctctgtatgatga

SEQ ID NO: 292203 - DNA, 271 bp, Glycine max
gtccttcatggggacgcgcctcctggaggcccattccggggcggggcgggtgcaggcccggttcgggtttggcaagaagaaagccgccgccccgaagaaagtttccagggggtcgggctctagctccgataggcccctgtggtatccgggcgccaaggcgcccgagtacctggatgggagccttgtcggagactacgggttcgacccatttgggctagggaagcccgccgagtacctgcagttcgagttggactcgctggaccagaacctt

SEQ ID NO: 292204 - DNA, 271 bp, Glycine max
gcagactatcccatctgcaacacttacgctggaacttgtctcaggagcaagaacaacccctttggagtgaaggcattaaggcgtactccagcgaaaccccattggaccttcggacgtaagaacaaggtcagcagtgcttaagcagtttaaggaaatgtgaacgtgcagaaggagccaatgatgaagtaaaagggaagacgaaggactaaagcaccagctggatgcacttcccccttcttcacataatgctgcacgtaacataaagatcttt

SEQ ID NO: 292205 - DNA, 264 bp, Glycine max
tgccgttttcttcttcatcatagtcgtggccgtgtcgcagcaaaaccaaaccacatattaacttgtttgctctaagtcatggctctgatcttgcacgcaaccaaagcaaacaagaatgctttcaagactctgattgcggcagagtacagtggcgtccaagtggaattggcccctaatttcgagatgggtgtctctaatagaactcctgaattcctaaaatgaatcccataggaaaggttcctgtcttggaaacgcccgatggtc

SEQ ID NO: 292206 - DNA, 265 bp, Glycine max
  unsure (1)..(265): unsure at all n locations
ctctctctcaccaaagccttcctagaacgaaaaaaaaaagaagagcaattttccctcaccaaagaagaagaagcaaacaatggccgatcaacttaccgatgaacagatctccgagttcaaggaagccttcagcttgttcgacaaggacggcgatggttgcatcacaaccaaggagcttggaactgttatgcgttcattggggcaaaacccaactgaggcagagctccaggacatgatcaatgaagtggatgctgatggganggta

SEQ ID NO: 292207 - DNA, 266 bp, Glycine max
catttctccatttccattttctctctcacttttcaagaatcgtaagctatgggaaagtcttacccaactgtgagtgctgattaccagaaggccgttgagaaggcgaagaagaagctcagaggcttcatcgctgagaagagatgcgctcctctaatgctccgtttggcatggcactctgctggaacctttgacaagggcacgaagaccggtggacccttcggaaccatcaagcaccctgccgaactggctcacagcgctaacaacgg

SEQ ID NO: 292208 - DNA, 264 bp, Glycine max
ctcaacttctgctcttccaactcctacaacgcttttctctgcactcatgggcaaggtcaagatcggaatcaacggatttggaagaattggccgtttggttgccagagtcgctctgcaaagagacgatgttgaactcgttgccgttaacgaccctttcattaccaccgattacatgacatacatgtttaaatacgacagtgttcacggacactggaagcatcacgatgtcaccgttaaggacgagaagacccttctcttcggtga

SEQ ID NO: 292209 - DNA, 261 bp, Glycine max
  unsure (1)..(261): unsure at all n locations
cgctggctttgcagctgagacncctgcaattgttgccgggggagtggttgttttggcagtgccattggttttgtctcaggttttcaagaagcctaaggcttggggtgttgagtctgctaagaacgcgtatgctaaacttggggctgatgggaatgctcagctgcttgacataagggcactggtggagattaggcaagtggggtccccagatgttgggggtctaaagaagaaagccgtgtcaatacctataagggtgatgat

SEQ ID NO: 292210 - DNA, 268 bp, Glycine max
  unsure (1)..(268): unsure at all n locations
cctctcccttcaagatgcagatcttcgtcaagaccctcaccggcaagaccatcacccttgaggtggaaagctctgacaccatcgacaacgtcaaggccaagatccaggacaaggaaggaatccccccggaccagcaacgtctcattttcgccggaaagcaacttgangacggccgtacccttgctgactacaacattcagaaggagagtactcttcacctcgtcctccgtctccgtggtggcatgcagatcttcgttaagacactcac

SEQ ID NO: 292211 - DNA, 266 bp, Glycine max
  unsure (1)..(266): unsure at all n locations
cttttgagtcaatttgaacatgagaatatagttcaatacattggcaccgaaatggatgcatcaaatctgtatatctttattgagcttgtaaccaaaggttcccttcgaaacctctaccagagatataatcttcgagattctcaagtatctgcctatacaagacagattttgcatggtttaaagtatcttcatgaccganatattgttcacagggatattaaatgtgcaaatatattggtggatgcaaacggatctgttaagcttgc

SEQ ID NO: 292212 - DNA, 265 bp, Glycine max
  unsure (1)..(265): unsure at all n locations
ctaaggtttnctgtaggagataagattgcagtagagctaagtgctaacacctgcagtgaacaatggcctctgcatcagcatctctgctcaagtcttcacttgttcttgacaagtctgagtgggtgaagggacaaacccttcgccaaccttctgcatcagttgngagatgcaaccccaccaccccatcaggcctcaccatcagagctggttcctatgctgatgagctcgttaagaccgcgaaaacagtggcttcaccagggagggg

SEQ ID NO: 292213 - DNA, 263 bp, Glycine max
  unsure (1)..(263): unsure at all n locations
gcaattgangttgaagtcttgcccttctctcttcaactccaaacacaagacatcatcatccatggctgcctccgtctccactgtcggagctgtcaacagagctcttttgaacctgaatgggtctggacctggggtttcagctcccagttcatccttctttgggagcagcttgaagaaggttattggctcaagggtccccaacacaaagatttcctctggaagcttcaagattgttgctgtagaagagaagaaagagattgaag

SEQ ID NO: 292214 - DNA, 263 bp, Glycine max
  unsure (1)..(263): unsure at all n locations
caagtntgctcgttacagcaagtttgangagtgtggcagattaaganatcgagatctgcttagttctgccaatgtaatgtgtgctctaagttttgaccgtgatgaggatcacattgcagcaggaggagtttcaaagaaaatcaagattttcgaccttaatgctattgcaagcgattctgttgacatccagtacccagtaattgagatgtcaaataaatcanagcttagttgtgtgtgctggaacacttacattaannatcatc

SEQ ID NO: 292215 - DNA, 269 bp, Glycine max
  unsure (1)..(269): unsure at all n locations
ctctctctccaatggccaaagacctcgaaacggagattcaaagtgggttgcctcacaaggactaccacgnccccaccccccgccccattctacgaccccgccgagctccgaaagtggtccttcttccgagccctcatcgccgagttcgtcgccaccctcctcttcctctacgtcaccatcctcaccgtcatcggctacaaccaccagacagccaccgccgccgagccctgcagcggcgtcggcgtcctcggcatcgcttgggcctttgg

SEQ ID NO: 292216 - DNA, 263 bp, Glycine max
  unsure (1)..(263): unsure at all n locations
ggtctgaaatccctattgtccaggttgatcctgtttttgagggactggatggtggaattggcagcctggtgaagtggaacccggttgcaaatgttaatggtctagacatatggaacttccttaggaccatgaatgttcctgtaaattcattgcattcccaaggatatgtttcgattgggctgtganccatggnacaanggccggttttacccggacaacatgaagagcaggaaggtggtggtgnaagatgccaaccnaggntt

SEQ ID NO: 292217 - DNA, 264 bp, Glycine max
  unsure (1)..(264): unsure at all n locations
ctctcacgcgccggcgctgtactcgctccgcggtgatacagttcaacggaagcggcggcacgaaaaacgacaaggaccttcgagcgggtgtngcgctttgcgcacgcgcggctttcctcggtcacatcgacgcgcttcgggagcttggtcattgccttcaagacggttacggcgttaaacaaaacgtaacggagggtcgacggtttttggtgcaacccaacgtgcgtgnaactcgccgncngtgcnctccgccggnataaaaag

SEQ ID NO: 292218 - DNA, 243 bp, Glycine max
  unsure (1)..(243): unsure at all n locations
gagaactgcgtangacccatcacagaagatcgcgatctactgaaacatgtctggggaacaggaagaaaacgccgcagagctcaaaattggagacgagtttttgaaggcaaagtgcttaatgaactgtgaagttgcattgantcttgagcacaagtatgagcagcttcaacagacatccgatgatcccatgaatcaagtttctcaggtatttgaaaagtcatgcagtatgtgaagcttcagccg

SEQ ID NO: 292219 - DNA, 265 bp, Glycine max
gtgcatagcatattccagtgtttttcatttcatcgtgcattcaatggccaccacagcagctctatccggaaccatggtgagcacctccttcatgaggaggcaacctatgaccaccacaagcctaaagacattccccaacgttggtgaagctctttttggtctgaaaagtggacgaggtggtcgtgtcacttgcatggcctcgtacaaggtgaagctcataaccccagaaggagaagtggagtttgaatgcccagatgtgttttca

SEQ ID NO: 292220 - DNA, 263 bp, Glycine max
  unsure (1)..(263): unsure at all n locations
gatcgagataactagaaaagtgtgatgaaaatgaaggtccttgttttcttcgttgctacanttttggtagcatggcaatgccatgcgtacgatatgttccctctccgaatgaacactggctatggtgcccgtactccggaggtgaaatgcgcaagttggaggcttgctgtggaagcacacnccatctttggctttgagaccatccgnnagagtgcgttaaagcancaaaggaatncatccanggcgaacaatatgatcngncc

SEQ ID NO: 292221 - DNA, 262 bp, Glycine max
  unsure (1)..(262): unsure at all n locations
cgtgaagctgcagacatgatcaagaagggaaagatgtgcgctctcttcatcaacgatcttgatgcaggagctggtcgtcttggtggaaccacacaatacactgtgaacaaccagatggtgaatgccactctcatgaacattgctgataaccccaccaatgtgcagcttccaggtatgtacaacaaggaagagaacccccgtgttcccattcattgtcaccggtaacgatttctcaacactctatgcactctcatggggnggg

SEQ ID NO: 292222 - DNA, 264 bp, Glycine max
  unsure (1)..(264): unsure at all n locations
ccttcatcaaatggcttctcacgacggcatctccgctgcttcttcagattccgtcttcaatccacctcgttcgtgctcccgaagatcctatcctcggggtaactgttgcttataacaaagatccaagtccagttaanctcaacttggganttggtgttaccgaactgaggaagggaaaacctcttgttttgaatgtagtgaggcgagttgagcagcaactcataaatgangtgtcncgcaacaagnatttnccncgtggggggg

SEQ ID NO: 292223 - DNA, 191 bp, Glycine max
  unsure (1)..(191): unsure at all n locations
aacatgggtggcatcagcctcgaagaaataaaaaacgagaacgtcgatctggaacggattccaatagaggaagtgtttgagcagctgaaatgttcaagagcaggtctaacatcagaggaaggggccatcggctccaagtctttggaccaaacaattggaagagaaaaaagggagcagttttggatttnggg

SEQ ID NO: 292224 - DNA, 266 bp, Glycine max
  unsure (1)..(266): unsure at all n locations
ggaccagtggactctgcagagaacagaaatgccttttccagaattttgtttcggccacgtattcttattgatgtgagcaagatagacatcacaactactgtcctgggcttcaaaatatccatgccaatcatgcttgccccaacagccatgcagaaaatggctcatcctgagggagaatatgcaacagcaagagctgcatctgctgctggaacaatcatgactttgtcttcatgggctacttcaagtgtgnaagggngttcancagg

SEQ ID NO: 292225 - DNA, 262 bp, Glycine max
  unsure (1)..(262): unsure at all n locations
cactaccgtaggcgctggtacactggatcgtgacttccccgcatacgtggcgctccggaaatggactcaacttctcccggcgtttcgctttaccgcggtaacgctttgccggattcttctttgcctttggtttatgcagggaatgtgagtaatggtgctatgaatgggaacttgtgtatcacgggaacgttgtctcctgagaaagttgctgggaanatcgtgttgtgtacacgtggttnnccgnaaggntnaaaaaggcngt

SEQ ID NO: 292226 - DNA, 257 bp, Glycine max
  unsure (1)..(257): unsure at all n locations
gaacaagtagttgagactaagaagganaagcaaatggcttcctcaatgatctcttccccagctgttaccactgttcaaccgtgccggtgccggcatggttgctccattcactggctcaagtccatggctggcttccccaccaggaagaccaacaatgacattacctccattgctagcaacggtggaagagtgcaatgcatgnggtgtggccaccagttgncaagaaagaagtttgagatccttccnantgcagacct

SEQ ID NO: 292227 - DNA, 261 bp, Glycine max
  unsure (1)..(261): unsure at all n locations
gaagagacttgcagacttttgtgcctcagtgtacaggatgctgagaagcatctcttcagatatggttgtgtctaaggcgctggtggcaaagattgatagaccattgggaatagtctgtttccaaacagcnaaggatagcaatgacattcttaactcatgggcagcaaacttggagaaattacttgatcttgtggagaaaagttgtcatcagatacncaaggnanccatggtccacaaagccgctttgnaaggtnannaggt

SEQ ID NO: 292228 - DNA, 259 bp, Glycine max
  unsure (1)..(259): unsure at all n locations
ggagtncgactcctgtaggttgctgnaaaaactgccagccatgccaacaagacattgagaattactgcagcaagaagatctggtcttacaatgatgtttatntcgatgganaacccacacagggtggctttgctgaaaccatgatcgttgagcaaaagtttgtggtgaagattccagagggtttggcgccagagcaagtggcaccattnctgtgtgcgggtgtgacagtgtacagtccactggtacacttgggctgana

SEQ ID NO: 292229 - DNA, 161 bp, Glycine max
ttccaatatattccattctctctgtgtatttccctacctctcccttcaagatgcagatcttcgtcaagaccctcaccggcaagaccatcacccttgaggtggaaagctctgacaccatcgacaacgtcaaggccaagatccaggacaaggaaggaatcccc

SEQ ID NO: 292230 - DNA, 202 bp, Glycine max
aagtagttgagaataagaagaaggaaatggcttcctcaatgatctcctccccagctgttaccaccgtcaaccgtgccggtgccggcatggttgctccattcaccggcctcaaatccatggctggcttccccacgaggaagaccaacaatgacattacctccattgctagcaacggtggaagagtacaatgcatgcaggtgcc

SEQ ID NO: 292231 - DNA, 260 bp, Glycine max
  unsure (1)..(260): unsure at all n locations
ggttctacaaggnggaagagaagaatgatcctgaatttgcaaagaagttggcttctctagctgatctctatgtgaatgatgcatttggcactgcccacagagctcatgcttctacagaaggagttgccaaatacttgaagccctctgttgcaggattcctaatgcagaaggagcttgattatctagttggggctgtgtcaaaccccaagagaccatttggctgcnattgtcggtggancgaaggtnttctncaagattgg

SEQ ID NO: 292232 - DNA, 215 bp, Glycine max
tctgaatgcagatcagagggaaatcaaaatattacagaatctttgtggagggcctaatattgtacagttgcttgacattgttagagaccaacagtcgaagaccccaagtcttatatttgaatatgtcaataacactgattttaaagtgctctatcctacattgtcagactacgaaatacgatattatatttatgaacttctgaaggcatggatta

SEQ ID NO: 292233 - DNA, 261 bp, Glycine max
  unsure (1)..(261): unsure at all n locations
gtagttgagaactcagaaggagaagcaaatggcttcctcaatgatctcttccccagctgttaccactgtncaaccgtgccggtgccggcatggttgctccattcactggcctcaagtccatggctggcttccccaccaggaagaccaacaatgacattacctccattgctagcaacggtggaagagtgcaatgcatgcaggtgtggccaccagttggcaacnagaagtttgagactctttcctacctgccagccttgatga

SEQ ID NO: 292234 - DNA, 187 bp, Glycine max
  unsure (1)..(187): unsure at all n locations
gaagctggggacggagtatgtggatctttatctgattcattggccagtgaggctgagacatgatcttgncaaatcctactgtttttaccaaggaagatgtgctgccctttgatatagaagggacatggaaagctatggaagngtgttacaagttgggaatagcaaagtccattggccttgncattac

SEQ ID NO: 292235 - DNA, 172 bp, Glycine max
  unsure (1)..(172): unsure at all n locations
catggatctcttcaggaaatgtatggagccggtggagaaatgtttganggatgcntcagatggacaaaagaagtgttgatgatgttgtccttgttggtggttctaccagaattcccaaggttcaacaactgctgcaggacttctttaatggaaaagagtttgcaagagcatt

SEQ ID NO: 292236 - DNA, 290 bp, Glycine max
  unsure (1)..(290): unsure at all n locations
ttcttcttcttttgttgttctgtgtttgtgtttgttttttctctcacctgaaaatgtcttgctgcggtggtaactgtggttgcggaagctcctgcaagtgcggcaacggctgcggaggctgcaagatgtacccagacttgagctacactgagtcaaccaccaccgagaccttggtcatgggagtggcacctgttaaggctcaatttganggtgctgaaatgggtgtgcccgctgagaacgatggctgcaaatgtggaccaaatgctcctgcaacctgcattncaagtgag

SEQ ID NO: 292237 - DNA, 291 bp, Glycine max
  unsure (1)..(291): unsure at all n locations
ggcagcaacaacaagttctggtactcttaaagcaactcctttccttggccaaggcaagggtgccaatgccaatgctcttagggatgttgtctccatgggaactgggaagtacaccatgggcaatgatttgtggtatggaccagacagagtgaaatacttgggacccttctcagctcagaccccttcatacttgaaaggagaattccctggngattatggatgggacactgctggcttatctgctgacccagaagcatttgccaagaacagggctctgaggtgatccatggg

SEQ ID NO: 292238 - DNA, 293 bp, Glycine max
  unsure (1)..(293): unsure at all n locations
cttacaatctcagctcatagcattcttcttcttccaacgagaatangtctttgtgttccaaatggctcgtacgaagcaaacagcaagaaagtccaccggaggaaaagctccaaggaagcagcttcgccaccaaggcagcacgcaagtccgctccggcgacgggcggcgtgaagaagccccaccgtttcaggccggggacagtggctctgagggagattcggaagtaccagaagagcacggagcttctcataaggaagcttcctttccagaggctcgtnggaaatcgctcaaga

SEQ ID NO: 292239 - DNA, 285 bp, Glycine max
  unsure (1)..(285): unsure at all n locations
atcggtatctttcagggaatgtgatgaacagacagaggttacaattacttggtgttgcctccatgatgattgcctctaaatacgaggaaatttgtgcgcctcaggtggaggaattttgttacataactgataacacatacttcaaagaagaggttttgcagatggaatctgctgtcttgaattttctcaagtttgaaatgacagccccaacagtaaaatgtttcttgagaagatttgtacgtgcagctcaaggagtcgatgaggtccctncctacaactagagtg

SEQ ID NO: 292240 - DNA, 292 bp, Glycine max
  unsure (1)..(292): unsure at all n locations
caaaggcattcgtggagcactactacagcaccttcgacaccaaccggaacggtttagcgaatctgtatcaggagggttccatgctgancttcgaagggcagaagatccagggcgcttccagcatcgtcgctaagctcacttccctccctttccagcagtgccaccactccatctccaccgtcgactgccagcctccggtgtcaacgctggcatgttgtctttgtcagnggcanctccagctcgctggcgaacagcacactctcaattcagccagatgtnattgataccaagc

SEQ ID NO: 292241 - DNA, 288 bp, Glycine max
  unsure (1)..(288): unsure at all n locations
gtgtggttnaaagntaagaagtagcaaagatgtttccattcgggcacaagggnccaaaagataaaggggactatggtggttatgcagaagaatgtgttggatatcaacagcatcaccagtgttgacgggatcgtcggcaccggcttaganttcttaggcagtgcactcgatacagttacttttttagcctcctccatctccatccaacttattagtnctaccaaggctgatggtgggaaaggaaaagttggaaaggctacaatttganaggangtancttaccaacca

SEQ ID NO: 292242 - DNA, 288 bp, Glycine max
gcgagtgacgcatgctatgtacaagtcatgcaatgcatcatcccctttgacaaccatgagcacaggcaatgacaccataaagataaccaactatggtcaccacttcttcttgtgtggcatccctggtcactgccaagcaggacagaaggttgatattaacgtggtgaaactatctgctgcagctgcaccgtcaccaacatcagcaatggcctctccagttccacctgccaatgtacctgcaccttctcctaacaatgcagccccattcattgtgtaaagggagctggt

SEQ ID NO: 292243 - DNA, 287 bp, Glycine max
ggtttgattaggcaaccaaagtatggtcatctaaaggagcttcataaggccatcaagatgtgtgaacgggctttagtttcagctgacccagctgttacttcaatggggaacttccaacaggctcatgtatacactacaaaatctggagactgtgctgctttcctctcaaactttgatacaaaatcttctgttagagtgatgttcaacaatatgcactataacttacctccttggtccatcagcatcctccctgattgcagaaatgttgttttaatacagcaaaagtt

SEQ ID NO: 292244 - DNA, 283 bp, Glycine max
aatttctatctctcttatactctcactactctctttgctctttcttttctccactatggctgcacaagaaaacaacttccaagactacttgcctgtgatggccaacaagcttggtggggatggcctaattgatgaactgtgcaatgggttcgatcttttgaaggattctgataaaggggtcatcacttttgagagcctcaagaggaattcttacttgcttggtcttcagggtctcagtgatgaggatctcgctccatggttttggaaggactttgatggtgac

SEQ ID NO: 292245 - DNA, 290 bp, Glycine max
aacagccaaagcatggcttctctctcttgctccgccaacgaccttgccccactcttcaacgacaccgccgccgccaactacctctgcgcccaattcgattccatttctagaaagctcgccgaaacaacctacgccgtcgacaacacctaccttctgttttcagcgtatcttgtcttcgccatgcagctcggcttcgccatgctctgcgccggctccgtcagagccaaaaacaccatgaacatcatgctcaccaacgtcctcgacgccgccgccggggtctctcctatacc

SEQ ID NO: 292246 - DNA, 293 bp, Glycine max
  unsure (1)..(293): unsure at all n locations
tatgatctctaccagtccacacgactagaaaagnttatcacagcctatgctatcctcttgaaagcaagtggtgaaacccccgtgacttggaaaagggcancaaccatggatgaggtcctccaggaggcagatataattagtcttcatcctgtcttggataaaaccacttatcatctantcaacaaggaaagactagctaagatgaagaaggaagcattcttataaatgcagtagaggactgttattgatgaagctgcattgtggagcattaaaacaaacccgatgtttcgagt

SEQ ID NO: 292247 - DNA, 274 bp, Glycine max
cttgttttttaaacaggagatggaactttcacttgttggccttcagaatgctggcaagacttctcttgtcaatgcaattgctactgggggctacagtgaggacatgattccaactgttggtttcaacatgagaaaagtgactaagggaaatgtcacaataaagctttgggaccttgggggacagaggaggttccgatcaatgtgggagcgatactgtcggggtgtctctgctatcgtatatgttgtagatgccgctgaagagacagtgttccaa

SEQ ID NO: 292248 - DNA, 287 bp, Glycine max
  unsure (1)..(287): unsure at all n locations
agcacaccgatgttgctgtcctcttggacaatgaagccatttatgacatctgcagacgctctctncgacattgagcgtcccacctacaccaacctcaaccgccttgtttctcaggtgatttcatctttgactgcttccttgaggtttgatggtgccctgaatgtggatgtgactgaattccagaccaacttggtcccataccctagaatccatttcatgctttcctcctatgcaccagttatctctgctgagaaggcctaccatgaacagcttcagtggcagaaata

SEQ ID NO: 292249 - DNA, 286 bp, Glycine max
  unsure (1)..(286): unsure at all n locations
acctccaagcgctttcttcgttttcatgtccgagttcagagagcagtttaagaaggagcatcctaacaacaaatccgtcnctgttgtcggtaaagctggtggtgacaaatggaaatcgctgtctgatgctgaaaaggcccccttcgttgccacggccgaaaagaancaacaagagtatgagaaaactattttggcttacaataagaaattggaggggaagaattcagagnnaagacgagtctgacaagtcaaagtctgaagtcaatgacgtgaggaagatgaggag

SEQ ID NO: 292250 - DNA, 280 bp, Glycine max
  unsure (1)..(280): unsure at all n locations
agaaataagggaaaaatggtgtcgctgaaactgcagaagcaccntctccgcaaagcntgctcaagtgcggcagaggaaaggtttggcttganccccaatgaagtcaacgaaatctccatggccaattctcggcaaaacatcaggaagttggttaaggatgggtttatcatcaggaagccaaccaagattcactcccgctcacgtgtcgtaggatgaaggaggcaaagaggaaggccgccatcggtttggtaacgtaaggtacagggacaggttccaccaa

SEQ ID NO: 292251 - DNA, 282 bp, Glycine max
ggcagaaagcaagctcatcctagagttttaaaaatggcagcagcctcctccatggctctctcttccccatccttggctggcaaggccgtgaagctgggcccatcagcccccgaagtcgggagggtcagcatgaggaagaccgtcaccaagcaggcctcctccggaagcccatggtacggcccagaccgcgtcaagtacttgggcccattctctggcgagcccccgtcctacctcactggcgagttcccaggtgactacggtgggacatggggtttcggccga

SEQ ID NO: 292252 - DNA, 283 bp, Glycine max
  unsure (1)..(283): unsure at all n locations
gtagttgagaactaagaagaaggaaatggcttcctcaatgatctcctccccagctgttaccaccgtcaaccgtgccggtgccggcatggttgctccattcaccggcctcaaatccatggctggcttccccacgaggaagaccaacaatgacattacctccattgctagcaacggtggaagagtacaatgcatgcaggnntggccaccaattggcnagaagaagttcgagactctttcctacttgccagacctcgatgatgcccattgnaaaggaagtcgaata

SEQ ID NO: 292253 - DNA, 281 bp, Glycine max
  unsure (1)..(281): unsure at all n locations
atctttttggaaattgtttttctgttcttgaggaaatggntgagcaaaatttaccattattggttcacggagaggttacagattcaaacgttgatatttttgaccgagaaaaagtctttattgaaacaattttaatgcctttaattcaaagacttccacagctgaaggttgtgatggagcatatcactactgcagatgctgttaaatttgtagagtcttgcaaagaaggttatgtagcagcaactgttacaccacagcatcttctngaatcgtaatgcttt

SEQ ID NO: 292254 - DNA, 285 bp, Glycine max
  unsure (1)..(285): unsure at all n locations
ggattctcttctttattccttttgtaatttcattcattcttaatctttgtgaaaaataatgttcatcgagaattttaaggttgagtgtcctaatgtgaantacaccgagactgagattcagtccgtgtacaactacgaaaccaccgaacttgttcacgagaacaggaatggcacctatcagtggattgtcaaacccaaatctgtcaaatacgaatttaaaaccaacatccatgttcctaaattaggggtaatgcttgtgggttggggtgaaacaacggctcaacc

SEQ ID NO: 292255 - DNA, 286 bp, Glycine max
  unsure (1)..(286): unsure at all n locations
atcttgcttcactttcaggaatacttaaatgcatttgtaggtattttaggcactgctctagttccctgcctgtacttcaacttccaatctgtgcaatacctgtnggcacgtgggtgcccaaaattggggaatcaaatcggcagcctctagcaatgttgagaccaaccgcttctcttgcgtcagccctaaatttattagttcaaggtgtgaactttttgtctgaccttgaacatagtgtatcaaaaagaaaagcaacagagagaaagaatgagaaantggtatccta

SEQ ID NO: 292256 - DNA, 278 bp, Glycine max
agaacgcctgtgcacctttggacctacggatctggtttgctgtagaaccttgcagggtcacacgggaaaggtgtattcattggattggacttctgaaaaaagtcagattgttagtgcatctcaagatgggcgattaatagtgtggaatgctctaactaggcagaaaattcatgccataaagctaccttgtgcatgggtcatgacctgtgcttttcaccaatggtcagtctgttgcagtggtggtctggacagtgtttgttctattcaatcttaattcg

SEQ ID NO: 292257 - DNA, 282 bp, Glycine max
  unsure (1)..(282): unsure at all n locations
cagcaggggctccaattcctactcttagccgcagatctctcagggcttgcatcttctcagttgtgaagatgtacacatcaaggaagaaaatccacaaggataangatgctgaaccaactgagtttgaagagtcagttggacaggcattgtttgatctggaaaataccaaccaggagctnnaaaagtgatctgaaggatttatacataaactcagctgtgcaanttgatgtttctgggaaccgcnaggctgntgttattcatgtccctacagattaaggnagg

SEQ ID NO: 292258 - DNA, 282 bp, Glycine max
  unsure (1)..(282): unsure at all n locations
cctcattcctaatcctccaatccaaccacctcagcctcacacttcacatatacacatatctgaacncgtatcgtccctcctatggcttcaaagcgcatcctcaaggagctcaaggacttgcagaaagacccaccaacttcttgcagcgctggtccagtagctgaggacatgttccattggcaagcaacaataatgggtcctgctgatagtccttatgctggaggtgtattcctagtcactattcacttccctccggattatcctttagcctcctaaggnngc

SEQ ID NO: 292259 - DNA, 282 bp, Glycine max
  unsure (1)..(282): unsure at all n locations
aatgataggcatctatgtcagtnatgacaaagtcattcacttcactagacgtggccaagaagtaggaaccggtactgcactagatcttctcctcattagttcaggaccagccaagtctcgagaaagttgccctacttgtatggcaccccaagaggaacacggggttatctcctcatgcctgaactgcttcctagctggtggggtcctgtatcggttcgagtatgccgttacccctgccctcttccttgcaaaagcccgcggtggaatgtactcttgcagtct

SEQ ID NO: 292260 - DNA, 280 bp, Glycine max
tgctaaccattctctgcacttttcagttacaaagcatttcattgttttacaatatacaacactacaatggctgcttcaacaatggctctctcttcatcatcattggctggccaagctatcaagcttgccccctccacccctcagcttggtgttggaagggttagcatgagaaaaacagcctccaagactgtttcctcaggaagcccatggtacggcccagaccgtgtcaagtacttgggcccattctcaggtgagcccccatcctatcatggtgaattcc

SEQ ID NO: 292261 - DNA, 278 bp, Glycine max
tcgacatctggttcagacagtggtacctggctcaagattgacaatcatgggaattttcagtatctaccaggcttctaactctaatacatcccacaaaggagcagttgcaattagacagccttatattagggttgtaggaatagaagaaacaaatgagaccaactctgcgcggtccagcagcatttacacaagatgagatagaagattcaaaaatttgcttccgaacctgatggcgtataaaatatctgctcccatgattgccctctatatttgggcag

SEQ ID NO: 292262 - DNA, 278 bp, Glycine max
  unsure (1)..(278): unsure at all n locations
cacaaatctagggagtgccttcccctcatactcatcctacgaaaccggctaaagtatgctctgacttaccgtgaagtcatcgctattctgatgcagagacatgttcttgttgatggaaaagtcaggactgacaagacttaccctgctggtttcatggatgttgtttcaatcccaaaaaccaatgagaacttccgcctgctctatgacactaaaggccgattccgtctccattctgtcagggatgatgaggcaaagttcnagcttgcaagttaggtcag

SEQ ID NO: 292263 - DNA, 290 bp, Glycine max
  unsure (1)..(290): unsure at all n locations
aaggacaggatatacaagtgacaggtcctttgggtgaacttgcattaacttcatcctcgagaagtgttggttganagggaagagtcagggnctctaagggttaaaaaggctgttgaaaccngaagggccaatcaaatgcatgggctttttagcgacacttacagacaacctggtgattggagtatctaaaggttttgacaagaaacttcaacttgttggtgtnggtnaaccgtgctatggtagagggaacgaanttgtgcctgaacccttggttttcccnacccggnana

SEQ ID NO: 292264 - DNA, 264 bp, Glycine max
gtggtcatcaagtttatcaagaagtctgtgcttcttgtcattctatgtctttgatatcataccgtgatttggttggtgttgcttatacagaagaagaggtaaaggctatggcagctgagattgaggtggttgatggccctaatgatgagggtgagatgtttacacgccctggtaaactcagtgatcgctttccccagccatatgcaaatgaagcagcagctaggtttgctaatggaggagcctatcctccagatctaagtcttg

SEQ ID NO: 292265 - DNA, 258 bp, Glycine max
  unsure (1)..(258): unsure at all n locations
attagttcattctctttgcgcagttccctacctctcctttcaagatgcagatcttcgtcaagaccctcaccggaaagaccatcacccttgaggtggaaagctctgacaccatcgacaacgtcaaggccaagatccaggacaaggaaggaattcccccggatcagcaacgtctcatcttcgccggaaagcagctcgaggacggccgtaccctcgccgactacaacatccngaaggagtcaacccttcaccttgtccttt

SEQ ID NO: 292266 - DNA, 251 bp, Glycine max
  unsure (1)..(251): unsure at all n locations
gccgcagttaaagtctcagctccccaagccacaaggttgggcatcaaggcttcgctgaaagacgttggagtcgctgttgtggccactgccgcgagtgcagtgctggctagcaacgccatggccattgaagtgttgctgggtggtgatgacgggtctctggctttcgttcccaacaatttctccgtggcctctggggagaagatcgtgttcaaganncacgcnggtttcccccacaacgttgtgttcgacga

SEQ ID NO: 292267 - DNA, 253 bp, Glycine max
  unsure (1)..(253): unsure at all n locations
cgcttgtgctgccttcgtttgcgtttttatcacagagganttaacatatatatagcaagcatggcagtcacactctacgaccttagctcttcctctgggttgaagaaacttgatgagtaccttctcccacgcngttacatcaccgggtaccaagctacaaaggatgatcttactgtttatgcngctttgccaactgctccatcagatgaatatggaaatgtttccaggtggtacaagcacattgatgctttgt

SEQ ID NO: 292268 - DNA, 263 bp, Glycine max
gtgcttgccaattttgacattgatcttggaattccttttggttctgtgctcaacgatgctgttcgttttagctatgccgcacatcttgtgcttgtatttccagttgtcttctatgcagtgcggatcaaccttgatggtctcatatttccatcatctaggcctttggttctagataacttcagatttgcatcaattactatggtccttattgttgcttcctttttgggagcaaatttcatacccagcacctgggatatattcca

SEQ ID NO: 292269 - DNA, 219 bp, Glycine max
  unsure (1)..(219): unsure at all n locations
tggcttncaggcaattgtgggcntcaagagctgnctcttacctgaggntctctgtgtttcacagaggcttntctaatgttgttaaagatttgaagtatgctgantctcatgagtgggtgaaagttgatgaaaattctgcaaccgncggcataactgatcatgcccaagatcatttaggaaaagttgttgaagttaatgaagcgcttaacagctctcctg

SEQ ID NO: 292270 - DNA, 254 bp, Glycine max
gaaaatcctcacccattttcttcgtagccaaacactctgaaattctcagttatgtcgtggcaagcgtatgtggatgatcacctactgtgtgaaatcgaaggtaaccacctcactcacgccgctatcatcggccaagaggaagcgtttgggctcagagcaccaacttccctcagttcaaacctgaggaaataactgccatcaataatgactttaatgagcctggatcacttgctccaactggattgtatatcggt

SEQ ID NO: 292271 - DNA, 249 bp, Glycine max
  unsure (1)..(249): unsure at all n locations
tcgggctcactcttgggcccagggggaggnatgttgtgttggatgagtttggaagtcctaaagtggttaacgatggtgtcaccattgctcgcgccatcgagcttccagatcctatggaaaatgccggtgcagctcttattagagaggttgctagtaagactaacgactctgccggtgatgggacgaccacggcttcggttcttgctcgcgagataattaagctggggcttcttagtgtgacttcngggg

SEQ ID NO: 292272 - DNA, 249 bp, Glycine max
tcttgatatcctttattctaaggacttaattgcaactggaggtattgatacaaatgctgttatttttgaccgcccatcaggacagatattatctacactcagtggtcactctaaaaaggtgaccagtgtaaagtttgtagctcagggtgaatcattcctaactgcttcagcagataagacagttcgtctatggcaagggtcagatgatggtaactataactgcaggcacatcttaaaggatcattcagc

SEQ ID NO: 292273 - DNA, 249 bp, Glycine max
  unsure (1)..(249): unsure at all n locations
cngagagtccaattggctgacaagtacttgaacgaggctgcacttggaaatgctcacgaggatgctattaacaggggaactttcttccaatcttgaattggaggcaaagcaaacttggcaagtaaatatttctgttcctgaaggttgtgctgatccaagtgctagaagttgtgatgggacttgcgtgtaacattcttagaattctcaatgtcttaggtgcnaagagaagatgccaagtttganatgatt

SEQ ID NO: 292274 - DNA, 252 bp, Glycine max
  unsure (1)..(252): unsure at all n locations
gtgctgccaggntgattgctgatgtatcanaatcggacaagatcgtggttgagaaattcgaccgtgcctgtgaaaacagctgaggcaattgagaggattctgactcagaataggnaaggcatcaatttcacaattcgtcaaaccctgagtttcttgctgagggtacngcaattgcagacctgtttaagccggatcgagtcctcatcggaggcagggaaaccccagagggtcaaaaagctatcnattctctga

SEQ ID NO: 292275 - DNA, 257 bp, Glycine max
  unsure (1)..(257): unsure at all n locations
gctttagncngctggatcgacaaggaaatagaagctgattttgagacagnnancacaacaccagtttttcnagacgccttcgccaatggagaancnggctgctaatctttatacangnnaaatattttcaaagtttcaagatgagcttgttgaaacttttgtttatactgcaaatagaattgaaggagatgggccaaatagcacatttagagttgcaaaatttgaggatgaccaaaaggcatacatngttacnttaa

SEQ ID NO: 292276 - DNA, 255 bp, Glycine max
  unsure (1)..(255): unsure at all n locations
gttaaagttgagccattcaattccactaagaagaaaatgcgtgtggtggttganctccctggtggaggcttaagagcccactgcaaaggtgcttctgaaataattctggctgcttgtgacaaagttctcaactcaaatggtgaggttgtaccccttgatgaagaatcaactagccatcttaaggctacaataaatcagtttgcaagtnaggcacttagaacactatgccttgcctatgtggaattggaaaatggg

SEQ ID NO: 292277 - DNA, 255 bp, Glycine max
  unsure (1)..(255): unsure at all n locations
cacgcagtcgcagtgagtgaaaaggaaaaccctaattgcggtnttctcagtgccttcgagagaaagaaaaaatggcancataatcttgttctccgtggcaccatgcgcgcccacaccgacgntgtgacggcgattgccactcccatcgacaactccgacatgatcgtcaccgcctcacgcgacaaatccatcatcctctggcatcttaccaaggaggacaagacttacggtgtcccccgccgccgcctcaccggc

SEQ ID NO: 292278 - DNA, 248 bp, Glycine max
  unsure (1)..(248): unsure at all n locations
ttggaganattgaaaaccgttcatcacatttgcttgccataaaggcagatattgagactcagggagaatttgtgaattcattgattagagaggtgaacaatgcagtttatcagaacatagatgatgtagtggcatttgtgaagtggctggatgatgaactttgcttccttgtggatgagagggctgtccttaagcattttgattggccagagaagaaagctgacacattaagagaagcagcatttggc

SEQ ID NO: 292279 - DNA, 246 bp, Glycine max
  unsure (1)..(246): unsure at all n locations
gcgaagagcatggctcccaagggtttaatctttttggctgtgttatgcttctcagcactgtcactgagtcgttgtcttgcggaggataatggacttgttatgaacttctacaaggaatcatgccctcaggctgaagacatcatcaaagaacaagtnaagcttctctacaagcgccacaagaacactgctttctcctggctcagaaacatcttccatgactgtgctgttcagagttgtgatgcttca

SEQ ID NO: 292280 - DNA, 245 bp, Glycine max
  unsure (1)..(245): unsure at all n locations
ccgctttgnggntggcaatgcaaactagggagcagcatatcaggagggacaaggctaccagcaacatttgcactgctcaggcactgcttgcaaacatggctgccatgtatgctgtgtatcatggacccgaaggcctgaagaacattgcacaccgtgttcatggtcttgctggggcatttgctcttggattaaagaaacttggaactgtggaagttcaggaccttcccttctttgacactgtgaag

SEQ ID NO: 292281 - DNA, 244 bp, Glycine max
aaattaatgactgttccatcagattcttcaagcagtgcttcttctggaaattggcttttcaaaaataaggaacatgggaagactagtgctgcagctagtctgggtatgattttactctgggatgttgactcgggacttgctcaaattgacaagtacttccatagtaatgataatcatgtcattgctggtgcattactgggagttggaattgtgaattgtagtatcaagaatgactgtgatcctg

SEQ ID NO: 292282 - DNA, 253 bp, Glycine max
tgaaattctttagttgtaactgacaaagttttctgagaaaataaggattattattgagagaatggctggctcatcggaagagggacaagtcattagctgccacaccgttgaagaatggaacgatcaactccagaagggcaacgaatccaagaaactcattgttgtggattttactgcttcttggtgtggaccatgccgtttcattgcaccattcttggctgagctggctaagaagttcacaagtgtcatattc

SEQ ID NO: 292283 - DNA, 250 bp, Glycine max
gatgagaagtccttgaaggatttgaagctcaaggaagtgaagaatggaaggttggctatgttggcaatcttgggttactttgttcaagctcttgtcacaggtgttggcccataccaaaacctcctagatcatttggctgaccccgtgcacaacaacatcttgaccagtctcaagttccactaaatgtattatatcatattctttaccctcttggtcttggttcttgttcgcttcgcagttaccaaagctc

SEQ ID NO: 292284 - DNA, 243 bp, Glycine max
  unsure (1)..(243): unsure at all n locations
gtgcttcctctgccattgcagctgttgccatctccacaccaagttcncanagnaatggatcactcttgggaagcacaaaagcttcttttcttagtgngaggaaactgaaggtgaacaactttacagcaccagttggagcacgatccagcactacagtttgcgcagttgctgagcctgataggcctctgtggttcccaggcagcacccctcctccatggctagatggcagtttgccaggagatt

SEQ ID NO: 292285 - DNA, 249 bp, Glycine max
gtgaaaagtgaaaagtgaaaatggacttggaagcagtgaagaggtacttagagaaaggaggagaaacagcatcggcggtggatgggttgcctccgaggtttctggaaccgttaataatgaacgctcttaaggtcgatctcatcgaaactggtcgcgttgtctgctccatgaagatacctccgcgtttactcaatgctgggaattcgttacacggtggcgccatcgctgctctggtcgacgtggtggggt

SEQ ID NO: 292286 - DNA, 238 bp, Glycine max
  unsure (1)..(238): unsure at all n locations
ccagatgtgcatgtgaagcgggctatgaatganatcaatgctagctgcaagattgaggttggcagctaatgagaaggcagaggcagagaagatcttgctaatcaaacgagctgagggcgaggcagagtctaagtatctttctggtctgggtattgctcgccaacgtcaagcaattgtggatggcttgagagatagtgtgcttggattctcagttaatgtacctgggacaagtgcaaga

SEQ ID NO: 292287 - DNA, 240 bp, Glycine max
tcatcgaggatgccaccaacagaaatcgtttggcaaaactgctcagatttgagagcaccaagtctgagggtaaattgacatctctggatcagtacatatctagaatgaaaactgggcagaaggattcttttacataactggaaccagcaaagaacaactggaaaactctcccttccttgagcggcttaagaagaaaaattttgaggttattttcttcacggatccagttgatgagtactt

SEQ ID NO: 292288 - DNA, 254 bp, Glycine max
  unsure (1)..(254): unsure at all n locations
aatgggaaagtatgaggnatgcataaaagattgtgacaaggctgttgaaagaggaagagaactaagatcagattttaagatgatagcaaganctttgacaaggaaaggaaatgccttggtgaaaatggcgaagtgctcgaaggattacgagtctgccattgagacttatcagaaagcactcactgagcaccgcaaccctgacactttgaagaaacttaatgaagctgaaaaggcgaagaaagaactagaacagc

SEQ ID NO: 292289 - DNA, 248 bp, Glycine max
tatgcttgtctcaaagattaagccatgcatgtgtaagtatgaactaattcagactgtgaaactgcgaatggctcattaaatcagttatagtttgtttgatggtatctactactcggataaccgtagtaattctagagctaatacgtgcaacaaaccccgacttctggaagggatgcatttattagataaaaggtcaacacaggctctgcctgttgctttgatgattcatgataactcgtcggatcgca

SEQ ID NO: 292290 - DNA, 248 bp, Glycine max
gagacgcttcgcaaatctcaatcgaatctcagaaaaatgagagaaatcatcagcattcacataggtcaggccgggatccaggtcggaaactcctgctgggaactctactgcctcgaacatggcatccagcccgacggcatgatgccttctgactccaccttcggtgtagcccacgacgccttcaacaccttcttcagcgaaaccggatctggcaagcacgtcccccgtgctgtcttcgtcgacctcgt

SEQ ID NO: 292291 - DNA, 237 bp, Glycine max
cgccaatccgcgatgctgtgggacagccaatgcccattcaagctctggccacggctcttgcaaatgctccccctgaacagcagaggactatgctcggtgaagctttatacccgcttgtcgatcagctggaacacgatgctgcagcaaaggttactggcatgcttctggagatggaccagcctgaagttttacatctgattgagtcaccagatgctctgaaggcaaaagttgctgaag

SEQ ID NO: 292292 - DNA, 238 bp, Glycine max
tcaattttaatttcctctcaaaccctaaccctaaccctaaccctccccgtcacaaaagaaaaccctctttgtccgatcatcgtcgtcaagatgttggaactccgtctcgtgcaaggctccctcctgaagaaggttttggaatccgtcaaggagctcgtgaacgacgcgaacttcgactgctcctccaccgggttctccctccaggccatggactccagccacgtcgccctcgtcgctc

SEQ ID NO: 292293 - DNA, 272 bp, Glycine max
cgaaacatggcaagagtggtggcactccaacagaaccaactatctttctctaccttagcttcctctctttctgacttcagtggaaccagacttcaaactcaacttcagttcaagagaaagcaatgccatccaaaagggtctttctacgtctccgcatcgagcaccaagaaaatcctaataatgggaggcaccaggtttattggtgtgtttttgtctaggctccttgtcaaagagggtcaccaggtgactttattcacaagaggtaaagcgcc

SEQ ID NO: 292294 - DNA, 260 bp, Glycine max
aaggcagaaagcaagctcatcctagagttttaaaaatggcagcagcctcctgccatgggctctctcttccccatccttggctggcaaggccgtgaagctgggcccatcagcccccgaagtcgggagggtcagcatgaggaagaccgtcaccaagcaggcctcctccggaagcccatggtacggcccagaccgcgtcaagtacttgggcccattctctggcgagcccccgtcctacctcactggcgagttcccagtgagta

SEQ ID NO: 292295 - DNA, 252 bp, Glycine max
  unsure (1)..(252): unsure at all n locations
tgatggtgagcatgggattgacaggacattcgaagtagcccaaaaggtgtggtcagaggtattcttctacctggctgagaacaatgtcctgttggaaggtattctcctcaagcctagcatggttactccaggagccgagtccaaggacaaggccactcctctgcaagttgctgattacaccctcaagctccttcacaggagaatccnacntgntgtccctggaatcatgtttctgtctggcggacaatctga

SEQ ID NO: 292296 - DNA, 251 bp, Glycine max
  unsure (1)..(251): unsure at all n locations
agaangaaatggcgaccaacattgggatcatggatgcggcttacttcgtcggcagatctgagattctttcttggatcaactcaactctgcaactcaatctctccaaagtcgaagaggcttgttccggcgccgttcattgtcagcttctcgatgccgctcatccagggatcgtgcctatgcacaaggtcaatttcgacgccaagagcgagtacgagatgattcagaactacaaggtccttcaagatgtcttc

SEQ ID NO: 292297 - DNA, 249 bp, Glycine max
  unsure (1)..(249): unsure at all n locations
ggattgccccatttcgctcatttttatggaaaatgttctttgagaagcacgaagattacaagttcaatggtttggcatggctcttcttgggtgtccctaccaagcagctcattnctttacaaggaggagtttgagaagatgcaagagaaaagtcctgaaaacttcaggcttgacttcgctgtgagtcgagagcaaacaaacgagaaaggggagaagatgtacatccaaacccgaatggctcaatacgca

SEQ ID NO: 292298 - DNA, 258 bp, Glycine max
ccggagaacctcctcctcgacgacgatggcaacctcaaggtcactgacttcggcctcagcactttctccgagcatctcaggcacgacggcctgctgcacactacgtgtggcacaccggcctacgttgcgcctgaggtcatcggaaaaagaggttacgacggcgccaaggctgatatttggtcttgtggcgtaatcctctacgtacttcttgctggttttttacctttccaggatgaaaacttggtggctttgtacaag

SEQ ID NO: 292299 - DNA, 256 bp, Glycine max
  unsure (1)..(256): unsure at all n locations
atttatcttacacttacccacagggaggcgaacagagaaactcagagacccgaaggcagatttcaagatgaagttcaacattgcgaatcccaccaccggttgtcagaagaagctggagatcgatgatgacctgaagctgcgagcattttgggacaagaggatctcacaagaggttgttggtgatgctctgggtgaggaattcaaaggttatgtcttcaaaattactggaggttgcgacaagcaaggnttccnatng

SEQ ID NO: 292300 - DNA, 252 bp, Glycine max
agcgtcttacctttccattatcaaaatggctgtttcggctatcacaggagcgaggctaaccctagggatagggttggcgatacctctttcctctcccacgcgctctcgaaccgtcgcaatggccgtatccgtcgaccccaagaccgacaacaaactcactcttaccaagtccgaggaagctttcgctgctgccaaggagctgatgcctggaggtgtcaactccccagttcgtgccttcaaatccgtgggtgg

SEQ ID NO: 292301 - DNA, 250 bp, Glycine max
  unsure (1)..(250): unsure at all n locations
aaacaaagtcgttttgagttccgccgaagganccgtaggttgcagcagctatggatttggcatccaatctcggtggcaagattgacaaagccgaagttctctctgccgttcagaagtatgagaagtatcatgtttgcnatggaggtcaagaggaagagagaaaagctaattataccgatatggttaataaatactatgatcttgttaccagcttttatgagtttggctggggggaatctttccattttgc

SEQ ID NO: 292302 - DNA, 248 bp, Glycine max
  unsure (1)..(248): unsure at all n locations
tggtgatcatgttgaccagaaaggatccattgttcttgctgaaaaattgagatttgacttttctcatggcaagcctattgaagctgacaatttaaggagaattgaatcaattgttaatgagcaaattaaagctgagttggatgtaagtncaaaanaggcaactcttgctgaagccaagggtatcaatggtttgcnagctgtttttggggaagtctatcctgatcctgttagagttgtgtcaattggac

SEQ ID NO: 292303 - DNA, 259 bp, Glycine max
  unsure (1)..(259): unsure at all n locations
aaacactcataacacaaagcacaaagcaaagctcatccttgagttaaaaaatggcagcagcttcttccatggctctctcatccccatccttggctggcaaggccgtgaagctgggcccatcagccccagaagtgggaagggtgagcatgaggaagaccgtcaccaagcaggtctcctcaggaagcccatggtacggcccagaccgagtcaagtattgggcccattctntggcgagcccccgtcctacctaaccggtgag

SEQ ID NO: 292304 - DNA, 248 bp, Glycine max; identical to SEQ ID NO: 125917

SEQ ID NO: 292305 - DNA, 246 bp, Glycine max
gcgagatgcttctgcgtgccgcttgtttcgttccgcgtcgggaagatcaacaaggaagggactcgcttcagccctacctcgaataggggtaacttgacactcgtactactgccaagttctgatcttcgtctctcattcattggggatgatggtagaacagagagattattcacccttaccaacaaatcccaatgctctgctgttgtggttgatgaaatcccaactgatagttctggccgatcgttc

SEQ ID NO: 292306 - DNA, 246 bp, Glycine max
  unsure (1)..(246): unsure at all n locations
aaactttnnaaagaattaatacaattaaaannataacaatgantgngataaacttaagaantnaatatattgaaatnggataantaaacaattgaattggactggtcgaatggtatcccaaaaatggagtactaactcccatttcttatttattattgaattaaccgatcaacttgctttgttatcgaacatttctttttgatttcaaaaattttccggaaaaaatttgaatgtntttttatatgc

SEQ ID NO: 292307 - DNA, 252 bp, Glycine max
  unsure (1)..(252): unsure at all n locations
acgaattatccaagctctcgagctttccttcgaagctccgcgctaatgcggaacacgacgcacgtctccagaaggcgancgatgtctgcgggaacatttttggcgacgcgctggaccggctcaacgantccatctccgcgctcggaagcagcggcggcgccggggaagattatctccccggcgagtgttagcgaacgtggagacgtggatcagcgccgcgctcacggaccaggacacttnctcgacgcgntg

SEQ ID NO: 292308 - DNA, 268 bp, Glycine max
  unsure (1)..(268): unsure at all n locations
ctcctccagcggaaaatgctgggctatacaaaggtcttaagcagttaagtgagcncatctcctcatatcagttccctgcaaanacaccggccgtggggcacaaattgtgagtcccaattatcagcacagctaaacaatgcagtcttgacaaggatgtgactctgccagatgagggtnatgagatcccatctanagagngcnaccttgtggttngacnggtgtattccaagatnntggagatcgngtctcgtntgtnaccttgtgggct

SEQ ID NO: 292309 - DNA, 251 bp, Glycine max
aaaaagatgaaggtttggagatgggtggtgagtttgatgttattggggttactgcccgtgtcaacaatgggtcgattcgtggtggagaagaacagcctgagagtgacatcgccggacaaaataagagggacacacgacagtgcccattggcaacttcggaatacctcaatacggtggtagcatggccgggaacgtaatttaccctaaggataacaaaaagggttgcaaagagttcgatgagttcgggattt

SEQ ID NO: 292310 - DNA, 248 bp, Glycine max
  unsure (1)..(248): unsure at all n locations
accactgagcttccctcgccaggttgttgctttgtgccaagctccattcctacttgatgatcctaatgttggactgctattccctgctgatgcaattgcaaganctaaacactatctttcattgacctcgggtggtttaggtgcttatagtgactcccgtggccttccaggagtgaggaaggaagttgctgagttcatactcaggcgtgatggttatccaactgatccagagctcatatatctcactg

SEQ ID NO: 292311 - DNA, 226 bp, Glycine max
  unsure (1)..(226): unsure at all n locations
tctatcnatctatcaagatgggcgttgttggttgagaaaacaagcagtggaagggagtacaaggtgaaggacatgacgcaagccgatttcggaagattggaaatcgagctggcggaggttgaaatgcccggcctcatgtcctcccgcaccgagttcggcccctctcaacccttcaagggcgctaggatcaccggctccctccacatgaccatccaaaccgccgtcc

SEQ ID NO: 292312 - DNA, 253 bp, Glycine max
  unsure (1)..(253): unsure at all n locations
acaaaaccacaatctaagtnagtnttganagaagagtgcgtttntctgtttgaaattaagtagtaaagatgtttggnatcatncggaggaaacaagggtcacaagntaaaggngaaccttggtgattatgcgananaatgtntggatatcaacagnattccccaggttaanggtgtcattgggacccggcttaacanccttggccgtgtctccgaccaccgttactctttnggcctcccntntctccatccag

SEQ ID NO: 292313 - DNA, 200 bp, Glycine max
ttgtatctgtagattggctttatgataacctgaaggagccagatatcaaggtactagatgcttcgtggtacatgccggatgagcagaggaatccaattcaagaatatcaggttgctcacattcctggtgtccttttctttgacgtagatggaatagcagatcggactacaaaattaccacatatgctgccatcagaggaa

SEQ ID NO: 292314 - DNA, 242 bp, Glycine max
  unsure (1)..(242): unsure at all n locations
tgaagttgaagtcttgcccttctctcttcaactccaaacacaagacatcatcatccatggctgcctccgtctccactgtcggagctgtcaacagagctcttttgaacctgaatgggtctggacctggggttttcgntcccagttcatcnttctttgggagcagcttgaagaaggttattggctcaagggtccccaacacaaagatttcntctggaagcttcaagattgttgctgtagaagag

SEQ ID NO: 292315 - DNA, 286 bp, Glycine max
ctattcagcaatcagcattcactggtcaaactgctctgaagcagctcaatgagttcgtccgcaagaccggtggcgccggcaaaggtcgcactaacatgcgccgcaccgtcaagagtgctcctcagagcatttggtatggccctgaccgtcccaagtacttgggtccattctcggagcagattccatcatacctgaccggagaattccctggtgactacggatgggacactgctggattatccagctgacccggaaaccttcgccaggaaccgggagctggaggtga

SEQ ID NO: 292316 - DNA, 271 bp, Glycine max
  unsure (1)..(271): unsure at all n locations
ctgaggacaaaatcaaccaagctgttttccctggactgcaaggnggccctcacaaccacactattactggtttagctgttgcattgaagcaggccacaactcccgaatatagagcatatcaggaacaagttctcagcaacagttttaaatttgcacaggctctaagtgagaggggctatgagctggtttctgggggaactgagaatcacctggttttggtgaatctgaagaataagggtattgatggctccagagttgagaaggtgttgga

SEQ ID NO: 292317 - DNA, 278 bp, Glycine max
tgcaattgaagttaaaagccttagccttccctacaactccaaacacaaagacatcatcatccatggctgcctccgtctccactgtcggagctgtcaacagagctcttttgaacctgaatggttctggagctggagcttcagctcccagttcagccttctttgggaccagcttgaagaaggttattgcctcaagggtccccaacagcaaggtttccggtggaagcttcaagattgttgctgtagaagagaagaaagagattgaagagacccagcagacc

SEQ ID NO: 292318 - DNA, 284 bp, Glycine max
  unsure (1)..(284): unsure at all n locations
catgagtgtgccaggcacaggaaatgacattgtcggactatggaaaccatagtccataaggcgctttgcaacatcttcaggctctatcccagcagtattctaccatagagatagcttacaattaagcagaatatgaataatcccgattggttgaaaaaaaaactgcaatgatcagttggacctaccttaaagcctcttaagtcaataatgaattcatgagcaactgttccattgaccccacggaaaagaacagggtaatgattctgtaaaactagangtataag

SEQ ID NO: 292319 - DNA, 266 bp, Glycine max
  unsure (1)..(266): unsure at all n locations
tggggattctcgccattgacatctacttccctcccgcttgcnttcagcaggaagcattggagactcatgatggtgccagtaaagggaagtataccattggacttggccaagactgcatgtcattctgtaccgaagtagaagatgtcatctcaatgagtttgacagtggttacctctcttcntgagaagtatgggattgatcctaaacaaatcggtcgtctggaagttggaagcgagacgtgatagacaaaagcaaatccatcaaga

SEQ ID NO: 292320 - DNA, 216 bp, Glycine max
tgggaggttgggctatcgcggtgcatggtggcgctggtgtggaccctaatcttccactcgagcgtcaagaagaagcgaaacaacttctcacgcactgtctcaatcttggaatctctgctctaaattctaatcttcccgccatagatgtcgttgaacttgtggtgagggaattggaaacggatccgctgttcaattcgggccgtggatctgccctga

SEQ ID NO: 292321 - DNA, 272 bp, Glycine max
  unsure (1)..(272): unsure at all n locations
aaagccttagccttccctacaactccaaacagccaagacatcatcataccatggctgcctccgtctaccactgtcggagctgtcaacagagctcttttgaacctgaatggttctggagctggagcttcagctcccagttcagccttctttgggaccagcttgaagaaggttattgcctcaagggtccccacncagcaaggtttccggtggaagcttcaagattgttgtctgtagaagagaagaaagagattgaagagacccagcagaccgac

SEQ ID NO: 292322 - DNA, 264 bp, Glycine max
  unsure (1)..(264): unsure at all n locations
tanantcttctcnncagcttttgatanaactcccttcacnatggntgaacaacccganaaagcttttctnaagcaancanaagngtttctgcagcacaaagnanactgggaanggaaaganacatggcaaaggtgggaaccgctttnggaagtccatngggttggatttaagactccnanggaagccatcgaaggaacctatattgacangangtgcccntcatggcaatgtttccatccgtggccgtatcttggtggaacatg

SEQ ID NO: 292323 - DNA, 231 bp, Glycine max
  unsure (1)..(231): unsure at all n locations
ggctatcgcggtgcatggtggcgctggtgtcgaccctaatctcccactcgagcgccaagaagaagcgaaacaacttctcacgcgctgtctcaatcttggaatctctgctctaaattctaatcttcccgccatagatgtcgtcgaacttgtggtgagggaattggaaacggntccgctgttcaattcgggccgtggatctgccctgacagaaaaaggaacggtggagatggc

SEQ ID NO: 292324 - DNA, 273 bp, Glycine max
  unsure (1)..(273): unsure at all n locations
cttttgatttgtgaaaggnaagcaaacatgcttgatcaggtccancaccctacaatcatggacaaggttgctggccagctccatctccgttctggtgtttctggtattaggagttatgaaggagcctactgccaccccacaatgtaccaaagaccctcttttgggaattactcgaatgctgcattgcagtatcctgtgatgccctcatgcaaagctactatggatttgtcctgctgctgcaacaactgcctcccccgtctttgttgctgctcc

SEQ ID NO: 292325 - DNA, 264 bp, Glycine max
  unsure (1)..(264): unsure at all n locations
ctccatttccatttcctctctctcagtttccaagaatcttaagctatgggaaagtcttacccaaccgtgagcgctgattaccagaaggccgttgagaaggcgaagaagaagctcagaggcttcatcgctganaagagatgcgctcctctaatgctccgtttggcatggcactctgctggaacttacgacgtgagctncgaagaccggtggtcccttcggaaccataaagcacccctccgaactcgctcaggcgctaacaacggt

SEQ ID NO: 292326 - DNA, 268 bp, Glycine max
  unsure (1)..(268): unsure at all n locations
cattcctcctagctgtgaancctgatgtagaaacacaaggtgattttntcatgtccttggcagctgaagttccgagcagcctccttctcagatattaatgacttggtggcctttgtgaactggctagatgaggaactttccttcttggttgatgaacgagccgtcctcaaacactttgactggcctgaagggaaagcagatgcactaagggaggcagcttttgaatatcaggatttgatgaaattggagaaccgagtctccaccttac

SEQ ID NO: 292327 - DNA, 269 bp, Glycine max
acgcaacacactttcactgagaaaggatctctatctaccaaggagcagaataaaacccttctctctggtaagtgaataagagaatggcttcagatcggaaacttcacactttcgaggaggtggcaaagcacgaccagaccaaggattgctggctcatcatttctggcaaggtgtatgatgtcacccctttcatggaggatcatcccggaggtgatgaggttttgttatctgcaacagggaaagatgcaaccaatgattttgaagatgtt

SEQ ID NO: 292328 - DNA, 265 bp, Glycine max
  unsure (1)..(265): unsure at all n locations
ctagtttcttacaagcctctactatactgcttcaccttctgctcnagaaaattcagtgctgaaacatggcttcggctactctctctgtagccaaaccagcccttcaggcaaatgggaaaggcttctctgaattctctggcctccgaagctcatcaggcttccttcccttttctagaaaatcttcagaggatttccattctgtcattgccttccagacctntgcagttggaagcagtggaggatacaagaagggtgtgacagaagc

SEQ ID NO: 292329 - DNA, 263 bp, Glycine max
  unsure (1)..(263): unsure at all n locations
gttctccagagctgggatcccactctcgttagcccctgtacttggttccacgtcacctgcaaccaggacaaccgagtcactcgcgtggatcttggtaactctaacctatctggacatttggtacctgaacttgggaagctggagcatctgcagtatcttgagttgtacaaaaacaacattcaaggaactattcctccagaacttggaaacctgaagagtctagttagcttggacttgtacaacaacaacntntcaggcaccat

SEQ ID NO: 292330 - DNA, 264 bp, Glycine max
  unsure (1)..(264): unsure at all n locations
gcagctgcttctcctatggcaagccaactcaagtccaccttcactaaaactcttgtagctcccaagggcctctctgcctcttcaccactccacctcctgccttctaagaggcaatttagcttcactgttagggccatccaatcagaaaagccaacctatcaagtgattcaaccaatcaacggtgatcccttcattggaagccttgaaaccccagttacatccagcccntgattgcatggtacttatcgaacctccccgcataca

SEQ ID NO: 292331 - DNA, 270 bp, Glycine max
acactcttctctgcagcttttgcctacaacttcccttcaccatgggctgaacaaaccgagaaagcttttctgaagcaaccaaaagtgtttctcagcacaaagaagactgggaagggaaagagacctggaaaaggtgggaaccgcttttggaagtccattgggcttggatttaagactcccagggaagccatcgaaggaacctatattgacaagaagtgccccttcactggcaatgtttccatccgtggccgtatcttggctggaacatgt

SEQ ID NO: 292332 - DNA, 267 bp, Glycine max
  unsure (1)..(267): unsure at all n locations
ctgaaatcattacttatactagttttctacgattattcatagtgnggcaatagtagcagcaattcacactggtctttgcttctcgttactcatttctcacctaactttctattcttctcagtctcagatcagaaccttagccatggcagcgttccagaagatcaaggtcgccaaccccatacgtacgagatggacggagatgaaatgactagggttatctggaagtcaatcaaggacaagctcattttgcccttcttggagttggac

SEQ ID NO: 292333 - DNA, 259 bp, Glycine max
  unsure (1)..(259): unsure at all n locations
ctagaaganactgaggcagcggttggtgttggcacggttggctcntcagaggccattatgttggctggattggcattcaaaagaaagtggcaaaacagaaggaaacaagagggaaagcctatgacaaacccaacattgtcactggagccaacgttcaggtttgctgggagaaatttgcaaggtatttgaggtggagttaaaggaggtgaagctccgtgatgattattatgtaatggaccctgaaaaggccgtggantgg

SEQ ID NO: 292334 - DNA, 260 bp, Glycine max
  unsure (1)..(260): unsure at all n locations
gagcagcatcatggttattggactgagtgtgcatagtacacctgtggaaatgcgtgaaaaacttgccataccagaagcagaatggccaagagccattgcggagtttgtagtctgaatcatattgaggaagcagcngttctgagcacctgcaacagaatggagatatatgtngttgctctgtccangcaccgcggtgtcaaagnagtcactgaatggntgtccaaaacaagtnggntcccggttgcagactttgccagcat

SEQ ID NO: 292335 - DNA, 290 bp, Glycine max
  unsure (1)..(290): unsure at all n locations
cactcataacacaaagcacaaagcaaagctcatccttgagttaaaaaatggcagcagcttcttccatggctctctcatccccatccttggctggcaaggccgtgaagctgggcccatcagccccagaagtgggaagggtgagcatgaggaagaccgtcaccaagcaggtctnccttcaggaagcccatggtacggcccagaccgagtcaagtattgggcccattctctggcgagcccccgtcctactaaccggtgagttcccaggcattacggctgggacactgctgggt

SEQ ID NO: 292336 - DNA, 291 bp, Glycine max
  unsure (1)..(291): unsure at all n locations
cgaattcagcgagagttgcggctgggaatggacggtgacggcgaggagttgacngcgcaggagaccgctttgtatgaccgtcaaattagggtttggggagctgatgctcaaagaagattaagcaaatctcatgtcttagtctatggaatganaggaactgtagctgagttttgcaagaatattgttctggctggngtaggtagtctgactttagtagatgaccgggctgccacggaggaaatgcttcctccaatttctcatccctcgatgagaatgtgtatngtggcaanc

SEQ ID NO: 292337 - DNA, 283 bp, Glycine max
  unsure (1)..(283): unsure at all n locations
aaagtttaatctctgaccagaacagaagcattgccacacttgccataactactctattgaagacaggaaatgaatcaagtgtggaccgtcttatgaagcagattacaaatttcatgtctgatattgctgatgagttcaaaattgttgttgttgaagcaataagatcactatgcttgaaattccctttaaaatatagatctctgatgaatttcctaagtaacattcttagggaagaaggtggcttggttacaaganngcaagtagattcaattgtgcttctatt

SEQ ID NO: 292338 - DNA, 282 bp, Glycine max
ttactggaggaaaggacataaccctgcaggaagtgaacagggtttctcaggttgtgactagtttggctgatccttctgctaatattatatttggggctgtcgttgatgatcgctacactggggagattcacgtgactatcattgcaactggcttctcacagtcttttcagaagaagttgctaacagatccaagggctgcaaagctgcttgacaaggtggctgaggccaagaaagcaaggtagtccctcctcccctcaatcctcaaacaaggttgaatctaga

SEQ ID NO: 292339 - DNA, 288 bp, Glycine max
  unsure (1)..(288): unsure at all n locations
ctttctttccatcccaacnacttantnagcgtctgatccaattncctttctctcaccatggatncatcgcanaccattgtnanccacttcctctgacgatgctccaaatccacgcactcggaaggaccttgttctaatgatttgcggtttgtttttgctctcttcccttgttgcctttggagggtacagggcctccaacgcgccacatgctgacgtgtcatcgccagcatcgaacgatgaacaacctagtcccacatcggtgcctctccgaaatggtacccggtttca

SEQ ID NO: 292340 - DNA, 291 bp, Glycine max
  unsure (1)..(291): unsure at all n locations
cttgcaattgaagttgaagtcttgcccttctctcttcaactccaaacacaagacatcatcatccatggctgcctccgtctccactgtcggagctgtcaacagagctcttttgaacctgaatgggtctggacctggggtttcagctcccagttcatccttctttgggagcagcttgaagaaggttattggctcaagggtccccaacacaaagattncctctggaagcttcaagattgttgctgtagaagagaagaaagagattgaaggacccagcagaccgacaaggacaga

SEQ ID NO: 292341 - DNA, 287 bp, Glycine max
  unsure (1)..(287): unsure at all n locations
ttccattgttgttatattgtattgtagccggagaagaagagaagagatagcggcgaagaaagaaagatgacggaggcatatataaggaagaagcccgggatggcgagcgtgaaggacatgccggttctccaggacggtccaccaccaggcgggttcgctnccggttccggttcgcccggcgcatccccaacaagggccccagcgccgttgccatcttcctcatgctttcgggcgctttctcttggggcatgtaccaggtcggccnggcaacnngatccgcagggcat

SEQ ID NO: 292342 - DNA, 215 bp, Glycine max
  unsure (1)..(215): unsure at all n locations
gtttgccgattnanagagaaagagaaatgggagaacganaaggaatcccaatggctttggggctcttggcgatgatcctcttcttcattgcttcctcttcctctcacctacgttcgcgcttccggtgacgccgacgacgcgatcttctacgagtcgttcgacgangattttgnnngacngtngatngtatccgacnaggaggatacaatggtgtc

SEQ ID NO: 292343 - DNA, 280 bp, Glycine max
  unsure (1)..(280): unsure at all n locations
gaagcaacngcatcggttgatactgctactgataatcttatccagaagattattcgaagagagtttagagattgcactgtgtgcactattgcacatcgtattcctactgttattgacagtgatctagtgctggtactcagtgatggtcgagttgcagagtttgatagtccatctaggctgttagaggacaagtcatctatgtttctgaagttggtgacggagtattcatcgcggtcaagtggcataccagacatttactggatganaatgcatcanaacc

SEQ ID NO: 292344 - DNA, 280 bp, Glycine max
ccagtttcaccgcacgaatatcttgttgtttggagcgatccgagaaaaactctgtaaacatgttggtttaccaggacctccttacaggtgatgagcttctctctgactccttccgttacaaggaaattgagaatggaatgctgtgggaagttgaggggaatgggttgttaaaggagcagttgatgtagacattggtgcaaacccttctgcctgagggtggaggagaagatgagggagttgatgatgcagctgttaattgttgacattgttgacacattcc

SEQ ID NO: 292345 - DNA, 285 bp, Glycine max
  unsure (1)..(285): unsure at all n locations
gagtttgttgtgagctataagctagtttatcgtgaggagaatatgaagttgtttgttttctttgttgctgcagtagttttggtagcatggccatgccatggcgcaggctaccaaaggttccctctccgaatgaaaactggctatggtgagcgttcttcggaggtaaaatgcgcaagttttaggcttgctgtggaagcacacaacatccgagccttaaaaccattccngaagagtgcgttganccaacaaaggactacattatggcgaacaatttagatcagactc

SEQ ID NO: 292346 - DNA, 289 bp, Glycine max
  unsure (1)..(289): unsure at all n locations
gagcagaggatcttcccatgatcatggtttcaatgctgagattcagacattggggaggattcgacacagacacattgttagactgttgggtttctgttcaaatcatgagacaaatctcttggtgtatgagtacatgccaaatggaagtttaggtgaggttcttcntggcaagaaagggggccacttgcattggtacccaaggtataagattgcngtggaggcttcaaagggcctttgcnatctacaccatgactgtccacnacnctgtcccaagaaagtnaaatccccc

SEQ ID NO: 292347 - DNA, 289 bp, Glycine max
  unsure (1)..(289): unsure at all n locations
gtagacttgttagagtcaattaataatgcatcaataatcaatgatgatcagtcaaaatctgatgcacaacagacacnaggtttgcagaaaagcctttgtggtcatcctcttttctttggtntancnatgggactgctttcnganantanaaattccnangctcctcacaactgtcagngnntctcnggggttgacatatgncgtgtcattgaattaaacttgtttgntaggcttaaactaggatggtatgtnatccctgtgacananctccnagcaagggtgnactcnc

SEQ ID NO: 292348 - DNA, 286 bp, Glycine max
  unsure (1)..(286): unsure at all n locations
gtgaaaatcccaaagctcttggaaggttgaggtcagcgtgtgagnnagctaagaggatactctcttcaagttcctcaaaccactattgagcttgattctttatgtgggggggttgatttacatgcaaatttttcaagggccttgttcgaggnattgaacaaggcattgttcatgaagtgtatggagncggtggagaagtgcctcaaggaggcaaggattgcnaaaagtcaagttcatgagtttgttctgtangngggtcaanagattccaaaggtgcagcaacttt

SEQ ID NO: 292349 - DNA, 279 bp, Glycine max
  unsure (1)..(279): unsure at all n locations
acaagttttgcgtcttcaaaggaaataggatgggagaattgaaggacactgaggcttacgaggaagagctcatcnnnnnnnnnnnnnnnnnnnnnnnnnctcccgattccgctaaacccgttactgaatctggcaagaagggttatgttggcatccatagttcgggatttcgagacttcctgttgaaaccagagcttcttcgagccattgtagattcaggatttgagcatcctcagaagtgcaacacgaatgcatcctcaagcatcttaggatggatgt

SEQ ID NO: 292350 - DNA, 259 bp, Glycine max
taagaatgtgcacacagccaacactttgatgcgagcacacgagggttggaacagtatgactcaattgctttgatgtttttgatgctgcaattccctttggagggtacaaaatgagcggcattggcagggagaagggtatctacagtctcaacaattacctgcaagtgaaagctgtggtttcaccagtgaagaaacctgcatggttgtgatttgtgaattgctcaaactgctatgacgaaatcctacgtggctatcatct

SEQ ID NO: 292351 - DNA, 277 bp, Glycine max
  unsure (1)..(277): unsure at all n locations
cnaagaattagttgaagcaattgttttgccaatgacctgcaaggngcggttccaaaaattaggagttcgtccaccgaagggagtgctcttatatggacctccaggaactggaaaaacactaattgcccgtgcttgtgcagcacaaacaaatgccacttttctgaagttggcaggtccacagctggtccagatgtttatnggagacggngcaaaattgtccaggatgccttccgctggcaaaagagaagtctccancattatatttatagatganatt

SEQ ID NO: 292352 - DNA, 281 bp, Glycine max
  unsure (1)..(281): unsure at all n locations
tcccccgccgccgcctcaccggccattctcattttgtccaggacgtcgtcctctcttctgacggccagtttgccctatccggctcctgggacggcgagctccgcctctgggaccttgctgctggcacctccgctcgccgctttgtgggccacaccaaggacgtgctctcccgtggccttttccattgacaaccgtcagatcgtgtctgcctctcgtgaccgcacgatcaagctgtggaacaccctgggagagtgtaanacacaatccaagacggcgatgcg

SEQ ID NO: 292353 - DNA, 281 bp, Glycine max
  unsure (1)..(281): unsure at all n locations
catcttcttcccaaccactacgcnanacctactcactcactgcagatctcaattgcatcgctgtccatggctaccatcgttagcatcaaggcccgcnagatcttcgacagtcgtggcaatccaactgtcgaggtggatttgattgctccgatggnattttgccagagctgctgttccaantggtgcatccaatgggatttatgaggccctganttganagatggaggatcngactaccttggaaagggtgtatcaaagtgttgacatgtgaaacaccnnnc

SEQ ID NO: 292354 - DNA, 282 bp, Glycine max
  unsure (1)..(282): unsure at all n locations
tgcaattgaagttgaagtcttgcccttctctcttcaactccaaacacaagacatcatcatccatggctgcctccgtctccactgtcggagctgtcaacagagctcttttgaacctgaatgggtctggacctggggtttcagctcccagttcatccttctttgggagcagcttgaagaaggttattggctcaagggtccccaacacaaagattcctctggaagcttcaagattgttgctgtagaagagaagaaagagatgangagacccagcagaccgacaag

SEQ ID NO: 292355 - DNA, 269 bp, Glycine max
  unsure (1)..(269): unsure at all n locations
tgatttctcaacactgtatgctcctctcatccgtgangggcgtatggagaanntctactgggcacctacaagggacgatcgtgttggcgtctgcnatggaattttccgcactgncaatgttcctaaggatgacattgtcaagcttgttgacaccttccccggccaatctattgatttctttggtgcnctcagggcnagagtntatgatgatgangtgaggaagtggattctgttgttggtgttgactcatgggaagaagctgtgaactc

SEQ ID NO: 292356 - DNA, 277 bp, Glycine max
  unsure (1)..(277): unsure at all n locations
ggttcctctcattcttggtatctggggaggcaagggacaaggaaaatctttccaatgtgagcttgtctttgccaagatgggaatcaaccccatcatgatgagtgctggagagttggaaagtggaaatgcaggagagccagcaaaactgatcaggcagagataccgtgaagccgcagacttgatcaagaaggganagatgtgtgctctctcatcaagatcttgatgcagganctngtcgtctggtggaaccacaatacactgtcaacaaaccagatgg

SEQ ID NO: 292357 - DNA, 278 bp, Glycine max
  unsure (1)..(278): unsure at all n locations
ttgttgccatctctacgccgagttccgggcagaagaatggatcaggaggttgttttcttagtggaaggaaattgngggtgaaaaaggagagagcagcaattggaggacgatcgatgggcactacagtgtgcgcagttgctgagcctgacagacctctatggttcccaggcagcacccctcctccatggcttgatggcactctacctggagacttcggctttgancctcttggtcttgggatctgaccggagagtctagatggatgttcaggcngagcc

SEQ ID NO: 292358 - DNA, 157 bp, Glycine max
  unsure (1)..(157): unsure at all n locations
aggggtgccctgagatcacattgaacaatggtganggctgtggccgttcttggcagcnntgagggtgtcactggaactattcacttcgttcnnganggaantggtccaancaccgtaactggatctcttgctggtcttaagcctggtctccatggct

SEQ ID NO: 292359 - DNA, 273 bp, Glycine max
  unsure (1)..(273): unsure at all n locations
cgtgcattcaatggccaccacagcagctctatccggnnncatggtgagcaccnccttcatgaggaggcaacctatgaccancacaagcctaaagacattccccaacgtnggtggaagctcttttnggtctgaaaagtngacgaggtngtcgngtcacntgnatggactcntacaaggtgaagctccataaccccagaaggagtaagtggatttgaatgcccagatgctnttttcattgttgacaaggcancgacgaangcttgnattccctnt

SEQ ID NO: 292360 - DNA, 272 bp, Glycine max
  unsure (1)..(272): unsure at all n locations
cgnactcaagttgccctttgagctganaagcagatctcatgttctcttcaattgtccaataagaccgatagctatgtagccttcaaggtganaacaaccaatccgnagaagtattgtgttcgtccgaacactggggttgtcacgcctcgatctacgtgtgatgttatcgttaccatgcaagcgcaaaaagaggctcctgctgatatgcaatgcaaggataagtttcttcttcagagtgtaaaaatgttgtgtaccagtccgnaggatatcac

SEQ ID NO: 292361 - DNA, 276 bp, Glycine max
  unsure (1)..(276): unsure at all n locations
tccttcttcttctcttaaaagagcctttgctttttctttaggcctttccgaattaagtacttgtttcattttctctcgaagcaagaaaaatgttcatcgagagtttcaaggttgagagtcctaacgtgaagtacacagagactgagattcagtccgtgtacaactatgaaaccactganttgttcacgagaacaagaatggcacttatcagtgggttgtcaagcccaaaactgtcaaatatgaatttaaaacaacacccatgtccctaaactaggg

SEQ ID NO: 292362 - DNA, 256 bp, Glycine max
  unsure (1)..(256): unsure at all n locations
cttcccttctccaacatgccaaacgacagcgttctgagtcttttcttcttcgttaccctcttcacatgccttctctctgctaattcccacgatgaccatattttcctaccgagtcaactccatgacgatgactcagtgagttgcactgctaccgacccaaaccttaactacaagccggtgatcggaatcctgacccaccccggcgacggtgcctctggcggctcagcaacgccaccggggtttcttacatcgncgc

SEQ ID NO: 292363 - DNA, 241 bp, Glycine max
  unsure (1)..(241): unsure at all n locations
tttggaattaaggatgataagggagatggatatcttgttgacaaggtcctagacaagactggcatgaagggcactggtaagtggactgttcagcaagctgctgaattatcaattgctgctcccactattgangcatcattggatgcaaggttcctgagtgggttgaaggaggaagagttgaagctgcaaaggtctttaaatcaggtggtattggtgatatcgtgactgatcaacctgtaga

SEQ ID NO: 292364 - DNA, 248 bp, Glycine max
gaattctctaaaagagatctttttctgctctttgaagaaagaagggtctttgcttgattttggagatgtctctgctctcagatctcatcaaccttaacctctccgataccaccgagaaggtgatcgcagagtacatatggatcggtggatcaggaatggacctgaggagcaaagcaaggactctcccaggaccagttagcgacccttcagagcttcccaagtggaatatgatggttccagcacaggtc

SEQ ID NO: 292365 - DNA, 244 bp, Glycine max
gagctcataatagcaatatttgcccttagcagtaacaaaattgctgtggtcaagtattctctgttgggttctattctttcaaaccttcttctggttcttgggacctctctattatgtggtggcattgcaaaccttaaagtggaacaaaaatatgacagaagacaagcagatgtgaatcacttatgctgttgttgggattgttgtgctacttgcttccaatgctgttcaaatacagtggtgcctc

SEQ ID NO: 292366 - DNA, 246 bp, Glycine max
cataacacaaggcagaaagcaagctcatcctagagttttaaaaatggcagcagcctcctgccatggctctctcttccccatccttggctggcaaggccgtgaagctgggcccatcagcccccgaagtcgggagggtcagcatgaggaagaccgtcaccaagcaggcctcctccggaagcccatggtacggcccagaccgcgtcaagtacttgggcccattctctggcgagcccccgtcctacctca

SEQ ID NO: 292367 - DNA, 245 bp, Glycine max
taagaaatttagggtcttaagggtttcattctgcggcatcagacatgggaggaggcaatgggcaaaaggcaaagatggcacgcgagaagaacctcgagaagcagaaggccgcctcaaagggaagccagctggattcaaacaagaaagcaatgtcgattcagtgcaaggtgtgcatgcaaacatttatgtgcaccacatcggaagtgaagtgtagggagcatgctgaagccaaacaccctaaatct

SEQ ID NO: 292368 - DNA, 242 bp, Glycine max
agaagcaacaattcttctacaatggatctcctccttctggaaaagaccctcataggtctcttcctcgctgcggtggtcgccatcgccgtctccaccctccgcggccggaaattcaagctcccaccgggcccactccccgtcccaatcttcggcaactggctccaagtcggcgacacctcaaccaccgcaacctcaccgatttggccaaaaaattcggtgacatcttcctcctccgcatgggg

SEQ ID NO: 292369 - DNA, 242 bp, Glycine max
  unsure (1)..(242): unsure at all n locations
cntcgctccgcaccagtttcaccgcacgaatatcttgttgtttggagcgatccgagaaaaactctgtaaacatgttggtttaccaggacctccttacaggtgatgagcttctctctgactccttccgttacaaggaaattgagaatggaatgctgtgggaagttgaggggaagtgggttgttaaaggagcagttgatgtagacattggtgcaaacccttctgctgagggtggaggagaagat

SEQ ID NO: 292370 - DNA, 247 bp, Glycine max
  unsure (1)..(247): unsure at all n locations
cnaagatacaggacaaggaaggtattccaccagaccagcagaggcttatttttgcagggaagcagctggaagatgggcgtaccctggctgattataatatccagaaggaatccactctgcatttggtgttgaggcttcgtggtggtatgcaaatatttgtgaagactctgacagggaagaccgtaaccttggaggtggaaagctctgataccattgataatgtgaaagcnaagattcaggacaagga

SEQ ID NO: 292371 - DNA, 241 bp, Glycine max
  unsure (1)..(241): unsure at all n locations
ggaagagaatccccgtgtgcccatcatncgtcaccggtaacgatttctccacactctatgcgcctttcatccgtgatgggcgtatggagaagttctactgggcaccaacaagggatgaccgcattggtgtctgcactggaatttttcgcaccgattcaattcctgaacaggacttgtcaagattgttgacaccttccctggccaatccattgatttctttggtgcactgagggccagagta

SEQ ID NO: 292372 - DNA, 248 bp, Glycine max
gcgaataaatggcgactaagaggagcgtgggaacgttgaaggagggtgatttgaaggggaagagggtgttcgtgagggtcgatctgaacgtgcctttggatgacaaccttaacatcaccgatgacactagagtccgtgctgctgttcccaccatcaagtacttgactggttatggtgctaaagtgatcctttctagccatttgggacgtccaaaaggtgtaacacctaaatacagtttgaagcctctt

SEQ ID NO: 292373 - DNA, 244 bp, Glycine max
  unsure (1)..(244): unsure at all n locations
gcaattgaagttaaaagccttagccttccctacaactccaaacatnaagacatcntcatccatggctgcctccgtctccactgtcggagctgtcaacagagctcttttgaacctgaatggttctggagctggagcttcagctcccagttcagccttctttgggaccagcttgaagaaggttattgcctcaagggtccccaacagcaaggtttccggtggaagcttcaagattgttgctgtagaa

SEQ ID NO: 292374 - DNA, 243 bp, Glycine max
  unsure (1)..(243): unsure at all n locations
agttaaaagccttagccttccctacaactccaaacanccccgacatcntcatccatggctgcctccgtctccactgtcggagctgtcaacagagctcttttgaacctgaatggttctggagctggagcttcagctcccagttcagccttctttgggaccagcttgaagaaggttattgcctcaagggtccccaacagcaaggtttccggtggaagcttcaagattgttgctgtagaagagaag

SEQ ID NO: 292375 - DNA, 241 bp, Glycine max
cagaggagttgtaaattaagagcatggctgcacaagctcttgtatcatcatcttctcttaccttctcagcggaggctgcaagacaaagtcttggaccaagatcactccaatctccatttggcttctccagaaaagcctcctttcttgttaaggcagctgctaccccccctgtcaagcaaggatcagacaggcctttgtggtttgcatcaaagcaaagtctttcttacttggatggcagcct

SEQ ID NO: 292376 - DNA, 239 bp, Glycine max
gtcgctggcattgcaggtcttctcaaagcatatcatcctacttggagtccagctgctatcaaatcagctattatgaccacagctacaacactagacaacacgaatcaaccgattcgcaatgcatttgatgaggtagcaactccattcgaatatggtgccggacacattcaacctaaccttgcaattgaccctggactcgtttacgatttacgcacctccgattacttgaacttcttatg

SEQ ID NO: 292377 - DNA, 238 bp, Glycine max
  unsure (1)..(238): unsure at all n locations
ctcagtctctgtgtttgcggctgaggattccgaacgagtgaccttcttcgtttctgcgcaaagtttaagtaatcatgggtaaggaaaaggttcacatcaacattgtcgtcattggacatgtcgactctgggaagtcaactaccactggtcacttgatctacaagcttggagtattgacaagcgtgtgattganaggttcgagaaggaggctgccganangaacaagaggtcattcaac

SEQ ID NO: 292378 - DNA, 239 bp, Glycine max
aaagttagggttttgcattttggatcagtcagactcagacatgggaggaggcaatgcccagaagtccaaagatggctcgcgagaagaatctcgagaagcagaaagcagcggctaaggggagccagttggattcaaacaagaaagctatgtctattcagtgtaaggtgtgcagcaaacatttatatgcaccacatcagaagtgaagtgtaaggagcatgctgaagccaaacaccccaaat

SEQ ID NO: 292379 - DNA, 247 bp, Glycine max
  unsure (1)..(247): unsure at all n locations
gnaatggcgatggcaatggcgcttcgcaggctttcatcttcaattgacaagcctctgcgccctctcttcaatgccggttccctctactacaagtcgtctttgcctgatgaagctgtttacgacaaggagcgacccggagttacatggccgaagcagttgaatgctccacttgaggtctggatcctgagattgctgatattattgagcttgagaaagctaggcaatggaaggggctagaattgatacc

SEQ ID NO: 292380 - DNA, 238 bp, Glycine max
ttctattcattcaagattcagcaagtgcgtttcggaagcagagaccgaaatactttcgagatggcccgtacaaagcaaactgcttcgtaagtcaactggaggaaaagctcccaggaagcagcttgcaaccaaggctgcacgtaagtctgctccaacaactggtggtgtgaaaagcctcatcgttatcgccctggaactgttgctcttcgtgagattaggaaataccagaagagcactg

SEQ ID NO: 292381 - DNA, 239 bp, Glycine max
gtcttgcaattgaagttgaagtcttgcccttctctcttcaactccaaacacaagacatcatcatccatgggctgcctccgtctccactgtcggagctgtcaacagagctcttttgaacctgaatgggtctggacctggggtttcagctcccagttcatccttctttgggagagcttgaagaaggttattggctcaagggtccccaacacaaagatttcctctggaagcttcaagattgt

SEQ ID NO: 292382 - DNA, 242 bp, Glycine max
ggaaacaaaacgcacaaaggattattatagcaatgggcagaacaaaaccaaaaccagacaactgaagctggaaggcaccaagaggttggccacaagagccttctccagagtgatgctctttaccagtatattctggagaccagtgtctacccaagagaacctgaatccatgaaagaactgagagagttgacagcaaaacacccatggaacatcatgacaacctctgcagacgaagggcaatt

SEQ ID NO: 292383 - DNA, 245 bp, Glycine max
cagattatatcctggtgtttctgatgcattaaaatttgcaagctcgagagtgtacattgtcaccacaaaacagagccgctttgctgatgctttactccgagagcttgccggagtgaccataccacctgaaagaatatatggccttggaactggtcctaaggtagaagttctgaagcagctacagaaaaagccagagcaccaaggactgacactgcactttgttgaggatcggctagctaccttaa

SEQ ID NO: 292384 - DNA, 241 bp, Glycine max
cttgtttgtttgctcacaactttatttgcaactgacttctttgagcatcaaggctgtaaaggagattgagcctgcattgaagaaacagctcatcatttccactgccttgatgactattgggattgcaattgttagttggattgcactcccaacttccttcactatcttcaatttggagtgcagaaagatgtcaagaattggcagctattcttgtgtgttgctgttggtctttgggcagggc

SEQ ID NO: 292385 - DNA, 238 bp, Glycine max
ggcaggaggtggagtggtgaagaggccatccaatcagaaaagccaacctatcaagtgattcaaccaatcaacggtgatcccttcattggaagccttgaaaccccagttacatccagccccttgattgcatggtacttatcgaacctccccgcatacaggaccgcagtgagcccactactaagagggatcgaggtgggcctggcccatggctaccttctggtgggcccattcgtgaagg

SEQ ID NO: 292386 - DNA, 236 bp, Glycine max
ttgtgccagttggaggcttggcgtggaagcaaacaacgtagtcaagtggcaaactgttcctgcagcttgcggagagtacatagctgactacgttctaggagaccaatatagatcagattccaaaacagttaaccaacaagcttatttctatgctaaatccctcaaactcaccaacaaagatgtctttgtcttggacgttgacgacactactctctctaatctccagtattttgcta

SEQ ID NO: 292387 - DNA, 236 bp, Glycine max
  unsure (1)..(236): unsure at all n locations
angcgtcgtcgacgacgcttttcttgcaaaaatacggtatcaagttgaacgatgcgattctcgccgaggataaacacaaacctatgtatgaagaattggctaacaatcctaatgtggagtacattgctggaggtgctactcagaattcaatcagggttgctcagtggatgcttcaagcaccaggtgccacaagttatataggttgcataggaaaggacaaatttggagaggagatg

SEQ ID NO: 292388 - DNA, 237 bp, Glycine max
acttaatcgatcatcacttcacttcactaatacatcatgggcagacgagacccagaacaagtatgagagctctgaggttgaggtccaggatcgtggtgtttttgactttctcggtaagaaaaaggatgaagaagacaagcctcatcctcaggaggaggtcatcgccaccagtttcaaaaagtcactgtctcagaccaaggagagaacaagcacagcctcttagaaaagcttcaccga

SEQ ID NO: 292389 - DNA, 239 bp, Glycine max
gggacatcaagccagacaacttcctaatgggtttggggaggcgtgcaaatcaagtttatgccattgactttggtcttgctaagaagcacagagacacctctacccatcaacatattccttacagagagaataagaatttgactggaactgctagatatgctagtatgaatactcatcttggaattgagcaaagccgtagggacgacttagaatcacttggattgttcctagtatttttg

SEQ ID NO: 292390 - DNA, 298 bp, Glycine max
  unsure (1)..(298): unsure at all n locations
cagattttcgtcaagactttgacgggaaaanaccatcaccttggaggtgganagttcagataccatagacaatgtgaaagccaagattcaagataagganggtatncccccagaccagcagaagcttatctttgctggtaaacagnttgaagatggacgagcccttgcagattataacatccagaaggaatctaccctgcanttggttttgaagcntcgtggtggcatgcaaatctttgttaagactttgaccggcanaacaataactntagaagttnaaagttcnnatnccatcacc

SEQ ID NO: 292391 - DNA, 290 bp, Glycine max
ggatcatcaaacatgaagagtttctgactcataggctggcccttctgcacgcggccgacaagtatgacatatctgatttgagagatgtatgccatgagagtcttctagaagatattgacacaaagaatgtacttgataggctccaaaatgcatctctatatcagttgatgaaactgaagatgagttgcatccgatatcttgtgaagtttggtaaaatatatgaaattcgtgaagatttcaataccttcctgcaaaatgcagatagggatctgattgctgaggtcttccat

SEQ ID NO: 292392 - DNA, 284 bp, Glycine max
  unsure (1)..(284): unsure at all n locations
cttgtggaagctgctatttttgaagacgaaaatggtgtttcgagttctgaagttgagctacattcttgacaaactggatagtaaatggacggatcagtaccttgactttgattacattagtttttcaaccgggaaatggtttctcaaatctgcaatctactatgagaatgacaccatattgggctgccactcctgtcctaagaagaacctgacagagctggggtttaactttgcttattncaatgccttgaaattagtaatgaactncatagtgtctcggaacc

SEQ ID NO: 292393 - DNA, 175 bp, Glycine max
  unsure (1)..(175): unsure at all n locations
ccaagatccaggacaaggagggtatccccccggaccagcaacgtntcatcttcgncgggaagcanctncgangacggangtacccttgcngcctncnagatccanaaggngtcaantctccacttggtgttgngtcttcgtggtggnatgcccttttcgtgaagactcttacggg

SEQ ID NO: 292394 - DNA, 289 bp, Glycine max
  unsure (1)..(289): unsure at all n locations
caatttttaatcgcatcgaaataccaacttcatttgatcctttaaatggtctatacattggtgcgcatgggctttactcctctgaagttattcatctaagacgtagatttggtcagtggcaagangacaatggggccaaggagccttcaaatcttgagttttatgagtatgtagaggctttgaagctaacaggggatccttatgtaccagctggtcacgtggcatttcgtgcaaaaattggaaagaggtatcaattgcctcataaagggataatacctgaagagtttgg

SEQ ID NO: 292395 - DNA, 287 bp, Glycine max
tgctgactgtgatgggtgtgttcaaatctaagagcaagtgttccactgtgggtatccaaggcattgcttgggcttttgggggaatgatctttgctcttgtttattccactgctggaatctcagggggtcatattaacccagcagtgacgtttgggctgttcttggcacgcaagctctctctgacaagggcaattttttacataatcatgcagtgcttgggagctatatgtggtgctggtgtagttaaggggttcgagccacacctctatgagaggcttggtggtggt

SEQ ID NO: 292396 - DNA, 283 bp, Glycine max
  unsure (1)..(283): unsure at all n locations
atatattccattctctctgtgtatttccctacctctcccttcaagatgcagatcttcgtcaagaccctcaccggcaagaccatcacccttgaggtggaaagctctgacaccatcgacaacgtcaaggccaagatccaggacaaggaaggaatccccccggaccagcaacgtctcattttcgccggaaagcaacttgaggacggcngtacccttgctgactacaacattcagaagganagtactcttcacctcgtctgacgtctccgtggtggcatgcagatct

SEQ ID NO: 292397 - DNA, 286 bp, Glycine max
aatgaagaagcaaggtcctgtagcggcatttgattcctatgttctggctgccgtttgtggctcttgcctgtgagcttcagctgttccctatgatctcacgaggagacaatcactcagtccccaacaatgtacaaaatatagccaagcctgtcaaaatagatggatcttcccatgcattgcagaatggcatagattcagcaatacgccatactcacagaattttagcaattttagaggcggtgttttcattgaagccatcttctgttggtacctcatggagttacag

SEQ ID NO: 292398 - DNA, 295 bp, Glycine max
aatggtggccacagttggtattcctgagaatacaggtatagcattggcctgtgctatgaatagttcttttagggggcgtgccagttctgatatttacaccatctgctctcaagactgtgaattatggaatcctgcttgcacaaaagcaatgactatgtcatttaatccaaacccgtgttctgatgcatggagtttggaatttctgaagcgtaccggatttcattgtgatatcatttgtgtcactggatggactgccactccaatgcaggatgttcaggttacaattgattggttt

SEQ ID NO: 292399 - DNA, 297 bp, Glycine max
gagagagcaaatgtttgaagtactgaatatttattttactgtgacattgcagttgaacctgaatggttctggagctggagcttcagctcccagttcagccttctttgggaccagcttgaagaaggttattgcctcaagggtccccaacagcaaggtttccggtggaagcttcaagattgttgctgtagaagagaagaaagagattgaagagacccagcagaccgacaaggacagatggaagggtcttgcctatgatatctcagacgaccaacaagacatcacaagaggaaagggttt

SEQ ID NO: 292400 - DNA, 295 bp, Glycine max
  unsure (1)..(295): unsure at all n locations
gagaaattttggatctcagtttttggcaggaaaaaaaaattgcatttgagtaaaaataacagagtgtagtgtagggtcttgttcttnntactgtgctaaatttgttggatggcggagaaatcatgcatcaagcgccttcagaaggaatatagagccctttgtaaagagccagtttctcatgttgtggctcgtccttcaccgagtgatattcttgagtggcattatgtgttggagggaagtgaaggaacaccttttgcaggtggatattactatggaaaaatcaagtttcctcctg

SEQ ID NO: 292401 - DNA, 292 bp, Glycine max
gaaagtgagtgagagaaagagatcacatagcagaatggcttctactcaatgtttcttgcaccaccatgctcttaccacccctgccagatccccatcacaacgcatcatggttagcaccaagcctaaccagcttgtttgcaaggcacagaagcaagaggatattgatgtcagcccaatctctcgccggttagctctaaccgtgctcattggtgctgatgctgttggctccaaagtccaacctgctgatgcagcttatggggaagctgccaatgtgtttggaaagccaaagaca

SEQ ID NO: 292402 - DNA, 169 bp, Glycine max
  unsure (1)..(169): unsure at all n locations
agaagaacaagtagttganaacnaagaaggagaagcaaatggcttcctcaatgatctcttccccagctgttaccactgtacaaccgtgccggtgccggcatggttgctccattcactggcctcaagtccatggctggcttccccaccagaaagaccaacaatgacatta

SEQ ID NO: 292403 - DNA, 281 bp, Glycine max
  unsure (1)..(281): unsure at all n locations
cagccttccgggtgactatggatttgaccctctgggactttcagaccctgaaggaacaggagggttcattgagccgaaatggctagcatatggtgagataatcaatggtcgttatgcaatgttgggtgcagttggngcaatagcacacnnaattctaggcaaggctggtctgatccctcaggagacagcactcccatggttcagaacgggtgtgttcccacctgcaggaactacaactactgggcagactcctacacactgttcgtgtttganatggcang

SEQ ID NO: 292404 - DNA, 296 bp, Glycine max
  unsure (1)..(296): unsure at all n locations
ggagaccacgccatactggtgtaatggttgggatgggtcagaaggatgcttacgtgggtgatgaagcccaatcaaaaaggggtatactcaccttgaagtatcctatagagcatggcatagtcagcaactgggacgatatggagaagatttggcatcacacattttacaatgagctacgtgttgcccctgaagaacaccccgtacttcttaccgaggcaccactncaatcccaaggccaacagagagaagatgacccaaattatgtttgagatttcaatgtgcctgccatgtatgtt

SEQ ID NO: 292405 - DNA, 290 bp, Glycine max
  unsure (1)..(290): unsure at all n locations
ccaatatattccattctctctgtgtatttccctacctctgcccttcaagatgcagatcttcgtcaagaccctcaccggcaagaccatgcacccttgaggtggaaagctctgacaccatcgacaacgtcaaggccaagatccaggacaaggaaggaatccccccggaccagcaacgnctcattttcgccggaaagcaacttgaggacggncgnacccttgctgacnanaacatncagaaggagggnancttgacntngtcctnggtctcggtggggggnatnnaaattttt

SEQ ID NO: 292406 - DNA, 280 bp, Glycine max
  unsure (1)..(280): unsure at all n locations
acttgcatcaattgttgtctgaagatccaagtgaactagagaagctggaccatgcgtgcaaagaatggggtttctttcagcttataaaccatggagtggaccctccagtggtggaaaatatgaagataggtgttcaagaattcttcaaccttccaatggaaganaagcagaanttntggcaaacaccagaggatatgcangggtttggccagttnnntgttgtatcagaggnncaananctanaatgggcagncatgttctatgctcacacatgtccatt

SEQ ID NO: 292407 - DNA, 281 bp, Glycine max
  unsure (1)..(281): unsure at all n locations
cggggactcttcnggcggcanagcgccggaaacctagactcnatccgtgcgccgtcacgcaacagggatggnccttcgtngctgatggccgtcgccnncgaaccatcggnagactggactcctcgtcgcgccaacaccttcgagaagctcgctaagattgggcaagggacgtatagtaatgtgtataaggcaagggaccttgtgacggggaagatagtggcattgaagaaagtgagatttgataatttggagccagagagtgtgaattcatggcaagagag

SEQ ID NO: 292408 - DNA, 293 bp, Glycine max
ttcgattccatttctagaaagctcgtcgaaacaacctacgccgtcgacaacacctaccttctgttttcagcgtatcttgtcttcgccatgcagctcggcttcgccatgctctgcgccggctccgtcagagccaaaaacaccatgaacatcatgctcaccaacgtcctcgacgccgtcgccggcggtctctcctactacctattcggctttgcattcgccttcggcggcccctccaacggcttcatcggccgcccaaacttccgcctacgagattacccgatgggctctctatc

SEQ ID NO: 292409 - DNA, 280 bp, Glycine max
  unsure (1)..(280): unsure at all n locations
ganaagtgagatacactaagttatcctcataaatacactgctaattaggtggcaagataagtgtctaaccttagtaacattgccacatattgtgttcattttggaattgtgccactaaaattctattcaattcatctatggctgcctcttcttatgctatgcaatcaatcctggcaaaccctttgatccgcatttccagcgggtctagggtgaaccaatttggncgttcntgctttgcacatgagaaggaatgtnggcctgagagtnaggtccatggcta

SEQ ID NO: 292410 - DNA, 282 bp, Glycine max
  unsure (1)..(282): unsure at all n locations
tgataattcattttacacctcagattaccagtatagtccacagaacaataacaataatgtacaggatatgggcatataagtttatgaaaggtataccaaactttgtaaagatagttgaagttggtccaagggatggattacaaaatgagaaaaacattgtaccaacagatgtaaagattgaattgattcatagattggcatcttctgggttatccgtcattgaagctactagttttgtatctcccaaatgggttcctcagttggcagatgcaaangatgtaa

SEQ ID NO: 292411 - DNA, 280 bp, Glycine max
  unsure (1)..(280): unsure at all n locations
caaatcagagtaattggaacttgaaacttgtcattcattcatggcgattgangcatggttgatggacgaaagcaatgaagatccaagactccctcaccgccgcaatcccaacaagtcagtttcattggaccaattagcagaatttggggtgttatactggaagctgaatccaactatctatgagaacgatgaagagttggccaagattaganaagataggggatacaactacatggacctgcttgatttatgcccagaaaaggtggaaaattatgaacag

SEQ ID NO: 292412 - DNA, 288 bp, Glycine max
  unsure (1)..(288): unsure at all n locations
ctgggctttctttcaatggttttattcgggtggagataactgtggatttnntcantttcccacttttggattgaaagcatggaaaaactcattttattttgatttcagcatgacttatgtcggagcaggaatgatttgttcccatcttgtaaatttatcattgcttcttggtgctgtnatttcatgggncattatgtggcccttaatcaggggactaaaaggggnatggttnccngcaagcataccaganannagcatgaagagtcntaatggttataangntttant

SEQ ID NO: 292413 - DNA, 289 bp, Glycine max
  unsure (1)..(289): unsure at all n locations
ttttcatcattctcatatcctcaatcaccccccctcgcactcgctcttcccttcctctggtggcgacaatgtcgactcctgctaggaagaggctgatgananacttcaagangctgcaacangatccgcntgcngggatcanttgtgcnccccaggataacaacataatgctgtggnatgctgtcatatacntgncctgatgatactccatgggatggaggcacgttcaagttgacactccaatttactgaggactatccaaataaaccaccgactgtacgatttgtgt

SEQ ID NO: 292414 - DNA, 277 bp, Glycine max
ctctagatttggacaaagacgttgaaggtgatttcaccaatgtggatctgttgaatgcagcttatgatcggtgtggtgaagtctgtgctgagtatgccaagacattttacttaggcacacaattgatgactgcagagcgccgaaaagctatttgggcaatttatgtgtggtgcagaagaactgatgagctagtggatggcccaaatgcttcgcacatcacccccggggccttggacaggtgggagcaacgactgagtgatgtttttgaaggtcgacc

SEQ ID NO: 292415 - DNA, 279 bp, Glycine max
  unsure (1)..(279): unsure at all n locations
gaagtttaaatcttgcaaganctattggtgacatggaatttaaacagaataagtttctttctgctgaaaaacaaattgtaactgccaatccagacatcaacactgttgagctttgtgacgaagatgagtttgtggtgttagcttgtgatggcatatgggattgcatgtcaagtcaacaactggttgattttgttcatgaacaattgcactcggaaacaaaactttctgccgtgtgtgaaagagtacttgatcggtgtttggcaccatcaactgccagtg

SEQ ID NO: 292416 - DNA, 279 bp, Glycine max
  unsure (1)..(279): unsure at all n locations
gcaagcactagccctgattttgtgccaaaaactgttgatatagcagccaaagaactaatagcaattgcttcccctggacaagttacacaggtacagcttgaccgagccaaaaaatccacaaagtctgcagttctaatgaatctggaatctagaatgattgcatcanaagatataggaaggcagattttgacttatggagaaaggaagcctgtggaacagttcttgaaggccgtagatgaaatcacgttgaatgatatcactaaaattgctcagaagatt

SEQ ID NO: 292417 - DNA, 281 bp, Glycine max
  unsure (1)..(281): unsure at all n locations
ctcgggccgcaccaacctgaaggctacccactggcaagangtggccgacgccgtcaccgcgcagtgccccaacgcctcccccacggcgaannaccgccgtgcagtgccgccacaagatggagaagctccgcaaacgctaccgcaccgaaatccaacgcctccgcaacctccccttcccccgcctcaacaacgccaacaccaattccccttcctcgtgggtccacttcaaatccatggactccatggaaaaaggccccaaccacaaaccccactccgacatc

SEQ ID NO: 292418 - DNA, 276 bp, Glycine max
gccatgatgcaattgggggaaggactatgtaaactgagaaagatggaattctcaaatgggccgtttcaaaagtttgagaaagacatttcagctgttctagattttatctaccagactcagatagaattagctgcatgtagtgaggatatgtgtgttgcaatggatcgatcagaaaggtcttaccaacttctaggggaatatgcttcagggcagcgtgtgtatgatctagaactttgtagtgatgcatcagtgtacattgtgttctgccctcaaggc

SEQ ID NO: 292419 - DNA, 273 bp, Glycine max
aacactcataacacaaagcacaaagcaaagctcatccttgagttaaaaaatggcagcagcttcttccatggctctctcatccccatccttggctggcaaggccgtgaagctgggcccatcagccccagaagtgggaagggtgagcatgaggaagaccgtcaccaagcaggtctcctcaggaagcccatggtacggcccagaccgagtcaagtacttgggcccattctctggcgagcccccgtcctacctaaccggtgagttcccaggcgatat

SEQ ID NO: 292420 - DNA, 273 bp, Glycine max
  unsure (1)..(273): unsure at all n locations
ccaccgttccagggcagctcgtgtgggagatcgtcaagaaaaacaattccttcttggtcaagcagtttggaaggggcacncggagcgtcgaattcagcagagagagcaacaatctctacaacctcaattcgttcaagtactctggtttggcaaacaagaaaactgttactgttcagcctgagggcaaagatcaggctgtgttgttggctacaaccaagacaaagaagcaaaacaagcccgctgcattgctccacaaatctgtgatgaagaagg

SEQ ID NO: 292421 - DNA, 266 bp, Glycine max
  unsure (1)..(266): unsure at all n locations
ttagtgaggntccacttactgtaaaantcgatcatctcaaggataaaacttacaacaaagacgatgatattataaaggccacatctttcgaggttatatcaaccctaagagatgttcttaaaacaagttccctttggagagatcatgttcagacttacactaagcatataggtgattttacttatccaaggcttgcagattttggtgctgcaatatctggggcaaataaattgcaatgccaacaagttcttgaagagctagatgtg

SEQ ID NO: 292422 - DNA, 277 bp, Glycine max
  unsure (1)..(277): unsure at all n locations
actttcgaaagantttatccaattganattttaaaaatgactgggataaacttaaganttcaattattgaaattgaataagtaaacaatttaattggattggtcgaatggtatcaaaaaaatggagtactaactcccatttcttatttatnattgaattaaccgatcaacttgctttgttntcgaacatttctttttgatttcaaaaattttccggaaaanatttgaatctatttttatatgcgaatcaatcctactacttctggtcctgaggtttc

SEQ ID NO: 292423 - DNA, 276 bp, Glycine max
  unsure (1)..(276): unsure at all n locations
acaaagagaagcattagcactaggagcagcaacaactagtctcagctgaaatggcctcttcagtgatggcatctgtggccctcaaacctgcccctttcactgttnagaagtcctcagtgagaggccttccctctctctcaaggaactcttcttcattcagagttgtggccagtggcaagaagatcaagactgacaaaccttatggaattaatggtggcatggctttgngggatggaactgatgcatctggcaggaaaggaaagggaaagggtgttt

SEQ ID NO: 292424 - DNA, 273 bp, Glycine max
  unsure (1)..(273): unsure at all n locations
ggactaccagangtccatcgacctcgacaaggacttcatcttctctcacatccaattgggcgttacanagtacaagatgggcagcatcgcctcgtccatggccactttccgccgctgcatgaagaacttcgccacagtacccgatgtgtacaactactacggcgagcttctcctcgaccagcaaaaataccaagaagccatcgagaagttcgacaggcagtagacatggaaaagagctccaagcctctcggcatgaacgtcctgccgctgatc

SEQ ID NO: 292425 - DNA, 270 bp, Glycine max
  unsure (1)..(270): unsure at all n locations
tcaagttaaagatatagacatggatganaatgctgattcttttgtggatgaatctgttatggaaaaggttctccagaagaggagtttgaggatgcgtaacatgcaaagagcttggcaggnatctcctgagggcaggaagatgctggaattccggaagtctctaccatcattcaaggagaagcaaggtttacttgaagctatagcacataatcagggcattcaccggctttgctgatgactaatctttgtcggagaatcttgctggtcacc

SEQ ID NO: 292426 - DNA, 269 bp, Glycine max
cccaattcctaattgtttaaacctaattctcatttcttcatcgttcgattcttctcctcctaaagatgcagatcttcgtgaaaactttgaccggtaagaccatcacccttgaggtggagtcctccgacaccatcgataacgtgaaagctaagattcaagacaaggaagggatcccacctgaccagcagagacttatctttgcgggtaaacagcttgaggatggtcgaacccttgccgactacaacatccaaaaggaatccatctccacc

SEQ ID NO: 292427 - DNA, 268 bp, Glycine max
ccgacgaggagcttctcgttcagtatctgtgccgcaaggtcgctggccaccatttctctcttccaatcattgccgaaattgacttgtacaagttcgacccatgggttcttccaagtaaagcgattttcggtgaaaaagagtggtactttttcagccccagagacaggaaatacccgaacgggtctcgacccaacagagtagctgggtcgggttattggaaagccaccggaaccgacaagatcatcaccaccgaagtagaaaagttggc

SEQ ID NO: 292428 - DNA, 272 bp, Glycine max
  unsure (1)..(272): unsure at all n locations
ctgcttctnctccttgtaagtncctctcgctcgctctctccgcctgnntcttctcnttgtggactgtaaganctgaactaagagatggggttgtctttcaccaagctttttagccggctctttgctaagaaagagatgcgtattctcatggtaggtcttgatgctgctggtaagactaccatcttgtacaagctcaagctgggagaaattgtcacaaccattcccacaattggattcaatgtggagacngtggaatataagaatattagctt

SEQ ID NO: 292429 - DNA, 271 bp, Glycine max
  unsure (1)..(271): unsure at all n locations
tccttgtgaagcgtgatgagctcaccttggagggtatcaagcaatttcatgtcaatgttgagaaagaggaatggaagcttgacacactatgtgatctttatgagacattggcaattactcagagtgtcatttttgtgaacaccagaaganaggttgattggctgactgacaagatgcgaancgagaccacacagtctcagcaacccatggagacatggaccaaaataccagggacattattatgcgtgaattccgttctgggtcatcccgt

SEQ ID NO: 292430 - DNA, 273 bp, Glycine max
ctgtactctatttcggataaaaatgtccaagagattaagatcagcccgggaatcatgttgttgatttatgctaaagcaagtagccatgtcccccttaaaatcctttcaatagaagatggtactattttgaagtcattcagtcatctcctttatcggaataagaaggtagattttattgaacagttcaacgaaaagctacttgtaaagcaagaaaacgagaacctccaaattcttgatgtgcggacttttgaacatacggaagtttgcagaagt

SEQ ID NO: 292431 - DNA, 270 bp, Glycine max
  unsure (1)..(270): unsure at all n locations
catggcttctctctcttnctccgccaangaccttgccccactcttccaacgacacngncgncggccaactacctctgcgcccaattcgattccatttctagaaagctcaacgtaacancctacgccgtcgacaacacctaccttctgttttcagcgtatcttgtcttcgccatgcagctcggcttcgccatgctctgcgccggctccgtcagagccaaaaacaccatgaacatcatgctcaccaacgtcctcgacgccgccgccggggtc

SEQ ID NO: 292432 - DNA, 267 bp, Glycine max
  unsure (1)..(267): unsure at all n locations
gcacaaagcaaagctcatccttgagttaaaaaatggcagcagcttcttcnatggctctctcatccccatccttggctggcaaggccgtgaagctgggcccatcagccccagaagtgggaagggtgagcatgaggaagaccgtcaccaagccaggtctcttnaggaagcccatggtacggcccagacgagtcaagtacttgggccaattctctggngagccccgtcttacctaaccgtgagttcccaggcgantacggntggganatg

SEQ ID NO: 292433 - DNA, 263 bp, Glycine max
cacatctggtctttaatgatgatattcagggaacagcatccgtggttcttgctggactagttgcatctctgaagttggttgggggtaacttagctgatcacagattcttattcctggtgctggagaggctggcactggcatagcagaactcatagcacttgaaacatcaaaacagacaaatgctccactggaggaagtgcgcaagaatatttggctggtggactcaaagggattgattgtcagttctcgcaaagattcgctcc

SEQ ID NO: 292434 - DNA, 266 bp, Glycine max
  unsure (1)..(266): unsure at all n locations
ggcaaaaaacacgaggacgttcctattttctccatgctaacaccttcgctcctccacgatttcgccattacgaanaaatacgcgatcttctgtgatattcagctcggattgaaccctcttgacatgatctccggtggctcccccgtcggctccgtcgcctccaaggtcccaaggatcggaatcctccctcgtgatgctaaggatgagtcgatgatgaagtggtttgaggtgccggggttcaacatcattcacgcgataaacgcgtg

SEQ ID NO: 292435 - DNA, 258 bp, Glycine max
  unsure (1)..(258): unsure at all n locations
ctaaaacatctccagtgggttcttcttcttctattacaacaacganatcaaaaaaccatgaccatggccatggccacgatcctgctcctgttcanggtcttcgcggtttcatcggccctagacatgtcgataatctcgtacgacaacgcccacgccgccacgtcgcgcaggagangggagctgatgtccatgtacgagcagtggctagtaaagcacggcaaggtgtacaacgcgctcggagagaaggagaagaggttc

SEQ ID NO: 292436 - DNA, 257 bp, Glycine max
cttttctcttaatggaatgatggaacacaacatcatcgtcaacaacaacgtgatcgcaccgtttgtcataaaaacctacaatatggtgaacgatcccaccaccgataaactcatcacgtggggcccagccaacaacagcttcatcgtcctcgatcccctcgacttctcccactccctcctccctactttcttcaagcacaacaacttctccagcttcgttcgccaatcaacacctatggtttcagaaaggtggatcc

SEQ ID NO: 292437 - DNA, 263 bp, Glycine max
  unsure (1)..(263): unsure at all n locations
gnaccgatctgagatcccagagtacttgaccggagaagtccccggagactatggttatgacccatttggtcttagcaagaagccagaagatttttccaaatatcaggcatttgaattgattcacgccagatgggcaatgcttggtgctgctggattcatcattcccgaggccttcaacaaatatggagcaaactgcggtcctgaggctgtttggttcaagactggagctctgcttcttgatgggggtaccttgaatacttcgg

SEQ ID NO: 292438 - DNA, 265 bp, Glycine max
  unsure (1)..(265): unsure at all n locations
cgaaaatcagaaaagctattgttgatttccatggtgaantggttctcttagtcaactacagcaacatcaattacacagggttggcaaaaattctgaagaaatacgacaagaggacaggggggcttctgcgtttgccgttcatccagaaagtgttggagcagccctttttcacaacagatttgatttcaaagctcgtgaaggagtgcgagagcataattgatgcagtgttcccggccgaggaagaagctgaaagagcaaaggaagc

SEQ ID NO: 292439 - DNA, 262 bp, Glycine max
  unsure (1)..(262): unsure at all n locations
ccaaagtttaagaaaaggcctccattaaggcgtgggagagtatcaccacatctccctgttcctgaccacataccaaggcctccttatgtaggttcagatatacttccagaaattgcaagtnagcatcaaattcatgattctgaaggtatagctaaaatgagggctgcaggtgagcttgcagcgcatgtcttaaactttgcaggaactatggttaggccttccataacaactaatgagcttgataaagcagtgcaccagatga

SEQ ID NO: 292440 - DNA, 260 bp, Glycine max
ctcatcaagggttgtgaaagcagagaagtgagatacactaagttatcctcataaatacactctaattaggtggcaagataagtgtctaaccttagtaacattgccacatattgtgttcattttggaattgtgccactaaaattctattcaattcatctatggctgcctcttcttatgctatgcaatcaatcctggcaaaccctttgatccgcatttccagcgggtctagggtgaaccaatttggcgttcctgctttgcac

SEQ ID NO: 292441 - DNA, 260 bp, Glycine max
tcagcatctgctgtagattttcctagggtgaatgagagctacactggaaggaagcagcgatatgtatggggaaccacattagacagcattgcaaaagttactggcattattaaatttgatttgcatgctgaaccggataatggaaaaacacaacttgaagtaggaggaaatgttcagggtctctatgacttgggaccagggaagtatggctcggaagctgtttatgtccctcgtgtccctggtaccgattctgaagaaga

SEQ ID NO: 292442 - DNA, 262 bp, Glycine max
caaattctccgatctaactccggccgagttccgccgccagttcctcggcctcaagccgctccgcttcccggcgcacgcccagaaggcgcccatcctccccaccaaggatctccccaaggatttcgattggcgagacaaaggagccgtcactaacgtcaaggaccaaggggcgtgtggttcgtgttggtctttcagtacgacgggagcgttggaaggagctcattatctggccactggtgagctcgtgagccttagcgagcaa

SEQ ID NO: 292443 - DNA, 258 bp, Glycine max
caagaacggcttcaggctcttgcgatcaacaaacgcagcgttttgatctcagatttgagggggagagaatggcaacaacagtgagaagtctgaagataaagacaagtacgtgcaaacgtatagtgaaggagctgcattcttatgagaaggaagttgagagagaagctgccaaaacagctgatatgaaggaaaaaggagccgatccctatgatctcaagcaacaggaaaatgtcttggctgagtctaggatgatgattc

SEQ ID NO: 292444 - DNA, 262 bp, Glycine max
gagaaagatgcagctgggatgtcgtgacatggaatggtggatgaggaggaggcagttgccatcgcgattaagacaaagagttcgccattttgaacgtcaaagatgggcagcgatgggaggagaagatgagatggaaatgatcaaagacttgccggaggggctgaggagggacatcaagcgccatctttgcctcgacctcattagaaaggttcctctattccacaacatggatgatcttattcttgacaacatctgtgacagg

SEQ ID NO: 292445 - DNA, 288 bp, Glycine max
cttgataaccactgatcttttggctcgtggtattgatgtgcaacaagtgtctctagttataaactttgatctccctacacagcctgagaactatctccaccgtattggtcgtagtgggaggttcggaaggaaaggtgttgcgatcaattttgtcacaaaggatgacgagaaaatgctgtttgacatccagaagttttacaacgtgcaagttgaggagctgccttcaaatgttgctgagctcctttgatcagattttgtcctccgtcgtagtagatgaaattagtttgc

SEQ ID NO: 292446 - DNA, 284 bp, Glycine max
aaggttgctgtaggagataagattgcagtagtgctaagtgctaacacctgcagtgaacaatggcctctgcatcagcatctctgctcaagtcttcacttgttcttgacaagtctgagtgggtgaagggacaaacccttcgccaaccttctgcatcagttgtgagatgcaaccccaccaccccatcaggcctcaccatcagagctggttcctatgctgatgagctcgttaagaccgcgaaaacagtggttcaccagggaggggtattttggccatggatgagtcca

SEQ ID NO: 292447 - DNA, 283 bp, Glycine max
  unsure (1)..(283): unsure at all n locations
caatggtttcggacgcattggtagaaacttccttcgctgctggcacggccgaaaagactcaccccttgangtcgttgttgtcaacgacagtggtggtgtcaagaatgcttcgcacctgcttaaatatgattccatgctgggaacttttaaagcagatgtgaaaatactggacaatgaaaccatcactgttgatggtaagcccatcaaggttgtttcaagcagggaccctcttaagcttccttgggctgaacttggaattgacattgttattgagggaaccgga

SEQ ID NO: 292448 - DNA, 280 bp, Glycine max
  unsure (1)..(280): unsure at all n locations
actctctctaacttcagggcagagctatgggcggaaattttatggaggaattggaattcatggcatcaagggaaggtctcagctctcagttgccaatgttgccactgaagttaactctgtagaacaggcccaaagtattgcttctaaagaaagccagaggccagtatacccattttctgccatagtnggacaagatgagatgaagctttgtcttctccttaatgtgattgatcctaagattggaggtgtaatgatcagggggataggggcacagggaaat

SEQ ID NO: 292449 - DNA, 292 bp, Glycine max
  unsure (1)..(292): unsure at all n locations
tcttgcgggctangggtttnagcgcanttcttctagatttaaggaagatgggtaaggaaaaggttcacatcagtattgtggtcattggccatgtcgactctgggaaatccactaccactggtcacctgatttacaagcttggaggcattgacaagcgtgttattgagaggtttgagaaggaagctgctgagatgaacaagaggtcttcaagtatgcctgggtgctggacaaacttaangctgagcgtgaaagaggaatcaccattgatattgctttgtggaagtttgaaaca

SEQ ID NO: 292450 - DNA, 282 bp, Glycine max
  unsure (1)..(282): unsure at all n locations
caaggaaganaacccccgtgtgcccatcatcgtcaccggtaacgatttctcaacactgtatgctcctctgcatccgtgatgggcgcatggagaagttctactgggcacctacaagggacgatcgtgttggcgtctgcaatggaattttccgcactgacaatgttcctaaggatgacattgtcaagcttgttgacaccttccccggccaatctattgatttctttggtgcactcagggctagagtatatgatgatgaggtgaggaagtggatttctgttgttg

SEQ ID NO: 292451 - DNA, 256 bp, Glycine max
  unsure (1)..(256): unsure at all n locations
gttgttgtaactcgttcttctacntttgttgttctgtacctgtgtttgttttttctcnccacctgaaaatgtcttgctgcggtggtaactgtggttgcggaagctcctgcaagtgcggcaacggctgcggaggctgcaagatgtacccagacttgagctacactgagtcaaccaccaccgagaccttggtcatgggagtggcacctgttaaggctcaatttgagggtgctgaaatgggtgtgcccgctgagaacga

SEQ ID NO: 292452 - DNA, 281 bp, Glycine max
  unsure (1)..(281): unsure at all n locations
gtttcttacaagcctctactatactgcttcaccttctgctctagaaaattcagtgctgaaacatggcttcggctactctctctgtagccaaaccagcccttcaggcaaatgggaaaggcttctctgaattctctggcctccgaagctcatcaggcttccttcccttttctagaaaatcttcagaggatttccattctgtcattgccttccagacctatgcagttgncaagcagtggaggatacaagaagggtgtgacagaagcaaaactgaaggttgccat

SEQ ID NO: 292453 - DNA, 283 bp, Glycine max
ctatgctttaatattgaggtctctcactgttttagaaggtttagcactctatgctgatcccaattttaaggttcttgcggcatcatacccatattttgctaagcggctcttgacagatccaaacccatatctaagagatgctcttatagagttgcttttccaggatgggaggttcaggtggggtagacttgaaaacctgctagcccaggggagaatggacagggatttctctgcaaaagaggctttgcaacctgtcctgaaggtattattgagtccagatggt

SEQ ID NO: 292454 - DNA, 276 bp, Glycine max
  unsure (1)..(276): unsure at all n locations
aatggttnggagaaagcaaaggcctccaagcctccaatgttgcctgatgactttgacaaaccggagtttgccacggtcaacattcagngtgatctgttctatggttacgatactctcatggagaatgtctctgatccttctcacattgagtttgctcatcacaaggtcacgggnaggagagacngagccaaacctctgccattcaagatggattctcgtggttcatggggcttctctggagctaatgaagggaacccacagancnctgccnagttt

SEQ ID NO: 292455 - DNA, 271 bp, Glycine max
  unsure (1)..(271): unsure at all n locations
cattctnnangatggacggctggatganagaaaagcaatgaaggaagagttgtcaggggaggggaaatttaatgttctgataacacactatgatcttataatgaganataaagcatttctcaagaaaatccattggctctacttgattgtggatgaagggcatcgattgaagaatcatgagtgtgctctagcaagaaccctggactctggctatcacattcaacgaagactgctgttgactggtaccccaattcagaacagtttgcaggaa

SEQ ID NO: 292456 - DNA, 272 bp, Glycine max
  unsure (1)..(272): unsure at all n locations
gcccaacatcaaggttcctctcattcttggtatctggggaggcaagggacaaggaaaatctttccaatgtgagcttgtctttgccaagatgggaatcaaccccatcatgatgagtgncggagagttggaaagtggaaatgcaggagagccagcaaaactgatcaggcagagataccgtgaanccgcagacttgatcaagaagggaaagatgtgtgctctcttcatcaacgatcttgatgcaggagctggtcgtcttggtggaaccacccaat

SEQ ID NO: 292457 - DNA, 265 bp, Glycine max
  unsure (1)..(265): unsure at all n locations
ttgcaagantgaaaaccttctcttacccttctctcaagtttcaagagatttcatcatggctccaaagaaggacaaggctccaccaccttcctccaagcccgccaaatctggcggtggcnnnnnnnnnnnnnnnnnnnnnnnnnnnggaaagcaaaaggagaaggtgaacaatatggtgctgtttgatcagggcacctatgacaagctcctttctgaagctcccaaatacaagctcatcactccttccattctctctgatcgtttg

SEQ ID NO: 292458 - DNA, 271 bp, Glycine max
  unsure (1)..(271): unsure at all n locations
gaagtataactgcttactttccctcaaaatgatactttaatctaagtattttatctaaataaattctatagccctgaccggcacatcaaccaaagtctctaagatatattggaagcatggtagctgatgttcatcgtacgttgctttatggaggcatctttttgtaccctgctgacaaaaaaagtccaaatggaaaacttcgtgtcctgtannnagtcttcccaatgtcattcttgatggaacaggcaggaggacagtctttcacgggcaa

SEQ ID NO: 292459 - DNA, 267 bp, Glycine max
  unsure (1)..(267): unsure at all n locations
tcgatggtgaagctgaattggctcaaggtggtggagaagaagtgtcgaattttgacttcgacttgtttattattggggctggaagtggtggcgttcgtgccgctagattttcatccaatttnngagctaaggtggggatttgtgagcttccatttcatccaattagttcagaaacaattggaggagtcggtggaacgtgtgttattcgtggttgtnttcccaaaaagattttggtctatggagcatcttttggaggtgatcttgagg

SEQ ID NO: 292460 - DNA, 276 bp, Glycine max
  unsure (1)..(276): unsure at all n locations
gcgtactcagactcttgtcaaaagtgctatcgttcaggttgatgctgctccattcaaacagtggtatcttcagcactatggtgttgagattggtaggaaaaanaagacagctgccaagaaggaaactgcagaggagggtggtgatgctgctgcagctgcagaagaagccaaaaagagtaaccatgtgcagagaaaattggagaagcgccagncagatcgaaagcttgatgctcacattgaggagcagtttggtggtgggcgtttgttgcttgcatt

SEQ ID NO: 292461 - DNA, 266 bp, Glycine max
tacaacaacatgtaccgcataatgttcgaccggaggttcgagagcgaggaggatcccatcttccagaggctaagagccttgaacggagagaggagtcgcttggcgcagagctttgagtataactatggtgattttattcccatcttgagactcttcttgaagggttacttgaagatttgcaaggaggtgaaggagacgaggttgaagcttttcaaggattacttcgttgacgagaggaagaagcttggaagcaccaagagcaccaa

SEQ ID NO: 292462 - DNA, 236 bp, Glycine max
  unsure (1)..(236): unsure at all n locations
gcgctttctgcaaaccgaacatttcatctccaaagggatcaacaggtcgaaggagaaatggggctgacattcacgaagcttttcagccggcttttcgcgaagaaggaaatgcgaattctgatggttggtcttgatgctgctggtaagaccactatctctacaagctcaagctccggagagatcgttactacaattcctaccattgggttcaatgttgagactgtggaatacangaa

SEQ ID NO: 292463 - DNA, 268 bp, Glycine max
  unsure (1)..(268): unsure at all n locations
cggacatttgangtgtctttactcaccattgaggagggtatctttgaggtgaaagccactgctggtgacacccatcttggaggtgaagattttgataacaggatggtgaaccactttgttcaagagttcaagagaaagaacaagaaggacattagtggaaaccccagagcacttagaaggttgaggactgcttgtgaganggccaagagaacactttcatcgactgctcagaccaccattgaaattgatctctatacgagggaattga

SEQ ID NO: 292464 - DNA, 267 bp, Glycine max
  unsure (1)..(267): unsure at all n locations
aagttgcagtgttcttatcatgggtggtcttttgatgggtgtggatcttgtgttaagatacctcaggctncatctgaaggccccgaagcacgtgctattggatctcctaaagcgtgtgccactaggttccctaccatggtgtctcagggcttgctcttcgtttggcctgatgagaatggttgggagaaagcaaaggcctccaagcctccaatgttgcctgatgactttgacaaaccggagtttgccacggtcaacattcagcgtgat

SEQ ID NO: 292465 - DNA, 265 bp, Glycine max
  unsure (1)..(265): unsure at all n locations
gcaagtngccctaggtttcaagatctttgccaggcaggagttaaggggcttataacagcaatcgatcgttttgagccaaacaggagatttcggctatcaacttatagtttgttttggataagacatgctatcattcgttcaatgaccctctcaaacttcacacgtgttccctttggacttgaatcggttcgagcagaaattcaaaaagctaaaactgagttaacatttgagcttcagaggtcaccaacagaggaagaaataatag

SEQ ID NO: 292466 - DNA, 264 bp, Glycine max
  unsure (1)..(264): unsure at all n locations
tttcttcctcagtagtgtcattnacgcttctcttctctgcagcaactatgcctaaccctaaggtcttcttcgacatgaccatcggcggtcaatctgctggccgcatcgtgatggagctctacgccgacgtcactccccgcaccgccgagaacttccgcgcgctttgcaccggcgagaagggcgtagggcggagggcaagcccctccactacaagggctcgtccttccaccgcgtgatcccgagtttcatgtgtcagggtggcga

SEQ ID NO: 292467 - DNA, 262 bp, Glycine max
  unsure (1)..(262): unsure at all n locations
gcactgcactggttcatctctccactcatgtcccagcaatcaaggacaagcttgaggatgcagatgagaggctaggagctgacattgtgcaaaaggcactgatagctcctgcagcattgattgctcaaaatgctggaatagaaggtgaagttgttgtggagaaaataaagagtggtgaatgggaggtcggttacaatgccatggcagacaggtatgagaatttanctggaggctggagttatcgaccctgccaaggtaacta

SEQ ID NO: 292468 - DNA, 263 bp, Glycine max
aattgagaaaggctgccgaaacacataaggacaacttatctgcacttatggtaacatatccttcaactcacggtgtttatgaggaaggtattgacgaaatttgcaagattattcatgataatggaggccaagtatatatggatggtgccaacatgaatgctcaggtgggactcacaagcccaggttggataggagcagatgtatgccatctcaatctccacaagacattttgcatccctcatggaggaggtggccctggcatg

SEQ ID NO: 292469 - DNA, 272 bp, Glycine max
atcatcggcaatattcatcagtttggaacactaccacatcgatctcttcgagatctctctctcaaatatggtgaaatgatgatgctgcagttggggcagatgcaaactccaaccctagtggtgtcatctgtagatgttgccatggaaataatcaaaacttacgacctagctttttctgaccgaccacacaacactgctgcaaaaatcttactctatggatgcgcggacgttggctttgcaagctatggagacaagtggagacagaaaagaaa

SEQ ID NO: 292470 - DNA, 247 bp, Glycine max
  unsure (1)..(247): unsure at all n locations
gaacacaatgtgttaatacttttggggatgagcagcttgcagtggatttgctagctaatcagcttctttttgaggccttaaattactctcatttctgcaagtatgcttgctctgaagaaaatcctgagctcttggacatgggaggtccagttgaaggtggatttagtgttgcatttgatccccttgatggctccagcattgtggacacaaatttcncagtaggcaccatctttggtgtgtggcctgg

SEQ ID NO: 292471 - DNA, 240 bp, Glycine max
  unsure (1)..(240): unsure at all n locations
tttgataaccgtgagtnacagannactccattctccaaggtttggacgaaatagagaggcgcattgagnatggagagttcaattggagagctgacagggaggatgttcacatgaacattgaggccgcnctcaccgacttgatcggtgagcctgccaagangctccacactgcacggagccngaacgatcaggtcttgacggattttcccctctggtgtcgcgacgccattgacaagatcc

SEQ ID NO: 292472 - DNA, 238 bp, Glycine max
gagaaagatgcagctgggatgtcgtgacatggaatggtggatgaggaggaggcagttgccatcgcgattaagacaaagagttcgccattttgaacgtcaaagatgggcagcgatgggaggagaagatgagatggaaatgatcaaagacttgccggaggggctgaggagggacatcaagcgccatctttgcctcgacctcattagaaaggttcctctattccacaacatggatgatctt

SEQ ID NO: 292473 - DNA, 249 bp, Glycine max
  unsure (1)..(249): unsure at all n locations
cnggcagctcacaaaactggaggtgaaggagattgctgacataatgctcaaagaggtgtttgatagactgaaggtgaaagatattgaacttcaagtgacaganagattcagggacagagtggtggaggaaggttatanccctagttatggagctagacctctaagaagagccataatgcgacttttggaggacagcatngctgagaagatgcttgccaganagatcaaggagggcgactctgttatagt

SEQ ID NO: 292474 - DNA, 243 bp, Glycine max
  unsure (1)..(243): unsure at all n locations
caattcttggatagtttgtatatggancaggacatggatgatgttgtgactaagacagcaattggcgtgcttggagatttagctgatactttgggcagtagtgctggccccttgattcagcaatctgtgtctagcaaagacttcctcaaagagtgtttatcatctgatgaccatttgattaaggaatctgccgaatgggccaagttggcaatcagtcgagcaatttcattttgaggctattgc

SEQ ID NO: 292475 - DNA, 241 bp, Glycine max
  unsure (1)..(241): unsure at all n locations
ttggatttantgtgaagaatgtngcagtcaaggatctcaagcgtggttttgttgcatccaactccaaggacgaccctgccaaggaagctgccaacttcacatcccaagtcattatcatgaaccatcctggccagattggtaatggatacgcaccagtccttgactgccacacttctcacattgctgtgaagttttctgaaatcttgaccaagattgacaggcgatctggtaaggagcttga

SEQ ID NO: 292476 - DNA, 238 bp, Glycine max
  unsure (1)..(238): unsure at all n locations
tgaaaactaaggaataatttaccattgccaacagtactagttgcaattgtttctctcttcttccttcaatccagacaaaagagctgganaattttggtactccggacttcactatatacaatgctggacagttcccctgtaatcgttatactcactacatgacatcctccactagtatagatcttaatcttgctaggagggaaatggtcatcctcggcacacaatacgccggggaaat

SEQ ID NO: 292477 - DNA, 237 bp, Glycine max
  unsure (1)..(237): unsure at all n locations
cgnttatcctaagtctttgggaatagtgctgcaatggcttcaagtcaggaggaggtgacccttttgggagctactggaagcccatttgtgtgcagggttcatattgccctcaagttgaagggagttcaatacaaatatgtcgaagaaaatttgaggaacaagagtgaactgcttctcaaatccaacccagttcacaagaagattccagtgtttattcacaatgagaagtccatagca

SEQ ID NO: 292478 - DNA, 240 bp, Glycine max
  unsure (1)..(240): unsure at all n locations
gaagacgttgatctcgctgtcgcngccgccaaagctgccctctcccgcaacangggcgccnattgggcctccgcttccggctccgttcgggctcgctacctccgcgccatcgctgccaagatcaccgagaaaaagcctgaactagcaaaactcgaagctattgactgtggaaaaccgctcgatgaagccgcctgggacatcgacgatgttgctggttgctttgagttctatgctgacctt

SEQ ID NO: 292479 - DNA, 241 bp, Glycine max
  unsure (1)..(241): unsure at all n locations
caaagggactcgntgttcttctcncangtnatttagaaaagcccacatggtgnagatttgntgcattggtgctggatatntggggggtcctactatngcagtcattgcacttaagtgcccatccattgaagttgctgttgttgatatctctaaatcccgcattgcagcctggaccagtgaccagcttcctatctatgaacctggccttgatggtgttgtgaagcaatgccgtggcaagaac

SEQ ID NO: 292480 - DNA, 225 bp, Glycine max
  unsure (1)..(225): unsure at all n locations
cttttctcttaatggnatgatggaacacaacatcatcgtcaacaacaacgtgatcgcaccgtttgtcataaaaacctacaatatggtgaacgatcccaccaccgataaactcatcacgtggggcccagccaacaacagcttcatcgtcctcgatcccctcgacttctcccactccctcctccctactttcttcaagcacaacaacttctccagcttcgttcgcca

SEQ ID NO: 292481 - DNA, 231 bp, Glycine max
  unsure (1)..(231): unsure at all n locations
tccttcttcttccttatcgcgaaatccgttacttcaaaacctaattgcgtgantntggtttctgatttgtgttgaagcgaagatgaggattatgattaaggncggngtttggaaaaacaccgaagatgaaatcctgaaagcggctgttatgaaatatggtaagaaccagtgggctcgaatctcttcgctccttgttcgcaaatctgccaagcaatgcaaagctcgctggta

SEQ ID NO: 292482 - DNA, 235 bp, Glycine max
  unsure (1)..(235): unsure at all n locations
cttagtcttcctggtgacaatggatttgnccctctggggctagctgaggacccagagaacttgaggtggtacgttcnagccgagcttgtgaatggacgttgggccatgttgggtgttgcaggaatgttgcttcctgaggttttcacccngtttggaatcatcaatgcccctcaatggtatgatgctgggaaatcagagtactttgcatcttcctcaaccctcttcgtgatcgagt

SEQ ID NO: 292483 - DNA, 235 bp, Glycine max
  unsure (1)..(235): unsure at all n locations
caacatcaaggttcctctcattcttngtatctggggaggcaagggacaaggaaaatctttccaatgtgagcntgtctttgccaagatgggaatcaaccccatcatgatgagtgctggagagttggaaagtggaaatgcaggagagccagcaaaactgatcaggcagagataccgtgaagccgcagacttgatcaagaagggaaagatgtgtgctctcttcatcaacgatcttgat

SEQ ID NO: 292484 - DNA, 228 bp, Glycine max
cggaagacaattcataggattttgaaagtccagtactcaattcctgattatgttcatatatctcccgagtgccgtcatctaatctcaaggatctttgtggcagaccctgcacagagaataagtattcccgagattcgaaatcacgagtggtttttgaggaacctgccggctgatcttatggtcgagaacacaatgaacaaccagtttgaggagcctgatcaaccaatg

SEQ ID NO: 292485 - DNA, 227 bp, Glycine max
  unsure (1)..(227): unsure at all n locations
tgagttcagttaaagatcaaggcagctgcggatcatgctggacattcagcacaactggggctttagaagcagcctatgcacaagcatttgggaagagtatctctctttctgagcagcagctagtggactgtgctggccctttcaacaactttggctgccatggtgggttgccatcacaagcctttgagtacattaaatacaatggtggaccngagacagaggaagca

SEQ ID NO: 292486 - DNA, 254 bp, Glycine max
  unsure (1)..(254): unsure at all n locations
ctnaanctgctcgatcnggtnttgctcgagccgaatcggctcgagaagcaatacagcttgcccccacatgagtgtggataacctggacctgtgttcaaccccttgaactttgcanctactttggaggccaaggagaangaacttgccaatgggagattggctatgttggcattcttgggattcatagttcaacacaacgtgacaggcaaaggaccatttgagaacctcttgcagcacctctctgacccgtggca

SEQ ID NO: 292487 - DNA, 236 bp, Glycine max
  unsure (1)..(236): unsure at all n locations
ctaactgggtttgggatgaaagtnaccctttgtatcagtcaaaagattgcagcttccttgatggaggatttcggtgttctgagaatggaagacctgatttgttctacacaaagtggaggtngcaacccaaagcttgcaacttgcccagattcaatgcaacaataatgttggaaacgctgcggaacaaacgcctagtgtttgctggggactcaattggtagaaaccaatgggagtca

SEQ ID NO: 292488 - DNA, 229 bp, Glycine max
  unsure (1)..(229): unsure at all n locations
cnagcttgttgacaccttccctggccaatccattgatttctttggtgcactgagggccagagtatatgatgatgaagtgaggaagtggatttctggtgttggtgttgacagtgttgggaagaagcttgtgaactcaaaagatggacctccaacctttgagcagcccaagatgactctggagaagctcttgctgtatggtaacatgcttgtccaagaacaagagaatgtc

SEQ ID NO: 292489 - DNA, 276 bp, Glycine max
  unsure (1)..(276): unsure at all n locations
ttatcaagagatgcaganaatccaggaaacaatttgtatgtnacaggattgtctcctaggattaccaaganagaactggaganacattttgctgctgaaggaaaagtgatagatgtccatctggtagttgatccttggacaagggaatcccgtgggtttggctttgtgacaatggagactcttgaggaggctgaacgatgtgtaaagtatctgaatcgctctgtacttgaagggcgtgtcatcacggtggagaaggtataatacttacctagcaat

SEQ ID NO: 292490 - DNA, 202 bp, Glycine max
tgattgaagaagatgccgatcagaaacatcgccatcggaaggcctgaagaggctactcaccccgacacgttgaaggcggggttggctgagttcatctccaccttgatcttcgtgttcgccggttcaggttccggcatcgcctacaacaagctcaccgacaacggcgccgccactcccgccggcctcatctccgcttccatcg

SEQ ID NO: 292491 - DNA, 272 bp, Glycine max
  unsure (1)..(272): unsure at all n locations
cantcttggtattgtcaagcacgtggatgccaagaatgtcaccattcttgaccagtcaccccaccagcttcgccaaggccaancagaaggagccactcaangaatgcaaaataatcgaaggggatgccgaggatctcncctttcgaactgattatgccgatagatatgtatccgcangaagtattgagtactggccggatccacagcgtggcatcaaggaggcatacagggttttgaaacttggaggcaaagcgtgtctaattggtccggtc

SEQ ID NO: 292492 - DNA, 260 bp, Glycine max
  unsure (1)..(260): unsure at all n locations
ctgagaatnttgatcaacgttttgaggcacttgggtggcatgtaanttgggtgaagaatggaaatactggatatgatgaaattcgtgcagccattaaggaagcaaaggctgtcaaagacaaacccactatgatcaaggtaaccactaccattggatttggttctccaaacaaggctaactcccacagtgttcatggaagtgcattaggtactaaagaagtggatgctacaaggaagaatcttggatggccatacgagcct

SEQ ID NO: 292493 - DNA, 264 bp, Glycine max
  unsure (1)..(264): unsure at all n locations
cncataattcattttacacctcagattaccagtatagtccacagaacaataacantgatgtacaggatatggcatataagtttatgaaaggtataccaaaccttgtaaagatanttgangttggtccaagggatggattacaaaatgagaaaaacattgtaccaacagatgtaaagattgaattgattcatagattggcatcttctgggttatccgtcattgaagctactagttttgtatctcccaaatgggttcctcagttgg

SEQ ID NO: 292494 - DNA, 265 bp, Glycine max
  unsure (1)..(265): unsure at all n locations
tttcatcattctcatatcctcaatcaccccccctcgcantcgntcttcccttcctctggtggcgacaatgtcgactcctgctaggaagaggctgatganagacttcaagangctgcaacangatccgcctgcngggatcanttgtgccccccaggataacaacataatgctgtggaatgctgtcatatttnnncctcatgatactccatgggatggaggcacgttcaagttgacactccaatttactgaggactatccaaataaa

SEQ ID NO: 292495 - DNA, 258 bp, Glycine max
  unsure (1)..(258): unsure at all n locations
ccatgggatccctacaagaatcggcntngcaagcgccttcaattctcccttctggactacaaattccgnngctcccatctggaacaataactcatcgctgactgttggatctagaggtccaattctgctggaggattaccatctggtggagaagcttgcaaactttgacagggaacggatccccgaacgtgttgtccacgctcgtggagctancgcaaagggtttctttgaagtcacgcatgacatttctcacctcac

SEQ ID NO: 292496 - DNA, 266 bp, Glycine max
  unsure (1)..(266): unsure at all n locations
ccnctcttcggtcntctantccngggtcttcttatcttgnttgctcnagtccctcagtgttgcacgaatgaaatatgtagctggcgatgatttaccagctgttacgcctgctcgaaangacactcgactgaancactcttttccttttcttgaatcactgaatgagattatggaaacaaacagaagtgaggnatctcagagtcatgtgcacaggttgtatttccatggcccaaatacattcagtgaaccttggcatctacttcatt

SEQ ID NO: 292497 - DNA, 268 bp, Glycine max
  unsure (1)..(268): unsure at all n locations
caaagagaagcattagcactaggagcagcaacaactagtctcagctgaaatgggcctcttcagtgatggcatctgtggccctcaaacctgcccctttcactgttcagaagtcctcagtgagaggccttccctctctctcaaggaactcttcttcattcagagttgtggccagtggcaagaagatcaagactgacaaaccttatggaattaatggtggcatggctttgnnggatggaactgatgcatctggcaggaaaggaaagggaaa

SEQ ID NO: 292498 - DNA, 259 bp, Glycine max
  unsure (1)..(259): unsure at all n locations
gcttctctttttccacatgatactaatcctccaaggtcagtgattcagtagctgagaatctgagggcatcactaccnatgaatatgttgtagcaatgagagccatgagtnaagcacctgcaggagcatccgtagatgaggatttgccaaatatacttttctctccaacaggctcagccacaactggattgagtggaggaagttctcttggttngcagtataaaggggcttggtgtacccctcctagggtattcgtggat

SEQ ID NO: 292499 - DNA, 256 bp, Glycine max
gaagccaccgatcatctatggtgatgtgagccgcccaaagccaatgaccgtcttctggtcatctctggctcagagctttaccaagcgcccaatgaagggaatgcttaccggtcctgttaccattctcaactggtcctttgttagaaatgaccaacctagatctgagaccacctaccagattgctttgtctatcaaggacgaagtggaagaccttgaaaaggctggcatcactgttatccaaattgatgaagctgct

SEQ ID NO: 292500 - DNA, 256 bp, Glycine max
  unsure (1)..(256): unsure at all n locations
cgtcacttatggaaccatcagcacaaggnggggatgtcatcatgagantgatggcaaggnactcaatgtcagacaggcttgcagaagacattgatgctgccatcaagaggatctcagatgaagcntatgaaattgcactggagcatatnaggnacaaccgtgaggccattgacaagattgtggaagtccttctggagaaggagactctgagcngagatgnaattccgtgctatattgtctgngtttgttgaaattc

SEQ ID NO: 292501 - DNA, 256 bp, Glycine max
  unsure (1)..(256): unsure at all n locations
cngagaggatgcaaattttgtcacaaaacagtggaaaaaggtgaagggaaggatgtctctgcacgttcactgccacattagtggaggtcattttctcttggatatattagcaaggttaagatacttcatcttctgcaaggagctaccagtggtgttgaaggccgtcgttcacggcgatgaaaacctattcaacagctacccagaattgcaagatgccttggtttgggtctactttcactcaaacattccagaattc

SEQ ID NO: 292502 - DNA, 259 bp, Glycine max
  unsure (1)..(259): unsure at all n locations
tcgaatccagagcagctaacanaataaaatatagttgcttgcnggccggtcgtcagtncagactagctggntcagngggggtaaganagtgttccgttagtgttctcacagtctcagtgcgaccttgcttggtcaacaatttggagagtttgcttctacacggaaacgaagactttcgagaacaaatattaaaccgggaagaaaaaaggggaaaaaaagtaaataaagtgcgcatatggcacgaaaaggaaatccgatt

SEQ ID NO: 292503 - DNA, 266 bp, Glycine max
  unsure (1)..(266): unsure at all n locations
cctttttcgaagaatttgaagttgggtatccacgaggatagccagaacaggtccaagttggctgatttgctcagataccactcaacaaagagtggagacgaattgacaagcttgaaggactatgttacacgaatgaaggagggccagaaggacattnactacattacaggaganagcaagaaggcagtggagaactctcctttcttggagagactcaagaagaagggctatgaagttctcttcatggtggatgcaattgatgagta

SEQ ID NO: 292504 - DNA, 268 bp, Glycine max
  unsure (1)..(268): unsure at all n locations
tccnatggtgaagctgaattggctcaaggtggtggagaagaagtgtcgaatttngacttcgacttgtttattattggngctggaagtngtggcgttcgtgccgctagattttcatccaattttngagctaaggtggggatttgtgagcttccatttcatccaattagttcagaaacaattggaggagtcggtggaacgtgtgtnattcgtggttgtgttcccaaaaagattttggtctatggagcatcttttggaggtgatcttgagg

SEQ ID NO: 292505 - DNA, 264 bp, Glycine max
  unsure (1)..(264): unsure at all n locations
cgagaggatgcaanttttgtccacaaaacagtggaaaaaggtgaagggaaggatgtctctgcacgttcactgccacattagtggaggtcattttctcttggatatattagcaaggntaagatacttcatcttctgcaaggagctaccagtggtgttgaaggccgtcgttcacggcgatgaaaacctattcaacagctacccagaattgcaagatgccttggtttgggtctactttcactcaaacattccagnattcaacaaggt

SEQ ID NO: 292506 - DNA, 253 bp, Glycine max
cttcgccaagaaccgtgaactcgaagtgatccactccaggtgggccatgctcggagccttgggctgcgtcttcccggagttgctgtcccgcaacggggtgaagttcggagaagccgtgtggttcaaggccgggtcccagatcttcagcgagggtgggctcgactacttgggcaacccaagcctgatccacgcccagagcatcctcgccatctgggccacacaagttatcctaatgggtgccgttgaaggttac

SEQ ID NO: 292507 - DNA, 249 bp, Glycine max
  unsure (1)..(249): unsure at all n locations
gngtgttccttctgttgtaggacacacattgtctcttactgaggctctatgtggcttccagtttgtgctgactcacctggatagcaggcagcttctgatcaaatcaaaccctggggaggttgttaagcctgagtcattcaaggcaataaatgatgagggaatgccaaactaccagaggcacttcctgaagggaaagctttacattcatttctcagtggaatttcctgataccctgagtcttgatcaggt

SEQ ID NO: 292508 - DNA, 249 bp, Glycine max
  unsure (1)..(249): unsure at all n locations
ccaatgtctcatagaatgcatgtagacaacagtgtaaaacttattgggaagcttttatttggtattgaaaagggtccagaagtactcaacgctgttagaccggcaggatcggcacttgttgatgantggcactgccttaaaaccatggtgaggacttttgagacacattgtggatccttgtctcagtatggcatgaaacatatgaggtcctttgcaaacatctgcaatgtagggataaagaatgagcaa

SEQ ID NO: 292509 - DNA, 253 bp, Glycine max
  unsure (1)..(253): unsure at all n locations
cgatggcaganatgataaacagtctttgttgtggtgatgaaaaattgatgcgtgaaaggacacacctgctgttggcttgttgttcaagaatggcaatttgtaaganagatgtttggagagttgaatgtggaatcccttctggatttccgctcacagttatttgtaatagcatttttaatgagatgctcattagatatagctatgaaaaattactgcgccaggctaaagctccaagtatgtttttacaatcctt

SEQ ID NO: 292510 - DNA, 251 bp, Glycine max
  unsure (1)..(251): unsure at all n locations
cttcccgtcttctttgtacgtgatggcatgaagtttccagatatggcncatgctcttaaacccaatcccaagaaccacatccaggagaattggaggatccttgacttcttctctcactttccagaaagccttcacatgttcacctttttatttgatgatttgggtgttccacaagattacaggcanatggatggttttggagttaacacatacacactgatcaacaaggctgggaaagcagtgtatgtgaa

SEQ ID NO: 292511 - DNA, 245 bp, Glycine max
  unsure (1)..(245): unsure at all n locations
cttaattctctctactactgctagctgtgacttnttttgagttcaatcaaatcgcattggtatctgaaatcaggaaagatggttagcgtantgagatcaggcaggcacaaagggcagaaggcccagcaaccatccttgccattggaactgcaaacccaccaaaccgtgttgatcagagcacctatcctgattactacttcagaatcaccaacagtgaccacatgaccgagctcaaagagaaattt

SEQ ID NO: 292512 - DNA, 246 bp, Glycine max
gcagcacttggtgggaatcgtgatgtgacaggaagccagaacagcgttgagatcgatgctctagctcgctttgctgttgaagaacacaacaaaaaacagaatgcccttttggagtttgaaaaggtggtaactgcgaaacagcaagtggtttctggtaccttgtacaccatcactttggaggcaaaagatggtgggcaaaagaaggtttatgaagccaaagtttgggagaagtcatggttgaacttc

SEQ ID NO: 292513 - DNA, 293 bp, Glycine max
tggacgaaaactccttatggtcaccttcaaaaccagtcaaccaacgtgatgctgatctcatccatttttgggataagttccgcaaagctcctgagggttctctcaggaaaaatgcagctcagaaacaagttttggaagcaatgtctcatagaatgcatgtagacaacagtgtaaaacttattgggaagcttttatttggtattgaaaagggtccagaagtactcaacgctgttagaccggcaggatcggcacttgttgatgattggcatgccttaaaaccatggtgaggactt

SEQ ID NO: 292514 - DNA, 287 bp, Glycine max
aaccagccatgagaccagtttgatggctcgatgccgtagagtatatgcccatgctcatgattatcatattaattctatttcaaataacagcgatggcgaaactttcatatcagctgatgatttacgaataaatctttggaacctggaaattagcaatcaaagttttaatattgttgatgtaaagcctgcaaatatggaggatctgaccgaggttataacatcagcagaatttcaccctacacattgtaatacattggcatatagcagttcaaagggttcattcgtct

SEQ ID NO: 292515 - DNA, 284 bp, Glycine max
  unsure (1)..(284): unsure at all n locations
gcacaatttgttagtggaaaaaccttcaaatatgatataattggtgctggttcacattcttcagaagattttcctgaaaaggaagatcaagaaaaacccacaaagattgataccagattgagacaaataatagatcctcaatacaatgaggttcaggctcagatggnaacaaatttgtttaaattgtctcntgntgatgttgaaactcctaaaggttccatgttggatcttaaaatttctcaatctaaaattgcacttcccaaaaacacagttggaggaaccat

SEQ ID NO: 292516 - DNA, 284 bp, Glycine max
  unsure (1)..(284): unsure at all n locations
caagacatcacaagaggaaagggtttggttgactcccttttccaagctccacagngatgctggaactcactatgcagttcatgagctcctacgagtacctcagcactggacttcgccagtacttggacaacaaaatggatggattctacattgctccagcttttatggacaagcttgttgttcacatctccaagaacttcatgacctgnccaacatcaaggttctctcattcttggnatctggggaggcaagggacaaggaaaatctttccaatgtgagcttgt

SEQ ID NO: 292517 - DNA, 287 bp, Glycine max
  unsure (1)..(287): unsure at all n locations
aaacaagtagttgagaactaagaagaaggaaatggcttcctcaatgatctcctccccagctgttaccaccgtcaaccgtgccggtgccggcatggttgctccattcaccggcctcaaatccatggctggcttccccacgaggaagaccaacaatgacattacctccattgctagcaacggtggaagagtacaatgcatgcaggtgtggcnacccaattggcangaagacgttcgagatcnttcctacttgccagaccttcgatgatgcccaattggcaaaggaagtc

SEQ ID NO: 292518 - DNA, 298 bp, Glycine max
  unsure (1)..(298): unsure at all n locations
ggcatatggatggttttggagttaacacatacacactgatcaacaagggctgggaaagcagtgtatgtgaaatttcactggaagaccactagtggtataaagtgtctattggaggaagaggccattaaggtgggaggagccaaccacagccatgccactcaagaccttcatgattcaattgctgctggtaactatcctgagtggaaactgttcgttcagacaatagatcctgagncatgaagacaaatttgactttgaccctcttgatgttactaagacttgggcctgaggacattat

SEQ ID NO: 292519 - DNA, 294 bp, Glycine max
  unsure (1)..(294): unsure at all n locations
gagcttgttagactcantgnnatcttgaatccccaaaacaaaccagggagnataactgtgattacnangatgggagctgnaaatatgagggtgaagcttccacatcttcatcagggcagtgcgcagagcagggcaaattgtcacctgggtcagtgatctatgcatggaaacaccattaaggctccatgnggtcttaaaacttcgccccttcgattcatcagggctgaagtgagagcattctttgnngtgcacgagcaagaaggaagccacccaggangggttcatctagagatg

SEQ ID NO: 292520 - DNA, 283 bp, Glycine max
  unsure (1)..(283): unsure at all n locations
gtggtgttggcgctgacaaggcttttggccgtgacattgttgacgcacactacaaagcctgtatttatgctggcatcaacatcagtggaattaatggagaagtgatgcccggtcagtgggaattccaagttggaccttcagttggaatctcagctggtgatgagatttgggcagctcgttacatcttggagangatcactgagattgctggtgtggtggtttcctttgaccccaagccaattaagggtgattggaaggtgctggtgctcacacaaactacagc

SEQ ID NO: 292521 - DNA, 291 bp, Glycine max
  unsure (1)..(291): unsure at all n locations
gtctgctttgantggagaatctcttcnngtaacaangagacntnccggntagaagtgttttnggnatcanacagttaagaagggtgagatnggnagcagttgtgnattgctagtgnggtgcacacnttttttggcaaagcanctcatctggtggacagnaccaaccaagttggacacttacnagaaagtgttacagcaattggtaacttntgcattgctcaattgcggttggaatcgccatgagctcatagtcatgtacccgattcagcaccgcagtacagggaaggaatt

SEQ ID NO: 292522 - DNA, 286 bp, Glycine max
  unsure (1)..(286): unsure at all n locations
ttcattgtgatatcattgtgtcactngatggactgccactccantgcaggatgttccaggttacaattgattggntatttcctctcaggaatgtgttcccaggacttattgtgttttaaatccacnaaatccttttgtgttgaataggtggatggggaaactgactttcccccagggcacttcccgaagtgttaagagaatgcctctttctatagggggaggagctggtgcaaagaatgctattctcatgaatatgcccaaatgctgttctttcaatgtggagata

SEQ ID NO: 292523 - DNA, 286 bp, Glycine max
tctaaaccctaaacaactctttctcttcttccttcgctcgttgttctccctcgcgtagatcgacaatggcggagacagagacgtttgctttccagggctgagatcaaccagctcctccagtctcatcatcaacaccttctactccaacaaggagattttccttcgtgaactcatcagcaacgcctccgatgctttggacaagattcgatttgagagtttgacagataagagcaagctcgatgctcagccagagttgttcatcatattattccagacaagactaaca

SEQ ID NO: 292524 - DNA, 284 bp, Glycine max
  unsure (1)..(284): unsure at all n locations
ctcactcttgtgttgttgccttcatgggccaagccantgtccattgangtatggaacccaagtggcaaatacagagttgttagcaccaaaccaatgcctggnactcgttggatcaatcttctcgttcaaaatgntgttcgccttganatatgtcncgagaagaaaacgattctgtcagttgaagacatcattgcttgattggtgataagtgtgatggngttattgggacagctgatgcacgacnggggagaacagttgtcctctantnggnncnaagccnggag

SEQ ID NO: 292525 - DNA, 289 bp, Glycine max
cacctcaaaacgctgctatctctttctccactctccccaacatggccgtcgttggcgtcctcgcgtggcaaggatctttcaacgaacacatagctgctcttagaaggttaggggtgcaaggcgtggagattcgaaagccagagcagcttaacacaattagttccctcattatccctggtggagaaagcaccaccatggctaagctcgccgagtatcacaacctgtttcctgctttgcgagagtttgtacaaatgggaaagcctgtttggggaactgtgcagggcttata

SEQ ID NO: 292526 - DNA, 287 bp, Glycine max
  unsure (1)..(287): unsure at all n locations
gttgcagacaactctgattgagcccacgtcagggcaatatgggtatcagcatgggcatttatgggccgccatgaagggatacnagatggttttgaccatgccctcttacacaagcttggaaagaanggtgaccatgagagtgtttggagctgaattaatcctcactgatccagccaaaggaatgggaggaacagtaaagaaggcttatgaacttttgganaacacaccaaatgcccacatgctggcaacattttcaaaccctgccaatactcaggtgccttttgcaa

SEQ ID NO: 292527 - DNA, 288 bp, Glycine max
  unsure (1)..(288): unsure at all n locations
ttcatgaaggagttccaaaggattacacngggcgaanatgttactgttggtaacttttttgcngtttacttggaaacaagttcggcacttactggtngcagtcngaaggttgtggacagtggacctgatgatcatatatntgtatactatactgaccatggaggtccaggggtgctcgggatgcctgctcggtccttacttatatgcggatgatctgattgaagtcttgaagaaaaaacatgnttctgggaacgtataaaaacctagtattttatctggaggcatgtg

SEQ ID NO: 292528 - DNA, 292 bp, Glycine max
  unsure (1)..(292): unsure at all n locations
gactaccagaagtccatcgacctcgacaaggacttcatcttctctcacatccaattgggcgttacacagtacnanatgggcagcatcgcctcgtccatggccactttccgccgctgcatgaagaacttcgccacagtacccgatgtgtacaactactacggcgagcttctcctcgaccagcaaaaataccaagaagccatcgagaagttcgacacggcagtagacatggaaaagagctccaagcctctcggcatgaacgtctgccgctgatcaacaaggcgctcgcgctctt

SEQ ID NO: 292529 - DNA, 268 bp, Glycine max
  unsure (1)..(268): unsure at all n locations
gtggcagctcaagtccctgacagtggtccttgcgtgacttatattggtaaaggtggctctggtaattttgtgaaaatgatccacaatggcatcgaatatggtgacatgcagctgattgcagaggcctatgatgtgctgaagtcagttggaaagttgtcaaatgaggaactacaaagtgtctcctcagaatggaacaagggagaattctgagtttccgattganatcatgcagatatattggattcangagataagggaganggatacc

SEQ ID NO: 292530 - DNA, 280 bp, Glycine max
  unsure (1)..(280): unsure at all n locations
gttattatcactgctcctgcaaagggtgctgatattccaacttatgttgttggtgtaaatgaaggggactacactcatcagatctctaacattataagcaacgcttcctgcaccacaaactgtcttgctccctttgtgaagatcctggatgaagagtttggaattgtgaagggaaccatgacaaccacacattcctacacaggagaccagaggcttttgggatgctttcacaccgtgacttgagaagagccagggctgcagcactgaacattgtcccanc

SEQ ID NO: 292531 - DNA, 289 bp, Glycine max
  unsure (1)..(289): unsure at all n locations
gccaatggggtatggagggcctcatgcagctttcttggccacttcacnagantacaagaggatgatgctggnagaatncatcggggtcagtgtcgattcttccggaaagaccgctttgaggatggcaatgcaaactagggagcagcatatcaggagggacaaggctaccagcaacatttgcactgcttcaggcactgcttgcaaacatggctgccatgtatgctgtgtatcatggacccgaaggcctgaagaacattgcacaccgtgttcatggtcttgctggggcatt

SEQ ID NO: 292532 - DNA, 278 bp, Glycine max
  unsure (1)..(278): unsure at all n locations
gcttcattcaacatttctctctcccttagctagtttttaccaatggcngctgcggttagtgctgcagtctcttttccatccaccaagtctacctctctcccaagcaggacctccatcattaccccagagagagttgtattcaagaagagatgtttgtagcagtggaagggtagtntccatcagagctcaagtcaccactgaggctccagccaaggttganaaagagtncaagaaacaggatgaaggtgtggttgtgaacaagttcaaacccaagaccc

SEQ ID NO: 292533 - DNA, 275 bp, Glycine max
  unsure (1)..(275): unsure at all n locations
cttcaacttcagttccctgctgaagatcttggttttaggtacctacaaggagcacttatgccagagagtaaagatgttgaaagtcctccagaagtactaacagggcgtcggagggactacaccccttcagcacaaccaggatcaagactggctcatatatctgtgagagtaaacccgttaagtgaggagactgtttctacattgatcttgtgtcgggagataaagttgagttcatctcatcatagcacctgtggaggnatcttatcatctagctc

SEQ ID NO: 292534 - DNA, 280 bp, Glycine max
  unsure (1)..(280): unsure at all n locations
cctcgctctatttctcagtctctgtgtttgcggctgaggattccgaacgagtgaccttcttcgtttctcgcaaagtttaagtaatcatgggtaangaaaaggttcacatcaacattgtcgtcattggacatgtcgactctgggaagtcaactaccactggtcacttgatctacaagcttgganntattgacaagcgtgtgattgagaggttcgagaaggaggctgccgagatgaacaagaggtcntcaagtatgcctgggtgctcgacaagctcaaagct

SEQ ID NO: 292535 - DNA, 293 bp, Glycine max
gtctcagagggtctgtgacacacagactcacttccaagttccaagctttgggccatttattcccactgtttattgagaacaactgcagaacatggcacagattttggctccctctacgcaatggcagatgagaatctcaaaatcctctcccaatgcaagtcccattacatcaaacatgtggagttctttattgtggaaacaaaataagaaagtttcacccacaagttctgctaaatttagagtgatggcaattaagtctgacaatagcatcatcaacaggctagagggtctac

SEQ ID NO: 292536 - DNA, 275 bp, Glycine max
  unsure (1)..(275): unsure at all n locations
ganattttaaaaatgactgggataaacttaaganttcaattattganattgaataagtaaacaatttaattggattggtcgaatggtatcaaaaaaatggagtactaactcccatttcttatttattattgaattaaccgatcaacttgctttgttatcgaacatttctttttgatttcaaaaattttcccggaaaaacatttgaatctatntttatatgcgcantcaatccnactacttcggtccngaggtttctgcgcttgaaaaaaaaatcc

SEQ ID NO: 292537 - DNA, 269 bp, Glycine max
ggttaaatgggcttattccttgcagttgtgtgcaaatacggaactggtttgactatcgtaatcatatctgtattgtaagtatttaatttgtgatggaatcatttccccaatttacaaataatttgggggttaagacaacggtgaatttaaatggttttaacaggtgtttgagaaacttggaccaagcttatacgattttctcggaaaaacaattatcgctcatttcccattgatcttgtccgtgagattggcaaacaactattggaatg

SEQ ID NO: 292538 - DNA, 272 bp, Glycine max
catctttagttcttcagtaatttattgtgggattctattctaagattttgagaatgtctagctgtgggtgtggaagcagctgcaactgtggcagcaactgcggttgcaacaagtactcttttgacttgagttacgttgagaagacaaccacagagactctagttttgggtgttgggcctgtgaaggcccaattggagggtgctgaaatgggtgttgcatctgagaacggtggctgcaactgtggatcaagctgcacctgtgacccatgcaat

SEQ ID NO: 292539 - DNA, 278 bp, Glycine max
  unsure (1)..(278): unsure at all n locations
tttttgagtaccatgatgatgacgaaccctctgaagatgtcgacntaagcatcaagggcaagaggaaagatgatggtggcatctttttgagactaagaattgctgataaagaaggtcgcatccgaaatatttatttcccatttgacatagagctggacacggcaataagtgtggccactgaaatggttgcagagctgggacatgactgatcaggatgttaccagantagccgatcngatagatgggggaattgcgtcctggtacctgnatggagaccc

SEQ ID NO: 292540 - DNA, 270 bp, Glycine max
  unsure (1)..(270): unsure at all n locations
gnagcaagttctcagcaacagctttaaatttgcacaggctctgagtgagagaagctatgagcttgtctctggtggaaccgagaatcacctggttttggtgaatctgaagaataagggtattgatggctccagagttgagaaggtgttggaagcagttcatattgcagctaataaaaacactgttcctggagatgtgtctgccatggttcctggtggcatcaggatggnccttccctgctcttacttctagaggattgttgaggaggattc

SEQ ID NO: 292541 - DNA, 294 bp, Glycine max
  unsure (1)..(294): unsure at all n locations
cnacacaacaattcactaagctaaaatcacttcatcatnngcttcctcgtgtgcttcctctgccattgcagctgttgccatctccacaccaagttcccagnagaatggatcactnctgggaagcacaaaagcttcttttcttagtgggaggaaactgaaggtgaacaactttacagcaccagttggagcacgatccagcactacagtttgcgcagttgctgagcctgatagggcctctgtggttcccaggcagcaaccctcctccatggctagatggcagtttgncaggagatt

SEQ ID NO: 292542 - DNA, 274 bp, Glycine max
  unsure (1)..(274): unsure at all n locations
gnttgcngctggtanagaggntanngcnaagaagctggctgatctcagtggaaanggggtgacnacaattatcggaggangagattctgttgcagctgtggagaaagtaggagtngctagtgtncatganccacatatctactggtggtggtgccagtntggagtnattnnaaggcnaagancntccangantccttggtctnnatgaagccgtcccagttgccgtgtaagacnattttcagcttggnnaaatttttccatcctcagattnncg

SEQ ID NO: 292543 - DNA, 267 bp, Glycine max
  unsure (1)..(267): unsure at all n locations
ctctgattttgtaattnagttcgatcaaatagctcccagtactttaattgatttctgaatatccatcacttaatttgaaggaangatggtgagcgtagtgagatccgccaggcacaaagggcagaaggcccagcaaccatccttgccattggaactgcaaacccaccaaactgtgttgatcagaggcacctatcctgactatacttcagaatcancaacagtgagcactgacgagctcaaagngaaattccagcgcatgtgtgacag

SEQ ID NO: 292544 - DNA, 270 bp, Glycine max
  unsure (1)..(270): unsure at all n locations
cgttcgtcaccatgactttcaagcgnannaatggaggtcgcaacaaacacggccgcggcnacgtcaagttcatncngatgctccaactgcggcaaatgctgncctaaggacaaggctatcaagaggtttctggtgaggaacattgttgaacaggctgcagtcagagatgtgcaggangcttgtgtctacgnncaatacacgcttccgaagctgtangtgaagatgcagtattgngtttcctgtgctatccantctcatgttgtgagggna

SEQ ID NO: 292545 - DNA, 269 bp, Glycine max
  unsure (1)..(269): unsure at all n locations
ttgaacgaaagtacgggatacattgactatgnaccagatggagaaatcagcaacactcttcaggccaaaattaattgttgctggagctagcgcttatgcacgtctgtatgattatgnacgtgtacgcaaggtttgtgataaacagaaagctatattattggcagatatggcacacatcagtggattggttgcagctggtgtcatcccatcaccttttgattatgcagatgtngttataccaccactcacaagtcacttcggggaccacg

SEQ ID NO: 292546 - DNA, 278 bp, Glycine max
  unsure (1)..(278): unsure at all n locations
aattggnccggggnnggccatgttgatntcaaagncttgcaggtcagatntcgtncaaacactcctttggttcttaaaggcattcaccctaagcatcaacggaggggaaaagattggagttgttggtcgaacaggaagtggaaaatcaactttaattcaagttttcttcaggctggtggancctacaggaggaaaaataatccttgacggcattgacatatccgccttggggctncatgatcttaggtcaggtttggtatcatcccntcaggagcctg

SEQ ID NO: 292547 - DNA, 269 bp, Glycine max
  unsure (1)..(269): unsure at all n locations
tgactgcctccaaggatcgcgagancttcgtctacatcgccaaactcgccgagcaggccgagcgttacgaagagatggtggaatcaatgaagaacgttgcgaatctcgacgttgaactgacggtggaggagcggaatttgctttctgttgggtacaagaatgtgattggtgctcgcagagcgtcctggaggatcctgtcttccatgagcagaaggnngaaacaaaagggaacgagttgaatgcgaacggattaaaggagtacagaccnc

SEQ ID NO: 292548 - DNA, 264 bp, Glycine max
  unsure (1)..(264): unsure at all n locations
cgccggcaaggggaaggcagcgaaagaccctaacaagccaaagaggcctccaagtgctttcttcgttttcatggaggagttcaggaaggtattcaacaaagaacatcctgaaaacaanngcagtgtctgctgtgggcaaagctgctggagcaaaatggaagaccatgtctgatgctgaaaaagcaccttatgtggcaaagtctgaganaaggaaagtggagtacgagaagaacatgagagcctatcaacagaaacaggcngang

SEQ ID NO: 292549 - DNA, 265 bp, Glycine max
gtaaacttggattaaatgatagagtattattagaggcacaaggtagaacaaccaagggaaaatcaattgacttggaagacatcaaatttcatcagtgtgtgcgtttggcccgatttgagaatgatcgaacgatttcatttatccctcctgatggatcatttgatttaatgacatataggctcagtacacaggttaagccttagtttgggtggaagcacaagttgaaaaacattcaaaaagccggatcgagttatggtaaaagcta

SEQ ID NO: 292550 - DNA, 271 bp, Glycine max
  unsure (1)..(271): unsure at all n locations
ctgtcaacagagctcttttgactcctgaatgnttctggagctggagcttcagctcccagttcagccttctttgggaccagcttgaagaaggttattgcctcaagggtccccaacagcaaggtttccggtggaagcttcaagattgttgctgtagaagagaagaaagagattgaagagacccagcagaccgacaaggacagatggaagggtcttgcctatgatntctcagancaccaacaagacatcacaagaggaaagggtttggttgact

SEQ ID NO: 292551 - DNA, 282 bp, Glycine max
  unsure (1)..(282): unsure at all n locations
gcagatcttcgtcaaatncctaaccggtaaaacgattacgctagaggtcgagtcctnccgacacaatcgataacgtgaaagctaaaatccaagacaaggaaggcattccaccggattcagcagcgtttgatcttcgccggtaaacaactcgaagacggcanaactctcgccgatttacnatattcagaaagaatcgacgctccacctcgtcctccggnttcgcggtggcatgcnaantctcgtcaaaaccctaaccggtaaaaagattacgctagaggtcga

SEQ ID NO: 292552 - DNA, 285 bp, Glycine max
  unsure (1)..(285): unsure at all n locations
tagaaaagaggagtttgagaatggcaacgatcagcgcggttcaggtggagttcctggagtttccagcggtggttacttcaccagcctccggcaagacctatttcctnggcggcgcaggggagagaggattgacgattgaggggaagttcataaagttcacaggcataggagtatacttggaggataaggcggtgccatcacttcgccgctaagtggaagggtaaaacttcagaggagttagttcacaccctccacttctacagggatatcatttcagggccgttt

SEQ ID NO: 292553 - DNA, 291 bp, Glycine max
  unsure (1)..(291): unsure at all n locations
gagcaggcaaaatttatgctttcaatgaagggacttatccagttgtgggatgacaagcttaagaaatatattgatgatctcaaggncccangtcctagcggnaagccttattctgcaaggtacattggtagcttggtaggagacttccacaggnccactgctatatggtgncattnatgggtaccccanggnccaagccaaagtaacnatgggcaattcaagctncantaggangggccnccatnancttccntattngccccggctgggggaaaaggtcccntgcccccc

SEQ ID NO: 292554 - DNA, 280 bp, Glycine max
cttggataacaacatggacggtttttacattgctcctgcttttatggacaagcttgttgttcacatcaccaagaacttcatgaccctgcctaacatcaaggttcctctcattcttggtatttggggaggcaaaggtcaaggaaaatcctccaatgcgagctcgtctttgccaagatgggaatcaaccccatcatgatgagtgctggagagttggaaagtggaaatgcaggagagccagcaaagttgataaggcaaaggtaccgtgaagctgctgatataa

SEQ ID NO: 292555 - DNA, 278 bp, Glycine max
agacgcctgtaattgttcgtttctcaactgtcattcatgagcgtggtagccctgaaaccttgagggaccctcgaggttttgccgtgaagttttacaccagagagggtaactttgaccttgttggaaacaaccttcccgtcttctttgtacgtgacggcatgaaatttccagatatggttcatgctcctaaacccaatcccaagaaccacatccaagagaattggaggatccttgacttcttctctcactttccagaaagccttcacatgttcaccttt

SEQ ID NO: 292556 - DNA, 280 bp, Glycine max
atcacttgggcatcgcttctcctctctcccaagaaagaatcatcaatggcgattgaacacgaagacgatctcaaagacgagaagaaccctcgacctctcgacgaggatgacatcgccctcctcaagacctacggtttgggaccttactccacaagcataaaaaaggcggagaaggaaatcaaagatatggccaagaaagtgaatgacttatgtggtataaaggagtctgatactggtttagctgcaccaagccagtgggatcttgtttctgataagcaaa

SEQ ID NO: 292557 - DNA, 277 bp, Glycine max
gagggaccctcgaggttttgccgtgaagttttacaccagagagggtaactttgaccttgttggaaacaaccttcccgtcttctttgtacgtgatggcatgaagtttccagatatggttcatgctcttaaacccaatcccaagaaccacatccaggagaattggaggatccttgacttcttctctcactttccagaaagccttcacatgttcacctttttatttgatgatttgggtgttccacaagattacaggcatatggatggttttggagttaac

SEQ ID NO: 292558 - DNA, 274 bp, Glycine max
gggacaggaacagcaaaccagtgcccaacaattgatggtggattggactcatttgccttcaagccggggaaatacaatgccaagaagttgtgccttgagccaacttcattcacagtgaaggccgagggtgtggccaagaatgctccccttgagttccaaaacacaaagctcatgacacgtttgacctacactctggatgagattgagggaccctttgaggtgtcttctgatggcactgtcaagtttgaggagaaggatggcattgactacgccg

SEQ ID NO: 292559 - DNA, 273 bp, Glycine max
agaaagagattgaagagacccagcagaccgacaaggacagatggaagggtcttgcctatgatatctcagacgaccaacaggacatcacaagaggaaagggtttggttgactcccttttccaagctccacaggatgctggaactcactatgctgtcatgagctcctacgagtaccttagcactggacttcgccagtacttggacaacaacatggatggattttacattgctccagcttttatggacaaacttgttgttcacattaccaagaatt

SEQ ID NO: 292560 - DNA, 277 bp, Glycine max
tttctcaacaacttctgctacttcctactccaaccgcacttctgctccgcaattatcatgggcaaggtcaagatccgaatcaacggatttggaagaattggccgtttggtagccagagtggctctgcagagagacgatgttgaactcgttgccgttaacgaccctttcatcaccaccgattacatgacatacatgtttaaatacgacagtgttcatggacactggaagcatcacgatgtcaccgttaaggacgagaagacccttctcttcggtgaca

SEQ ID NO: 292561 - DNA, 275 bp, Glycine max
  unsure (1)..(275): unsure at all n locations
cttctctctcactcactcacacccaaaacaaaagaaaaattcatanctatgagtggtgctgaagcgcgaccttgtgactactgtggcaactccacagcacttctctattgcagagccgattcagcaaaactctgtttctcgtgcgatcgcgaagttcactccaccaaccagctcttctccaagcacacgcncacgctgctctgcgacgcatgcgatgattcccctgcgaccatactctgttcaaccgacacctctgttctgtgccagaatgcgat

SEQ ID NO: 292562 - DNA, 272 bp, Glycine max
  unsure (1)..(272): unsure at all n locations
cagaagcataatgtaaaaatacttccagctgattcagaacattctgccatctttcagtgtatccaggggttgccagagggtgcacttaggagtcnattttaactgcatctggaggngctttcagggattggccagttgataaactgaaagatgttaaagttgctgatgcattaaaacatcctaactggaatatggggaaaaagataantgtggactctgntaccctttttaataagggtctagaagtaattgaagcacattacttgtttgga

SEQ ID NO: 292563 - DNA, 267 bp, Glycine max
gcagattgatcaagaagggaaagatgtgtgctctcttcatcaacgatcttgatgcaggagctggtcgtcttggtggaaccacccaatacactgtcaacaaccagatggtgaatgccaccctcatgaacattgctgataaccccaccaatgtgcagcttcctggtatgtataacaaggaagagaatccccgtgtgcccatcatcgtcaccggtaacgatttctccacactctatgcgcctctcatccgtgatgggcgtatggagaagt

SEQ ID NO: 292564 - DNA, 261 bp, Glycine max
  unsure (1)..(261): unsure at all n locations
gctgggcccatcagccccanaagtgggaagggtgagcntgaggaagaccgtcaccaagcangtctcctcaggaagcccatggnacggcccagaccnagtcaagtacttcggcccattctctggcgagcccccgncnanntaaccggtgagttcccangcgatacgnctgggacacngctgggtttccgcagcacccagaaaccttcgccaagaaccgtgaactcgaagtgatccnctccaggtgggccatgntcggagctt

SEQ ID NO: 292565 - DNA, 264 bp, Glycine max
  unsure (1)..(264): unsure at all n locations
ctgcaattggttttgaaggtttcgagaagnngctggaaatatcctttttccagccgggactttttgctgaccctgagggaatgggtttaagagctcttgcaaagtcccagttggatgagatacttacaccggctgcttgcaccatangtttcatctctcagaaatgatcatgtcgactcctatgttctgtctgagtncagtctctttgtttatgcctacaagatcatcatcaaaacctgtggtatacaaagctactgttgcant

SEQ ID NO: 292566 - DNA, 260 bp, Glycine max
  unsure (1)..(260): unsure at all n locations
gnggaacgggaagcccctccactanaaggggtcgtccttccaacgngtgatcccgagtttcatgtgtcatggtggcgattcancgncggaaacggaaccggcgccgagtcgatttatggcgncaagttcgctgnngagaacttcgtnaanaagcataccngtnccgngatcttctccattgcntncnccggtccnngnatnaanggatctnagtttcttnatttgcacggagaatnagagtcgctcnncggaaagcatgt

SEQ ID NO: 292567 - DNA, 154 bp, Glycine max
attttcctttcgtttcctttcattttccctcactttctcgctccccaaacgcccctctctctcctccaatggccgaccagctcaccgacgaccagatcgccgagttcaaggaggccttcagcctcttcgacaaggacggcgatggttgcattat

SEQ ID NO: 292568 - DNA, 148 bp, Glycine max
ctgcgttcaattctcagagctacgttggtctcagagcgccactgaggaccttcaacttttcttctcctcaagctgccaaaattcctcgctcccaacgccttttcgtcgtcagagcctccgattcggagttcgaagccgccgttgtcgc

SEQ ID NO: 292569 - DNA, 129 bp, Glycine max
gagtgtttgtggatggccctggggctggtaaacacatccaagcaggtgccaagaaagttattatcactgctcctgcaaagggtgctgatattccaacttatgttgttggtgtaaatgaaggggactaca

SEQ ID NO: 292570 - DNA, 201 bp, Glycine max
  unsure (1)..(201): unsure at all n locations
caaaggaggagtagatgcagcagctgctttatcattgtattggtctgatttgaaagataaagttgctgggttggcattagcacaaagtccctatggtggaactcctatagcttcagatcttctacgagaaggacnacttggtgattatgtnaattttacgggaacttaccgaggtttcntaatccggaaaggaattaaggg

SEQ ID NO: 292571 - DNA, 174 bp, Glycine max
  unsure (1)..(174): unsure at all n locations
ggctcatcctgagggagaatatgcaacagcaagagctgcatctgctgctggaacaatcatgactttgtcttcatgggctacttcaagtgttgaagaggtagcttcaacaggacctggcattcgctttttccagctatatgtgtacnaggacaggaatgtggttgcncnagcttg

SEQ ID NO: 292572 - DNA, 210 bp, Glycine max
atgacaccatcaattttgaggcttttccccacaagctggtgcagtttggagagattcaggaaaaagttgtattgaaattttcacaagaggaatttcttacagcttggtcaactcaggtgcgtcctgcaacaactctgttggctgatgggtgtccatatttgtatgctatggtgcatgatagttcagtgtctacaataaccagtgatttgt

SEQ ID NO: 292573 - DNA, 143 bp, Glycine max
gaagaacaagtagttgagaactaagaaggagaagcaaatggcttcctcaatgatctcttccccagctgttaccactgtcaaccgtgccggtgccggcatggttgctccattcactggcctcaagtccatggctggcttcccca

SEQ ID NO: 292574 - DNA, 154 bp, Glycine max
  unsure (1)..(154): unsure at all n locations
gttgtgcagctctgggaaaattgttggaacctcaagattgtgtggcacntattcttcctgtcatagtcaatttttctcaggataagtcatggcgtgttcgttacatggttgctaatcaactatatgagctatgtgaagctgttggtcctgaccc

SEQ ID NO: 292575 - DNA, 143 bp, Glycine max
  unsure (1)..(143): unsure at all n locations
gcaacaaacaggcatcttagtgtgctccaccctattcataagcttctcttgcctcactaccgtgacacaatgaatatcaatgcacttgcacgacantcgctcatcaacgcagatggcgttatcgagcgatcatttttncccgg

SEQ ID NO: 292576 - DNA, 133 bp, Glycine max
  unsure (1)..(133): unsure at all n locations
gccaagcgcaggagttatgcnaacaccattagctatctgactcctccagcagaanatgctgggctatacaaaggtcttaagcagttaagtgagctcatctcctcttatcagtccctcaaagacacaggnncgt

SEQ ID NO: 292577 - DNA, 152 bp, Glycine max
  unsure (1)..(152): unsure at all n locations
ctggattagttaggangagcccttatctgacacactctatctttaacntgtaccaaactgagcatgagttgcttaggtacttgtataagctacaatcaaaagatctctcactatgccacagtatgattccacttngatcttgtanncatgaa

SEQ ID NO: 292578 - DNA, 171 bp, Glycine max
  unsure (1)..(171): unsure at all n locations
ggttccccagattttagatagcttttgaatgtattttgctggacgtgacgatgattgggaagttgggttgttgtttttatttgtggttgatacttttgttaaataacattgttcagcgataatgatagtgatctttccggacccaaaanncaaaaannaaaaaaaaggggg

SEQ ID NO: 292579 - DNA, 160 bp, Glycine max
gaatgtcccaaggatgagaaacttcctcgtcgcaaaatttttgacaaacctaagacgcgctgcttcactattctccctatggagtttaatcttgtggtccgtcaaaagtttttaaattttgtgaggttcattatgaagaaaaggggacaagcttagttgt

SEQ ID NO: 292580 - DNA, 282 bp, Glycine max
  unsure (1)..(282): unsure at all n locations
ggtgcgtcctgcaacaactctgttggctgatgggtgtccatatttgtatgctatggtgcatgatagttcagtgtctacaataccaggtgattttgtcattggtgttaagttgacaaccataaacaatatgtgtgcatatgggctcaatcctggtattcaggttctcgtcttttgggcaccattcctcagtctatttcacagcaaactgtttggnatcaaatggcaacagtgagaacaccattgaattttgattctagcaagcagagcttttgtcaattttct

SEQ ID NO: 292581 - DNA, 252 bp, Glycine max
  unsure (1)..(252): unsure at all n locations
ctggtctaagaagatntgggtctacccttaanngatatagaaatacgtgcacntatggaagcggctgatgtggacaaaagtggaaccatagattatggggagtttattgctgctacatttcatctcacaaactagagcgtgaagaacatcttattgcagcattccaatattttgacaaggatggtagtggctacattacagttgatgaacttcaacaagcttgtgcagaacataacatgactgatgcttttc

SEQ ID NO: 292582 - DNA, 278 bp, Glycine max
cttcttcctgaagatatcaatatttatgcaaccactgcttccaatgcagaagaaagtagttggggaacatattgccccggggagtatcctagtcctcccccagaatatacaacctgtttgggtgacttgtacagtgttgcttggatggaagacgtgacagacacaatttgcgaacagaaactctgcaccaacaatataaattggttaaagagaggactatatctggagattcatactatggctctcacgtgatgcagtatggtgatgtagggcttagc

SEQ ID NO: 292583 - DNA, 279 bp, Glycine max
  unsure (1)..(279): unsure at all n locations
tcttggagaaggctagtaagctctatgagttgcatctttacactatgggaaacaagctatatgcgacaganatggcaaaggtgcttgatccaaagggagttttgtttgctggaagagttatctctagaggtgatgatactgattcagttgatgtgaggagagggttcccaaaagcaaagatttggaaggcgttttgggtatggaatcatctgttgtaattatagatgattctgtgagggtctggcctcataacaaactgaacttgatagtggtggaaag

SEQ ID NO: 292584 - DNA, 276 bp, Glycine max
  unsure (1)..(276): unsure at all n locations
tttgtgaacaaaattgttatttgaacacaacatatatcccataattgatactccacatacaaaaaaaganaagaaatggattcactacttcatatccaaaagcctcatgttgtatgtgtaccatttccagcacaaggccatgtaaaccccttatgcaactagccaaactccttcattgtgtgggtttccacataacctttgtgaacactgagttcaaccacaaccgttttgtcaagtcccatggaccagactttgttaagggtctccctgatttca

SEQ ID NO: 292585 - DNA, 275 bp, Glycine max
taatattctcattcttctgtctctgcttcttctccttctgaactaagagatggggttgtctttcaccaagctttttagccggctctttgctaagaaagagatgcgtattctcatggtaggtcttgatgctgctggtaagactaccatctttacaagctcaagctgggagaaattgtcacaaccattcccacaattggattcaatgtggagactgtggaatataagaatattagctttactgtatgggatgtgggtggccaagataagatccgtcc

SEQ ID NO: 292586 - DNA, 277 bp, Glycine max
ggggtgaagaaaaagcaaaaacactgaatacaccaaaaatggccaaaagcaaaaactgtcatgctttgcctcttctccttgccctgatcctcttcttcactcttcttggaacctctcacgcaggtggcatagccatctactgggggcaaaatgtaacgagggcaccctctcagaagcatgtgcaacaggcaaatacacccacataaacatagcctttctcaacaaattcggcaatggccaaaccccagaaatgaacctggctggtcactgcaacccc

SEQ ID NO: 292587 - DNA, 278 bp, Glycine max
tgcaattgaagttgaagtcttgcccttctctcttcaactccaaacacaagacatcatcatccatggctgcctccgtctccactgtcggagctgtcaacagagctcttttgaacctgaatgggtctggacctggggtttcagctcccagttcaccttctttgggagcagcttgaagaaggttattggctcaagggtccccaacacaaagatttcctctggaagcttcaagattgttgctgtagaagagaagaaagagattgaagagacccagcagaccg

SEQ ID NO: 292588 - DNA, 269 bp, Glycine max
  unsure (1)..(269): unsure at all n locations
ttcccaaattcattttaatcctaattctgcacttcttgatcattcgattttnctcctcaagatgcagatattcgtaaaaactttgaccggcaagaccatcacccttgaggtggaatcctccgacaccattgacaacgtanaantaagattcaagacaaggaagggatcccacctgaccagcagagacttatctttgcgggtaaacaacttgaggatggtcgcacccttgccgattacaacatccanaaggaatcaaccctccatctcgt

SEQ ID NO: 292589 - DNA, 273 bp, Glycine max
aagctttgcttgctaagaggttgggcaaaaaacgcattattgctgaaactggagcgggtcagcatggagttgccactgctactgtatgtgctcgatttggtttagaatgcattatttatatgggcgcacaggatatggaaaggcaggctccaatgttttcagaatgcgtcttcttggtgctgaggtgagacccgtccattctgggactgctacactgaaggatgcgacatcagaggctataagggactgggtaactaatgtggagacaatcat

SEQ ID NO: 292590 - DNA, 272 bp, Glycine max
ccttcttccacttccaccctcctctcaggtttttgtggataagagtgagctataatggctgccaggagaccgggtttaattgctttgtttgatgttgacgggactcttacagctcccaggaaggtggtcacaccggaaatgttgacatcatgcaagaactacgaaaggttgtaacggttggagttgttgggggttctgaccttataaagatatcagagcaacttggcagcacagttaccaatgagtatgattacgtattttctgagaatggt

SEQ ID NO: 292591 - DNA, 272 bp, Glycine max
  unsure (1)..(272): unsure at all n locations
ggagcttttctgctgagtgcagggacaaaaggaaaganatacagcttgccaaattcaaggataatgattcatcaaccgcttggtggtgctcaaggagggcaaactgacatagatattcaggctaatgaaatgctgcatcacaaggcaatctgaatggatatctcgcctatcataccggccaaagtttagataagatcaaccaggatacagaccgtgactttttcatgagtgcaaaagaagccaaggaatatggactcatagatggagtcatt

SEQ ID NO: 292592 - DNA, 276 bp, Glycine max
ccccatcgccactccactacgtccgcaaccacggtccagttcccaagatcaaatgggatgaatggaccgtggaagtgactgggttggtcaaacgatcaacccacttcaccatggagaaacttatgagggaattccctcaccgcgagtttccgccacactagtgtgtgcgggaaatcggcgcaaagagcataacatggtgaagcagagcatcggcttcaactggggtgccgccggggcctccacctccgtgtggcggggggtccgctgcgtcatgtg

SEQ ID NO: 292593 - DNA, 237 bp, Glycine max
  unsure (1)..(237): unsure at all n locations
tcttagatctcttctttctctacgccgcacgccganncccatggccggaaaaggagagggtcctgctatcggaatcgatctcgganccacctactcttgcgtccgtgtgtgcaacatgaccgcgttgaaatcatcgccaacgaccaagggaacagaaccacgccgtcttacgtcggattcactgacaccgagcgtctcatcggtgatgcggccaagaatcaagtcgccatgaacccc

SEQ ID NO: 292594 - DNA, 271 bp, Glycine max
gggatagtggaaattttcaggaagctttcatgaagcaagttaaatatctagtcaccccattattgttgatggggctatttcttacatccttttcgtttggtcctcctgaacagaaccagattagctttcaggagtttaaaaacaagttttggaaccaggattagtagaccatattgttgtctcaaataaatcagttgccaaagtatatgtaaggaacactcccctcaaccaaacagataatgaagtagcccaagggacccaacctgcaatt

SEQ ID NO: 292595 - DNA, 269 bp, Glycine max
tggttccagcacaggtcaagctcctggtgaagacagtgaagtgattttatacccacaagccattttcagggatccattcagaaggggtaacaatatcttggttatctgtgatgcctacactcctgctggagaacctattcccactacaagaggcacgctgctgccaaggttttcagccatcctgatgttgttgctgaagtgccatggtacggtattgaacaagaatacaccttgttgcagaaagatatccaatggcctcttgggtggcc

SEQ ID NO: 292596 - DNA, 274 bp, Glycine max
  unsure (1)..(274): unsure at all n locations
cttcttcctgaagatatcaatatttatgcaaccactgcttccaatgncagaagaaagtagttggggaacatattgccccggggagtatcctagtcctcccccagaatatacaacctgtttgggtgacttgtacagtgttgcttggatgaagacagtgacagacacaatttgcgaacagaaactctgcaccaacaatataaattggttaaagagaggactatatctggagattcatactatggctctcacgtgatgcagtatggtgatgtagggc

SEQ ID NO: 292597 - DNA, 273 bp, Glycine max
cttatgactaatgatatctcgggtgtcaaccttgaagaagcagtcccttgcattgcactctcaaaaaatgactcttatgttatgtctgcctgtggtggaaaggtttctctatttaacatgatgacattcaaggtaatgacaacattctgccaccgcctcctgcttctaccttcctagctttccatccccaggataacaacattattgccattgggatggacgattcaaccattcacatctataatgtcagagtggatgaggtgaaatcaaaat

SEQ ID NO: 292598 - DNA, 271 bp, Glycine max
ctcgaagctattgactgtggaaaaccgctcgatgaagccgcctgggacatcgacgatgttgctggttgctttgagttctatgctgaccttgctgaaaaattggacgcacagcaaaaggctcatgtgtctcttcccatggacacatcaagagttatgttcttaaggagccgattggagtcgttgctttaataactccttggaattatcctctgttgatggctacgtggaaggttgctcctgctctggcggccggctgtgctgcaatattgaa

SEQ ID NO: 292599 - DNA, 271 bp, Glycine max
  unsure (1)..(271): unsure at all n locations
ggccaggactatctgaagcagataaaatgtggagggttttcagtgcnttgggaaacattgcacttgcttgctcttatgctactgttgtgtatgatataatggacacgttgaagtcatatccaccagaatgcaagcagatgaaaaagccaatgtgttaggaatcacaacaatgacaatacttttcctgctatgtggtagccttggctatgctgctttcggagatgacaccccgggaaacatcctcactggctttggattttacgagccattc

SEQ ID NO: 292600 - DNA, 265 bp, Glycine max
  unsure (1)..(265): unsure at all n locations
aaccccatcatgatgagtgctggagagttggaaagtggaaatgcaggagagccagcaaaactgatcaggcagagataccgtgaagccgcagacttgatcaagaagggaaagatgtgtgctctcttcatcaacgatcttgatnaggagctggtcgtcttggtggaaccacccaatacactgtcaacaaccagatggtgaatgccaccctcatgaacattgctgataaccccaccaatgtgcagcttctggtatgtataacaaggaa

SEQ ID NO: 292601 - DNA, 267 bp, Glycine max
ctttgagtctggggaagaccagcgtatggaatcagttcttccaggatacagagatcatagatcaaattgaccgagatgtaaagcgcactcatcctgatatgcactttttctctggtgattcccaatttgcaaaatctaatcagaggctttgaagaatatattaattatttttgcaaagttaaacccgggtgtaagatatgtgcaaggaatgaatgagatattggctcctctattctacgtgttcaaaaatgacccagatgaggaaat

SEQ ID NO: 292602 - DNA, 273 bp, Glycine max
  unsure (1)..(273): unsure at all n locations
aaggattctaaccgccgctcgatnngaattgcgcttcaaggagtcncgnagggctaatnngcctcacgagggtnaccaacggcacgtgcctttagngggcagaagncccctaactgcctggtcggcaaacggacggngggcncacgcgcgcttctagctcggattctgactnanaggnntncantcatantccaacgcacggtannnncgcgcnactggcttttgaactcagcgcgatgaccaattgtgcgaatcanggnncctctcgtacta

SEQ ID NO: 292603 - DNA, 268 bp, Glycine max
ggcagctgcttccccaatggcaagccaactcaagtccaccttcactaggactcttgtagctcccaagggctctctgcctcttcaccacttcacctcgtgccttctagaaggcaatttagcttcactgttaaggccatccaatagagaagccaacctatcaagtgattcagccaatcaacggtgacccattcattggaagcctggaaaccccagttacatccagccctttgatcgcatggtacttgtccaacctgcccgcatacagaac

SEQ ID NO: 292604 - DNA, 266 bp, Glycine max
  unsure (1)..(266): unsure at all n locations
caggttcaaaccggagcaaaaaaacttgttacgatggtttcttccgacaaggatccacgagaggaagtccttcaagcatggtacatggatgatagtgatgaagatcaaagactcnccnnccacaaagaacccaaggagtttgctcgttggaccaacttgctgaacttggagtccttagctggaaattagatgctgataaccatgaaaatgatccagagtgaaaaagattcgtgaagagcgtggctacacctacatggatgtttgtg

SEQ ID NO: 292605 - DNA, 265 bp, Glycine max
atgatcctgttcgtcatgcagaaacgttccccatacctcctgctatctgcagtggaaggcgtgaaaagtgtggaattgagaaggagaacaactttaagcagcccggagagagataccgatcttgggcacctgacaggcaagtagatttaatcgccgatgggttgatgctttatctgacccacgggtcacccatgaaatccgcagtgtctggatatcttactggtctcaggctgaccgttctctaggccaaaagatagcatctcgt

SEQ ID NO: 292606 - DNA, 264 bp, Glycine max
  unsure (1)..(264): unsure at all n locations
ggagtcgccatacacctgagggtgctaaacttgaagctgagtggtntgccaagtttgtggaatatgagaagcaatacagtgaggaagctgcagagctgaaggctattattactggcgaattaccagctggttgggagaaacacttccgacatacacaccagaaagccctgctgatgctacaagaaatctgtctcagcaaaatctaaatgcccttgttaaggttcttcctggtctacttggtggtagtgcagatcttgcctcttc

SEQ ID NO: 292607 - DNA, 267 bp, Glycine max
ctcggaacttcaagggactaaaagacaagatcaatttggtccctataaaccttcaagacaggccagcttggtataaggagaaagtctaccctgaaaataaggtgccatccttggagcacaatggcaaggtgttgggagaaagcttgatttgatcaaatatgtagatgaaaactttgaagggacacctttgtttcccagagatcctgccaagaaagagttcggagagcaattgatatcccatgttgatacattcagcagagacctgtt

SEQ ID NO: 292608 - DNA, 273 bp, Glycine max
  unsure (1)..(273): unsure at all n locations
ctaagatggcttcctttgtatccttcctagtgctgcttcttgcagcccttatcctcatgcctcaagggcttgctacttactacaaaccaattaagaagccaccagtgtacaagcctccagtgtacaagccaccagtgtancnaacaccggtttataagccaaaaccaccggtttacaagccgaaaccaccggtttacaagccaccatataagaagccaccatacaagaaaccaccttatggaaagtaccctccagtagaggacaacacccatg

SEQ ID NO: 292609 - DNA, 242 bp, Glycine max
  unsure (1)..(242): unsure at all n locations
gtcgtttctattgatgactacgaagntgttcctgcctatgatgagttagccttgaaaaangccgttgcaaatcagcccgtgagcgttgctattgaaggagggggcagggaatttcaattatatgtatctggtgtattcacggggagatgtggcacagcactagatcatggtgtcgtggctgttgggtatggaacagctaaaggtcatgattattggatcgtaaggnattcatggggttctag

SEQ ID NO: 292610 - DNA, 244 bp, Glycine max
  unsure (1)..(244): unsure at all n locations
gaggccttcaatttcacccttcacacgtggtggtggtgttgtncttcttctcttcccctttctntttcttcttctgagcttgtttaagctctttctatttgattccattaacatatatnatcacaatgtgtggtattctngctgttcttggttgtnctgatgactctcgagccaaaagggtccgcgtgcttgaggctctctcgcagattgaggcacggtgggcccctgactggnatgggntcca

SEQ ID NO: 292611 - DNA, 244 bp, Glycine max
  unsure (1)..(244): unsure at all n locations
gggtttgtatcatcatatgacattgctaatcaatacagtgacagttatgcagatnctcacaagtgggttagtcaccgaaatcataggggaaatatctgtggtgttgacttcatttggctttgcaatcccaaccaagcagtaaacctttaaagacaagttgggctgaagctgnatttagtatactaaaaatttccagttacgaaaagcatcgttatctgaagatgatggcattggccttncctnc

SEQ ID NO: 292612 - DNA, 240 bp, Glycine max
  unsure (1)..(240): unsure at all n locations
ggnactgtcccagctgcggtgccaggggttgtgtttctgtctggtgggcaaagtgaagaagaagctaccctcaacctgaatgcaatgaacaagttggaggtgttgaagccatggactctctcattctcattcgggcgagcactgcaacaaagcacactcaagacatggggtggaaagaaggagaatgccgccaaagctcaagaggcatttctggcaagatgcaaggccaattctgatgct

SEQ ID NO: 292613 - DNA, 243 bp, Glycine max
  unsure (1)..(243): unsure at all n locations
gngagctagactgcaggctcagtttgctcaaatgcgacctgttggaatgccaccatctgttggtcctcgtgtgccaatgtatcccccaggtggtccaggtattggtcaacaattattttatagccaaggccctcctgntatcattccttcccagcctggatttggctatcaacaacaacttatgcctggtatgaggccaggtgcagctcctgtgccgaatttttcgtgccaatggttcagcag

SEQ ID NO: 292614 - DNA, 240 bp, Glycine max
  unsure (1)..(240): unsure at all n locations
gagaacccccgtgttcccatcattgtcaccggtaacgatttctcaacactctatgcacctctcatccgtgatgggcgtatggagaagttctactgggcaccaacaagggaagaccgcattggtgtttgcaccggaattttccgcactgatggtattcctgaacaggacattgtcaagcttgttgacacttncctgggccaatccttgattttctttggtgcctgaggggccagagtatat

SEQ ID NO: 292615 - DNA, 242 bp, Glycine max
  unsure (1)..(242): unsure at all n locations
gggcaganataccgtgaagctgcagacatgatcaagaagggaaagatgtgcgctctcttcatcaacgatcttgatgcaggagctggtcgtcttggtggaaccacacaatacactgtgaacaaccagatggtgaatgccactctcatgaacattgctgataaccccaccaatgtgcagctttccaggtatgtncnaacaagggngagaaccccgtgttcccatcattggtcacgggtaaggat

SEQ ID NO: 292616 - DNA, 240 bp, Glycine max
  unsure (1)..(240): unsure at all n locations
ttcgcgancttcttacctcctacgnattccccggtgacgatanccccatcgtctccggctccgcactacttagccctagaagcccttatggcgaaccctgancatcaaacgcggcgacaacgagtgggtcgacaaaatctacaaactcatggacgaagtcgnacgantacattcncatngcccagcgnnagaccgaccttccattctcctcggcgtcgaaganttttctccntcacggcg

SEQ ID NO: 292617 - DNA, 238 bp, Glycine max
  unsure (1)..(238): unsure at all n locations
caattatcaaaaggnttanctgagaacaattacaagacagattgangcncttgtggannttncagtgatagagatatngtcaagacatgcntctgatgagatctaccttgggaagaggganagtgatcattngactgatgaccaanaggcaatncaagcctntgnaaagtntggaaccaagctgaaggaaattgaggcnaaaatcattcgaggaacanagattcangnnttagaaacg

SEQ ID NO: 292618 - DNA, 243 bp, Glycine max
  unsure (1)..(243): unsure at all n locations
gagaaacttgggcggggtggtatatgatggatacttgaatggccagttatctgtttcccgtgccttaggagactggcacatgaagggtcacaagggttctgcctaccccttgagtgctgagccagngctgcaggaaatcaacctgactgaggatgatgagttcttgattatgggctgcgacggcctatgggatgtnatgagtaaccaatgtgctgtaaaccatgggcaagganaagaattgat

SEQ ID NO: 292619 - DNA, 236 bp, Glycine max
  unsure (1)..(236): unsure at all n locations
caaganncacatccaagagaattggaggatccttgggattgggtttaagaccatgaaccatatcccaagaaccacatccaagagaattggaggatcctgacttcttctctcactttcccagaaagccttcacatgtncactttttattgatgatttgggtgttccncaagattacaggcatcatggatggtttggagttaacactntacgctgatcaacaaggctgggaaagcngt

SEQ ID NO: 292620 - DNA, 237 bp, Glycine max
ctcaggaaaaatacagctcagaaacaagttttggaagcaatgtctcacagaatgcatgtagacaacagtgtaaaactgattgggaagcttttatttggcattgaaaagggtccagaagtactcaacgctgttagaccggctggatcggcacttgttgatgactggcactgcctgaaaaccatggtgaggacttttgagacacattgtggatccttgtctcaatacgggatgaaacac

SEQ ID NO: 292621 - DNA, 239 bp, Glycine max
  unsure (1)..(239): unsure at all n locations
gtgtgangttggtgaaggtttttnagaagaaagatggaacgaagtgncggaatggtaactgggtcgcatganaggnacgaacttgttagagttagacacggctctgatagtaggtctaaacccttgaagaatttgaatggtcagagttgtcaaatatgtggtgataccattggattaacggctactggtgatgtctttgtcgcttgtcatgagtgtggcttcccactttgtcattcttg

SEQ ID NO: 292622 - DNA, 232 bp, Glycine max
  unsure (1)..(232): unsure at all n locations
gtaganggcgatggccgcgcgagtnctgttgaccagaaaaaccctagccaccgtgctccgcaacgacgcgaanccataancggagttggcataacagcagcggctactcattcacgcgggttgcacgtgtacacgctacccgatctggattacgactatgggcgcanggagccagccatcagcggcgacatcatgcagctgcaaccacagaagcacaaccagactnacatca

SEQ ID NO: 292623 - DNA, 240 bp, Glycine max
  unsure (1)..(240): unsure at all n locations
cacaaggcagaaagcaagctcatcctagagttttaaaaatggcagcagcctcctccatggctctctcttccccatccttggctggcnaggccgtgaagctgggcccatcagcccccgaagtcgggagggtcagcatgaggaagaccgtcaccaagcaggcntcctccggaagcccatggtacggcccagaccgcgtcangtantgggcccattctctggcgagcccccgtcctaccttaa

SEQ ID NO: 292624 - DNA, 239 bp, Glycine max
ccgaaacatacccttgatgttacggaggaagacttctcatttctgataaatacaaatcttgaatctgcttaccacctaagccagcttgcacatcctctcctgaaagcttcagaggctgcaaacatcatttttatatcctccattgctggtgtgctatcaataggtataggatccacttatggtgcaacaaaaggagcaatgaaccaactgactaaaaatttgggcatgtgagtggggcc

SEQ ID NO: 292625 - DNA, 217 bp, Glycine max
  unsure (1)..(217): unsure at all n locations
gtacttgatggtcttgcctctcgctncggctgcatactaccancaaggtgcccgtttcgccaaatggcgtactgttgtgagcatccccaacggtccctctgctctggcagttaaggaagcagcctggggtctggctcgctatgccgcaattgctcaggacaatggattggtcccaattgtggagccngagatcttgcttgntggggagcatggtatt

SEQ ID NO: 292626 - DNA, 241 bp, Glycine max
  unsure (1)..(241): unsure at all n locations
gacactcatctcactcgcgccatcttagggtttctccttttgtttcgcaacatggttgccgctaagaaaactaagaagacccatgagagcatcaacaacaggctcgctcttgtcatgaagagtggcaaattcaccctcggttacaagaccgttctcaaatctcttaggaactccnanagaanaattgattatcattgctaaacaactggccccctttgagaaagtccagagattgaatact

SEQ ID NO: 292627 - DNA, 235 bp, Glycine max
  unsure (1)..(235): unsure at all n locations
ttcaatcatgaaatgtgatgtcgatattaggaaggncttgtatggaaacatcgttctcagtggtggttctaccatgttcccaggtattgctgacagaatgagcaaggnaatctcagctttggccccaagcagcatgaagattaaggtggttgctccacctgagagaaagtacagtgtctggattggtggctctatcttggcttctctcagcactttcccaacagatgtggattgc

SEQ ID NO: 292628 - DNA, 237 bp, Glycine max
  unsure (1)..(237): unsure at all n locations
cactcttcttctcttgcggctngggttttagcgcagtttcttctagatttaaggnngatgggtaaggaaaaggttcacatcngtattgtggtcattggccatgtcgactctggganatccactaccactggtcacctgatttacaagcttggaggcattgacaagcgtgttattgagaggtttnagaaggaagctgctgagatgnacnagcggtctttcangtatgctgggtgctgg

SEQ ID NO: 292629 - DNA, 238 bp, Glycine max
  unsure (1)..(238): unsure at all n locations
cattggtgtctgcactggaatttttcgcaccgattcaattcctgaacaggacgttgtcaagattgtngacaccttccctggcnaatccattganttccttcgngcactgagggccagagtatatgatgacgaatgaggaagtggatttctggtgttggtgttgacggcattgggaaagaagcttgtgaaactcaaaaagatggacctccaaacctttgagcagcccaagatggactct

SEQ ID NO: 292630 - DNA, 251 bp, Glycine max
  unsure (1)..(251): unsure at all n locations
ttcagacgaccagcaagaccatcacaananggaagggtttggntgantccctcttccaagctccacaggcatactggaactcactacgcaatcatgagctcttatgagtaccttagcactggacttaaacagtacaacttggataacaacatggacggtttntacattgctccngcttttatngacaagnttgttgttcacatcagcnagaacttcatgaccntgcccaacatcanggttccnctcnntct

SEQ ID NO: 292631 - DNA, 260 bp, Glycine max
  unsure (1)..(260): unsure at all n locations
accngatgcatcctctgacaatgatgagaagaaaggtcaatattctaagttctggaatgagtttggtaaatccattaaacttggtntcatcgaggatgccaccaacagaaatcgtttggcaaaactgctcagatttgagagcaccaagtctgagggtaaattgacatctctggatcagtacatatctagaatgaaaactgggcagaaggatatcntttacntaactggaaccnncaaagaacaactggngaactctccct

SEQ ID NO: 292632 - DNA, 256 bp, Glycine max
  unsure (1)..(256): unsure at all n locations
cgnagcgagangcgagangcgacatggatccagacgcgttggcaaaggcattcgtggagcactactactccaccttcgacaccaaccgcaacantctcgccaatctctaccaggaaggttccatgctctctttcgagggtcagaagatccagggctcccacancatcgtcgccaaactcacctcccttcccttccaacagtgccagcactccatcaccaccgtcgattctcagccctcaggcgtcaacgccgccat

SEQ ID NO: 292633 - DNA, 251 bp, Glycine max
  unsure (1)..(251): unsure at all n locations
cgcacgaatatcttgttgtttggngcgatccgaganaaactctgtaaacatgttggtttaccaggacctccttacaggtgatgagcttctctctgactccttccgttacaaggaaattgagaatggaatgctgtgggaagttgaggggaagtgggttgttaaaggagcagttgatgtagacattggtgcaaacccttctgctgagggtggaggagaagatgagggagttgatgatgcagctgttaaggttg

SEQ ID NO: 292634 - DNA, 263 bp, Glycine max
  unsure (1)..(263): unsure at all n locations
ctaaactgcagtagaggacctgttattgatgaagctgcacntgtggagcatttaaaacagancccgatgtttcgagtaggccttgacgtgtttgaggaagagccctacatgaaacccgggcttgcagagttgaagaatgccattgtggtaccccacattgcatctgcctccaagtggactcgtgagggaatggctacactagcagctctaaacgtggtggggaagatcaaagggtncccagtttggttcgatgccaatagggt

SEQ ID NO: 292635 - DNA, 253 bp, Glycine max
  unsure (1)..(253): unsure at all n locations
cgttgggacccgaatacgaagtcgacgctgacacagatccctctgctggggacgaaggctggtccacgagacggggcggcatggacgcagaggctgaaggaagagtacaaggctctgatagcgtacacgcaaatgaacaagtccaacgacaacgattggntccgcatctccgccgccaatccggaaggcactcgctggaccggtaaatgctggtacgtctacaacctcctcaagtacgaattcgacctccaat

SEQ ID NO: 292636 - DNA, 251 bp, Glycine max
  unsure (1)..(251): unsure at all n locations
cgaganatggcgatggcaatggcgcttcgcaggcctttcatcttcaattgacaagcctctgcgccctctcttcaatgccggttccctctactacaagtcgncttngcctgatgaagctgtttacgacaaggagcgacccggagttacatggccgaagcagttgaatgctccacttgaggtcgtggatcctgagattgctgatattattgagcttgataaagctaggcaatggaaggggctagnattgatat

SEQ ID NO: 292637 - DNA, 247 bp, Glycine max
  unsure (1)..(247): unsure at all n locations
ctgttgcaacagaacaagatcttnaaggtcatncctaagancctggtcaagaagtgccttgagctctcgctttgaaattgcanagaacaaggaggattacnncaagttctatgaggctttctctaagaacttanngcttggtatccatgaggattcccagaacaagggaaagattgctgaattgctcaggtancactccaccaagagtggtgatgngctgacaagcctcaaggattatgtgaccagg

SEQ ID NO: 292638 - DNA, 252 bp, Glycine max
  unsure (1)..(252): unsure at all n locations
cngaggngttgattcctgagtatttggnctttgtcaagggtattgttgattctgaagatctcccactcaacatttcaagngaaatgttgcaacagaacaagatcttgaaggtcatccgtaagancttggtcaagaagtgccttgagctcttctttgaaattgcacagaacaaggaggattacaacaagttctatgaggctttctctnngaacttaaagcttggtatccatgaggattcccagaacaagggaa

SEQ ID NO: 292639 - DNA, 250 bp, Glycine max
  unsure (1)..(250): unsure at all n locations
ggaatatgcagccttcccagctccttggngtatggntttgtccatngcatcagccatgagcagtgatggtggatgcatggacaaaaccatactccagggaatatgcagccttcccagctccttggctccgtactgcaaagttctggcctaccanaggacgtgttgataatgtgtaacnngaccgcaacctcatttgcacccttctcccagnatcacaggctgttgaagaacaagcagctgccacagcata

SEQ ID NO: 292640 - DNA, 246 bp, Glycine max
  unsure (1)..(246): unsure at all n locations
cctttcttcctcttcctcagtagtgcgattttcgattctcttctctgcaactatgcctaaccctaaggtcttcttcgacatgaccatcggcggtcaacctgccggccgcatcgtgatggagctctacgccgacgtgactccgagcaccgccgagaacttccgcgcgctctgcaccggcgagaagggcgccgggcggagggcaagcccctccactacaaaggctcgtccttccancgcgtgatcccg

SEQ ID NO: 292641 - DNA, 250 bp, Glycine max
  unsure (1)..(250): unsure at all n locations
cgcctccgtctccactgtcggagctgtcaacagagctcttttgaacctgaatgngtctggacctggggtttcagctcccagttaatccttctttgggagcagcttgaagaaggttattggctcaagggtccccaacacaaagatttcctctggaagcttcaagattgttgctgtagaagagaagaaagagattgaagagnnnnngcagaccgncaaggacagttggaagggtcttgcctatgatatctct

SEQ ID NO: 292642 - DNA, 253 bp, Glycine max
  unsure (1)..(253): unsure at all n locations
cacgttgatgccgaacttgccaatgctcaagcttggtggtacaagccggactatattatcaacgancttaacataaactccgtgataaccacgccttgccacgaggagntcttgcccatcaactcatggacnactcagatgccttatttcatcagaggctatgcgnattccggtggtgggaganaggtgacacgtnttgaggtaaccctggacggaggtgaaacgtggcaagtgtgcacatggactgtccgga

SEQ ID NO: 292643 - DNA, 245 bp, Glycine max
  unsure (1)..(245): unsure at all n locations
cnantcatcagcnaagcttaacttcacttgtnctgctttanaggcactcttcaagctattgctgttacttttgtagttgaacacaatccttctgtatggagaattggctgggatgtgagcttacttgctgctgcatatgctgggattgtgacatcaagcatatcatactatgtacaaggactggtaattaagatgaaaggacctgtctttgcaactgcctttagccctttaangatgatcattgt

SEQ ID NO: 292644 - DNA, 249 bp, Glycine max
cctttgccggtgctcaagggacgatccccagttcaatgttatgctgatttcatgcgtgctttcagagacactttcaagcacctccttggtgataccattgtggaaatccaagttgggatgggaccagcaggtgagttgcgttacccttcgtacccagagcaaaatgggacatggaaattcccagggcctggtgctttccaatgctatgacaagtatatgttgagtagcttaaaagctgctgctgaagct

SEQ ID NO: 292645 - DNA, 253 bp, Glycine max
  unsure (1)..(253): unsure at all n locations
cggggtcagagtgagacagagaaagagagaattcgtaaaccctaatttcggaaagatcggcgatgactgcctccaaggatcgcgagancttcgtctacatcgccaaactcgccgagcaggccgagcgttacgaagagatggtggaatcaatgaagaacgttgcgaatctcgacgttgaactgacggtggaggagcggaatttgtttctgttgggtacaagaatgtgattggtgctcgcagangtcctggaggt

SEQ ID NO: 292646 - DNA, 254 bp, Glycine max
  unsure (1)..(254): unsure at all n locations
cgnaggacgtgattctgtctgccgggtttnggatatacgaagtaaaatgcagattcatgctctttcangtcatgataacactgtctgttctgtgtttacgcggccaacggatccccaagttgttacaggttctcatgacactaccatcaagatgtgggaccttagatatggtaaaacaatgtcaactcttacaaaccataaaaaatctgttcgagcaatggcccagcatcccaaagagcaancttttgnctntt

SEQ ID NO: 292647 - DNA, 251 bp, Glycine max
  unsure (1)..(251): unsure at all n locations
ccaatcttcactacattcaccgagcatttgcattcacattgaatatggctganactacacaatctaatgctgagttgttggagtngcctaaganagataagcgccgcttcctgcatgtngtgtatcgtgttggtgatcttgatcgcaccattaagttttatactgaatgttttgggatgaagcttttgaggaaaagagatattccagaggagaaatatgccaatgcttttcttggatttggccctgaacat

SEQ ID NO: 292648 - DNA, 249 bp, Glycine max
cggatggattccttgcttggaattcgagttggagcacggtttcgtgtaccgtgagcacaacaggtcaccaggatactacgatggacgctactggaccatgtggaagctgcctatgtttggttgcactgatgcttctcaggtgttgaaggagcttcaagaggctaagactgcataccccaacggcttcatccgtatcatcggattcgacaacgttcgccaagtgcagtgcatcagcttcatcgcctacaa

SEQ ID NO: 292649 - DNA, 249 bp, Glycine max
  unsure (1)..(249): unsure at all n locations
ctgctttctgatctcagcaaatctcaantagcagttccagcatcaatagagttcgtagatattgctgggcttgtcaagggtgcaagtcaaggagagggtttgggcaataagtttttgtctcatattcgtgaggcggactctatacttcaggttgtacgatgttttgaagacaacgacattgttcatgtgaatgggaaagttgatcccaagtctgatattgatgttatcaatttggagcttgttttctca

SEQ ID NO: 292650 - DNA, 250 bp, Glycine max
  unsure (1)..(250): unsure at all n locations
ccatgaccctgcccaacatcaaggttcctctcattcttggtatctggggaggcaagggacaaggaaaatctttccaatgtgagcttgtctttgccaagatgggaatcaaccccatcatgatgagtgctggagagttggaaagtggaaatgcaggagagccagcaaaactgatcagggcagagataccgtgaagctgcagacatgatcaagangggaaagatgtgcgctctcttcatcaacgatcttgatg

SEQ ID NO: 292651 - DNA, 247 bp, Glycine max
  unsure (1)..(247): unsure at all n locations
cangngcatgtggaaccgttgtaaganatgcagagatgangattgtcgatcctgaaaccggtcattctttacccagaaaccaatccggtgaaatttgcataagaggcgaccagattatgaaaggttatctaaatgatggagaggctacagagagaaccatagacaangatggttggttgcacacaggtgacatcggttacatcgacgatgacgatgatttattcatcgttgacaggctcaaggtntt

SEQ ID NO: 292652 - DNA, 246 bp, Glycine max
  unsure (1)..(246): unsure at all n locations
gttgggacccgaatacgaagtcgacgctgacacagatccctctgctggggacgaaggctggtccacgagacggggcggcatggacgcagaggctgaaggaagagtacaaggcnctgatagcgtacacgcaaatgaacaagtccaacgacaacgattggttccgcatctccgccgccaatccggaaggcactcgctggaccggtaaatgctggtacgtctacaacctcctcaagtacgaattcgacc

SEQ ID NO: 292653 - DNA, 244 bp, Glycine max
  unsure (1)..(244): unsure at all n locations
cgtcaggntgtngctttgtgccaagctccattcctacttgatgatcctaatgttggactgctattccctgctgatgcaattgcaagagctaaacactatctttcattgacctcgggcggtttaggcgcttatagtgactcccgcggccttccaggagtgaggnaggaagtngctgagttcatactcaggcgtgatggttanccaactgatccagaactcatatatctcactgatggtgccagca

SEQ ID NO: 292654 - DNA, 243 bp, Glycine max
  unsure (1)..(243): unsure at all n locations
gcagatagaaaaaaagagcgacttttganttcaaaagatgactaacttcccattgatcaacttggagaagctcagtggtgaggaaagaaacgataccatggaaaaaattaaagatgcttgtgaaaactggggattctttgagctggtgaatcatggcattcctcatgacatattggacactgtggagaggttgaccaaagagcactacaggaaatgcatggaagagaggttcaaggaattagt

SEQ ID NO: 292655 - DNA, 227 bp, Glycine max
  unsure (1)..(227): unsure at all n locations
aaagaatctgggtctttatggggaacgngttggcgccttaagccttgtctgnccgtcagctgatgttgcaagcagggttgagagccagctgaagctagtgattaggcccatgtactcaagtcctcccattcatggtgcatccattgtggctgccattctcaaggaccggaatttgttcaatgactggactattgagttgaaggcaatggctgatcgcatcatcagtt

SEQ ID NO: 292656 - DNA, 249 bp, Glycine max
  unsure (1)..(249): unsure at all n locations
cgatatggcaaaggaatacgancaagctattgaagaantccagaaattgttgagggagaagagtgaactcaaagccacagctncctgagaaagtggagcagataacagcttctctgggaacatcatcatctgatggcatcccatcatcagaagcctcagacaggatcaaagctggtttcattcacttcaagnaggagaaatatgacaagaatccagctttgtatggtgaacttgccaaaggccagagcc

SEQ ID NO: 292657 - DNA, 137 bp, Glycine max
  unsure (1)..(137): unsure at all n locations
cgatggtataatggcacattatgatgagatatttaggctgaaggccgatgcagctaangctgatgtcttccatttgttgtctggaatgtggaagacaccagcagagaggtgttttctatggcttggtggttttcggt

SEQ ID NO: 292658 - DNA, 244 bp, Glycine max
  unsure (1)..(244): unsure at all n locations
cncacagcagaactctgcttcttcggattccgatcgcacgcgccgtcaccatggtgaacgttccgaaaacnaagaagccatacctgcaagagtaaggcgtgcaggaagcacacgctgcacaaggttacccaatacaagaagggtaaggatagcattgctgcccaaggaaaacgccgttatgatcgcaaacaatccggttatggtggacaaactaagcccgtcttccacaagaaggctaaaacca

SEQ ID NO: 292659 - DNA, 246 bp, Glycine max
  unsure (1)..(246): unsure at all n locations
cgcgtgtactttcttgcgaaacagaagggcgaaggggcanacacaacttttttgtttttttgtagagcgagagaaaaaaaaatgttggggatcttcagcagttccgtggtgtcgccgccggaggagctggtggctgccggcagcagaacgccgtcgccgaagacgacggcggggaagctgctgaaccggttcgtgcgagaacaaggcgtcggcggtgtcgctgcaggtgggagaacacgtgcagtt

SEQ ID NO: 292660 - DNA, 243 bp, Glycine max
catggattggttaaagtagatgacagaggccgcatcattcaattttcagaaaaacctaagggtgatgatctgaaagcaatgcaagcagatacctctcttcttgggttgtcatcccaagatgcattagagtcaccatatattgcatctatgggggtttatgtattcaagacagatgttttactcaatcttctgaaatggagatatcctacctcaaatgacttcggatctgaaatcatccctgca

SEQ ID NO: 292661 - DNA, 239 bp, Glycine max
  unsure (1)..(239): unsure at all n locations
cagctcgttaagaccgcgaaaacagtggcttcaccagggaggggtattttggccatggatgagtccaatgctacctgtgggaagcgtttggcttcaattgggctagagaacactgaagctaaccgccaggcataccgtaccctcctcgtgacagttccaggccttggtcagtacatcnctggtgccattctctttgaggaaacactctaccaatccacaactgatggcaggaagattgt

SEQ ID NO: 292662 - DNA, 241 bp, Glycine max
cgcagctacgagatacaaggcttctgggcaagacaccattgtgctagctggagctgaatatggcagtggaagttctagagattgggctgccaagggtccaatgctactgggagtcaaagctgtgatagccaagagtttcgagagaattcatcgcagtaacttggtagggatgggtatcattcctctttgcttcaaacccggtgaggatgcggacacattgggattaactggtcatgaacgt

SEQ ID NO: 292663 - DNA, 241 bp, Glycine max
  unsure (1)..(241): unsure at all n locations
cactttgactcctggtcatgatgctgtgcaaaaggtaacactagtncctcgtggtcaagctcggggtcttacatggttcattcctaatgatgatccaactctgatctccaaacaacaactctttgcaaganttgttggaggactaggtggaagggctgcagaaganattatttttggtgagcctgaagttacaactggagcagctggtgatttgcagcaaatcaccggtttggcaaaacag

SEQ ID NO: 292664 - DNA, 246 bp, Glycine max
  unsure (1)..(246): unsure at all n locations
cgaagatgaaggagattgcggaggcgtatctaggttccaccataaagaatgcggcngtcactgtgcctgcttacttcaacgactcacaacgtcaagccaccaaggacgctgntgtcatttctgggctcaacgtgatgcgaattatcaacgagcctaccgcggctgccattgcttatgggctcgacaaaaaggccactagctctggggagaagaatgttctcatttttgatctcggtggtgggactt

SEQ ID NO: 292665 - DNA, 155 bp, Glycine max
  unsure (1)..(155): unsure at all n locations
ggcagaaagcaagctcatcctagagttttanaaatggcagcagcctcctccatggntctctcttccccatccttggctggcaaggccgtgaagctgggcccatcagcccccgaagtcgggagggtcagcatgaggaagaccgtcaccaagcaggc

SEQ ID NO: 292666 - DNA, 148 bp, Glycine max
  unsure (1)..(148): unsure at all n locations
cgtggcaccgtcaaagtaggggaaactgttgaccttgtaggattganaganacaagaaacacaacggtcacaggtgtggaaatgttccagaagattctagacgaagccctcgccggggacaacgtggggctgttgctganaggggttc

SEQ ID NO: 292667 - DNA, 262 bp, Glycine max
  unsure (1)..(262): unsure at all n locations
ggatcatcaaacatgaagagtttctgactcataggctggcccttctgcacgcggccgacaagtatgacatatctgatttgaganatgtatgccatgagagtcttctagaagatattgacacaaagaatgtacttgataggctccaaaatgcatctctatatcagttgatgaaactgaagatgagttgcatccgatatcttgtgaagtttggtaaaatatatgaaattcgtgaagatttcaataccttcctgcaaaatgcaga

SEQ ID NO: 292668 - DNA, 274 bp, Glycine max
  unsure (1)..(274): unsure at all n locations
cagagataccgtgaagccgcagacttgatcaancaagggaaagatgtgtgctctcttcatcaacgatcttgatgcaggagctggtcgtcttggtggaaccacccaatacactgtcaacaaccagatggtgaatgccaccctcatgaacattgctgataaccccaccaatgtgcagcttcctggtatntataacaaggaagagaatccccgtgtgcccatcatcgtcaccggtaacgatttctccacactctatgcgntctcatccgtgatgggg

SEQ ID NO: 292669 - DNA, 258 bp, Glycine max
  unsure (1)..(258): unsure at all n locations
tgganccagggcctggtggtgacccaataagaaatccaaaagtcttgccaacaggaaagaatattcatgccctggacccacaagctattcctacaactgcagcgatncagagtgccaaaatagtggtagataggttgattganaggcagaaagctgagaatgggggaaaatatcctgngacaattgcacttgtattgtggggtactgataatattaaaacatatggtgaatccctggctcaagtgttgtggatgattg

SEQ ID NO: 292670 - DNA, 257 bp, Glycine max
tggaaacatgaaaaagacattgagggaggttatcgagaagtataatttgaatgtaagaatcactccaaatcagaatatcatcttgactgatgttcgtgctgcatggaagcgtcccattacaaccacgcttgctcaagctggtttgctgcaacctagatttgtagatcccctcaacataacagcagatggcatgccctgctttcccattatgtcctctggcaattactgaagctgaacgtgggatacctaacatactt

SEQ ID NO: 292671 - DNA, 259 bp, Glycine max
  unsure (1)..(259): unsure at all n locations
actgggaagagcacttggctgtnaagcatttctctgtggagggccagcttgagttcaaggccatcctctttgtcccgaagagggcaccctttgatttgtttgataccaggaagaagatgaacaacatcaagctttatgtcaggagggtgtttataatggacaattgtgaggagctcattcctgagtaccttggatttgtgaaaggtgttgttgactccgatgacttgccgctcaacatctctcgtgagatgctgcaaca

SEQ ID NO: 292672 - DNA, 254 bp, Glycine max
  unsure (1)..(254): unsure at all n locations
ttgagaggaacaggaaggacaaggactccaagttcaggttgatncttgttgagagcagaatccaccgacttgctcgctattacaagaagactaagaagctcccaccagtctggaagtacgaatcaacaactgctagcactctggttgcttagagaatgtatcaactttcatgggttttgctaccgtgcagtcgccgntgagctagcaatttgcgatatcattttgatgtttatttgaaggctggataggttatg

SEQ ID NO: 292673 - DNA, 252 bp, Glycine max
tctgaatatgtggtggatacaattgaggatgcatcagattcgtggggtttgtctgtgagctttctcagcataatcttgctaccaatagttggaaatgcagctgaacatgcaggagcaatcatatttgctttcaagaacaagctggacatttcattgggtgttgcattgggttcagcaactcagattgccatgtttgtggtcccattatgtgtaatcgttgcttggataatgggtatcgatatggacctgaac

SEQ ID NO: 292674 - DNA, 257 bp, Glycine max
  unsure (1)..(257): unsure at all n locations
aattctccagagagaagaagaaacttaatcgatcatcacttcacttcactaatacatcatggcagacgagacccagaacaagtatgagagctctgaggttgaggtccaggatcgtggtgtttttgactttctcggtaagaaaaaggatgaagaagacaagcctcatcctcaggaggaggtcatcgcnaccgagtttcaaaaagtcactgtctcagaccaaggagagaacaagcacagcctcttagaaaagcttcacc

SEQ ID NO: 292675 - DNA, 269 bp, Glycine max
  unsure (1)..(269): unsure at all n locations
ccaattgaagttaaaagccttagccttccctacaactccanacacaaagacatcntcatccatgggctgcctccgtctccactgtcggagctgtcaacagagctcttttgaacctgaatggttctggagctggagcttcagctcccagttcagccttctttgggaccagcttgaagaaggttattgcctcaagggtccccaacagcaaggtttccggtggaagcttcaagattgttgctgtagaagagaagaaagagnttgaagagacc

SEQ ID NO: 292676 - DNA, 262 bp, Glycine max
  unsure (1)..(262): unsure at all n locations
aaaacccagatgggtaatggaagacatgccgtttgggaggattatgggggatatggtgatgctgccaaacggcgacgttttgattattaatggagcgatgtcggggactcagggttttgagatggcgagtnatccgtgtttgaacccggttctgtaccggcccgaccaaccggtcgggttgcggttcatggttttgaaccccgggacggttccgaggatgtaccacgcgacaggaatctgttacctgatgcgagggttttgc

SEQ ID NO: 292677 - DNA, 128 bp, Glycine max
cataaaatagcgattccggaaatcatgtctgtagctgctctttttatttatgtgataaatgtaaaacgctttggtttggcttggccgttgtgcattacgttgaaaaaataaatgttataattactcag

SEQ ID NO: 292678 - DNA, 259 bp, Glycine max
  unsure (1)..(259): unsure at all n locations
agacatgctcataacttcagggaagttcagcagtgtactcttctgtctatcaaaacaggagggtgcagtgaagattgttcctattgtcctcaatcctctaagtatgatacaggagtcaaaggccaacgccttatgancaaggaagctgttctccaggctgcaaagaaggcaaaagaggctgggagnactcgcttttgtatgggtgctgcgtggagggatacactngggngaaagacnaacttnancnntgtcttngatt

SEQ ID NO: 292679 - DNA, 252 bp, Glycine max
caaggctctactctactgcttcaccttctgctctagaaaattcagtggtgatacatggcttcggctactctctctgtagccaaaccagcccttcaggcaaatgggaaaggcttctctgaattctctggcctccgcagctcatcaggcttccttcccttttctagaaaatcttcagaggatttccattctgtcattgccttccagacctatgcagttggaagcagtggaggatacaagaagggtgtgacagat

SEQ ID NO: 292680 - DNA, 251 bp, Glycine max
  unsure (1)..(251): unsure at all n locations
ctcatttcttcatcgttcgattcttctcctcctaaagatgcagatcttcgtgaaaactttgaccggtaagaccatcacccttgaggtggagtcctccgacaccatcgataacgtgaaagctaagattcaagacaaggaagggatcccacctgaccagcagagncttatctttgcgggtaaacagcttgaggatggtcgaacccttgccgactacaacatccanaaggaatccactctccacctcgtgcttc

SEQ ID NO: 292681 - DNA, 252 bp, Glycine max
  unsure (1)..(252): unsure at all n locations
tgcagtcacatcatctttacttgantcggtggaaagtgctgatnttatnnccatatggtctcatacccgaatttataggacgatttccaatcttaattagcttgtcagctctaaccgaagaccaacttatgcaggtcctcacagaaccaaaaaatgctcttgctaagcagtacaaganattatttaacatgaataatgtaaagctacacttcacagagaaagctctgagattgattgcaaagaaagcaatgg

SEQ ID NO: 292682 - DNA, 245 bp, Glycine max
  unsure (1)..(245): unsure at all n locations
gccaagagctgccccaatgcaattgtcaacttgattagtaatccagtgaattccanagttgctattgctgcagaggttttcaagaaagccggtacatatgatccaaagcgactactgggtgttacgacccttgatgttgtgagggcaaatacttttgtggcagaggtacttggagttganncaagagaggttgatgttccagtggttggaggtcatgctggtgtcacaattttgcctcttttgtc

SEQ ID NO: 292683 - DNA, 264 bp, Glycine max
  unsure (1)..(264): unsure at all n locations
gttcactcttcttctcttgcagctagngttntancgcacttncttctagatttaaggancnatgggtaangaaaaggttcacatcagtattgtggttattggccatgntgactctgggaagtccactaccactggccacctgatctacaagcttngacggcattgacaagcgtgttattgaganatttgagaaggaagctgctgagatgaacaanaggtctttcaagtatgcctgggtgcntgataagcttaaggctgagcgtg

SEQ ID NO: 292684 - DNA, 253 bp, Glycine max
  unsure (1)..(253): unsure at all n locations
aggtcctggggtgctcgggatgcctgctggtccttacttatacgcggatgatctgattgaagtcttgaagaaaaagcatgnttctggaacatataaaaacctagtattttatctggaggcntgtgaatctgggagtatctttgaaggtcttctncctgaagatatcaatatttatgcaaccantgcttccaatgcagaagaaagtagttggggaacatattgccccggggagtatcctagtcctcccccagaa

SEQ ID NO: 292685 - DNA, 134 bp, Glycine max
  unsure (1)..(134): unsure at all n locations
gcaganataccgtgaagccgcagacttgatcaagaagggaaagangtgtnctctcttcatcaacgatcttgatgcaggagctggtcgtcttggtggaaccacccaatacactgtcaacaaccagatggtgaatg

SEQ ID NO: 292686 - DNA, 261 bp, Glycine max
  unsure (1)..(261): unsure at all n locations
aagaaanacgaggccaaaaatgcattggaaaattatgcctataacatgaggnacacaatcaaggatgacaagattgcttcnaaactgtcttctgatgataagaagaaaattgaagatgcgattgagcaggctatccaatggctagatggaaaccaacttgctgaggctgagnaatttgaggataagatgaaggagttggagagcatttgtaatcccatcatagcaaagatgtaccagggtctggtggtgatgcgggtggag

SEQ ID NO: 292687 - DNA, 251 bp, Glycine max
  unsure (1)..(251): unsure at all n locations
tcacagccccagctggtgccatttccgttattgatgaatgggaattacacagcaagcaccattccttngaggctcccttccgacgatccaagcattcccacacccatcgagctnaccttggcttaatctcttcctcaacacaatccccaccttcaagaagcatgctgagagtgatacttctgttcctgatgctgtgaataaagctgaagaatttgctcaaaggtttgctagnataattgaagatttcaaga

SEQ ID NO: 292688 - DNA, 251 bp, Glycine max
atttaaacctcttttttgcaggtttccattaattggaaatctgttacaaattttttcggcactccgttgatgagatgccacttttaaaatatggctgtttatctctgcgagcatagttaccgagttctggagttaggtatctttttttctagtgttggcacctgatgtttttagctctgctttgtatcggttttgccaccatgtgtttccttgtcctcgtttctttgcagcagtacatttatcgagtctgt

SEQ ID NO: 292689 - DNA, 217 bp, Glycine max
  unsure (1)..(217): unsure at all n locations
aagcaatacagcttgcccccacatgagtgtggataacctggncantgtgttcaaccccttgaactttgcacctactttggaggccaaggagaaggaacttgccaatgggagattggctatgttggcattcttgggattcatagttcaacacaacgtgacaggcaaaggaccatttgagaacctcttgcagcacctctctgacccgtggcacaacacc

SEQ ID NO: 292690 - DNA, 208 bp, Glycine max
  unsure (1)..(208): unsure at all n locations
cctganaacaaagcagtgtctgcngtgggcaaagctgctggagcaaaatggaagaccatgtctgangctgaaaaagcaccttatgtggcaaagtctgaganaaggaaagtggagtacgagaagaacatgagagcctataacaagaaacaggcggaaggtcctactggtggggatgaagaagaatctgagaagtctgtatctgaggtga

SEQ ID NO: 292691 - DNA, 261 bp, Glycine max
  unsure (1)..(261): unsure at all n locations
ctcactttccagaaagccttcacatgttcacctttttatttgatgatttgggtgttccngcaagattacaggcatatggatggntttggagttaacacatacacactgatcaacaaggctgggaaagcagtgtatgtganatttcactggaagaccactagtggtataaagtgtctattggaggaagaggccattaaggtgggaggagccaacccacngccatgcccatccagacctttcatgantccattgctgctggnt

SEQ ID NO: 292692 - DNA, 254 bp, Glycine max
  unsure (1)..(254): unsure at all n locations
cgganaaganaattctctcaattcgagacagaggtattggtatgacgaaggaggatttgataaagaatttggggacaatagcaaaatctggaacttctgcatttgttgagaagatgcaaacaagtggagatctcaatctgattgggcagtttggagtcggcttctactctgtttatctcgtggctgactatgtcgaagtcattagcaagaataatgatgataaacagtatgtatgggaatcaaaagctgatgga

SEQ ID NO: 292693 - DNA, 246 bp, Glycine max
  unsure (1)..(246): unsure at all n locations
gaacagactattaaccagcttctgacggagatggatggcttttctggcaattctggtgttattgttttggctgccactaacagaccggatgttcttgattcggcgctgttgaggcctggccggttcgacaggcaagttactgtggatagacctgatgttgccggcagagttaaaattcttcaggtgcattctagaggaaaagcacttgcaaaggatgttgactttgaaaaaattgcnaggagaacc

SEQ ID NO: 292694 - DNA, 190 bp, Glycine max
  unsure (1)..(190): unsure at all n locations
cttcctcnaaactcatactattccnccatgcatcatcatcctcttcccttaattccacacnnttcngnncntngacnacnaacacccacaaactaacccctctctcctcctccttccnccaccccaccaccgtcctccgcngcaccccttcttccacnaccaccccgcgtngcaccttcaccgtccgcgc

SEQ ID NO: 292695 - DNA, 255 bp, Glycine max
  unsure (1)..(255): unsure at all n locations
ggctgctctgcaatacttggaatcgctgcgcaacgcgcatncctgagctctccgattggtacaattcgctggcggatctataccagaacaagctctggcaccagcttaccctcaagcttgagcagttcgtggctctcgccgtcttccaggccggtgatgcattaatacaattatatcacaatttcatcacagactttgagaccaaaaatcaaccttctcaagcttgcgcatttcgctgttatagtttctcggcag

SEQ ID NO: 292696 - DNA, 249 bp, Glycine max
  unsure (1)..(249): unsure at all n locations
cnttactgctaaacttcaggaggtagaagactggctatatgaggatggtgaagatgaaactaaaggtgtatacattgccaagctagaagaactcaagaagcaaggtgatccaattgaagagcgttacaaagaatacatggagaggggtacagtaatagatcaacttgtctattgtataaatagttatagagaagctgcaatgtcaaatgatcccaaattcgatcacattgacatcaatgagaaaccaaa

SEQ ID NO: 292697 - DNA, 245 bp, Glycine max
  unsure (1)..(245): unsure at all n locations
ctctagatttggacaaagacgttgaaggtgatttcaccaatgtggatctgttgaatgcagcttatgatcggtgtggtgaagtctgtgctgagtatgccaagacattttacttaggcacacaattgatgactgcagagcgccgaaaagctanttgggcaatttatgtgtggtgcagaagnnctgatgagctagtggatggcccaaatgcttcgcacatcacccccggggccttggacaggtgggag

SEQ ID NO: 292698 - DNA, 247 bp, Glycine max
  unsure (1)..(247): unsure at all n locations
gtgacagtnacntggtcttggngaatacatctctggtgccattctctttgaggaaactctctaccaatccactgtcgatggaaggnccgatcntcgacgtacttgttgaccaaaacattgttcccggtatcaaggtcganaagggtttggtgcccctagctggttcgaacgatgagtcatggtgcnaaggtcttgatggtcttgcgtctcgcncagctgcatantacnagnaaggtgcccgtttcgc

SEQ ID NO: 292699 - DNA, 247 bp, Glycine max
  unsure (1)..(247): unsure at all n locations
ctanaactnnacnccctcagaagcgaagaagaagccacagagaactagtctcctactctcacccgcaaganaaaaatggcatctcacatcgttggatacccccgtatgggtcccaagagagagctcaagttcgtctcgagtcttnctgggatggcaagagcagcgccgaggatttgcagaaggtgtcttctgatctcagggcatccatctggaagcagatggctgangctgggntcaagtacatccc

SEQ ID NO: 292700 - DNA, 252 bp, Glycine max
  unsure (1)..(252): unsure at all n locations
ggcagatagaaaaaagagcgacttttgagttcaaaagatgactaacttcccattgatcaacttggagaagctcagtggtgaggaaagaaacgataccatggaaaaaattaaagatgcttgtgaaaactggggattctttgagctggtgaatcatggcattcctcatgacatattggacactgtggagaggttgaccaaagagcactacaggaaatgcatggcagagagggtcnaggaattagtggccaacaa

SEQ ID NO: 292701 - DNA, 241 bp, Glycine max
  unsure (1)..(241): unsure at all n locations
gcaattgaagtggaagtcttgcccttctctcttcaactccaaacacaagacatcancatccatngctgcctccgtctccactgtcggagctgtcaacagagctcttttgaacctgaatgggtctggactggggtttcagctcccagttcatccttctttgggagcagcttgaagaaggttattggctnaagggtccccaacacaaagatttcctctggaagcttcaagattgttgctgtag

SEQ ID NO: 292702 - DNA, 247 bp, Glycine max
aaggttgacattaacaacaatgtacttaagggcgcccctcatccaccatcactgctcatggctgatgcatggacaaaaccatactccagggaatatgcagccttcccagctccttggctccgtactgcaaagttctggcctaccacaggacgtgttgataatgtgtacggtgaccgcaacctcatttgcacccttctcccagcatcacaggctgttgaagaacaagcagctgccacagcataatgtg

SEQ ID NO: 292703 - DNA, 253 bp, Glycine max
ggttgtgaaagcagagaagtgagatacactaagttatcctcataaatacactctaattaggtggcaagataagtgtctaaccttagtaacattgccacatattgtgttcattttggaattgtgccactaaaattctattcaattcatctatggctgcctcttcttatgctatgcaatcaatcctgggcaaaccctttgatccgcatttcccagcggggtctagggtgaacccaatttgggcgttcctgctttg

SEQ ID NO: 292704 - DNA, 247 bp, Glycine max
  unsure (1)..(247): unsure at all n locations
cctctctctcttctgcaccggnncccttcncgccggcggcctctactggttcgtctgtgttctgggccccgccgagcagaagggcaaacgcgccaccgatctatccggcggctccatctccgccgagaaagtccaagacaactacaagcagtactggtccttcttccgccgcnccaaggagatcgagaccgccgacaaagttcccgatntcgtcgacaacttctacaatctagtcaacgacattacg

SEQ ID NO: 292705 - DNA, 243 bp, Glycine max
  unsure (1)..(243): unsure at all n locations
acctttcatccattaatcggtgactctatcagccccttatataccatctgtattgattattatgttcataattttatttgtatttatatttacactacaaatagtcttcgaagatagattatgttcaaaatacatggttataacattgtcttcaccttgataagtttcttcattttgttcattaaaaaaaaagnnggnggnaanannaaaaanggggggncngcnggtnngnggncccncccc

SEQ ID NO: 292706 - DNA, 244 bp, Glycine max
  unsure (1)..(244): unsure at all n locations
ggcagagagcaagctnatcntagagttttaaaaatggcagcagcctcctcnatggctctctcttccccatccttggctggcaaggccgtgaagctgggcccatnancccccgaagtcgnnagggtcagatgaggaagaccgtcaccaagcaggcctcctccggaagcccatggtacggcccagaccgcgtcaagtacttgggcccaattctntggngagcccccgtcctanctcactggngagt

SEQ ID NO: 292707 - DNA, 219 bp, Glycine max
  unsure (1)..(219): unsure at all n locations
atttcatctgtcaatgccatgtcagcactttgtgaggctaccggggcanatgttcaacaggtgtcctattctgttggaacagactcaaggattggacccaagttcctcaacgccagtnttggttttggtggatcctgcttccagaaggatatcttnaaccttgtntacatctgcgagtgcaatggccttccagaggtggctgagtactggaaacaagtt

SEQ ID NO: 292708 - DNA, 238 bp, Glycine max
  unsure (1)..(238): unsure at all n locations
tccaattganattttaaaaatgactgggataaacttaaganttcaattattgaaattgaataagtaaacaatttaattggattggtcgaatggtatcaaaaaatggagtactaactcccatttcttatttattattgaattaaccgatcaacttgctttgttatcgaacatttctttttganttcaaaaattttccggaaaanaatttgaatctatttttatatgcgaatcaatccta

SEQ ID NO: 292709 - DNA, 275 bp, Glycine max
gaagggaatgagagtgaagcttcaaggcgtattaaaactgagcttctggtgcagatgcagggtgtgggacacaatgatcagaaagttcttgttcttgcagctacaaatacaccttatgctctagaccaggcaataaggcggcgtttcgataagcgtatatacatacccctacctgatttaaaggctcgccaacacatgttcaaggtgcacctaggagatactccccataacttggctgaaagtgattttgaacatttggctcgcaagacagaggg

SEQ ID NO: 292710 - DNA, 270 bp, Glycine max
  unsure (1)..(270): unsure at all n locations
ggcggaagttgcaactgaagtgaagctctttaacaagtggtcgtacgatgacatcagcgttgcagcggatatctcattggaagactacattgccgtgaagggtaaagccgccacgtttctgccgcatacggcgcaggctaccagaagaagcgctttcgtaaggcgcagtgccccattacagagcgtctggtgaatgcgttgatgcgcaaaggtcgtaactcgggcaaaaagctcaaggccacgcgtattgtcaagcacacgcngganatt

SEQ ID NO: 292711 - DNA, 271 bp, Glycine max
  unsure (1)..(271): unsure at all n locations
ggttgccaaaccgggatgacgtgaaggctggagttatagcctacaagatagcggctcatgctgctgatttagccaaaggtcatccatatgctcaagcctgggatgatgcattaagcaaggcaanatttgagttccgatggatggaccagtttgctttgtcattggatccgatgacagccatgtccttccatgacgaaaccctgccagcagatggtgcaaaagtggctcatttctgctcaatgtgtggccctaaatnctgctctatgaagat

SEQ ID NO: 292712 - DNA, 270 bp, Glycine max
tgatcaggttgttggtgtccatgggagaagcattgagaacaatttccttcaaagtgaagacggcttcatgtggtggaacacaatgtgttaatacttttggggatgagcagcttgcagtggatttgctagctaatcagcttctttttgaggcctaaattactctcatttctgcaagtatgcttgctctgaagaaaatcctgagctcttggacatgggaggtccagttgaaggtggatttagtgttgcatttgatccccttgatggctccag

SEQ ID NO: 292713 - DNA, 221 bp, Glycine max
tgtcatcatcttcagacctggacaggcaaatagagcagttgaagaggtgtgagcctcttaaggagtctgaagtgaaggcgctttgcctcaaagccatggaaatccttgtcgaagagagcaacgttcaaagggtcgacgcccctgtcaccatatgtggtgatattcacggtcagttttatgacatgaaggagttttcaaagtaggaggggattgccccaaaa

SEQ ID NO: 292714 - DNA, 270 bp, Glycine max
  unsure (1)..(270): unsure at all n locations
cacatttagaggtagaggcctttctatacggggcgagggtcctttaaggaatgtgaggagccgttctgcacttgatttggaatccaacctggctagggcccatttatcaaatactcatccacacaactcanactctngtggtctaccagttgaccattcttctagcgtggtcgatctgtcaactcaaacttctggcactttgacacgggattggagcccaatgagttcatgtcctcctcatggaagggtgtcatcatcagatgcaaatgc

SEQ ID NO: 292715 - DNA, 271 bp, Glycine max
  unsure (1)..(271): unsure at all n locations
gaagttaaaagcctnagccttcccnacaacnccaaacngggagacancggnatccanggctgcntccgtctccactgtcggagcngtcaacagagcnctnttgaacctgaatggttctggagctggagcttcagcncccagttcagccttcttngggaccagcttgaagaaggttattgcctcaagggnccccaacagcaaggtttccggtggaagcttcaagattgttgctgtagaagagaagaaagagattgaagagacccagcagacc

SEQ ID NO: 292716 - DNA, 268 bp, Glycine max
  unsure (1)..(268): unsure at all n locations
aattctctgggctaagatccacttcatgtgtgacatatgctaacgatgctagagaatcttccttttttgatcttntagcttcccaactgcactcccaagaccaatggatcatcaactcctgtgaggggagagacagtggccaagttgaaggtggcaatcaatggtttcggacgcattggtagaaacttccttcgctgctggcacggccgaaaagactcaccccttgaggtcgttgttgtcaacgacagtggtggtgtcaaatgcttcg

SEQ ID NO: 292717 - DNA, 271 bp, Glycine max
caacgaggagtacagggccaagtacttgggaaccaagatcgatcccaaccggaggcttcggcaagaccccgagcaaccgatacgcgccacgtgttcggcgacaaactacctgaatcggttgattggaggaaggaaggtgctgttcctccagtcaaagaccaaggaggctgtgggagctgttgggcattctcagcaatcggtgcagtggaaggaataaataagatagtgacaggtgaactgatttcgttatcagaacaagaattggtggatt

SEQ ID NO: 292718 - DNA, 264 bp, Glycine max
  unsure (1)..(264): unsure at all n locations
gatttggcaccagtggatctccaaggtgaaggatggccagcaccttctcgaagaggagcttcaacttctttgcgaatatgttaaagagatccttattgaggagtcaaatgtgcagcctgtcaacantccagtgacggtttgtggtgatattcatggtcagtttcangatccaangaanctttccaaactgggggnaatttccnggaaaaantcatttttngnggganctttgtgaaccggggttaaaaacnntnantttnccnc

SEQ ID NO: 292719 - DNA, 271 bp, Glycine max
  unsure (1)..(271): unsure at all n locations
ccctggccaatccattgatttctttggtgcactgagggccagagtatatgatgacgaagtgaggaagtggatttctggtgttggtgttgacggcattgggaagaagcttgtgaactcaaaagatggacctccaacctttgagcagcccaagatgactctggagaagctcttgacgtatggtaacatgcttgtccaagaacaagagaatgtcaagagagtccaattggctgacaatacttgaacgaggctgcacttggaaatgctaacgang

SEQ ID NO: 292720 - DNA, 266 bp, Glycine max
  unsure (1)..(266): unsure at all n locations
tgagaggcaccatggcgacactggattccgacgtgaccatggttccggccggcgaaccctccaccagcgccggtccttcttcgtccaccaagaagccgaagcgattcgagatcaagaagtggaatgccgtttctctctgggcttgggatattgttgtggataattgcgctatttgcagcaaccanatcatggatctctgtattgagtgccaggccaaccaggctagcgccactagcgaggaatgcactgtagttggggagtttnta

SEQ ID NO: 292721 - DNA, 266 bp, Glycine max
  unsure (1)..(266): unsure at all n locations
ggttaaagttaatgtagcatgtgctgctgttggcttgacatcaagttacactccaactccattgttggaatctggtttgcaaaaagacagagggttaattgtggagtattttggaaggatgtcttacgttgctcacaacgttaatcancccccaagagaaagatttgttggagggaaatttntcctntgatatnaaatctcgctctagannggaaaaagnttcctctacaaaagcacaatttgttagtggaaaaacctcaaatang

SEQ ID NO: 292722 - DNA, 267 bp, Glycine max
atcgtgtgcattttggaattgtgccactaaaattctattcatcctatggctgcctcatcttatgctatgcaatcaatccttgcaaaccctatgatccgcatttccagcgggtctagggagaaccattttggtgttcctgcttatcacatgagaaggaatgttggcctgagagttaggtccatggctgaggaagagcaaccaagtcagcctgcgaccccagttacaccaccaccagcagaacccaaaccacagccagtctctactcct

SEQ ID NO: 292723 - DNA, 267 bp, Glycine max
  unsure (1)..(267): unsure at all n locations
cttttcaganaaataatccttatccagatgttaagtacactttcnntccaatattaatcaaatcactatctatggccctcagtaagtacccctttatgaacagttgcttcaaagaggatgcattggaggtcatcctcaaaggttcacacaatgttggaattgccatggcgacatcacatggtttagttgtgccaaacattaaaaatgttcagtctctttccataatggagataaccaaagagctggcaaggttacaacaattggctt

SEQ ID NO: 292724 - DNA, 265 bp, Glycine max
  unsure (1)..(265): unsure at all n locations
gnagcaccaaagggtcctcaactgagagacattgatcgtggagcagatattgtggtagccactcctggtcgcttgaatgatattcttganatgagaagaattagtcttaatcaggtttcttacctggtgctagatgaggcagacaggatgctggatatgggttttgaacctcaaattaggaaaattgtgaatgaggtgcccaatcgcaggcaaactctaatgnttactgcaacatggccaanggagttaggaaaatcncacctgt

SEQ ID NO: 292725 - DNA, 269 bp, Glycine max
ggagaagttctactgggcaccaacaagggaagaccgcattggtgtttgcaccggaattttccgcactgatggtattcctgaacaggacattgtcaagcttgttgacaccttccctggccaatccattgatttctttggtgcactgagggccagagtatatgatgatgaagtgaggaagtggatttctggtgttggtgttgacagtgttgggaagaagcttgtgaactcaaaagatggacctccaacctttgagcagcccaagatgactc

SEQ ID NO: 292726 - DNA, 265 bp, Glycine max
gcgaattcagcgagagttgcggctgggaatggacggtgacggcgaggagttgacggcgcaggagaccgctttgtatgaccgtcaaattagggtttggggagctgatgctcaaagaagattaagcaaatctcatgtcttagtctatggaatgaaaggaactgtagctgagttttgcaagaatattgttctggctggagtaggtagtctgactttagtagatgaccgggctgccacggaggaaatgctttcctccaactttctcatc

SEQ ID NO: 292727 - DNA, 268 bp, Glycine max
  unsure (1)..(268): unsure at all n locations
gaaaactttttacttggtcaaccagctacagcgcaaganaagaaactgtttcttgttgaccttggattagcaacaaaatggagagacacctccagtggacagcatgtggactatgatcaacgtcgcgatatgtttagaggaactgttcganatgctagtgttcatgctcatttggggagaactgctagtagaagagatgatcttgaatcgcttgcatacancactagtcttccncccataagggcccatnnncatggccagggttacc

SEQ ID NO: 292728 - DNA, 260 bp, Glycine max
  unsure (1)..(260): unsure at all n locations
cacagttgctattgctgcggaggttttcaagaaagccggtacatatgatccaaagcgactactgggtgttacaacccttgatgttgtgagggcaaatacttttgtggcagagatacttggagttgatccaagagaggttgatgttccagtggttggaggtcatgctggagtcacaattttgcctcttttgtcacaggttaagcctcccagtagcttcactgcagaanaaactgaatacctgacaaatcgcatccaaaatg

SEQ ID NO: 292729 - DNA, 260 bp, Glycine max
aaaatccagtctctcagcagagggatttgatgttgtttatgacataaatggacgcgaggcagatgaagttgaacccatactggatgctctgcctaatctggagcagtttatttactgctcttctgccggtgtctatctcaaatctgatctattacctcacgcagagactgatgcagttgatcctaagagcagacacaagggaaagcttgagacagagagtttgctacaagcaaggggtgttaattggacatctataaggc

SEQ ID NO: 292730 - DNA, 261 bp, Glycine max
  unsure (1)..(261): unsure at all n locations
cgagttgttgtaaagctagccttgttgcagccatggccacccacgcggctctagcttctacaaggatccccactaacaccaagttcccatccaaggcttcacactctttcccaacccaatgcgcctcaaagagacttgaggtgacagaattctctgggctaagatccacttcatgtgtgacatatgctaacgatgctagagaatcttccttttttgatcttgtagcttcccaactcacncccaagaccaatggatcatcaa

SEQ ID NO: 292731 - DNA, 262 bp, Glycine max
ttacgtgttccccggttacattttccaaatgctaacctccctctcttggatttgctggttatatcccaacaatgttctggcccaacaacttgggtcgggcctaaacgggcttggcataggagcaattgggcttgactggtccaccatttcgtcctacctcggaagcccactcgcaagcccatggtttgccactgccaatgtcgcggtgggtttcgtgtttgtgatgtacgttctgactccgctgtgctattggctcgacttg

SEQ ID NO: 292732 - DNA, 200 bp, Glycine max
  unsure (1)..(200): unsure at all n locations
aatcctntnataacatttatagnttcattcttaatcgttgggaaaaatgttcatcgagaattttaaggtagagagtcctaatgtgaagtacaccgagactgagattcagtccgtgtacaactacgaaaccaccgaattgttcacgagaacaggaatggcacctatcagtggattgtcaaacccaaatccgtcaatancaa

SEQ ID NO: 292733 - DNA, 261 bp, Glycine max
  unsure (1)..(261): unsure at all n locations
tcgagggtgaganatttgtttgagaaggcgaaggggaaggcgccgtgcattgttttcattgatganattnacgccgttgggaggcagagaggggcggggctcggaggtgggaatnacgagagggaacagactattaaccagcttctgacggagatggatggcttttctggcaattctggtgttattgttttggctgccactaacagaccggatgttcttgattcggcgttgttgangctggccggttcgacaggcaagtta

SEQ ID NO: 292734 - DNA, 266 bp, Glycine max
  unsure (1)..(266): unsure at all n locations
tccggttcatntncgcacancctgcccaannnnngngatcagaacaaaagtgagtatattgagattgaggagctgcgtacgccttatctgatgatcttgacacaaacagtgaagaagttatcagtgcaattatgcatgatgtggacacagacaaggatggaaggataagttacgacgaatttgctanaatgatgaaggctggcacagattggagaaaagcatcaaggcagtattccgcgagagaggtttgccagtctgagcctaac

SEQ ID NO: 292735 - DNA, 258 bp, Glycine max
caactggacaagcaactctgcgtctctttttccatgattgctttgttgagggctgtgatgcctccgtgataatctcctcgccaaatggggacacagagaaggatgccgaggaaaatatttcactgccaggagatgggtttgacactgtgatcaaggcaaagcaagcagtggaagcttcgtgccctggagtggtttcctgtgcagacattttggcacttgctaccagagacgttataggcttgcttggaggtccttcat

SEQ ID NO: 292736 - DNA, 252 bp, Glycine max
  unsure (1)..(252): unsure at all n locations
gagagagacaagaaacacaacggtcacaggtgtggaaatgttccagaagattctagacgaagccctcgccggggacaacgtggggctgttgctgagaggggttcaaaagacggacatccagagagggatggtgttggcgaactggcacgattacgccgcacaccaagttctcagcgattgtgnatgttttgaagaagggaaganggtgggagacattcacctttcnttgcaggtatagggcctcagttttac

SEQ ID NO: 292737 - DNA, 243 bp, Glycine max
  unsure (1)..(243): unsure at all n locations
ctagttataaattatgatctcccaacacagcccgagaactatctccatcgtattggtcgtagtggaaggtttggtaggaaaggtgttgccattaactttgtcacaagggatgatgaaaaaatgctgtttgacatccagaagttttacaatgtgattattgaggagctgccttcaaatgttgctgaactcctttgatgagtttttttgnttccatcatattagaggaaagttggtttctgaggt

SEQ ID NO: 292738 - DNA, 243 bp, Glycine max
  unsure (1)..(243): unsure at all n locations
acgaagtcgcacgactacattcccatcccccagcgncagaccgacctcccattcctcctcgccgtcgaagacttttctnccatcaccggccgtgggaccgtcgccaccggccgcgtagagcgtggcaccgtcaaagtagggganactgttgaccttgtaggattgagagagacaagaaacacaacggtcacaggtgtggaaatgttccagaagattctagacgaagccctncgccggggacaa

SEQ ID NO: 292739 - DNA, 242 bp, Glycine max
  unsure (1)..(242): unsure at all n locations
ttnttatgtatgatgncattgcattcaatggggaaaacccaagcgcctggagtcatcattaacaaaccagatggaggtgatgtttatgaaggagttccaaaggattacaccggcgaagatgttactgttggtaacttttttgctgctttacttggaaacaagtcggcacttactggtggcagtgggaaggttgtggacagtggacctgatgatcatatatttgtatactatactgaccatgg

SEQ ID NO: 292740 - DNA, 248 bp, Glycine max
  unsure (1)..(248): unsure at all n locations
tagatatctcccacccgaccttcaggtttgcttgatttctgctacccttcctcatgaaatactggagatgacaaacaaattcatgacagatccagtaaggatccttgtaaaacgtgatgaattgacattggagggcatcaaacaattttttgttgccgttgaaagggaggaatggaagtttgataccctgtgtgatcttatgataaccncactaacatcnagngttatatctgtaaacactnagcaaa

SEQ ID NO: 292741 - DNA, 246 bp, Glycine max
  unsure (1)..(246): unsure at all n locations
ccattgtgtaaggcacatggtggggggaagcgctgccttttcaatggaggtggcatttgcccaaaaagtgtgcatggaggcactaacttctgtgttgctcatggtggtggaaagangtgtgctgttgcaggttgcaccaagagtgcacgtggccgtactgactgttgtgtcaggcatggtggggggaagcgatgcnagtatgnaagcngtgggaagatgcnccaagggagcacagattctgcaaag

SEQ ID NO: 292742 - DNA, 241 bp, Glycine max
ccggccatgttgagatacttaagagggctagggagcttggtgactttcttctagttggtatccactccagatgagacagtgagtgagcatagaggaaatcactatccaattatgcatctgcatgagcgtagccttagtgtgttagcttgccgttatgttgatgaagttattattggttcaccttgggaaattacaaatgacatgatcaccactttcaatatctcagtagttgtgcatggta

SEQ ID NO: 292743 - DNA, 249 bp, Glycine max
  unsure (1)..(249): unsure at all n locations
gnagaagaggtcgagtttcacagcagcaatggtgtacgtcaaggctcagaaatcaaaagcctacttcaagagatatcaagtcaagttcaagagaagaagagagggaaaaaccgattaccgtggccaggattcggttgattaatcaggacaagaacaaatataacactccgaaataccgatttgttgttcgctttagcaacaaggacattgttgcacaaataatntctgctagcattgctggcgatattg

SEQ ID NO: 292744 - DNA, 236 bp, Glycine max
aggtgatggtgtcaaaaattgtgaagacattgacgaatgcaaagagaagaaagcttgtccagtgccctgaatgtagctgcaagaatacttggggaagctatgactgcacttgcagtggggatcttttgtatataagggaccacgacacttgcataagtaaaactgccagtcaggagggaagatcagcttgggctgctttttgggttattttaattggctagttgtggctgctgcag

SEQ ID NO: 292745 - DNA, 239 bp, Glycine max
  unsure (1)..(239): unsure at all n locations
aaggcgacaaacacttcgccaaccttctgctgcatcagttgtgagatgcaaccccaccaccccatncaggcctcacaatcagagctggttcctatgctgatgagctcgttaagaccgcgaaaacagtggcttcaccagggaggggtattttggccatggatgagtccaatgctacctgtgggaagcgtttggcttcaattggggctagagaacatgaagctaaccgccaggcgtaccgt

SEQ ID NO: 292746 - DNA, 237 bp, Glycine max
caaggcagaaagcaagctcatcctagagttttaaaaatggcagcagcctcctccatggctctctcttccccatccttggctggcaaggccgtgaagctgggcccatcagcccccgaagtcgggagggtcagcatgaggaagaccgtcaccaagcaggcctcctccggaagcccatggtacggcccagaccgcgtcaagtacttgggcccattctctggcgagcccccgtcctacctt

SEQ ID NO: 292747 - DNA, 238 bp, Glycine max
  unsure (1)..(238): unsure at all n locations
catgatttccgaaaacttgcctctgcaatctatcttcaagtgagcactattagtcaggccctaatatttgtgactcggtcacggggttggtcttatgttgaacgtcctggtattttgcttgtnacagctttcgtgattgctcagctaattgccactttgattgcggtatatgccaantggagtttgtgccatcgaaggcataggttggggatgggctggagtgatatggtatacaaca

SEQ ID NO: 292748 - DNA, 246 bp, Glycine max
  unsure (1)..(246): unsure at all n locations
cgaaccttggctgattacaacatccaanaagaatctaccctccacttggtgctccgtctgcgcggtggtatggcaaatctttgtgaagacccttactgggaagaccattactttggaggtagagagctcagacacaattgacaatgtgaaggcnaagntccaagacaaggagggtatcccaccagaccaacagaggctcatttttgctgggcaaacagttgnagatggccgnaccttggctgatta

SEQ ID NO: 292749 - DNA, 239 bp, Glycine max
  unsure (1)..(239): unsure at all n locations
ccngaacccgtcggctgtcggtggactgctcgagctgcttccgcggcgagaggggtcntcgcgtgccggtcgggggacggnttgggaacgangcccttcngggcctcttcccngggcgtcgaacagtcaactcagaactggtacggacaaggggaatccgactgtttaattanaacaaagcattncnatgtcctgcggatgnttgnnngaatgtgatttctgcccagtgctctgnatgt

SEQ ID NO: 292750 - DNA, 232 bp, Glycine max
  unsure (1)..(232): unsure at all n locations
cttctataaggccagtctatatctatggacccttgaactacaacccngttgaagagtggttcttccatagattgaaagccggacgcccaattcctatccccagctcaggactacagataacccaacttggtcatgttaaggatttggcgacagttttatccaagttcttggtaatgagaaggccagcaaggaagtattcaacatctcgggagagaagtatgtcacgtttgac

SEQ ID NO: 292751 - DNA, 234 bp, Glycine max
  unsure (1)..(234): unsure at all n locations
agaaatcagtgcttagttcggtggatattattgggcttggaactggacctgaattggagaagaaacttaagtatgcagctgacatttcttctggaatcattctcggaagggagcttgtgaattctccggctaatgtgctcacgccaggggtattggctgaagaggcatcaaagattgcttcaacatataatgntgtttttactgccaaaatatnncnccccngagcagtgtaaa

SEQ ID NO: 292752 - DNA, 237 bp, Glycine max
  unsure (1)..(237): unsure at all n locations
agcagagagaaganaaggtgtagacaaacacaatctctaatggcactgcaggatgtgggcttcttccactgccaatgcactcaaagtctcttctacctccagacctcatctcttgcatcctttttctttctccagatgcttgtcttccgtcttggatggacttaagtatggcagattcacacgaatgggtcaagcacgaaggcttcagtcgccaccattggtatcactgancatgcc

SEQ ID NO: 292753 - DNA, 283 bp, Glycine max
  unsure (1)..(283): unsure at all n locations
tgcaattgaagttgaagtcttgcccttctctcttcaactccaaacacaagacatcatcatccatgggctgcctccgtctgccactgtcggagctgtcaacagagctcttttgaacctgaatgggtctggacctggggtttcagctcccagttcatccttctttgggagcagcttgaagaaggttattggctcaagggtccccaacacaaagatttcctcnggaagcttcaagattgttgctgtagaagagaagaaagagattgaagagacccagcagaccgac

SEQ ID NO: 292754 - DNA, 282 bp, Glycine max
  unsure (1)..(282): unsure at all n locations
atccgatccaccngattagtatgtggggaganggcttcaaaagtaatggaaatttncagtggcagcnatgcctctanattgatgagacagacatgaagtttgatagtcagtcagaggntgcttctcatggtatactgggagagcctaataagtatgaccaagangctaacaaacctactgataagatacaangacgtcttgcacaaaatcgagaggctgctcgtaagagtcggttgaggnaaaaggcctatgtgcagcagttagaatcaagtcgtttgaagt

SEQ ID NO: 292755 - DNA, 278 bp, Glycine max
tccgatccaccagattagtatgtggggagaaggcttcaaaagtaatggaaatttaagtgcagccatgcctctaattgatgagacagacatgaagtttgatagtcagtcagaggatgcttctcatggtatactgggagagcctaataagtatgaccaagaagctaacaaacctactgataagatacaaagacgtcttgcacaaaatcgagaggctgctcgtaagagtcggttgaggaaaaaggcctatgtgcagcagttagaatcaagtcgtttgaagt

SEQ ID NO: 292756 - DNA, 278 bp, Glycine max
caatgatcaccattatcatttgggatacttcctttatggaattgcggtccttgcaaagattgatcctgagtggggacaaaaatacaatccacaagtttattcacttgtcacagattttatgaacttgggccaaaaatataactctcgttatccacgtctaaggtgttttgacctttacaacttacactcttgggcttcaggagtgactgaattcgcagatggaaggaatcaagaaagtacaagtgaggctgtgaatgcgtactattcagcggcattgg

SEQ ID NO: 292757 - DNA, 281 bp, Glycine max
ccggaaagacaatcacccttgaggtggagagctctgacaccattgacaatgttaaggctaagattcaggacaaagagggtatcccaccagaccaacagaggctcatctttgctggaaagcagctagaagatggccgaaccttggctgattacaacatccaaaaagaatctaccctgccacttggttctccgccttcgtggtgggatgcaaatctttgttcaagacttctcactggaaagaccatcacccttgaggtggagagctctgacactattgacaat

SEQ ID NO: 292758 - DNA, 275 bp, Glycine max
  unsure (1)..(275): unsure at all n locations
ctttctcctaaaacatctccagtgggttcttcttcttctattacaacaacgtcntcccaagaccatgancatggccatggncacgatcctgctcctgttcacggtcttcgcggtttcatcggccctagacatgtcgataatctcgtacgacaacgcccacgccgccacgtcgcgcagggacggagctgatgtccatgtacgagcagtggctagtaaagcacggcaaggtgtacaacgcgctcggagagaaggagaagaggttccagatcttcaag

SEQ ID NO: 292759 - DNA, 279 bp, Glycine max
cggcgcggcacccacacacacagttcgtcggaatgggaagggtgattcgcgctcagcgtaagggtgctgggtcggtgttcaagtctcacactcaccaccgcaagggtccggcgaggttccgcagcctcgacttcggcgagcgcaacggctacctcaagggcgtcgtcaccgacatcatccacgaccccggtcgcggcgcccctctcgccaaggtggcattccgccaccccttccgctacaagaagcaaacggagctcttcgtcgccgccgagggcctct

SEQ ID NO: 292760 - DNA, 253 bp, Glycine max
  unsure (1)..(253): unsure at all n locations
gaagtttccagatatggttcatgctcttaaacccaatcccaagaaccacatccaggagaattggaggatccttgacttcttctctcactttccagaaagcctcacatgttcacctttttatttgatgatttgggtgttccacaagattacaggctaggatggttttggagttaacacatacacatgatcaacaaggctgggaaagagtgtatgtgaattcatggagacatagtggataatgcatngagagagc

SEQ ID NO: 292761 - DNA, 276 bp, Glycine max
  unsure (1)..(276): unsure at all n locations
cgatcagagaaagaggggagatggaagttgaagggtcatcgaagaagatgatagcgactcaggaggagatggtggaggccagggttcctctggcctacagggaccagtgcgcccacttgctcatccctctcaacaagtgcaggcaggccgagttctacctcccatggaagtgccaggaccagcgtcactcctacgaaaagtgccagtacgagctcgttatggagagaatgcnccagatgcaaaagatccgcgagcaccaacaaaaccccaacgcca

SEQ ID NO: 292762 - DNA, 274 bp, Glycine max
gtccgaagctgctacgacgagggaaagccgtacggccgagacgttgaccatggactaccaccgaggtgccggcgttgaggttagaattgctagaatctttaacacctacgggcctagaatgtgcttagatgatggccgtgttgttagtaacttcgttgctcaggcactaaggaaggagcctttgaccgtttatggagatgggaaacagacaagaagtttccaatatgtctctgatttggtggagggtctaatccgccttatggaaggagaacac

SEQ ID NO: 292763 - DNA, 272 bp, Glycine max
  unsure (1)..(272): unsure at all n locations
aagaatcagagaatggcaactatgactggtgtgagcctttcatgccccagggttttcttcaacgcatcagcctcaccgcaaaacgcgcatgctgtaaagttctcacttccacccagccaagcagtncgaccgggtagtatcaagttgggtcgcgtgatgaggatccgacccgttcgcgctgcgcctgagcgcatatcggagaaggtggaggagagcataaagaacgcgcaggaggcgtgcgccggcgatccgacgagcggcgagtgcgtggc

SEQ ID NO: 292764 - DNA, 272 bp, Glycine max
  unsure (1)..(272): unsure at all n locations
gccaattaagggtgattggnatggtgctggtgctcacacaaactacagcaccaagtccatgagagaagatggtggctatgaagtgatcaaagcagcaattgacaagttggggaagaagcacaaggagcacattgctncttatggagaaggcaacgaacgtcgtttgacaggacgccacgaaaccgctgacatcaacaccttcttatggggagttgcaaaccgtggagcttctgttagggttgggagagacacagagaaagcagggaagggat

SEQ ID NO: 292765 - DNA, 277 bp, Glycine max
agagttttaaaaatggcagcagcctcctccatggctctctcttccccatccttggctggcaaggccgtgaagctgggcccatcagcccccgaagtcgggagggtcagcatgaggaagaccgtcaccaagcaggcctcctccggaagcccatggtacggcccagaccgcgtcaagtacttgggcccattctctggcgagcccccgtcctacctcactggcgagttcccaggtgactacggctgggacactgctgggctttcggccgacccagaaacct

SEQ ID NO: 292766 - DNA, 276 bp, Glycine max
cgagttactgagctttatgtgtatgacaaattcaatagggtccctgcaaataaggtggaggcaggagatatatgtgcagtatgtggaattactgatattcagatcggggagacaattgctgataaagtatctgggaaaccactaccttcaatcaaggtggaagaaccaacagtgaaaatgtctttctccataaacacttcaccttttgttggccgtgagggaaagtatgttactagtaggaatttaagggacaggctttatcgtgaacttgagcgg

SEQ ID NO: 292767 - DNA, 277 bp, Glycine max
gcatccaccactctatcccctacaaccccttctcagctatgctcaggaaagagtgggattttcagtccctcacaggcacttcttgtgaagccagtgaagaggcagatgatggggaagagcaagggaatgagaattgcatgccaagccaccagcattcctgctgatagagtccctgacatgggcaaaagacagctcatgaatctgcttcttcttggtgccatttcactcccctctgctggaatgcttattccctacacctacttttttgtccctccag

SEQ ID NO: 292768 - DNA, 272 bp, Glycine max
  unsure (1)..(272): unsure at all n locations
aagagacccagcagaccgacaaggacagatggaagggtcttgcctatgatatctcagacgaccaacaagacatcacaagaggaaagggtttggttgactcccttttccaagctccacaggatgctggaactcactatgcagtcatgagctcctacgagtacctcagcactggacttcgccagtacttggacaacaaaatggatggattctanattgctccagcttttatggacaagcttgttgttcacatctccaagaacttcatgacctgc

SEQ ID NO: 292769 - DNA, 272 bp, Glycine max
  unsure (1)..(272): unsure at all n locations
ctgcacacacattcagtcataacgtaaaatatgaaattagacactatcttcgcctttatcgtagtttatattctgctggtaacctcatcagagttccctagtgttgctgcagatgatgttagcagcatcatcagtgcttcccaatttgagcaattgctgaaacacagaaacgatcaaatttgtgaggggaagaacggattctacagctacaatgcttttgtcactgctgccagaacctttgatgggtttggcactacgggtgatgntaacac

SEQ ID NO: 292770 - DNA, 278 bp, Glycine max
  unsure (1)..(278): unsure at all n locations
aagccttagccttccctacaactccaaacncccnagacatcatcatccatggctgcctccgtctccactgtcggagcngtcaacagagctcttttgaacctgaatggttctggagctggagcttcagctcccagttcagccttctttgggaccagcttgaagaaggttattgcctcaagggtccccaacagcaaggtttcnggtggaanctncaannttttcccngaaaagggnaagaaaggggtttnaaggaacccagnaanccnacnaaggccnnt

SEQ ID NO: 292771 - DNA, 275 bp, Glycine max
  unsure (1)..(275): unsure at all n locations
attgaagttaaaagccttagccttccctacaactccaaacaccnaagacatcntcatccatgggctgcctccgtctccactgtccggagctgtcaacagagctcttttgaacctgaatggttctggagctggagcttcagctcccagttcagccttctttgggaccagcttgaagaaggttattgcctcaagggtccccaacagcaaggtttccggtggaagcttcaagattgttgctgtagaagagaagaaagagattgaagagacccagcaga

SEQ ID NO: 292772 - DNA, 271 bp, Glycine max
cgtcggagctgtgtctggggaaatttgcgttgtttttcgcggtacagctcacacacactgaacggtaagtatggcggacaaggctgttacaatccgaacccgaaagttcatgaccaacaggcttctttccaggaagcagtttgtcgttgatgttcttcatccagggagggcaaatgtttccaaggctgaacttaaggagaagctagctaggatgtatgatgtgaaagaccctaatactgtatttgtcttcaaattccgaacacattttgga

SEQ ID NO: 292773 - DNA, 270 bp, Glycine max
  unsure (1)..(270): unsure at all n locations
acaggttcaaaccggagcaaaaaaanttgttacgatngtttcttccgacaaggatccacgngaggaagtccttgcaagcatggtacatggatgatagtnatgaagatcaaagactcccccaccacaaagaacccaaggagtttgtctcgttggaccaacttgctgaacttggagtccttagctggaaattagatgctgataaccatgaaaatgatccagagctgaaaaagattcgtgaagagcgtggctacacctacatggatgtttgtg

SEQ ID NO: 292774 - DNA, 276 bp, Glycine max
  unsure (1)..(276): unsure at all n locations
gtcaattacttcccttcanggtatgatcctgttcgtcatgcagaaaggttccccanaacctcntgtatctgcagtggaaggcgtgaaaagtgtggaattgagaaggagaacaacttcaagcagcccggagagagataccggtcttgggcacctgacaggcaagatagatttgctcgccgatgggttgatgctttatctgacccacgggtcacccatgagatccgcagtgngctggncatcatactggtctcaggctgaccgttctctaggccaaaa

SEQ ID NO: 292775 - DNA, 270 bp, Glycine max
tcttgcccttctctcttcaactccaaacacaagacatcatcatccatggctgcctccgtctccactgtcggagctgtcaacagagctcttttgaacctgaatgggtctggacctggggtttcagctcccagttcatccttctttgggagcagcttgaagaaggttattggctcaagggtccccaacacaaagatttcctctggaagcttcaagattgttgctgtagaagagaagaaagagattgaagagacccagcagaccgacaaggac

SEQ ID NO: 292776 - DNA, 269 bp, Glycine max
tgggtctaagcatgtaggggtgaagaaggctttggttttttacaagggtaagccaccaaagggtctcaagacagattggattatgcatgagtatagattaattggatcaagaagacaagccaatagacaagttggatccatgaggctagatgactgggtcttgtgtaggatttacaagaagaagaatattggaaaatcaatggaggcaaaagaggactacccaatagcccaaatcaaccttacaccagcaaacaataacagtgaacaag

SEQ ID NO: 292777 - DNA, 280 bp, Glycine max
  unsure (1)..(280): unsure at all n locations
caaaaagaaagaatcccaggcgaggagaaagatggaggggaaggagcaggatgtgtcgttgggagcgaacaagttccccgagagacagccgattgggacggcggcgcagagccaagacgacggcaaggactaccaggagccggcgccggcgccgctggttgacccgacggagtttacgtcatggtcgttttacagagcagggatagcagagtttgtggccacttttctgtttctctanatcaccgtcttaaccgttatgggagtcgccggggtaagtcta

SEQ ID NO: 292778 - DNA, 278 bp, Glycine max
  unsure (1)..(278): unsure at all n locations
gcanaggcaatttctgatgggtctgaagaagtatggtaaaggagactggaganacatctctcgcaattttgtgaccacaagaanaccaactcaggtcgcaagtcatgctcagaagtatttcatcaggcaactaagtggaggaaaggacaagaagagatccagtatccatgacatcacaatggtgaatctcccagaagcaaaatctccttcatcagagagtaacaacagaccctattcaccagatcactcagtgaaggatgtgaatccaccatcccaga

SEQ ID NO: 292779 - DNA, 277 bp, Glycine max
  unsure (1)..(277): unsure at all n locations
ggangagggtaaagtgaagtatatagggttatctgaagcgagtccagatacaataagaagagcacatgcagttcatcccatcactgctttanaaatagagtggtccctatggactcgtgacattgaagaggagataattcctctctgcagagagcttggcattggaattgtaccatatagccctcttggtcgaggcttttttggtggcaaaggagttctggaaaatatgcctgcaagtacagtcctgacttnacatcatcctcggttccaagcagag

SEQ ID NO: 292780 - DNA, 270 bp, Glycine max
  unsure (1)..(270): unsure at all n locations
ttaccaggccttggtcagtacatctctggtgccattctctttgaggaaacactctannaatccacaactgatggcaggnagattgttgacgngctgcttgagcanaacattgttcctggtatnanagtcgacaagggtttngtgccccttgcaggttccaacgacgagtcatggtgccaaggtttggatggtctagcctctcgctcagctgnatactacgagcaaggtgcccgtntcgccaaatggcgtactgntgtgagcatccccaac

SEQ ID NO: 292781 - DNA, 278 bp, Glycine max
gctttgccacagcaacatacggttgactatcccagtttcaagcttgtcatcgtaggcgacggaggaactgggaaaaccacttttgtcaagagacacataacgggagagtttgagaagaaatatgaaccaaccattggtgtggaggttcatccactagacttccataccaattgtggaagaattcgcttttactgctgggacactgctggccaagaaaaattcggtggtcttagagatggttattatattcatggacactgtgctatcattatgtttga

SEQ ID NO: 292782 - DNA, 274 bp, Glycine max
  unsure (1)..(274): unsure at all n locations
tngntatcactgagttccagaccaaccttntgccctaccctaggatccacttcatgctttcntcctangctccggttatctctgccgccaaggcctaccacgagcagttgtcggtgccggagatcaccaatgccgtgttcgagcccgccagcatgatggccaagtgtgatccaaggcacggcaagtacatggcttgctgcttgatgtaccgtggtgatgttgtccctaaggatgtcaatgcngctgttgccaccatcaagactaagaggactgt

SEQ ID NO: 292783 - DNA, 279 bp, Glycine max
  unsure (1)..(279): unsure at all n locations
cggagggcaagatttctacgacgtgagccacgtggatggcttcaacgtgcccatgtccgtaaccccacaaggtgggagtgcgcgattgcnaaacctcaagttgccctaagaacattaactctgtgtgccctgcggagcttcaagtcaaagggtccgatggcaacgtcatcgcttgcnagagtgcttgcnaggcttttaaggaagatagatattgctgcactggacctaacaacaccgcagaaacatgtccacctacgaactactctcagatttcggggg

SEQ ID NO: 292784 - DNA, 278 bp, Glycine max
  unsure (1)..(278): unsure at all n locations
gcctgcnaccccagtnacaccgccaccatcagtagaacccaagccacagccagtctctgctccttcaccaaaggtgagcactaagttttctgatgtgttggcattcagtgggccagcacctgagaggatcaatggaaggttggccatgattggntttgtggctgcaatggcagtggaagtagccaaagggcaaggtgtgttagaacaaatatccaatggtggcatcccatggttcttggggacaagtgtggtccttacccttgcttccttgattccac

SEQ ID NO: 292785 - DNA, 281 bp, Glycine max
  unsure (1)..(281): unsure at all n locations
gtnattgtagaaaaggggntgcagaatgcgnccagaagataanattccctgngcgaantgatgaacgcgcngcgacanaacnactggggatatcgtctttcctccttcagnagaaggaagatcccaaattcaaaaganaggctgaagatctttttgtagagcacactttgtcccttaccgaggccttgtgtggcttccaatttgtgctgactcacttggatagccgtcagcttcttattaaatcaaatcccggggaagttgtgnagcctgattcatacaag

SEQ ID NO: 292786 - DNA, 277 bp, Glycine max
  unsure (1)..(277): unsure at all n locations
cttggntaacaanatggacggtttttacattgctcctgcttttntgganaagcttgttgtncacatcancaagaacttnangaccctgcctaagnnncaaggttcctctnattcttggtatttggggaggcaaaggtcaaggnaaatccttccaatgcnagctcgtntttnccaagatgggaancaaccccatcatgangagtgctggagagttggaaagtggaaatgcaggagagccagcaaagntgataaggcaaaggtaccgtgaagctgctga

SEQ ID NO: 292787 - DNA, 274 bp, Glycine max
  unsure (1)..(274): unsure at all n locations
tttcaaagctgatgctgttcttcattttgggacacatggttcccttganttcatgcctggnnagnaggtggggatgagtgatgtatgttatccagacagtctgattggnaacattcctaatatctantactatgctgcaaacaanccttctnaggctaccatcgccaaacgaagganctatgcgaatancatcagctatctgantcctccagcagannatgcaggactgtanaaaggtcttaagcagttaagtnagctcatctcctcataccag

SEQ ID NO: 292788 - DNA, 280 bp, Glycine max
  unsure (1)..(280): unsure at all n locations
ggaatatgatgaataagaaaatggttaatggggggacagttaacaactggttctgcataaacttttcaaggccatgttcaagatagtgttgcccgtcgtttttgctatgaacttgctcagatgtgttatatatctggnatggcatttacacctgagccagtagtccccccagtcagtgctcgccctgatcaagtggaaaaggttcttaaaactcggtatcatgatgccaagaacaaactgcaaggnagagagcttgatttgctcatcgttatctngcccg

SEQ ID NO: 292789 - DNA, 277 bp, Glycine max
  unsure (1)..(277): unsure at all n locations
gnaaaccttctcttacccttctctcaagtttcaaganatttcatcatggctccanaganggacaagngctccaccaccttcctccaagcncgcnanatctngcggtggcaagcagaagangaagaagtggagcnaggganagcnaaaggngaaggtgaacaatatggtgctgtttgatcagggcacctatnanaagctccttnntgangctcccaaatacaagntcatnantcctttccattctntctgatngtttgangnttaatggancacttgc

SEQ ID NO: 292790 - DNA, 272 bp, Glycine max
  unsure (1)..(272): unsure at all n locations
cgttgatgtcaatggaccatttacaactccagtgtaccagtttctgaaatcgagtgctggaggctttttgggtgatcttataaagtggaattttgagaaattcttggttgacaaaaatggtaaagttattganagatacccancaacaacgtctccttttcaaattgaggtatgttaagcttcccccaatagtaaatccagtttttaattgttaccatgacagtgaaatattaactaatgaagtatgtcaatgtctttcctactcaagattg

SEQ ID NO: 292791 - DNA, 272 bp, Glycine max
  unsure (1)..(272): unsure at all n locations
gcctctgcatcagcatctctgctcaagtcttcacttgttcttgacaagtctgantgggtgaagggacaaanccttcgccaaccttctgcatcagttgtnagatgcaaccccaccaccccatcaggcctcaccatcagagctggttcctatgctgatgagctcgttaagaccgcgaaaacagtggcttcaccagggaggggtattttggccatggatgantccaatgctacctgtgggaagcgtttggcttcaattgggctagagaacactga

SEQ ID NO: 292792 - DNA, 276 bp, Glycine max
  unsure (1)..(276): unsure at all n locations
ctcaaaaacaattcgtcaggctgtgggtgttgtgggttgtntcattatgcctcacaatgtattcctgcattctgctttggttcagtcaaggaaggttgatcctaaaaagataggtcgggtacaggaggctctcaactactattcaattgagtcatcggctgcacttgcagtctccttcatgatcaatctttttgtcaccacagtttttgccaagggtttttatggaaccaagcaggcagatagcataggattggtcaatgcaggggcagtatcttg

SEQ ID NO: 292793 - DNA, 214 bp, Glycine max
  unsure (1)..(214): unsure at all n locations
cttagncttctctatcgctcgctntcctttgacgcttctgacccttnctttntctgcntcttccttctntctntctttctnnctctgtgtgtcgtaatggctctccnagactcttcttcccgtcgcaactccctgatcccctccttcatctantcctcttcctcnaaaaggcnccctctccagnagangctcaanancgcctcggctggcgccg

SEQ ID NO: 292794 - DNA, 276 bp, Glycine max
  unsure (1)..(276): unsure at all n locations
cggaagagaacccccgtgttcccatcattgtcaccggtaacgatttctcaacactctatgcacctnctcatccgtgatgggcgtatggagaagttctactgggcaccaacaagggaagaccgcattggtgtttgcaccggaattttccgcactgatggtattcctgaacaggacattgtcaagcttgttgacaccttccctggccaatccattgatttctttggtgcactgagggccagagtatatgatgatgaagtgaggnagtggatttctggt

SEQ ID NO: 292795 - DNA, 274 bp, Glycine max
  unsure (1)..(274): unsure at all n locations
cggagggcaagatttctacgacgtgagccacgtggatggcttcaacgtgcccatgtccgtaaccccacaaggtgggagtngcgattgcaaaacctcaagttgccctaagaacattaactctgtgtgccctgcggagttcaagtcaaagggtccgatggcaacgtcatcgcttgcnagagtgcttgcgaggcttttaaggaagatagatattgctgcactggacctaacaacaccgcagaaacatgtccacctacgaactactctcagattttcg

SEQ ID NO: 292796 - DNA, 275 bp, Glycine max
  unsure (1)..(275): unsure at all n locations
gctgagaacacggtgagaggatccttgtatctgccaaaggaatatttganacaactggggtgaaactatcagggaaagttgcaggaatccactggcattacagagcaagatctcacgcagctgaactaaccgctggctactanaacacacgaaataacgatggatatctgcctatagcaaggatgctcgcaaaacatggagttgtcttcaatttcacctgcatggaaatgaaggacagagagcagccagactttgcaaactgctcacctgaaggg

SEQ ID NO: 292797 - DNA, 273 bp, Glycine max
  unsure (1)..(273): unsure at all n locations
gatcagcacgacactgagcatcagcaatggcaagcgcaagtgttggtaaagaactgacgctgtattcgtattggaggagctcttgttcccaccgagtccgaatcgctctcanccctcaaagggcttaaatacgaatacaagcccgtcaatctgctcaagggagaacaatctcgccctgagtttctccagctcaatcctgttggttgtgtccccgttctagtggatgaccacgttgttctctatgactctttcgccattattatgnatttggaa

SEQ ID NO: 292798 - DNA, 271 bp, Glycine max
  unsure (1)..(271): unsure at all n locations
cttattggaganaatgatgagtttatagggaaganagctgcctatgctttgagccaaggtcttggggtgattgcatgcattggagacttgttagaagaaagggaggctggaaaaactactgatgtttgtnttcagcaattgaaggcttatgcagacgcagttgctagttgggacaacattgttattgcatatgaacctgtatgggccattggaacgggcaaagtcgccactccccaacaagctcaggaagtacatgtagctgttcgggatt

SEQ ID NO: 292799 - DNA, 272 bp, Glycine max
cgactcccccaaactcatggcaactcccgctcaagttgaaaggtctgtttcatacaacgaacaccggcccagaaggccgccacctgacctgccttcgctgcttctccatggtagaattgtttacattggcatgcctttcgtgccagctgtcacggagcttgtcgttgcagaattgatgtacttgcagtatatggatcctaaagagccaatctatatttacataaattccactgggactacgcgagatgatggtgaaacggtaggcatggaga

SEQ ID NO: 292800 - DNA, 274 bp, Glycine max
  unsure (1)..(274): unsure at all n locations
cgcggacggcggctccncggcggtctcggacgggtcgaaagccgagcacggcgaggacgatgaccggaatcccgccgncaaccggtggccgagngaggagacaatggctttgctcaatataaggtccganatggacgttgctttcaaagacgcaaacctcaaagcccctctctgggaacaagtctcaaggaaattatcggagctaggttataataggagtgcgaagaagtgcaaggngaaattcgagaacatttacaagtaccataggagaata

SEQ ID NO: 292801 - DNA, 285 bp, Glycine max
  unsure (1)..(285): unsure at all n locations
gngaaacatggcttccttaagctccttagtgctgctccttgcagctctaattctatcccctcaagttcttgcaaactatgagaatncccccagtgtacaagcctcccactgagaaaccaccagtttataagccccnnttgagaagcctcctgtttacaagccnccagttganaagccnccagtttacaagccnccagttgagaagncaccagngtanaagcccccattgntgaagcnccacantagcngcccccgnnngaggncnccaggtacanatnncnnacg

SEQ ID NO: 292802 - DNA, 274 bp, Glycine max
  unsure (1)..(274): unsure at all n locations
gnaaatctttgttaagactctgaccggaaagacaatcacccttgaggtggagagctctgacaccattgacaatgttaaggccaagattcaggacaaagagggtatcccaccagatcaacagaggctcatctttgctggaaagcagcttgaggatggccgtacccttgctgattacaacatccagaaggagtcnactcttcacttggtatccgtctnacgtggtggaatgcaaatctttgttaagactctgaccggnaagacaatcacccttgag

SEQ ID NO: 292803 - DNA, 274 bp, Glycine max
  unsure (1)..(274): unsure at all n locations
gntagataggtganaatggcgcagtgtgtgaccaacacattcgtgcaaggnaaaccctttcttccagttgcagcagctacccactaaaaatgttcggagagcggttcagtgcggtgtgtggtgcaagaagaaggagatacacccgcaattctacgaggnatcgnnggtgtactgcaacggggagctggtgctgatcacaggtgggacccagaangaatcacgtggtggcacgtgtggncgggnaccaccccttctncctcggnagccggtcggc

SEQ ID NO: 292804 - DNA, 280 bp, Glycine max
  unsure (1)..(280): unsure at all n locations
agaatccgaggcgaagagaagaganaaattaagatggaggggaaggagcaggatntgtacgctgggagcgaacaagttcccggananacagccgattgggacggcggcgcagagccnagacgacggcaaggactaccaggagccggcgccggcgccnanggttgacccgacggagtttacgtcatggtccttttacagnnccgggatagcagnntttgtggccacttttcctgtttctatacatcatgtcttaaccgtccatgggatcgccggggccagt

SEQ ID NO: 292805 - DNA, 276 bp, Glycine max
  unsure (1)..(276): unsure at all n locations
gngtgtccctaacaagcagctcattgctatataaggaggaatttgagaagatgcaagagaaatatcctgacaacttcaggcttgacttcgctgtgagccgagagcaaacaaacgagaacggagagaagatgtacatccaaacccgaatggctcaatatgcagaagagctgtgggaattactgaagatcnataacacttttgtgtacatgtgtggactaaaaggaatggaaaagggtattgatgacattatggtgtcatggctgccaaagatggcat

SEQ ID NO: 292806 - DNA, 274 bp, Glycine max
  unsure (1)..(274): unsure at all n locations
cnagctgcagctaccttcatgcaacccaccaaggttggcatagcctctcgcaacctcaaatctacacaatgcatttctaaggcttttggcttggaacctgctgcagctaaactcacttgctcccttcagcctgatctcaaagaatttgctcaaaaatgtgtcgacgctaccaaaattgcaggattcgcccttgccacctctgctctcgttgtttctggagcacgtgcagaaggtgttccaaaaaggctaaccttcgacgaaatccagagcaaga

SEQ ID NO: 292807 - DNA, 286 bp, Glycine max
  unsure (1)..(286): unsure at all n locations
caaccggggcggataagcccattggtcagcccaaaccggttgggattaaaaaagctttggtgttttacgcagggaaagctcctaaaggggacaaaagcaattggctcatgcacgagtatcgtctacgcagacgtagatcgctccgttcgcaaaaagaacaccctaaggttggatgattgggtgcnttnccgtatttaccccaagnagggcacgatcgaganactgccaancnagccagngatgttgctctagncnaatatcgaatccctcggaganngaancaccc

SEQ ID NO: 292808 - DNA, 273 bp, Glycine max
  unsure (1)..(273): unsure at all n locations
gntttaccttcaatcatacatganactttgaaagccgtggttgcccagtacaatgccagccagcttattactncagcgagaggctgttagtcgggaaatccggaagattttgactganagggctgctaacttcaatattgcccttgatgatgtgtcaattactagtctgacttttggcaaggagtttaactgntgcnattganggcaaagcnggtagcngcacaagaagntgaganggtanttcatattgcccttgatgagtgncattatnnt

SEQ ID NO: 292809 - DNA, 267 bp, Glycine max
  unsure (1)..(267): unsure at all n locations
gagaanattgggtactggagatacataaccatatacagacatctcaaggccaacccngagtttcaatgttatcccatttttaagtactttgagaactggtgccaggatgagaacagacatggagntttcttctctgccctgntgnnggcacagccacnaatttctaaatgactggaangcaaagttgtggtctcgattcttctgtcntatncggtttatgtcnacaatgtntctcatgattgccaacgtacagctttctacgaaggc

SEQ ID NO: 292810 - DNA, 278 bp, Glycine max
  unsure (1)..(278): unsure at all n locations
gngctgatgaggaacagaaganagtgaaganagaggttaagaagaaaggctcttcatcttcaaaagatggcactgctaaatccacctacttcaaagaagaaagcaagtggctctgatgaagaccgcacttcacctactcacagtcaaattgatgaganngaggaggctccagatgaagatgctggtgatgatgacgtggcaatggctgacagatcacatcacttgcatggctgncncgtncaacgtatcccgaacagttaagtgctgtgacagctgat

SEQ ID NO: 292811 - DNA, 268 bp, Glycine max
  unsure (1)..(268): unsure at all n locations
aaagagaggactatatctggagattcatactatggctctcacgtgatgcagtatggtgatgtacggcttagcagtgatgttctcttccattatttgggtacagatcctgctaatgataatttcacttttgtggacgaaaactccttatngtcaccttcaaaaccagtcaaccaacgtgatgctgatctcatccatttttgggataagttccgcaaagctcctgagggttctctcaggaaaaatgcagctcagaaacaagttttggaag

SEQ ID NO: 292812 - DNA, 272 bp, Glycine max
  unsure (1)..(272): unsure at all n locations
ctggcctggacgcgaggctgttatctatgatttatctaaacaaatttaccaaatatgtgacaagcgttcggtntcctgtattattgaacacaagcatgatgcaggtgctgtgatttgtgattctgatctgagttcacagctcaagtctgcagcttattctgcactcaagaagatggagggtgacattcaagatgaagtgccaacgttaatgagtggagcagggcatgatggcaatggcntatctcacttaacaaaggtgggaatgcngtttg

SEQ ID NO: 292813 - DNA, 274 bp, Glycine max
  unsure (1)..(274): unsure at all n locations
gttccgggaccgtgatcagtataacaaagctgattttccagaagaatatactgatgctaaattttttgtcatcaagtcttacagtgaggatgatatccataagagtattaagtataacgtgtgggccagnncccaaaatggcnacaagaagcntgatgctgcatatcatgagggcacagcagaanccggtggctgcccgtttttctctttttctcagttaataccagtgggncaaatttgtggggctgctganatgatggtcctgttgatttaa

SEQ ID NO: 292814 - DNA, 284 bp, Glycine max
  unsure (1)..(284): unsure at all n locations
gacattctccgtcgccacaacaacaancgctccgaagaaaggtgtgaaaggttccgttgtagcagcgaagaagaaggttcaggagaaggtgacgaatcctttgttcgagaagcgtccgaagcagttcgggatcggaggcgcgctgccgccgaagcgggacctgacgcggttcgtgaagtggccgaagaacgnccaaatccaacgcaagcngcgnatcctcaagcagaggcttcaaggncctcctgcactcaaccnnttcaccananccctagaccagctttcgc

SEQ ID NO: 292815 - DNA, 279 bp, Glycine max
  unsure (1)..(279): unsure at all n locations
tatcctaagtctttgggaatagtgctgcaatggcttcaagtcaggaggaggtgacccttttgggagctactggaagcccatttgtgtgcagggttcatattgccctcaagttgaagggncttcaatacaaatatgtcgaagaaaatttgaggnacaagagtgaactgcttctcaaatccaacccagttcacaagaaggttccagtgtttattcacaatgagaagcccataggcagagtccttgtgatgttgaatacattgatgagacatggaagaacnc

SEQ ID NO: 292816 - DNA, 274 bp, Glycine max
  unsure (1)..(274): unsure at all n locations
gnaaaattgatgcgtganaggacacacctgctgttggcttgttgttcaagaatggcaatttgtaaganagatgtttggagagttgaatgtggaatcccttctggatttccgctcacagttatttgtaatagcatttttnatgagatgctcattagatatagctatgaaaaattactgcgccaggctaaagctccaagtatgtttttacaatccntcaaaaattttgtttcttgtgtgtgtaggtgagatancttanttagtgttcatgcatatg

SEQ ID NO: 292817 - DNA, 265 bp, Glycine max
  unsure (1)..(265): unsure at all n locations
tgggattctctgtgaagccgtgttttcttagtgtcctatgttgtnatgtaagggtattaatcttcattatgtatggtctagtctaggtcttagtgtcttctcaggtggctgctactgcaatggagtttttggcaattgcagagccagtcttagttaattactagtattctgtgtataatctctctctaccttgggtcatagctggtttttttctgcttgaccagggagaatagtccacttaatatgtttctcaagtgcatcgctg

SEQ ID NO: 292818 - DNA, 268 bp, Glycine max
  unsure (1)..(268): unsure at all n locations
gccaagtcagatcctatggttgtttgtaccattgaggagtctggtgaacacattgttgctggtgcaggagagcttcatcttgagatctgtttgaaggacttgcaggatgntttcatgggncggagctgagatcattanatnctgaaccctgttgtgtcattcagggagactgtcctggagngatcatgccgcactgtgatgagcaaatcacccaacaagcacaatcgtctgtancatggaagcnagaccannggnggccggtctgccg

SEQ ID NO: 292819 - DNA, 266 bp, Glycine max
  unsure (1)..(266): unsure at all n locations
gtgatcaatggcttctttagtgtcttctccatttaccttacccaattctaaggttgatcaactctcttctcttgcccagagacacctttttcttcattctttccttcccaagaaggccaatggctatgctagcagctcaaaagcttccctgagagtgaaatgtgctgctatgggcaatggtcttttcagccaaaccacgccggaagtgcgtcggatagttcccgagaaganacnangccgccaaatgttaaaattgtgtatgttgc

SEQ ID NO: 292820 - DNA, 263 bp, Glycine max
  unsure (1)..(263): unsure at all n locations
tttgcgcagttccctacctctcctttcaagatgcagatcttcgtcaagaccctcaccggaaagaccatcacccttgaggtggaaagctctgacaccatcgacaacgtcaaggccaagatccaggacaaggncggaattcccccggatcagcaacgtntcatcttcgccggaaagcagctcgaggacggcgtancctngncgactacaacanccanaaggagtcanccttcnctngtctnctctacgtggtggctgcannttct

SEQ ID NO: 292821 - DNA, 276 bp, Glycine max
  unsure (1)..(276): unsure at all n locations
gnaaatctttgttaagactctgaccggaaagacaatcacccttgaggtggagagctctgacaccattgacaatgttaaggccaagattcaggacaaagagggtatcccaccagatcaacagaggctcatctttgctggaaagcagcttgaggatggccgtacccttgctgattacaacattccagaaggagtccatcttcacttggtactccgtctacgtggtggnatggcanaattctttgttangactctgaccggnaagacnatcacccttga

SEQ ID NO: 292822 - DNA, 276 bp, Glycine max
  unsure (1)..(276): unsure at all n locations
gngatggagatgtatcagatctggagcaggagaatagcgttgggagcgttcgcgtttgttctgcttttcctatacggcctcagcagacgacgtcgttgtgctctctgaagataacttcgngaaggangttggtcaggacagaggagctactcnttgagttctatgctccttggtgtggacactgcaaaangcttgctccgnatatgaaaagcttggtagcagcttcaagaaagcccnaatcgttttaatcggcaaggttgcangtgangcncncnc

SEQ ID NO: 292823 - DNA, 269 bp, Glycine max
  unsure (1)..(269): unsure at all n locations
ggnactcaattcctgcttggattaagttttctgtacaggctcctggtgaaattccatacagcggaatatactatgatcccccagaagaggaaaaatatgtcttcaaacatccacagncaaagagaccaaaatcacttagaatataanggncacacatcggaatgagcagtccggagccaaaaatcaatacatatgtcaattttagagatgatgtactgcctcgcattaaaagggcttggctataatgctgtccagattaggctatccaa

SEQ ID NO: 292824 - DNA, 269 bp, Glycine max
  unsure (1)..(269): unsure at all n locations
gnatttttcacattcttggactcaattaaagagtgctatgaagctctggtgattgctaagtttttgggcttgatgtacaattatctaaacatctccttaagtaagaacatagtgccggatgaaatcaagggaagagaaattcatcattcattcccaatgactctttttcagcctcacactactcgtcggaccataaaacactgaagcttctcaaaaactggacttgggcaatttgttgtgatacgtccagtgtgctcaatctgatgata

SEQ ID NO: 292825 - DNA, 257 bp, Glycine max
  unsure (1)..(257): unsure at all n locations
ctttgaaggtcttcttcccgaagatatcaatatttatgcaaccaacagcttccaatgcagaagaaagtagttggggaacatattgccctggggagtatcctagtcctcccccagaatattcaacctgcttgggtgatctgtacagtgttgcttggatggaagacagtgacagacacaatttacgaacagaaatctgcatcaacaatataaattggttaagagaggatatatctggagattcatactanggcctctcc

SEQ ID NO: 292826 - DNA, 264 bp, Glycine max
  unsure (1)..(264): unsure at all n locations
gtcgagccgcttctgttgggatatgcaccacctanttcagatagaagggagggagttctaangaaggaaacgccttgagtatcttgactgtatttctcagtattatgatattcctgatacagaacgttcanatgacgaggtcaacatgcttcgtcagattggtgttgattgtccaagaactgttcccgatgnccccattcttccagcagcagcaagttcagaaatccattgggnacgtntnctnaangannggcnattcccanc

SEQ ID NO: 292827 - DNA, 262 bp, Glycine max
  unsure (1)..(262): unsure at all n locations
gtctgggaccattcgagtgcatgatgacctgcttctggctgcctctgaggctttggctgcacaagtgagccaagagaactttgataagggactcatatacccaccattcaccaacataagaaagatttcagcacacatagctgccaatgttgctgctaaggcttatgagcttggcttggccactcgccttcctcaactaaagatttggtgaagtttgcagagagctgtatgtatcccccatcctancggaagtncnggngag

SEQ ID NO: 292828 - DNA, 258 bp, Glycine max
  unsure (1)..(258): unsure at all n locations
gtgaacgtgtgccaacccggaagcaaccttcttgcagctggttactgcatgtattctagctccaataatctttgttctcacccttgggaatggagtgtttgtgtttacattggacccgatgtatggcgaattcgttttgactcaggaaaacctncaaatacctagagcaggcaaaatttatnctttcaatgaagggaatnatcattgtggganccncacntaaggaaantntntggacaancnangncccncgcnccc

SEQ ID NO: 292829 - DNA, 130 bp, Glycine max
  unsure (1)..(130): unsure at all n locations
aatattcncaccaggttcctntcattcttggtatntggggaggcaagggacaagganaatctttccaatgtgagcttgtctttnccaagatgggaatcaaccccatcatgatgagtgctggagagttgga

SEQ ID NO: 292830 - DNA, 252 bp, Glycine max
  unsure (1)..(252): unsure at all n locations
gntgaagaggaacttgctaaagaaaacaacaagagtgcttcttcttccaagggcaaaatcaccttgagtgtcaccaagaccaagcctgagactggtgaggttattggggtcttcgagagtgttcagccttctgatactgatttgggggntaaaccncctaaggntntnaacatcccacggcatctggtatnctcagcttgantcatanacctttnncnancaganncannnctccttcccccccncccgggg

SEQ ID NO: 292831 - DNA, 250 bp, Glycine max
  unsure (1)..(250): unsure at all n locations
gnaaaactttcggnagatttnatccanttgaaatnnccaaaaatgactgggataaacttanganttcaattattgaaattgaataagtanacaatttaattggattggtcgnatggtatcaaaaanatggagtactaactcccatttcttatttattattgaattaaccgntcnacttgctttgttatcgancatttctttttgatttnaaaaattttccggaaaannttgaatcnantttatangcgac

SEQ ID NO: 292832 - DNA, 251 bp, Glycine max
  unsure (1)..(251): unsure at all n locations
tgataacattaggtgggattcttggggaaggtttacagaaaggagtgttgcttatcaaccatggatatggactgcaggaaaccatgaaattgattttgctccagaaattggtgaaactgtacctttcaagccttatacccacgttaccatgttccttataaagcatcctcaaagtacttcacccttcnggnattctatcangagggtttnannaaacancattgtttnggcccncatanccgnggtangga

SEQ ID NO: 292833 - DNA, 254 bp, Glycine max
  unsure (1)..(254): unsure at all n locations
ggagaagtganatacactaagttatcctccataaatacactctaattaggtggcaagataagtgtctaaccttagtaacattgccacatattgtgttcattttggaattgtgccactaaaattctattcaattcatctatggctgcctcttcttnatgctatgcaatccaatcctggcaaaccctttgatccgcatttccagcgggtctagggtgaacnatttggngtncccgntttgnaatgggaggatgtgg

SEQ ID NO: 292834 - DNA, 286 bp, Glycine max
  unsure (1)..(286): unsure at all n locations
tgcttttgggaagagtggaactaatgtgaaaacagctatttttctgtcccccaagtttgaacttggaccaggatcggtagccaataaatatgattatgacgctgattttccaagaggtcatatagcacttaagagtttcaatgctgaagtagttgatgaagcngggaacctgtgcctcttcatgaaacttatctccaccactgggttgttgtagatatatcaactaaatatgtgacgacacacacaaatatgatggacatangatcttcacaactctgnacatata

SEQ ID NO: 292835 - DNA, 287 bp, Glycine max
gtaaccaatcatctttagttcttcagtaatttattgtgggattctattctaagattttgagaatgtctagctgtgggtgtggaagcagctgcaactgtggcagcaactgcggttgcaacaagtactcttttgacttgagttacgttgagaagacaaccacagagactctagttttgggtgttgggcctgtgaaggcccaattggagggtgcgaaatgggtgttgcatctgagaacggtggctgcaactgtggatcaagctgcacctgtgacccagcaactgcagtaa

SEQ ID NO: 292836 - DNA, 286 bp, Glycine max
gggcaccatttttaccttcacaccctgtgatagaaactggtggaattcctgcccctgacaaaccttcaaccacttggtaccatcgctgctgcaccatggggctcagcactcatattgccaatctcttacacttacatagccatgatgggttctaaaggactcaccgatgcatcaaagatagccattttgaatgcaaactacatgggcaaaacgattggagaattattacccggttcttttccgtggagtcaatggaacagttgctcatgaattcatcatgacttga

SEQ ID NO: 292837 - DNA, 296 bp, Glycine max
  unsure (1)..(296): unsure at all n locations
gagatccganaataccaaaagagcacagagcttctgatccgcaagctcccctttcagcgtcttgttcgtgaaatcgcgcaagacttcaagactgatttgaggttccagagtcacgcggttcttgcgcttcaggaagctgcggaggcttacttggtgggtttgtttgaagacaccaacctttgtgcgatccacgccacgagagtgaccatcatgccaagggacattcaacttcgcaaggcgcntccgtngagaacgtgcttaaggcttataatatgatatancatagttgtcggctt

SEQ ID NO: 292838 - DNA, 292 bp, Glycine max
  unsure (1)..(292): unsure at all n locations
gtctgtttgtcgttggaccagagagcgcaaggcancacccaggcccagcatgttaccgcaaaggtggtcctctgaccatcaccgacgccaacctgttcttgggcagactactacccgacttcttcccaaagatctttggcaagaacgaagacgaagggcttgatgagcaggcaagcaaggctctttttgaggagctgacgaagcagatcaatgagggatactgctggtagcacaggacaaggccatgagtctggacgaatggcgtacggtttcatcaggatcgccaacgaga

SEQ ID NO: 292839 - DNA, 280 bp, Glycine max
  unsure (1)..(280): unsure at all n locations
atcntatncaattgaaattntaaaaangactgggataaacttaagaattcaattattgaaattgaataagtanacaatttaattggattggtnaatncgtatcanaaaaatggantactaactcncatttctnatttattattgaattaaccgatcaacttgctttgttatcgaacatttctttttgatttcaaaaattntccggnaaaaatttgaatctatttttatatggngaatcaatctnactacttcggnctcgaggtttctgcgctgaaaaaaa

SEQ ID NO: 292840 - DNA, 282 bp, Glycine max
  unsure (1)..(282): unsure at all n locations
ttaatatagaagaattgaganaggctgccgaaacacataaggacaacttatctgcnacttatggtaacatatccttcaantcacggtgtttatgaggtaggtattgacgaaatttgcnagattattcatgatatggaggnccaagtatatatggaggtgccaacatgaatgcctcaggtgggactccnaagccccaggttggatggancagatgtnaggccatcctcnatcttccacaaganattttgcatccctcatggaggangtggnccggcatgggtc

SEQ ID NO: 292841 - DNA, 282 bp, Glycine max
  unsure (1)..(282): unsure at all n locations
ttcatcagttttttgaagggtttgcgcttggaggttgcatttcccaagcgcagtttaaagcctcgtcagcaactataatggcttgtttttttgcactgactacacccttgggtgttgggattggaatggctatcncttcggggtataacccttacagccccggtgcactcatcgccgaagtatcttggattccttgtcgtcggggatttggtttatatggcttggtagatttgatcgctgcggattttcttagcaagangatganttgtaactttaggctgc

SEQ ID NO: 292842 - DNA, 277 bp, Glycine max
ttgcatcaccgcaagtccacaacatgggctgccactgccgctgcaggcatagcttccttgttttcttcttctattaacagtgtcaaatgtcttcgttcctccaagaactgctccattatagacccccttataaccacagtgccctcaaaccgtggcatgtttgtgtcacacttggtggaacctttgtccattgggggtgccataattcgcacaagttgtgggggcctagaatttctgctgctgttgcacaagaagaggctgttgttgtggctgatga

SEQ ID NO: 292843 - DNA, 276 bp, Glycine max
  unsure (1)..(276): unsure at all n locations
atgatcccaagaccagatccatgcgtgaggntccacttccagatgcagatccgaatgaaaagttttatttgggtgataaccaatatagaaatagtgggcaagctttagaattcaaggaattaaacatccatgcttgggaagcatttgacaagggacggctgtncacatggcaagcagctccatcccaggctgagttactcatnagaatttcaaggtcatgaaggagaagttgaagtatcaaacaaaggngaccattatcgagaagtatggcaatgc

SEQ ID NO: 292844 - DNA, 276 bp, Glycine max
  unsure (1)..(276): unsure at all n locations
cttctntctttttctgtgagcctttctttcaggttcttaacttgntcagtgtgcagtgtccaaatcataagggtagttgcaaattgcaatgggctaagcatgatgttgagggtggttccttctctgcaaaggactaccatgatctcctccagcaccgttgattgatgctgaggaactcacacagtggtccttctacagggcttgattgctgagttcattgccacaatgctcttccttacatcacagtgctcactgtgattggttacaagagccaga

SEQ ID NO: 292845 - DNA, 278 bp, Glycine max
  unsure (1)..(278): unsure at all n locations
ttaagatggctaattcctacttatccttgcttgtcttgatccttgtagctctgctcctcacccctcnagggcttgctgatgaatctgattcttactataagccaccagtttacaagaaaccaccagtgtacaagcccaagcccaagccacccnctcacaagcccaagccacccgtttacaagcccaagccacccgtttacaagaaccccctatggtaagtacccaccagtttcaagacaaggatcattctaaaccatgcaacaggcngttatgttaac

SEQ ID NO: 292846 - DNA, 277 bp, Glycine max
  unsure (1)..(277): unsure at all n locations
ctgccttgaagacatggggaggccgcccagagaatgtgaaggcggcncaagatgcacttcttttccgtgccaagtcccaactcgctcgcccagcttgggaagtacaccggtganggtgaatctgaggaagccaagaaggagttgttcgncaaaggctactcctactaanatgtttgtagtgaatatgatncatgttaggcgcagcaacaccagcagttgcagtaggtgttgacggnngatgaagtggaanacgactaatttgnctaanatgtaatgc

SEQ ID NO: 292847 - DNA, 278 bp, Glycine max
  unsure (1)..(278): unsure at all n locations
attccaatatattccattctctctgtgtatttccctacctctcccttcaagatgcagatcttcgtcaagaccctcaccggcaagaccatcacccttgaggtggaaagctctgacaccatcgacaacgtcaaggccaagatccaggacaaggaaggaatccccccggaccagcaacgtctcattttcgccggaaagcaactngaggacggccgtacccttgctgactacaacattcagaaggagagtactcttcacctcgtcctccgtctccgtggtgg

SEQ ID NO: 292848 - DNA, 273 bp, Glycine max
  unsure (1)..(273): unsure at all n locations
ttgctgataaccccaccaatgtgcagcttccaggtatgtacaacaaggaagagaacccccgtgttcccatcattgtcaccggtaacgatttctcaacactctatgcacctctcatccntgatgggcgtatggagaagtnctactgggcaccaacaagggaagaccgcattggtgtttgcaccggaattttccgcactgtggtattcctgaacaggacattgtcaagcttgttgacaccttccctggccaatccattgatttctttggtgcatg

SEQ ID NO: 292849 - DNA, 270 bp, Glycine max
  unsure (1)..(270): unsure at all n locations
ttagcactggacttaaacagtacaacttggataacaacatggacggtttttacattgctctgcttttatggacaagcttgttgttcacatcagcaagaacttcatgaccctgcccaacatcaaggttcctctcattcttggtatctggggaggacaaggtcaaggaaaatccttccaatgcgagcttgtcttgccagatgggaatcaaccctatcatgatgagtgctggagagttggaaagtgnaatgcaggagagccagcaaaactgat

SEQ ID NO: 292850 - DNA, 274 bp, Glycine max
cgaagtttgctcctgtagctggatatcactggtttgatggagatggaatgattcatggcttgcgcatcaaagatggaaaagctacatatgtttcccgttttgtgagaattctcgccttaaacaagaagaatactttggaggctccaaatttatgaagattggagatctcaaaggtctattcggacttttaatggttaacatacatatgctgagaactaaatggaaagtgctggatgcttcttatggaactggaacagctaatactgctctcgta

SEQ ID NO: 292851 - DNA, 276 bp, Glycine max
  unsure (1)..(276): unsure at all n locations
ttggaggatccttgacttcttctctcactttccagaaagccttcacatgttcacctttttatttgatgatttgggtgttccacaagattacaggcannatggatggttttggagttaacacatatacgctgatcaacaaggctgggaaagcagtgtatgtgaaatttcactggaagaccactagtggtataaagtgtctattggaggaagaggccattaaggtgggaggagccaaccacagccatgccactcaagacctccatgattcaattgctg

SEQ ID NO: 292852 - DNA, 264 bp, Glycine max
  unsure (1)..(264): unsure at all n locations
ctcaaatctgatctattacctcacgcagagactgatgcagttgatcctaagaacngacacaagggaaagcttgagacagagagtttgctacaagcaaggggtgttaattggacatctataaggccagtctacatctatggacccttgaactacaaccctgttgaagagtggttcttccatagattgaaaggggacgcccaattcctatccccggctcaggaatacagataacccaacttggtcatgttaaggatttggccaaag

SEQ ID NO: 292853 - DNA, 276 bp, Glycine max
  unsure (1)..(276): unsure at all n locations
anaaaaaaaaagagttctggccatggctgnatcattatttatgccttcatccatagtggaggaagaagcgaggttcgaagccgaantggcggaggtgcaagcatggtggaactctgagaggttcaggctaacaaaaaggccatacacagcaagagatgtagtgtccctccgaggcaacctcaganaaacctatgcctcgaacgagatggcgaaaaagctatggcgcctcctgaagaaccaccaagctaatggaacagcctcgaggacttttggtgc

SEQ ID NO: 292854 - DNA, 274 bp, Glycine max
  unsure (1)..(274): unsure at all n locations
atttaattacaactctgtatgtgaattctgcttgcagctgatggcgcaaattctgctccatgggactcttcatgccactatctatgaagtcgataagctcaaaattggtggaggcaactttttaaccaagatcgtacaaaacatcgagggactgttggtattggaaaaggtgtcactaaactatatgcaaccattgatctagagaaggcacgagtggggaggaccagaattattganaaagagattaaaaatccaagatggtacgagncctttc

SEQ ID NO: 292855 - DNA, 278 bp, Glycine max
  unsure (1)..(278): unsure at all n locations
cctcgctctatttctcagtctctgtgtttgcgngctgaggattccgaacgagtgaccttcttcgtttcctcgcaaagtttaagtaatcatgggtaaggaaaaggttcacatcaacattgtcgtcattggacatgtcgactctgggaagtcactaccactggtcacttgatctacaagcttggaggtattgacaagcgtgtgattganaggttcgaganggaggctgccgagatgaacaagaggtcattcaagtatgccgggtgctcgacaanctcaaa

SEQ ID NO: 292856 - DNA, 270 bp, Glycine max
ctgcaatggcagtggaagtagccaaagggcaaggtgtgttagaacaaatatccaatggtggcatcccatggttcttggggacaagtgtggtccttacccttgcttccttgattccactcttccaaggtgtcagcgtggagtctagtccaaagggttcatgtcctcagatgcagaactgtggaatgggagatttgctatgttgggtttgattgctctggcttttactgagtatgttaagggtagtactttggtataattcagtcatgaagg

SEQ ID NO: 292857 - DNA, 272 bp, Glycine max
cgagtacaagccagagcttgatattatttccaacgctagctgcacaaccaactgccttgctccactcgccaaggttatcaatgacaggtttggcattgttgagggtttgatgaccactgttcattccatcactgctacccagaagatgttgatgggccatcagccaaggactggagaggtggaagagctgcttcatttaacatcattcctagcagcactggagctgccaaggctgttgggaaagtcttcctgctttgaatggaaaattgact

SEQ ID NO: 292858 - DNA, 274 bp, Glycine max
  unsure (1)..(274): unsure at all n locations
gcaaaggattctacccgccgctcgatgggaattgcgcttcaaggcgtctcgtagggctaatccgccttcacgagggtcaccaacggcacgtnntttggggggccgaggcccctactgctggtcggcaaacggacggcgggcgcacgcntcgcttctagcccggattctgacttagaggcgttcagtcataatccaacgcacggtagcttcgcgccactggcttttcaaccaagcgcgatgaccaattgtgcgaatcaaggttcctctcgtacta

SEQ ID NO: 292859 - DNA, 266 bp, Glycine max
aagcttgtgaactcaaaagatggacctccaacctttgagcagcccaagatgactctggagaagctcttgctgtatggtaacatgcttgtccaagaacaagagaatgtcaagagagtccaattggctgacaagtacttgaacgaggctgctcttggaaatgctaacgaggatgctattcagaggggaactttcttccagtcttgaattggaggcaaagcaaacttggcaagtaaatatttctgttcgtgaaggttgttgtactaatc

SEQ ID NO: 292860 - DNA, 270 bp, Glycine max
  unsure (1)..(270): unsure at all n locations
tcctcctgggacctcatggtgtaaaagatgcttattgcctactgaattttggtgacagtataaccactgatcatatttctccagctggaagcattcacaaggacagttcctgctgccaaataccttgttgagcatggggtggaagcaaggcnctcnattcttatggangtcctccangcaatgatgacgtgatggcaagggggacntttgccaaacattcgncttgtnnacnagttttnantggggaattggcccgaagacaattcacat

SEQ ID NO: 292861 - DNA, 270 bp, Glycine max
cttagcactggacttaaacagtacaacttggataacaacatggacggtttttacattgctcctgcttttatggacaagcttgttgttcacatcagcaagaacttcatgaccctgcccaacatcaaggttcctctcattcttggtatctggggaggcaaaggtcaaggaaaatccttccaatgcgagcttgtctttgccaagatgggaatcaaccctatcatgatgagtgctggagagttggaaagtggaaatgcaggagagccagcaaaa

SEQ ID NO: 292862 - DNA, 263 bp, Glycine max
  unsure (1)..(263): unsure at all n locations
ctggagagntggaaagtggaaatgcaggagagccagcaaagttgataaggcaaaggtaccgtgaagctgctgatataatcagcaaggggaagatgtgctgtctcttcataaacgatcttgatgcaggagctggtcgtcttggtggaaccactcaatacactgtgaacaaccagatggtgaatgccaccctcatgaacattgctgataaccccacaaatgttcagcttcctggcatgtacaacaagcaagagaacccccgtgtg

SEQ ID NO: 292863 - DNA, 260 bp, Glycine max
  unsure (1)..(260): unsure at all n locations
gcagaaagnaagctcatcctagagttttaaaaatggcagcagcctcctccatggctctctcttccccatccttggctggcnaggccgtgaagctgggcccatcagcccccgaagtcgggagggtcagcatgaggaaaccgtcaccaagcaggcctcctccggaagcccatggtacggcccagaccgcgtaaagtattgggcncattctctggcgacccccgtcctacctnagnggcgtncccanaggtnnnnaggggtgg

SEQ ID NO: 292864 - DNA, 263 bp, Glycine max
ttcatcacttcattcaacatttctctctcccttagctagtttttaccaatggctgctgcggttagtgctgcagtctcttttccatccaccaagtctacctctctcccaagcaggacctccatcattaccccagagagagttgtattcaagaaggcttcattgcaatacagagatgtttgtagcagtggaagggtagtttccatcagagctcaagtcaccactgaggctccagccaaggttgaaaaagagtccaagaaacagga

SEQ ID NO: 292865 - DNA, 270 bp, Glycine max
  unsure (1)..(270): unsure at all n locations
caccaggnnggggtattttggccatggangagtccaatgctacctgtgggaagcgtttggnttcaattgggctagagaacactgaagctnaccgccncggcataccgtaccctcctcgtgacagttccagggccttggtagtannatntctggtgccattctctttgaggaaacactctaccaatccacaactgatgnccaggncngattgttnnacgtgctgcttgagcaaaacattgttcctggtattaaagtcgacaagggtttggt

SEQ ID NO: 292866 - DNA, 260 bp, Glycine max
  unsure (1)..(260): unsure at all n locations
gggtgatagtaacaagggctgagattggggactgatgacacaaaacttataagggtgatagtaacaagggctgagattgatttacagtatatcaaagctgaatatttaaaganatacaaaaagacgcttaacgtgcagttcactcagaaacatccggccactacagggcttttcttctctcactcttaggtcccaaccagtagtaaaaaatgttcaacgatgttttgtgtggaatgaattcagcgtatgatgtttgaata

SEQ ID NO: 292867 - DNA, 258 bp, Glycine max
cagcttccaacatggacccatacgtggttacttccatgattgcagacacaaccattctgtggaagccatgagcaaaacctgcatgttttctccctttggatggaaaggaacagttatgcttttcttagtaggattggtctctctctctttttaccttttgattggtactatggttggtgccttgttggttggtgcaactaactggcaagggttgttcattgttttcttctattcctttccctcgttttccgattgtta

SEQ ID NO: 292868 - DNA, 260 bp, Glycine max
gtaacatcctgctatcagataatctcactcaatcacttctattcctttcacattttttgggagacgtccatcagcccctacattgtggctttttctcagacaagggtggcaatgaaatcaatgttcgctggtacgaagaaagcaaaatcttcaccacgtttgggatgcaagcataattgagactgaagttgaaagattctatgatgacatagaagacttcgttgatgcaattcaaaggaatattacgaaagtgtgggccg

SEQ ID NO: 292869 - DNA, 270 bp, Glycine max
  unsure (1)..(270): unsure at all n locations
gaataaatggttagaggtccaaagaaggcacttaagagaatcaatgctcccaagagctggatgctcgacaaattaggcggcatcttcgcaacaaaatcttcccaaggtccacacaaatacagaganagtcttcctctcacgttgtgctcaagcaccgtcttaaatacgctcttactggaagagaagtcactatgatcgtcaatgacaaggaaggaaacatcgctgtcgatggcaagatcagaagagaccctagattccccgctggtctta

SEQ ID NO: 292870 - DNA, 258 bp, Glycine max
  unsure (1)..(258): unsure at all n locations
ggagctcattatctgggccactggtgagcttgtgagccttagtgagcaacagcttgtggattgcgaccacgtgtgtgatccagaagaatatggancgtgtgactcgggctgtaatggtgggttgatgaacatgcatttgagtacatacttcagtctgggggagtacagaaagaaaaggactatccatacacggggagagatggcacctgcaaatttgacaaaaccaaagttgcagctactgtatctaattacagtgtg

SEQ ID NO: 292871 - DNA, 255 bp, Glycine max
ggcactaacaaaagccatgtgctgggaagttgtgtcgatcagcaaggatccagtaaatggagtaggtgtagctgtatacaggaagccaacttctaatgagtgttacgagcaacgctcaaagaatgagccaccgctgtgtccagactctgatgatcctaatgcagcatggaacattcaattgcaagcttgcttgcacaaagcgccagttagttcaaaggaacgaggctcaaaattgcctgagctgtggccagccag

SEQ ID NO: 292872 - DNA, 254 bp, Glycine max
  unsure (1)..(254): unsure at all n locations
tgcaaagagaaggagtcgaacccagtgatggtggagaatatgctggacttatggttattcgtgcatatcatttggcaaggggagaccaccaccgcaatgtttgcattatacctgtctcagcacacggaacaatcctgctagtgcagctatgtgtggaatgaaaattgtctctgttggaactgatgccaaggganacattaatatagangagctgaggaaggctgctgaaacacacaaggatacttatctgcact

SEQ ID NO: 292873 - DNA, 257 bp, Glycine max
tcttcctttgaccatgttccttcccgaagcggagttcccagcctgggttgtttgttacattcctggaatcatgtccctcctaagtgttctaccagctccacggtcatttccgtttatagttccttaccttctatttgagaacactatgtcggtaactaaatttaatgccatgatatctggattacttcgctttggaagttcttacgagtgggtggttacaaaaaagttgggaagatcgtctgagactgatttggttg

SEQ ID NO: 292874 - DNA, 259 bp, Glycine max
ttttattaacgtgagaatatcaaacctgatgagcaagtggtttggggatgcccaaaagcttgttgctgctgtatttagcttggcttataagcttcagcctgccatcatattcattgatgaagtagacagtttttgggtcagcgtcgtggaacagatcacgaggctatgttaaacatgaaaactgaattcatggctctgtgggatggatttacaacagatcagaatgctcaagttatggttcttgcagcaactaatcgtc

SEQ ID NO: 292875 - DNA, 264 bp, Glycine max
  unsure (1)..(264): unsure at all n locations
gtagttgagaactaagaagaaggaaatggcttcctcaatgatctcctccccagctgttaccaccgtcaaccgtgccggtgccggcatggttgctccattcaccggcctcaaatccatggctggcttccccacgaggaagaccaacaatgacattacctccattgctagcaacggtggaagagtacaatgcatgcaggtgnggccaccaattggcaagaagaagttcgagactctttcctacttgccagacctcgatgatgccca

SEQ ID NO: 292876 - DNA, 265 bp, Glycine max
tggtatctggggaggcaagggacaaggaaaatctttccaatgtgagcttgtctttgccaagatgggaatcaaccccatcatgatgagtgctggagagttggaaagtggaaatgcaggagagccagcaaaactgataggcagagataccgtgaagccgcagacttgatcaagaagggaaagatgtgtgctctcttcatcaacgatcttgatgcaggagctggtcgtcttggtggaaccacccaatacactgtcaacaaccagatgg

SEQ ID NO: 292877 - DNA, 263 bp, Glycine max
  unsure (1)..(263): unsure at all n locations
caggaaatctcccaaggattatactctaacccatagtgatataaccgctaagctcaccttggcaatctctcaaaccataaataattctcagttacaggggtggtacaacagattgcaaagggacgaagtggtggcacagtggaaganggtgaaggggaaantgtctcngncacgtacanttgcnanntcnatggtggtcntttcncctaaatatantangcagggtaangtannttnncctcngncaaggngnnacnatggnt

SEQ ID NO: 292878 - DNA, 256 bp, Glycine max
  unsure (1)..(256): unsure at all n locations
gaggagatagagactggcggtcctgctgctatgatgaggtactggaataatgaggaggttttgcagaagttgggacaagccatgggtcttgccaattcgggagatgcaggtgcctctgctgaaaattctggggcagatgagaccgaagatttgggaaatgaagatgaatcnattgttccatcntactgctaatgttggtgatgtgganggcnttaaaaatgcnctannctcnggtgnngaccagggtgaaaaagat

SEQ ID NO: 292879 - DNA, 257 bp, Glycine max
  unsure (1)..(257): unsure at all n locations
ccactctctgagtaggactacactgccatggctgcctcagtctccactgttggagctgtcaacggngctccactgagcttgaacagctctggagctggagcttcagttcccagttcagccttctttggcaccagcttgaagaaggttattgcctcaagggtccctaaacgtcnagatttcttctggnagtttcaaaatcgttggccgcggaaaaaganatgattgagnaacnaccggncagaccagggaccagtngg

SEQ ID NO: 292880 - DNA, 258 bp, Glycine max
  unsure (1)..(258): unsure at all n locations
aacgctcttcatgctttgagaancaggctttctgaccccagcaacgtgcttcagagctgggacccaaatctcgttaatgcttgtacttggtttcatgttacctgcgactccaacaatcacgtcattcgcttagacttgggcaattctaagctctccggaaatttggggacccgaacttggccagctaaacccaactccaataccngggggtcnaannggattaaccttaagggggnaaantcctcngggacntttcnt

SEQ ID NO: 292881 - DNA, 208 bp, Glycine max
  unsure (1)..(208): unsure at all n locations
gccatggttctctccaaaaccacctccgaatccgacgtctctgtccactcaaccttcgcttctcgatatgtcagaacttcgcttcccaggtttaagatgccggaggagtcgataccaaaggaggcagcgtatcnaataataaacgatgagttgatgttggatggggaaccnaggttgaacttgggcatcnttgtgnacaacctggatg

SEQ ID NO: 292882 - DNA, 244 bp, Glycine max
  unsure (1)..(244): unsure at all n locations
cttcctgctgtgatgaccactacagttgctgccctgcagactatcccatctacnacacttacgctggaacttgnctcaggagcaagaacaacccctttngagtgaaggcattaaggcgtactccagcgaaaccccattggaccttcggacgtaagaacaaggtcagcagtggttaagcagtttaaggnaatgtgaacgtgcngaaggaggcaatgatgaagtaaaagggnagacgaaggataaa

SEQ ID NO: 292883 - DNA, 252 bp, Glycine max
  unsure (1)..(252): unsure at all n locations
ttacaaggcacaaggtctttcagtgggttcatcccttgtagaagaagataagttggatcttgctacatcactacttgcaaaagccaaggaaaagggggtgtctctcttgttaccaagtgatgtggtgattgcagacaaatttgctcctgatgctaatagcaaggtcgtgccagcatctgccatccctgatggctggatgggatggatgctngtccagatccgntaaatcantcagtgaagcttgggtacnac

SEQ ID NO: 292884 - DNA, 253 bp, Glycine max
  unsure (1)..(253): unsure at all n locations
cagcaaccagggtataacagttcacgggcttacctggntcatcttgctgatttgccatggcagaaggctagcaaagagcttgaactggacttaagggctgcacaggagcncctggacactgatcactatggtttagtgaaggtcaagcaacggataattgaatacctggctgttcgcaagcntaanccagatgccaggggtccaataatgtgcttgttggacccccaggggtttgnaagaccttcactgggcc

SEQ ID NO: 292885 - DNA, 252 bp, Glycine max
  unsure (1)..(252): unsure at all n locations
tacaaganagaatggctgctaggttgaaacacttgggtattagagtgaaaagcattgaagaagatgagcattgtgtcattccaatgggtggccccctcccagttctcccccaaagagttgttggaattggcggtaccgcangaatggtgcatccttcaacagggtatatggtagcaaggaccctaagctgcggctcctattgttgctaattcnnntgtcantgccttggttcngatagaggnttttcnngag

SEQ ID NO: 292886 - DNA, 251 bp, Glycine max
  unsure (1)..(251): unsure at all n locations
cttctcatcattctcatattattgtcgccacttcgacctcaatcaccctcgcgccctcgctcttcccttcctggtggcgacaatgtcgactcctgctaggaagaggctgatgagagacttcaagaggctgcaacaagacccgcctgcagggatcagcggtgccccccagnctaacaacataangcngtggaatgctgtcatatttggtcctgatgataatccatgggntgggngcncgttcaagttgactc

SEQ ID NO: 292887 - DNA, 252 bp, Glycine max
  unsure (1)..(252): unsure at all n locations
gnattttacattgctccagcttttatggacaaacttgttgttcacattaccaagaacttcatgaccctgcccaacatcaaggttcctctcattcttggtatctggggaggcaagggacaaggaaaatctttccaatgtgagcttgtctttgccaagatgggaatcaaccccatcntgatgagtgctggagagttggaaagtggaaatgcnggcgagccagcaaaactgatcnggnngagatancgggaagcc

SEQ ID NO: 292888 - DNA, 252 bp, Glycine max
  unsure (1)..(252): unsure at all n locations
cgacccgaaggcacctctggaganagtttgtcttcttggatgtggtgtttcaactggccttggagctgtctggaacactgcaaaagtggagtcagggtccattgttgctatttttggcctggaactgttgggcttgctgttgcagagggtgctaaaactgctggtgcatcccgggttattggcatagatattgacagcaagaagtttgatgtagccaaaaacttggnntcactgagtttataaatccnaatg

SEQ ID NO: 292889 - DNA, 257 bp, Glycine max
  unsure (1)..(257): unsure at all n locations
aaaacaagtagttgagaactaagaagaaggaaatggcttcctcaatgatctcctccccagctgttaccaccgtcaaccgtgccggtgccggcatggttgctccattcaccggcctcaaatccatggctggcttccccacgaggcagancaacaatgacattnccttcnatgctaagcaaaggtgggagagtaacattgnntgcnagtggtggcaacaactggcagaagganntnccggattntttctaantggcaag

SEQ ID NO: 292890 - DNA, 250 bp, Glycine max
  unsure (1)..(250): unsure at all n locations
ccatgatgggttctaaaggactcaccgatgcatcaaagatagccattttgaatgcaaactacatggcaaaacgattggagaattattacccggttcttttccgtggagtcaatggaacagttgctcatgaattcatcattgactgngaggcttaagaatangcngggattgagccnggangnggtngcaagcggctccnnggataacggtttncaggnaccaacanggnnanggctnnngcnngnnanat

SEQ ID NO: 292891 - DNA, 248 bp, Glycine max
  unsure (1)..(248): unsure at all n locations
gcaaaggattctacccgccgctcgatgggaattgcgcttcaaggcgtctcgtagggctaatccgcctcacgagggtcaccaacggcacgtgcctttggngggccgaggccccctactgctggtcggcaaacggacggcgggcgcacgcgtcgcttctagcccggnttctgacttagaggcnttcngtcataatccaacgcncggtagcttcgcgccaatggcttttcnaacaaacncgangancaatt

SEQ ID NO: 292892 - DNA, 246 bp, Glycine max
  unsure (1)..(246): unsure at all n locations
caatcatatttgctttcaagaacaagctggacattncattgggtgttgcattgggttcagcaactcagattgccatgtttgtngtcccattatgtgtaatcgttgcttggataatgggtatcgatatggacctgaacttcaacctcctagagacaggttcccttgcgttggcnataatagtcacaggcntcactttacnggatgggacttcncactanntgaaaggcctgntcnnctggngtgcna

SEQ ID NO: 292893 - DNA, 244 bp, Glycine max
  unsure (1)..(244): unsure at all n locations
cttggcaccatgactcatcgttggaaccaaggtcttgatggtcttgcctctcgctcggctgcatactaccagcnaggtgcccgtttcgccaaatggcgtactgttgtgagcatccccaacggtccctctgctctggcagttaaggnagcngcctggggtctggctcgctatgccgcaattgctcnagacatggattggtcccnattgtggagccnganatcttgcttgatggggagcatggtat

SEQ ID NO: 292894 - DNA, 262 bp, Glycine max
  unsure (1)..(262): unsure at all n locations
ccccaccaccccatcaggcctcaccatcagagctggttcctatgctgatgagctcgttaagaccgcgaaaacantggcttcaccagggaggggnattttggccatggatgagtccaatgctacctgtgggaagcgttggcttcaattgggctagagnncactgcagctaaccgccaggcataccgtaccctccttgtgacagttccaggacttggtcagtacatctctggtgccattctctttgaggaaactctctaccaat

SEQ ID NO: 292895 - DNA, 257 bp, Glycine max
  unsure (1)..(257): unsure at all n locations
ccaattganattttaaaaatgactgggnataaacttaaganttcaattattgaaattgaataagtaaacnatttaattggattngtcgaatggtatcaaaaaaatggagtactaactcccatttcttatttatattgaattaaccgatcaacttgctttgtcatcgaacatttctttttgatttcaaaaattttccggaaaanattntgaatctatttttatatgcgaatcaatcctactacttctggccctgaggt

SEQ ID NO: 292896 - DNA, 258 bp, Glycine max
  unsure (1)..(258): unsure at all n locations
gggattttacattgctccagcttttatggacaaacttgttgttcanattaccnagaacttcatgaccctgcccaacatcaaggttcctctcattcttggtatctggggaggcaagggacaaggaaaatctttccatgtgagcttgtctttgccaagatgggaatcaaccccatcatgatgagtgctggagagttggaaagtggaaatgcaggngagccagcaaaactgatcaggcagagataccgtgaagccgcagat

SEQ ID NO: 292897 - DNA, 261 bp, Glycine max
  unsure (1)..(261): unsure at all n locations
ggaggaggtggccctggcatgggtcctataggtgtaaagaaacacttgggcaccatttttancatcacaccctgtgatagcaactggtggaattcctgcccctgacaaacctcaaccacttggtaccatngctgcgcaccatggggctcagcactcatattgccaatccctnacattacatagccatgatgggttnctaaagggactcaccgntngcatcaaagatngccntttggantgccanactacatnggcaanncg

SEQ ID NO: 292898 - DNA, 256 bp, Glycine max
  unsure (1)..(256): unsure at all n locations
cttttgatgtctctcttctcaccatcgaggagggtattttcgaggtgaaggccactgctggtgatactcacttgggaggtgaagattttgataacagaatggtgaaccattttgttcaggaattcaagaggagaacaagaaggatattagtggaaatgccagactctgaggaggttgagaacagcatgtgagcgggcaaagaggnctctctcttccactgctcaaaccaccatagagattgattccttgtacgagg

SEQ ID NO: 292899 - DNA, 258 bp, Glycine max
  unsure (1)..(258): unsure at all n locations
tctgcactgtgtgaagctggagttatttatgtgatgactcatgattcgattggacttggagaggatggaccaactcatcagccaatagagcatttggcaagcttcagggcaatgccaaacactttgatgcttgtccagctgatggnaatgaaactgctggatcatacaaagttgctgtggttaacaggaagagaccctcaattcttgcactttctaggcaaaagttgacccaacttccagganttctattgagggagt

SEQ ID NO: 292900 - DNA, 257 bp, Glycine max
  unsure (1)..(257): unsure at all n locations
caccgaatatattactatgatcttcgcaaccttaaaatgccactttgtactnnagttggacataacaagactgtgagctacatcaagtttgtagacactgtgaaccttgtctctgcttccacagataacacttgncagctttgggatttgtctacatgtgcatctcgagttatagactcaccgattcaatcattcactggtcacgcgaatgttaagaactttgtggggttatcagtatctgatggttacattgccac

SEQ ID NO: 292901 - DNA, 257 bp, Glycine max
ttttatttggctttgattttcttctgcaaccttatctactgcaaagctttgattactgagtctaacttaccctgccacagtttgccttgtttacctgagctctgtttttaactggtctttgatcaaggatggcataaaggcaattgagttgttgaaaggaagcggaaaccatgaagagatatttgaagttcttgcagcagtggctgcatctttgggggatgtaatagatgatgtgaacactttgcaggtaacacctt

SEQ ID NO: 292902 - DNA, 258 bp, Glycine max
  unsure (1)..(258): unsure at all n locations
gtcaagattgttgacaccttccctggccaatccattgatttctttggtgcactgagggccagagtatatgatgacgaagtgaggaagtggatttctggtgttggtgttgacggcattgggaagaagcttgtcgactcaaaagatggacctccaacctttgagcagcccaagatgactctggagaagctcttgacgtatggtaacatgcttgtcccaagaacaagagantgtcaagagantccattggccnaanaattt

SEQ ID NO: 292903 - DNA, 264 bp, Glycine max
  unsure (1)..(264): unsure at all n locations
aatcattgttctacgaagctcccctcggatacagcattgaagacgttagaccaaacggtggaatcaagaaattcagatctgctgcttactccaactgcgctcgcaaaccttcctgatatccatccagattgatgttcattgcatgcaaccatagttttattaggttttttcttctttgttttcaattaggtttttgctgctctccttcnaaactccgtctttccggaatcccctcttngngatggngnncngtcccgcccccnc

SEQ ID NO: 292904 - DNA, 254 bp, Glycine max
  unsure (1)..(254): unsure at all n locations
gaagattttggcactgaaggacgtggcgggtactttgaccattatggtatcataaganacattatgcagaatcatttacttcaaatactagcactctttgcgatggaaacccctgttagtttggatgcagggatattagaaatgaaaaggtcaaggttcttcgttcgatgagacccctacgacttgaggatgtggttatagctgccctcttcatagataatgcaagatgggatggggtaccttttctgatgaag

SEQ ID NO: 292905 - DNA, 258 bp, Glycine max
  unsure (1)..(258): unsure at all n locations
ctccttgctcttagccctcntcctcttcgccgcngtnnccaccgcngcgatggcggtggccgcgtccgacgccgacgacatcctgatccgtcaggtggtgccagatgttggcgaagcgaaagaggaggncacctgctgaacgccgagcaccacatcgcgagcttcaaggccaagttcgccaagacctacgnnaccaaggaggagcacgatnatcgnttgggcgtcttcaagtcgaaccctncggaagagccnaggtct

SEQ ID NO: 292906 - DNA, 255 bp, Glycine max
  unsure (1)..(255): unsure at all n locations
gctgganntctcattgggtgttgcattaggttcagcaactcagattgccatgtttgtggtcccattatgtgtaatcgttgcttggataatgggtatcaatatggacatgaacttcaacctcttagagacggttcccttgctttggcaataatagtcacaggcttcatcttacaggatggaacttctcactacatgaaaggccttgttctcctgctgtgctacattgttattggggcatgcttcttcgtacaaaga

SEQ ID NO: 292907 - DNA, 256 bp, Glycine max
  unsure (1)..(256): unsure at all n locations
ggaggacgtgattctgtctgccgggtttgggatatacgaagtaaaatgcagattcatgctctttcangtcatgataacactgtactgttctgtgtttacgcggccaacggatccccaagttgttacaggtttcatgacactaccatcaagatgtgggaccttagatatggtaaaacaatgtcaactcttacaaaccataaaaaatctgttcgagcaatgnnncngcatcccaaagagcaagcttttgcatctgctt

SEQ ID NO: 292908 - DNA, 250 bp, Glycine max
  unsure (1)..(250): unsure at all n locations
cttgcaggttccaacgacgagtcatggtgccaaggtttggatggtctagcctctcgctcagctgcatactacgagcaaggtgcccgtttcgccaaatggcgtactgttgtgagcatccccaacggtcctctgctctggcagttaaggaagcagcctggggtctggctcgctatgctgcaattgctcaggacaatgggttggtcccaattgtggagccnnnnatcttgcttgatggggagcatggtattga

SEQ ID NO: 292909 - DNA, 250 bp, Glycine max
  unsure (1)..(250): unsure at all n locations
gcctctacagcagagtcccagatctctgcattccaattcccatggctggtcgctatgacagtaaccccttcgatgaggaagaagttaaccccttctataatcctggaagtgttcccgctgccactaatcaaggctttcacctctgaagccagaacctgttattataattatggctttggtgcgacagttgatatacctcttgattcatcaanggnttgaaaaaanngggaagggnntcnaagccangggg

SEQ ID NO: 292910 - DNA, 252 bp, Glycine max
  unsure (1)..(252): unsure at all n locations
gttggaaagtggaaatgcaggagagccagcaaaactgatcaggcagagataccgtgaagccgcagacttgatcaagaagggaaagatgtgcgctctcttcatcaacgatcttgatgcaggagctggtgtcttggtggaaccacccaatacactgtcaacaaccagatggtgaatgccaccctcatgaacattgctgataaccccaccaatgtncagnttccnggtatgnaacnncgggaacancccncccnt

SEQ ID NO: 292911 - DNA, 253 bp, Glycine max
  unsure (1)..(253): unsure at all n locations
tacttcgtatcggttatccatttattcgtgggtgtggcgtactgtttggtgagctgggccgtgggacttcctaaacgtgctcctatagactccaacctactgaagttgctcattccggtggctgtggccatgcattaggccacgtgaccagcaatgtctcatttgctgcagttgctgtttctttcactcataccattaaagctcttgagccattcttccaatgcngctgctttcacagttccatacttggccc

SEQ ID NO: 292912 - DNA, 249 bp, Glycine max
  unsure (1)..(249): unsure at all n locations
aaactattaccattataaggataacagggtactcccttctcacgttgatgccgaacttgccaatgctcaagcttggtggtacaagccggactatattatcaacgagcttaacataaactccgtgataccacgccttgccacgaggagatcttgcccatcaactcanggactactcagatgccttatttcatcagaggctatgcgtattccggtggtgggagaaaggtgacacgtgttgaggtnaccctg

SEQ ID NO: 292913 - DNA, 250 bp, Glycine max
  unsure (1)..(250): unsure at all n locations
gaaggatgtgatgactaagaacgtctccatttacaagtcccaggcttctgcccttgaaaagcatgctgctgccaactgcaaggttcttgttgttgctaacccagcaaacaccaatgcattgatcttgaggaatttgctccatctattcccgagaagaacatttcttgtttgactagattggatcacaacagggcattgggccaaatctctgaaagactgaccgttcaggtttctgatgnaaagaatgnct

SEQ ID NO: 292914 - DNA, 251 bp, Glycine max
  unsure (1)..(251): unsure at all n locations
gatgacttctccctacattaaatgtacagtctctttcttcatagcatttggaaatttggctgatgacnccatcaattttgaggcttttccccacaagctggtgcagtttggagagattcaggaaaaattgtattgaaattttcacaagaggaatttcttacagcttggtcaactcaggtgcgtcctgcaacaactctgttggctgatgggtgtccatatttgtatgctatggtgcatgatagttcagtgtc

SEQ ID NO: 292915 - DNA, 257 bp, Glycine max
  unsure (1)..(257): unsure at all n locations
gaaaaacaagtagttgagaactaagaagaaggaaatggcttcctcaatgatctcctccccagctgttaccaccgtcaaccgtgccggtgccggcatggttgctccattcaccggcctcaaatccatggctgcttccccacgaggaagaccaacaatgacattacctccattgttagcaacggtggaagantacaatgcnnccgggtgggcccacnacccggcaagaantttccgggnnttttcccnntttggaaanc

SEQ ID NO: 292916 - DNA, 282 bp, Glycine max
  unsure (1)..(282): unsure at all n locations
ctttctcctacctcgtccttctaacccaacctcaacctgtttctccgagaatcacatccaacgcttctgtcatggaggaagttaacgttgtggaaactaaggatggaactgtctcagtagctgctgcgtttgctggtcatcaggaagccgtgcaggatagagaccacaaatttttaagaaaagctgttgaagaagcatataaaggggtannttgcaaagatggcncncccttntggtgntnttatantncataataatgncatagttgccncccccccnccc

SEQ ID NO: 292917 - DNA, 276 bp, Glycine max
  unsure (1)..(276): unsure at all n locations
aaaatggtggccacagttggtattcctgagaatacaggtatagcattggcctgtgctatgaatagttcttttagggggcgtgccagttctgatatttacaccatctgctctcaagactgtgaattatggaatcctgcttgcacaaaagcaatgactatgtcatttaatccaaacccgtgttctgatgcatggagtttggaatttctgaagcgtaccggatttcattgtgataccattngtgtcantggngggnccnccccnnacaaggnnggttgc

SEQ ID NO: 292918 - DNA, 272 bp, Glycine max
  unsure (1)..(272): unsure at all n locations
ggtctttctacgtctccgcatcgagcaccaagaaaatcctaataatgggaggcaccaggtttattggtgtgtttttgtctaggctccttgtcaaagagggtcaccaggtgactttattcacaagaggtaatcgcgcctgtccactcaacagttgccaggtgaatcagacagtgattatgctgatttttcttccaagatctgcatttganaggagacaggaaggacttcgactttgtaaaaatccagtctctcagcagngggnttnnnttttt

SEQ ID NO: 292919 - DNA, 271 bp, Glycine max
  unsure (1)..(271): unsure at all n locations
cgcaacggggtgaagttcggagaagccgtgtggttcaaggccgggtcccagatcttnagcgagggtgggctcgactacttgggcaacccaagcctgatccacgcccagagcatcctcgccatctgggccacacaagttatcctaatgggtgccgttgaaggttaccgtattgctggtggccccctcggtgaggtcactgacccaanntgacccaggtggcagcttcgacccattgggccttgctgatgacccagaggcttttgctgagctt

SEQ ID NO: 292920 - DNA, 272 bp, Glycine max
  unsure (1)..(272): unsure at all n locations
gttgaataggtggatggggaaactgactttcccccagggcacttcccgaagtgttaagagaatgcctctttctatagggggaggagctggtgcaaagaatgctattctcatgaatatgccaaatgctgttctttcaatgtggagatattttgttggagatctcgtctttgaagtttctaagatgacttctccctacattaaatgtacagtctctttcttcatagcatttggnaattnggcctgatgacccnncaatttggggncctntcccc

SEQ ID NO: 292921 - DNA, 270 bp, Glycine max
  unsure (1)..(270): unsure at all n locations
cttgcagaagccattccccaatttatcaagcagaatgttcagttngtagccctaggaacaggaaaaaaacaaatggaaaagcagcttgaggaacttgaaatatcataccctgataaggccagaggagtggnnaaattcaatgttcccctagcccacatgataatagctggagctgattttatattggttcctagcagatttgagccttgtggtctcattcagttacaagctatgcgctatggatctgtaccattgttgcctcaacaggtg

SEQ ID NO: 292922 - DNA, 271 bp, Glycine max
  unsure (1)..(271): unsure at all n locations
ttctccagagagaagaagaaacttaatcgatcatcacttcacttcactaatacatcatggcagacgagacccagaacaagtatgagagctctgaggttgaggtccaggatcgtggtgtttttgactttctcggtaagaaaaaggatgaagaagacaagcctcatcctcaggaggnggtcatcgccaccgagtttcaaaaagtcactgtctcagaccaaggagagaacaagcacagcctcttagaaaagcttcaccgatctgacagcagctc

SEQ ID NO: 292923 - DNA, 271 bp, Glycine max
  unsure (1)..(271): unsure at all n locations
gtttaaacctaattctcatttcttcatcgttcgattcttctcctcctaaagatgcagatcttcgtgnaaactttgaccggtaagaccatcacccttgaggtggagtcctccgacaccatcgataacntgaaagctaagattcaagacaaggaagggatcccacctgaccagcagagacttatctttgcgggtaaacagcttgaggatggtcgaacccttgccgactacaacatccaaaaaggaatccactctccacctcgtgcttcgcctc

SEQ ID NO: 292924 - DNA, 270 bp, Glycine max
  unsure (1)..(270): unsure at all n locations
ggagagattaagaatcttcctcagggtgctactgtcattgactatgcttatatgatacacactgaaataggcaacaagatggtagctgcaaaggtcaatggcaatcttgtttctcctgctcatgtacttgcaaatgcagaagttgtagagataatcacatataatgcactttccagcaaatcagcctttcagaggcataagccagtggttgcaacatgctaaaacacgtagtgcaagacncaaaataatgaagtttctgagggagcaagc

SEQ ID NO: 292925 - DNA, 265 bp, Glycine max
  unsure (1)..(265): unsure at all n locations
gttgagaactaagaaggagaagcaaatggcttcctcaatgatctcttccccagctgttaccactgtncaaccgtgccggtgccggcatggttgctccattcactggcctcaagtccatggctggcttccccaccaggaagaccaacaatgacattacctccattgctagcaacggtggaagantgcaatgcatgcaggtgtggccaccatngnnnncaagattcngagtcttnncctnccanacattttngccnannnnnaaaag

SEQ ID NO: 292926 - DNA, 268 bp, Glycine max
  unsure (1)..(268): unsure at all n locations
gagagtgaaagcaaggctgaactagacaggttctgtgatgctcttatttccattagacaagaaattgctgagattgagaaaggaaatgctgacattaacaacaatgtacttaagagcgcccctcatccaccatcactgctcatggctgatgcatggacaaaaccatactccagggaatatgcagccttcccagctccttggctccgtgcttcaaagttctggcctaccacaggacgtgttgataatgtgtanggtncncgccnccctc

SEQ ID NO: 292927 - DNA, 265 bp, Glycine max
ccaacatgctccgagaagaaacttctctgttttcgccatgtctgctgatgacgcaaagcgcagtgttccattgaaggattatcgcaacatcggtatcatggctcacatagatgctggaaagactactacaacagaacgaattttgtactatactggaaggaactacaaaattggagaggtgcatgagggaacagcaaccatggactggatggaacaagaacaagagagggggattaccattacttctgctgcaaccactacattt

SEQ ID NO: 292928 - DNA, 270 bp, Glycine max
  unsure (1)..(270): unsure at all n locations
gngatcacctaatccaagggattggtaatggtctcattccaagtgtactggattttaatctcctagatgaagttattcagatatcnantgaagaagctatagaaactgctaagcttcttgctttaaaagaagatgggaatttcatcaggagccgcagctgcagctgccataaaattggggaagagaccagaaaatgccggaaaactcatcgttgtggtatttcctagttacggggagcgttatttatcttcaccattgtttgaatccatt

SEQ ID NO: 292929 - DNA, 268 bp, Glycine max
  unsure (1)..(268): unsure at all n locations
tctcatcctttcttttagttttatttttatttttttatcttgggtaaaaaaaatcatgggtgttttcacttctgaaagcgaacacgtttcccccgtctctgctgcaaaattatacaaagctattgtcctagatgccagcaatnccttcccaaaagcattgccaaatttcattaagagcgtagaaaccattgaaggagatggagggccaggaaccattaagaagcttactcttgngaaggttaggttttgtgaagccccncgtaatttc

SEQ ID NO: 292930 - DNA, 269 bp, Glycine max
  unsure (1)..(269): unsure at all n locations
ccttcagaaaccctaatttctcaaaatcttcagaggacacacagcacaaccancacctccacagccttctcctacctcccggagccatggccgccgccgactcctccgccgctccatcgcaccagttgtcgcagagggagacggacatccagatgatgctcgccgccgacgttcacctcggcaccaaaaactgcgactttcagatggaacgctacgtcttcaagcgcagaaccgatggtatttacataattaaccttggcaagacatgg

SEQ ID NO: 292931 - DNA, 267 bp, Glycine max
  unsure (1)..(267): unsure at all n locations
caacaagacagagtgtattcatcatatcttgaattanacctttctgatgttgaancatggcatttcaggaccaaagagaccacatgatcgggtacctttgaaaganatgaaggccgactggcatgcttgtcttgataacaaagttgggtttaagggatttgctataccaaaagaggcacaaggaaaagttgcaaaatttgatttccatgggcagccagcagcgctcaagcatggcagtgttgtgattgctgcaatcacaagctgtac

SEQ ID NO: 292932 - DNA, 272 bp, Glycine max
  unsure (1)..(272): unsure at all n locations
cagggaccctcttaagcttccttgggctgaacttggaattgacattgttattgagggaaccggagtgtttgtggatggccctggggctggtaaacacatccaagcaggtgccaagaaagttattatcactgctcctgcaaagggtgctgatattccaacttatgttgttggtgtaaatgaaggggactacactcatcagatctctaancttattnagcnacgcttcctgcacccacaaanggtcttgccccccttgggaaccccccggaaaa

SEQ ID NO: 292933 - DNA, 273 bp, Glycine max
  unsure (1)..(273): unsure at all n locations
cgacagagccgtatgttattgcaaccaacagacaacttcagtgagatgcaccccataaacaaattgctacaccctacatttccgttacacaatggagattaacgctcttgcacgggaagcacttattaatgctgatggcacaattgagagctcatttgcaccaggaaagtatgccttagagactagctccgctgcttatgctctcgaatggcggtttgacaagcaggcataccagcagatctaattagaaggggantnctgtngaaccccttt

SEQ ID NO: 292934 - DNA, 268 bp, Glycine max
  unsure (1)..(268): unsure at all n locations
gctcaaccttcaaatcctccagctgatactccacaggcagcacaaccagcatctgttccttcctagtggacctaatgctaatccnttagacctctttccccagggccttcctaatgttgggtctggtgctgctggtgctggttccttagactttcttcgcaacagtcaacagttccaagccttacgcgctatggtacaggctaatccacaaatattgcagcctangctacaagngctgggaaannaaaatcccccanctnanggnttc

SEQ ID NO: 292935 - DNA, 261 bp, Glycine max
  unsure (1)..(261): unsure at all n locations
ggtgtgcccatctcatgtgctagatttccaaccaggagaggcctttgtggtcagaaatgttgccaacattgtcccaccatatgaccagtcaaaatacgctggaactggggctgcagttgagtatgctgttttgcatcttaaggtgtcggagattgtggtcattggacacagtgcttgtggtggtattaaggggcttctgtctttcccatatgatggancctaccctactgattnnatnggagngngggcnaaattggcttc

SEQ ID NO: 292936 - DNA, 266 bp, Glycine max
gggagtttaaggaaagcactaaggttgacaaggtggttgtcctgtggacagccaacacagagaggtacagcaacctagttgtgggactaaacgacaccatggaaaacctctttgcttccttggacaggaacgaggctgagatttccccttccaccttgtatgccattgcttgtgttatggaaaatgttcctttcatcaatggaagccctcagaacacctttgtcccagggctgattgatctggccatcaagaggaacagtttgatt

SEQ ID NO: 292937 - DNA, 269 bp, Glycine max
  unsure (1)..(269): unsure at all n locations
gcattcgctcccactgatgggaggtgccactttgccgccgacgaatatcgggtggcgtctggcgatgtcaccaaatcgccggtgacaagtgcgtttgaccttgaatctgtggcagtgcacgagatcgggcacttgctcggattaggccactcgtcggacctaagagccatcaaggaatccntntaaancnnctngaanccaggaaggngaatctaagggcaaatggnntnnangggggttcnnaagccnnnggngnnacccccaanntc

SEQ ID NO: 292938 - DNA, 263 bp, Glycine max
  unsure (1)..(263): unsure at all n locations
caacaacaagtgagtggtgaggtacaaagcagccgtagggcagtgctttcacttgttgctgctggtttggccactggctcttttgttcaagctgtgcttgctgatgccaaatctatcaaagttggaccacctcccccaccttctggtggattgcctggnacgttgaactcagatgaagcaagagaccttcagctgccattgaaagataggttcttccttcaaccattgtctcctacgaggntgcnaaangggcaaggatcccc

SEQ ID NO: 292939 - DNA, 272 bp, Glycine max
caaattcattttaatcctaattctgcacttcttgatcattcgatttttctcctccaagatgcagatattcgtaaaaactttgaccggcaagaccatcacccttgaggtggaatcctccgacaccattgacaacgtaaaagctaagattcaagacaaggaagggatcccacctgaccagcagagacttatctttgcgggtaaacaacttgaggatggtcgcaccctgccgattacaacatccaaaaggaatcaaccctccatctcgtgcttcg

SEQ ID NO: 292940 - DNA, 268 bp, Glycine max
  unsure (1)..(268): unsure at all n locations
cgcaacggggtgaagttcggagaagccgtgtggttcaaggccgggtcccagatcttcagcgagggtgggctcgactacttgggcaacccaagcctgatccacgcccagagcatcctcgccatctgggccacacaagttatcctaatgggtgccgttgaaggttaccgtattgctggtggccccctcggtgaggtcactgacccaatctacccngtggcagcttcgacccattgggccttgctgatgacccagangcttttgctgagct

SEQ ID NO: 292941 - DNA, 274 bp, Glycine max
  unsure (1)..(274): unsure at all n locations
gatgacttctccctacattaaatgtacagtctctttcttcatagcatttggaaatttggctgatgacaccatcaattttgaggctttccccacaagctggtgcantttggagagatnccagganaaagttgtattgaaattttcacaagaggaatttcttacagcttggtcaactcaggtgcgtcctgcaacaactctgttggctgatgggtgtccatatttgtatgctatggtgcatgatagttcagtgtctacaataccaggtgattttgtc

SEQ ID NO: 292942 - DNA, 267 bp, Glycine max
  unsure (1)..(267): unsure at all n locations
cttccatctccccagccaanncctctctcaggaaggccacatnacgcccttccgtcttcgcaacccttaacactccttcttctaccttcctcttcatctnncttcccctctctcattcaagacaggcctgtttttgctgcccctgcccccatcatcaccccaactgtgagagaggatatggcaaaggaatacgagaaagctattgaagaacttcagaaattgttgagggagaagagtgaactcaaagcgacagtgctgaaaaagtgg

SEQ ID NO: 292943 - DNA, 266 bp, Glycine max
  unsure (1)..(266): unsure at all n locations
atttcacttttgtggatgaaaactccttatggtcaccttcaaaaccagtcaaccaacgtgatgctgannaannaatntttgggataagttccgcaaagctcctgagggttctctcaggaaaaatacagctcagaaacaagttttggaagcaatgtctcacagaatgcatgtagacaacagtgtaaaactgattgggaagcttttatttggcattgaaaagggtccagaagtactcaacgctgttagaccggctggatcggcattgt

SEQ ID NO: 292944 - DNA, 264 bp, Glycine max
  unsure (1)..(264): unsure at all n locations
gtgaggaagtggatttctggtgttggtgttgacagtgttgggaagaagcttgtnaactcaaaagatggacctccaacctttgagcagcccaagatgactctggagaagctcttgctgtatggtaacatgcttgtccaagaacaagagaatgtcaagagagtccaattggctgacaagtacttgaacgaggctgctcttggaaatgctaacgaggatgctattcagaggggaactttcttccagtctgaattggaggcaaagcaa

SEQ ID NO: 292945 - DNA, 264 bp, Glycine max
  unsure (1)..(264): unsure at all n locations
ctaagtgggaaggcttgggataatcttttggagaacaagactgccttcactacaaagaaagactatggtaaagaagagagggaagctcaatgggcggctgcacagaggacacttcacggtcttcagcctccggaaacttccaaccttttcaatgacaaaaatagctacagggagctttcaganntgcagaacaagccaagagacgtgctgaagttgcaaggcttagggagcttcatactctaaagggacatgtcgagtcagtgg

SEQ ID NO: 292946 - DNA, 276 bp, Glycine max
  unsure (1)..(276): unsure at all n locations
cagtgacttgagaatggccttgccagtggtcgtcgacgcagagtaccttcaaagaggtcgncaaggctcgccgcgatctccgggcactcatcgctanccaggaactgcgctcctctcatgcttcgattggctggcacgatgccggaacttacgatgctaagaccaagactggtggacctaacggttcgatccgtaacgaggaagagtantctcacggcgccaacaatggcttgaagaaggctattgatttctgtgaggaagtgaaggaaaaactcc

SEQ ID NO: 292947 - DNA, 270 bp, Glycine max
cgagggcgaagagaagagaaaaattaagatggaggggaaggagcaggatgtgtcgctgggagcgaacaagttcccggagagacagccgattgggacggcggcgcagagccaagacgacggcaaggactaccaggagccggcgccggcgccactggttgacccgacggagtttacgtcatggtccttttacagagcagggatagcagagtttgtggccacttttctgtttctatacatcactgtcttaaccgtcatgggagtcgccggggc

SEQ ID NO: 292948 - DNA, 263 bp, Glycine max
atagacatggccaccgtcacttctgcagccgttgctattccctcattcactggcctcaaggcaagcgcaggcaaagtgagtgccgcagttaaagtctcagctccccaagccacaaggttgggcatcaaggcttcgctgaaagacgttggagtcgctgttgtggccactgccgcgagtgcagtgctggctagcaacgccatggccattgaagtgttgctgggtggtgatgacgggtctctggctttcgttcccaacaatttctc

SEQ ID NO: 292949 - DNA, 262 bp, Glycine max
  unsure (1)..(262): unsure at all n locations
tgccaccaacaatttttcgttgaataataagattggacaaggtggttttgnacctgtatataagggagaattagtggataggcgacaaattgctgtcaagagactatcaactagctccggacaaggaataaatgagnccacaacagaagtaaaactgattgcaaagcttcaacaccgaaatcttgtaaagctccttggctgttgctttcnagaacaagaaaaattactaatatatgaatacatggttaatggcagcctagac

SEQ ID NO: 292950 - DNA, 262 bp, Glycine max
ggcttcttggtgtgggaggatttggtaaggtttacaaaggggaaattgatggtggaacaaccaaggtagcaattaaacgtgggaatccactatctgagcagggggtgcatgagttccaaactgagattgaaatgctctcaaaacttcgtcaccgccaccttgtttcactgattggctactgtgaagaaaacactgcaatgatcctgtgtatgactatatggcctatggaacactcagggagcatctgtacaagactcagaaa

SEQ ID NO: 292951 - DNA, 269 bp, Glycine max
  unsure (1)..(269): unsure at all n locations
gacaaacgntacaagaatagagagttacaaattatgcaaatgctggatcatccaaatattgttgccctaaggcattgtttcttttcaacgactgacaaagaagaagtttacttgaatcttgtacttgaatatgttcctgaaactgtgaatcgcattgcgaggnngctatagcaggattaaccagcgaatgcctttaatatatgtaaagcttatacctaccagatttgcagggcccttgcttatatacataactgcattggtatatgtca

SEQ ID NO: 292952 - DNA, 257 bp, Glycine max
ctctggagccatgtaattgggaaccagaggtcagaggtcctatatcttttgaaacagattcttggggattcggttgcaccattgtcgaaatgttgaccggtaatcaaccttggtatggatgtcctgttggcagaatataccagtctgttgttgaaaagcatgaaaaacccaatattccaagtggccttccttcttcagttgagaatgtcctcagtggatgcttgagtatgatttgaggaatcgcccttaatggtaga

SEQ ID NO: 292953 - DNA, 270 bp, Glycine max
  unsure (1)..(270): unsure at all n locations
gttgttgtaaagccttgttgctgccatggccacccacgcggctcttgcttctacaaggatcccttcaannaaaggttcccatccaagggcctctcactctttcccaacccaatgcgccttaaagagacttgaggtgacagaattctctgggcttagatccacttcatgtgtcacatatgctaacagtgctagagaatcttccttttttgatcttgtagcttcccaactcactcccaagaccaatggatcaactcctgtgaggggagagaa

SEQ ID NO: 292954 - DNA, 265 bp, Glycine max
  unsure (1)..(265): unsure at all n locations
cttcaaaacactcataacacaaagcacaaagcaaagctcatccttgagttaaaaaatggcagcagctncttccatggctctctcatccccatccttggctggcaaggccgtgaagctgggcccatcagccccagaagtgggaagggtgagcatgaggaagaccgtcaccaagcaggtctcctcaggaagcccatggtacggcccagaccgagtcaagtacttgggcccattctctggcgagcccccgtcctacctaaccggtgag

SEQ ID NO: 292955 - DNA, 259 bp, Glycine max
  unsure (1)..(259): unsure at all n locations
agggcttccattgccgttgagcaacaaacttcccagactaaggttgctctcctcagaattggtaccagaggaagtccactagctctggctcncgcatatgagaccagagacaagctcatggcatnccatgcagagctagcagaagaaggggctattcagattgtaataataaaaacaactggtgacaaaatactatcacagccacttgcagacattggtgggaagggcctattcacaaaagaatagatgaggcatcata

SEQ ID NO: 292956 - DNA, 261 bp, Glycine max
  unsure (1)..(261): unsure at all n locations
gnactacatcctatcattcnntataancaacanganataagaaaaattaggtatgaatagaacaagagancggggggataaaagagaaaagagttttagaaatctatatacaagtgcatccacacccccttttttntgattcattaatggaatttcgtttgttgattcgagctaagttccataaaaacaccagcntcntttganatgtcctgaacagttctgtaggttgaggcctcgtttcnaggagnataggataacagg

SEQ ID NO: 292957 - DNA, 255 bp, Glycine max
  unsure (1)..(255): unsure at all n locations
gttggtgcaataacaagtggacctcttgctgattttattggacgtaaaggggcaatgagagtgtcaagtgctttctgtgtcgcagggtggcttgttatttatttttctgagggtccagtgcctttggacattgggaggttagcaacaggatatggaatgggagttttttcatangtggttcctgtctttgtagcagaaattgcaccaaaagaactccgaggggcactgactacctaaatcagttcatgatagtta

SEQ ID NO: 292958 - DNA, 261 bp, Glycine max
  unsure (1)..(261): unsure at all n locations
aaaganagtagttggggaacatattgccccggggagtatcctagtcctcccccagaatatacaacctgtttgggtgacttgtacagtgttgcttggatggaagacagtgacagacacaatttgcgaacagaaactctgcaccaacaatataaattggttaaagagaggactatatctggagattcatactatggctctcacgtgatgcagtatggtgatgtagggcttagcagagatgttctcttccatatttgggtacag

SEQ ID NO: 292959 - DNA, 265 bp, Glycine max
  unsure (1)..(265): unsure at all n locations
caaaaacttaagttcattccttgtgttttgctttcttcctcaaaaccaaacatgtcgaacacatgcggcaactgcgactgcgctgacaagnctagctgcaccaagggaaacagctatggtgttattgtagagactgagaagagttacatcgagactgttgtcatggatgttccagcagctgagcatgatgggaagtgcaagtgtggcactaactgcacttgcacggactgcacctgtggccataaggaatatgtatganaatgta

SEQ ID NO: 292960 - DNA, 262 bp, Glycine max
  unsure (1)..(262): unsure at all n locations
caattgaagttaaaagccttagccttccctacaactccaaacacaaagacatcntcatccatggctgcctccgtctccactgtcggagctgtcaacagagctcttttgaacctgaatggttctggagctggagcttcagctcccagttcagccttctttgggaccagcttgaagaaggttattgcctcaagggtccccaacagcaaggtttccggtggaagcttcaagattgttgctgtagaagagaagaaagagattgaag

SEQ ID NO: 292961 - DNA, 258 bp, Glycine max
  unsure (1)..(258): unsure at all n locations
ctttgaaggagactttcttcnctgatgacccnttgangtngttcaagaacaagccagcttccaagaagttcatgcttggccttcagttcttcttccccattttcgaatgggntcccaaatacacctttcagttcttgaaagctgacctcatagctggcatcaccatcgctagcttggccattcctcagggcatcagttgngncaagctcgccaacctccctccaattcttggactatattcgagnttataccaccatt

SEQ ID NO: 292962 - DNA, 263 bp, Glycine max
  unsure (1)..(263): unsure at all n locations
ctccccttgagttccaaaacacaaagctcatgacacgtttgacctacactctggatgagattgagggaccctttgaggtgtcttctgatggcactgtcaagtttgaggagaaggatggcattgancacgccgccgtgacagttcagctaccgggaggcgaacgtgtgccctttctcttcaccatcaagcagttggtggcatcagggaagccagatagctttagtggggagtttctagtcccatcctaccgtggaagctctttc

SEQ ID NO: 292963 - DNA, 260 bp, Glycine max
gtttcagacgaccagcaagacatcacaagagggaagggtttggttgattccctcttccaagctccacagtctactggaactcactatgcaatcatgagctcttatgagtaccttagcactggacttaaacagtacaacttggataacaacatggacggtttttacattgctcctgcttttatggacaagcttgttgttcacatcagcaagaacttcatgaccctgcccaacatcaaggttcctctcattcttggtatctg

SEQ ID NO: 292964 - DNA, 261 bp, Glycine max
  unsure (1)..(261): unsure at all n locations
gggcagatagaaaaaaagagcgacttttgagttcaaaagatgactaacttcccattgatcaacttggagaagctcagtggtgaggaaagaaacgataccatggaaaaaattaaagatgcttgtgaaaactggggattctttgagctggtgaatcatggcattcctcatgacatattggacactgtggagaggttgaccaaagagcactacaggaaatgcatggaagagaggttcaaggaattagtggcaagcaaagntcta

SEQ ID NO: 292965 - DNA, 175 bp, Glycine max
  unsure (1)..(175): unsure at all n locations
aggagcgccggttgaaggatttgattaagaagcattctgagttcattagctacccaatttctctttgggttgagaagactaccgagaaggagatttctgacgatgaggatgaggaagagaagaaggatgaggagggtaaggtggaggatgttgatgaggagaaggagaagnaaga

SEQ ID NO: 292966 - DNA, 266 bp, Glycine max
  unsure (1)..(266): unsure at all n locations
cagttcccaaattcattttaatcctaattctgcacttcttgatcattccgatttttctcctcaagatgcagatattcgtaaaaatttgaccggcaagaccatcacccttgaggtggaatcctccgacaccattgacaacgtaaaagctaagattcaagacaaggaagggatcccacctgaccagcagagacttatctttgcgggtancacaacttgaggatggtcgcacccttgccgattacaacatccaaaaggatcaaccctcc

SEQ ID NO: 292967 - DNA, 270 bp, Glycine max
  unsure (1)..(270): unsure at all n locations
ccaaaatcagattttatttttnatttttttgctgaatctgaatagatcagaaggtgatgtcgtgtttctcgtcatctgggtcggaggaagacgatgagggattcgactcttaccggaaaggaggctaccacgccgtcagagtcgccgatcagttcgccgccggcaggtacatagcgcagagaaagttgggttggggtcagttttccaccgtgtggctcgcttacgatactaaaactgagtcatatgttgctctcaatctccagaaaagtt

SEQ ID NO: 292968 - DNA, 260 bp, Glycine max
  unsure (1)..(260): unsure at all n locations
tgggttccaacaagcctcgcggttcttcaggcagcgcgcaagtcccgcacttcccgccgggaganccgatgggcggacaagaactacaagaagcgcgccctcggcaagttctacaagacttcgcccaccggtggtagctcgcacgccaagggcatcgtgctggagaaggtcggtgttgaggccaagcagcccaactcggctatccgcaagtgtgtccgtgtccagctcatcaagaacggcaagaaggtcactgcgttcgt

SEQ ID NO: 292969 - DNA, 257 bp, Glycine max
  unsure (1)..(257): unsure at all n locations
ggagatccatttattgaaagcaactatggtgtccactcccggcagtttgaagttggtgttttggattggtttgcccgattgtgggaactggagaaaaatgagtactggggctatataacaaactgtggtacagaaggcaatctccatggcatcctagttgggagagaggtctttccagatgggattttgtatgcttcacgggagtcacattattctgtgtttaaagctgctcgaatgtacagtncggaatgtgagaa

SEQ ID NO: 292970 - DNA, 256 bp, Glycine max
ccagaactagctggagatcggcgaaggacagttatgaggcctcctcaagttcttcgtgagggcacaaagaaaactgtgtttgtcaattttatggatctatgcaaaacgatgcatcggcagccagaccatgtcatggctttcttgcttgctgaattgggtacaagtggctcccttgatggacagcagagattggttgtaaagggaaggtttgcaccaaagaatttgaaggaattctgcgacgatatgtcaatgaata

SEQ ID NO: 292971 - DNA, 257 bp, Glycine max
  unsure (1)..(257): unsure at all n locations
tcttctcttgcggctagggttttagtncagntcttctagatttaaggaagatgggtaaggaaaaggttcacatcagtattgtggtcattggccatgtcgactctgggaaatccactaccactggtcacctgatttacaagcttggaggcattgacaagcgtgttattgagaggtttgagncggaagctgctgagatgaacaagaggtctttcaagtatgcctgggtgctggacaaacttaaggctgagcgtgaaaga

SEQ ID NO: 292972 - DNA, 257 bp, Glycine max
  unsure (1)..(257): unsure at all n locations
tgcaattgangttgaagtcttgcccttctctcttcaactccaaacacaagacatcatcatccatggctgcctccgtctccactgtcggagctgtcaacagagctcttttgaacctgaatgggtctggacctggggtttcagctcccagttcatccttctttgggagcagcttgaagaaggttattggctcaagggtccccaacacaaagattccnctggaagcttcaagatgttgctgtagaagagaagaaagagat

SEQ ID NO: 292973 - DNA, 269 bp, Glycine max
gttgctaacattgtcccaccatatgaccagtcaaaatacgctggaactggggcagcagttgagtatgctgttttgcatcttaaggtgtctgagattgtggtcattggacacagtgcttgtggtggtattaaggggcttctgtctttcccatatgatggaacctactctactgattttattgaggagtgggtcaaaattggcttgcctgcaaaggcaaaggtgaagacacaacatggggatgcaccttttgctgagttgtgctcacactg

SEQ ID NO: 292974 - DNA, 265 bp, Glycine max
  unsure (1)..(265): unsure at all n locations
gattcactctggtgaacataagtggaaaccgatggcttgcaatccgattggaaactttgggaggcctcatgatatggttgactgcaacctttgccgtcatgcagaatggcagggcggagaaccagcaagaattcgcatccaccatggggttactacttagctatgctctgaacattactagtttgcttaccggtgtgctgangctggcaagtngcgctgagaatagtttaaacgcagttgaacggattggcattacattgatttg

SEQ ID NO: 292975 - DNA, 258 bp, Glycine max
  unsure (1)..(258): unsure at all n locations
cgacatatgtgtagcttataaaatctttagctaaatttgagcatcagagtcatggatgcttttcagttcaaaactattatttcaggcattcttgccctgctagcatgcgccttgttttatcaatttaagaaaacactttgtggcaatacaaagaagntctgtagggcacctcaagcagcaggtgcatggcctatcattggccatttgcacctcttcaatgctcatcaatcacacacaaaacacttggcaaaatggctg

SEQ ID NO: 292976 - DNA, 259 bp, Glycine max
gacttcgccagtacttggacaacaacatggatggattttacattgctccagcttttatggacaaacttgttgttcacattaccaagaacttcatgaccctgcccaacatcaaggttcctctcattcttggtatctggggaggcaagggacaaggaaaatctttccaatgtgagcttgtctttgccaagatgggaatcaaccccatcatgatgagtgctggagagttggaaagtggaaatgcaggagagccagcaaaact

SEQ ID NO: 292977 - DNA, 261 bp, Glycine max
  unsure (1)..(261): unsure at all n locations
gcggggatnagattaaagattcaacaatggcctctgcttctgctactcttctcaagttcatctcctgttcttgacaagtgcgagtnggtcaaaggccagacccttcgccaacctctcgtgagatgtaacccttcctcagcatcagctctcaccatcaaagctgcttcctatgctgacgagctcgtcaaaaccgccaaaacagtggcctcaccggggcgtggtattttggcgatggatgagtcaaatgcaacctgcgggaag

SEQ ID NO: 292978 - DNA, 256 bp, Glycine max
caggaagccacagcaattggaaaaacatttgcatctatgaaagactatcaattggatgggaacagagaaatgatggcattaggaacaatgaatgttgttggttccatgacttcgtgttatgtagcaacaggttctttctctcggtctgcggtaaattacatggcaggctgccaaactgcagtctctaatattgtgatgtcagtggttgtgttcttaaccctgaaattcatcactcctcttttctactacactccaa

SEQ ID NO: 292979 - DNA, 254 bp, Glycine max
  unsure (1)..(254): unsure at all n locations
ttggcgctgcaggttcggagagtggttcagtgcggtgtgtggtgcaggaagaaggagatacacccgcaattccacgaggaagcgaaggtgtactgcaacggggagctggtgctgacgacaggtgggacccagaaggagtacgtggtcgacgtgtggtcggggaaccaccctttctacctcggaagccggtcggcgtctatggtcagcgacgaccaggtcgagaattccgcaagangttcggagagctaaaagag

SEQ ID NO: 292980 - DNA, 257 bp, Glycine max
  unsure (1)..(257): unsure at all n locations
atcaaggnntgtgaaagcagagaagtgagatacactaagttatcctcataaatacactctncattaggtggntngataagtgtctaaccttagtaacattgccacatattgtgttcattttggaattgtgccactnnaattctattcaattcatctatggcngcctcttcttatgctatgcaatcaatcctggcaaaccctttgatccgcatttccagcgggtctagggtgaaccaatttggcgttcctgctttgca

SEQ ID NO: 292981 - DNA, 256 bp, Glycine max
  unsure (1)..(256): unsure at all n locations
cattcctcttgcctatgctctttttacccaacaaggaaacaacgacgttgggtaccaaaacctctttgatgctatgttggattcaatatatgctgctttggagaaagtgggagcgtccaatttgcagatagtggtttctgagagtgggtggccatctgaaggtggagctggagcctcaattgatantgcnggcnntantatgctaatttgatcgtcatgcctcgagtgggnatggaactccaaagaggctggtgag

SEQ ID NO: 292982 - DNA, 267 bp, Glycine max
caagattgttgctgtagaagagaagaaagagattgaagagacccagcagaccgacaaggacagatggaagggtcttgcctatgatatctcagacgaccaacaggacatcacaagaggaaagggtttggttgactcccttttccaagctccacaggatgctggaactcactatgctgtcatgagctcctacgagtaccttagcactggacttcgccagtacttggacaacaacatggatggattttacattgctccagcttttatgga

SEQ ID NO: 292983 - DNA, 270 bp, Glycine max
  unsure (1)..(270): unsure at all n locations
ggttgctcagcttgtgagaagagctgaaagggctggattcaaagccattgcccttactgttgataccccaatactaggacgcagagaagcngatatcaagaacagattcacattgccgccatttttgacattgaagaactttgaaggattggaccttggaaagatggacaaagctgatgactctggacttgcttcatatgtttctggtcaaattgatcgtactttaagctggaaggatgtgaagtggcttcaaacaatcaccaaactgcc

SEQ ID NO: 292984 - DNA, 262 bp, Glycine max
  unsure (1)..(262): unsure at all n locations
gaggcttttgctgagcttaaggtgaaggaactcaagaacggacgattggccatgttctctatgtttggcttctttgttcaggccattgtcaccggaaagggtccattggagaacctcgccgatcaccttgctgaccctgtcaacaacaacgcctgggcctatgccaccaacttcgtccccggaaagtgagcgtcaaagaacgaaatgacttttgagagtttttagatttgngtttggtgaagtacttcagataatctgaatt

SEQ ID NO: 292985 - DNA, 260 bp, Glycine max
ctagaactcaacctggcttcagcaaaggatctcaaagacttgaatatattctcaaagatggatgtatatgctgtgctttcactctccggcgatcaaaagaccaagactcccgtccacagaaacggcggcaccaacccaacatggaattttccggtcaagttcacttttgatgaatcggtggcgcggcagaaccgtttggccctcgaaatcaagatccgctccgagcgcgcctcgccaccgataaggacatcggccaggtc

SEQ ID NO: 292986 - DNA, 259 bp, Glycine max
  unsure (1)..(259): unsure at all n locations
attcaactacagtgtctattttgacacccaagattgcaagtggcagttatggggcatagacagttccataacacatcttcattgcntcgagggtgagcctgaccagaactggaatcatatgcatactgatcaacaatgtgtgcaccttggtaggactagcacttcagagaatggttcatttatttatcctgctgaaaatatgtccatagataacatgtctttcccttctcatggaattcttccacaaggtcaancntac

SEQ ID NO: 292987 - DNA, 256 bp, Glycine max
  unsure (1)..(256): unsure at all n locations
ccgattaccgtgccaggnttcggttgattaatcaggacaagaacaaatataacactccgaaataccgatttgttgttcgctttagcaacaaggacattgttgcacaaataatatctgcnagcattgctggcgatattgttcttgctgcagcatatgcacatgagctgccacgatatggtcttgaagtagggcttacaaattatgctgcagcttattgcactggtctcctgttggcccgaagagtccccaaaacact

SEQ ID NO: 292988 - DNA, 258 bp, Glycine max
  unsure (1)..(258): unsure at all n locations
ataagtaggaattagccttgcttgtctngatccttgtagctctgctncctcacccctcaagggcttgctgatgaatctgattcttactataagccaccagtttacaagaaaccaccagtgtacaagcccaagcccaagccacccattcacaagcccaagccacccgtttacaagcccaagccacccgtttacaagaaacccccttatggtaagtacccaccagttcaagacaacgatcacttctaaaccatgcaacaa

SEQ ID NO: 292989 - DNA, 258 bp, Glycine max
  unsure (1)..(258): unsure at all n locations
actcgttcttcttcttttgttgttctgtgtntgtgtttgtnttttctctcacctgaaaatgtcttgctgcggtggtaactgtggttgcggaagctcctgcaagtgcggcaacggctgcggaggctgcaagatgtacccagacttgagctacactgagtcaaccaccaccgagaccttggtcatgggagtggcacctgttaaggctcaatttgagggtgctgaaatgggtgtgcccgctgagaacgatggctgcaaatg

SEQ ID NO: 292990 - DNA, 266 bp, Glycine max
  unsure (1)..(266): unsure at all n locations
cttttttgcggtaaaggaggtgtctttgctggatgaaggtggccanggaaaacagagcttttttcaacttcagcaggaaatatctcttttgagtaagtttgagcataaaaacatagttcgatattatggctcaaacaaggacaaaagtaaattatatatattccttgagcttatgtcaaaagggtcattggcaagtctctatcaaaagtatcggttaaacgattctcaagtttctgcatacacaaggcagattttatgtggcttga

SEQ ID NO: 292991 - DNA, 264 bp, Glycine max
cgcagatgagcttatcaagaatgccaagtacatagccacacctgggaagggcatcttggcagcagatgagagcactggcaccattgggaagcgcctatcgagcattaacgttgagaacattgaggccaaccgccaagctcttcgcgagcttctcttcaccgctccagatgccctccaatacctctctggtgtcatcctctttgaggaaactctttaccagaaaacctccgatgggaagccttttgttgaggtccttcaagagaa

SEQ ID NO: 292992 - DNA, 262 bp, Glycine max
  unsure (1)..(262): unsure at all n locations
aaaaactgaggctgaactctgcaaatcctgttgcagatgctgngagcattgtatcaaaggctattcgtgatggtgcaattgatgctacattggatcatgccaatggttggatggtgnccaaagaaactggagatatttactccacaaatgagccacncccagccttcaattctcggattgctttctgtcttaacatgcacaatgaggcggttcgagctcttcgttttccaccatacacacacaaagagaaggaaagtgctga

SEQ ID NO: 292993 - DNA, 261 bp, Glycine max
  unsure (1)..(261): unsure at all n locations
gggttgtgaaagcagagaagtgagatacactaagttatcctcataaatacactctaattaggtggcaagataagtgtctaaccttagtaacattgccacatattgtgttcattttggaattgtgccactaaaattctattcaattcatctanggcngcctcttcttatgctatgcaatcaatcctggcaaaccctttgatccgcatttccagcgggtctagggtgnaccattttggcgttcctgctttgcacatgagaagg

SEQ ID NO: 292994 - DNA, 262 bp, Glycine max
  unsure (1)..(262): unsure at all n locations
ggtgaactcncaagccacagctgntgagaaantggagcagataacagcttctctgggaacatcatcatcctgntggcatcccatcatcagaagcctcagacaggatcaaagctggtttcattcacttcaagaaggagaaatatgacaagaatccagctttgtatggtgaacttgccaaaggccagagccccaagtttatggtgtttgcttgctcagactcaagggtgtgccnatctcatgtgctagatttccaaccaggaga

SEQ ID NO: 292995 - DNA, 256 bp, Glycine max
  unsure (1)..(256): unsure at all n locations
attgaagttgaagtcttgcccttctctcttcaactccaaacacaaganatcaacgatccatggctnnntccgtctccactgtcggagctgtcaacagagctcttttgaacctgaatgggtnggggacctggggtttcagctcccagttcatccttctttgggagcagcttgaagaaggttattggctcaagggtccccaacacaaagatttnntctggaagcttcaagattgttgctgtaggcgagaagaaagaga

SEQ ID NO: 292996 - DNA, 253 bp, Glycine max
agtcagatgaggttctggtgaagtcatctttcctggctgaattacagcgccgggtacttaaggcagaagcttccctgagagagaaagaagaggaaaatgacattcttcaccaacgccttcaacagtatgagaacagatggtctgaatatgaattaaagatgaaatccatggaagaagtatggcagaaacaaatgaggtctctacagtctagcctctctattgcaaagaagagccttgctatggatgattctga

SEQ ID NO: 292997 - DNA, 190 bp, Glycine max
  unsure (1)..(190): unsure at all n locations
acnagacccttacccttctctatcgctcgctttcctttgacgcttctgacccttgctttgtctgcgtcnnnnnnnnnnnnnnnnnnnnnnnnnnnnnnnncgtaatggctctcccagactcttcttcccgtcgcaactccctgatcccctccttcatctactcctcttcctccaaaacgctccctcccca

SEQ ID NO: 292998 - DNA, 259 bp, Glycine max
  unsure (1)..(259): unsure at all n locations
gactattnccgatggtgcagtggtantatngggaaatatgctgcaggagaantcaagcntccatcaaccgcntcttnnccgtggttctgggaagnatcctcaanttgtgccttcaactccaagatnggctnttgcnaatggtgctggtgttatattaagtgtttgtgatgatgaagttgctcgcaatgagactgctactttaacannanctgctgtncctgcgcttttcgcttncncnananannanattatngnncna

SEQ ID NO: 292999 - DNA, 254 bp, Glycine max
  unsure (1)..(254): unsure at all n locations
tcttaactcaacttctgctacccactctcttcttccaagtccaaccacgcttttctctacagtcatgggcaaggtcaagatcggaatcaacggatttggaagaattggccgtttggttgccagagtcgctctgcaaagagacgatgtggagctcgttgccgttaacgaccctttcattaccaccgattacatgacatanctgtttaaatacgacagtgttcacggacactggaagcatcacgatgtcaccgtta

SEQ ID NO: 293000 - DNA, 252 bp, Glycine max
  unsure (1)..(252): unsure at all n locations
ttgaattttgattctagcaagcagagcttttgtcaattttctattgaccttctcggtggaggaattttagtggncaaaactggagattggatcacacttatacaaaattctccaattagtaacttgttgagagttgctgcttggaagaaaggctgtttaatggttaaaattgngatgtctgggaatgcagcagtcaaaaggagtgattgggcctcattggtacaagtgtttttaacnaacagcaacagtaca

SEQ ID NO: 293001 - DNA, 251 bp, Glycine max
  unsure (1)..(251): unsure at all n locations
atccanctaatcctggacnatcanccccttcacctgtgnagccancanatgtctgtgacaactactacagctgtgctgatagtnctacttgtcgctgtattnncgagttcggaaatgcttgctttgagtggggttgctgtcctcttgagggtgctacctgctgtgatgaccactacagtngctgccctaangactatcccatctgcaacacttatgctggaattgtctcaagngnaatnacaacccattcg

SEQ ID NO: 293002 - DNA, 253 bp, Glycine max
ggttcctgttttggaaacgcccgatggtccagtctttgagagcaatgcaatcgctcgttacgttgctcgactaaagggtgacaacgctttgttctcatcttctgccattgataatgcccacattgaccagtggattgatttttcatccttggagatcgatgctaatctcatgaaattgctcctaccaagacttggatttgccccataccttcctccagttgaggagggtgcaaattctgcgttgaagagagca

SEQ ID NO: 293003 - DNA, 254 bp, Glycine max
  unsure (1)..(254): unsure at all n locations
aaaggggttagggtttgttcttgtgatcgaagctaagcgaagaaaatgggtggatcagtgagggacgtgaagtcgaagggcgaggtcgacgaggtggtggcgagtngctctncggttatcctccacttctgggcgtcgtggtgcgaactttccaagcacatggaccaactcttctctcacctttccactgatttccccaacgcccgcttcttaagggtcgaggccgaagagcaacccgagatttctgaggctta

SEQ ID NO: 293004 - DNA, 266 bp, Glycine max
  unsure (1)..(266): unsure at all n locations
cttcacttnacaaacagncanncgtttcagctccatngtnttctcaaganggaccntaaaacagtcatgggtaccattattangaacatnnnctcnactctnngtgcttgtggcgacctaaacaggaatgtncttgctcctncanctccccttgcaaganaagattacctctttnctcaacaaactgctgagaacattgctgcnctcctcgctcctcagtctggtttctactatgatatttgggtggatggggnnaagattttgcc

SEQ ID NO: 293005 - DNA, 269 bp, Glycine max
  unsure (1)..(269): unsure at all n locations
gtgtatttccctacctctcccttcaagatgcagatcttcgtcaagaccctcaccggcaagaccatcacccttgaggtggaaagctctgacaccatcgacaacgtcaaggccaagatccaggacaaggaaggaatccccccggaccagcaacgtctcattttcgccggaaagcaatttgaggangggcggaaccctttggnngantaaaatttcanaagggagagtantttnaactngtcctcgtctccgngggnggnntnnaanntttt

SEQ ID NO: 293006 - DNA, 266 bp, Glycine max
  unsure (1)..(266): unsure at all n locations
aacaatgaggactaccgttctccagcaattccagctatgaccaaaacactgcttgaggncntcaagaagattttcaagaccataactggaatcccatttctcatccctacaactggtactggtgcttgggagagtgctctcacaaacacactgctctcctggggatcnaattgtatctttcctgattggccaattcagcttgctttggattgatcagcagcaacgcctgaaattcaatgttgatgttgtagagagtgaatggggcc

SEQ ID NO: 293007 - DNA, 265 bp, Glycine max
  unsure (1)..(265): unsure at all n locations
tttgtngtntgcttgtncagtaccctggcactgagggagaggttttggactatggagagtttgtgaagaangctcatgctcatgaggtgaaggttgttatggcaagtgatttgttggcactgactgtgttgaagcctcctggggantttggggcagatattgttgttggctcggctcagagnttcggggtgcccaanggggtatgnngggcnccntgcagcttcctnggccattaccaanntnncanaaggnnnnngcncggnnc

SEQ ID NO: 293008 - DNA, 270 bp, Glycine max
  unsure (1)..(270): unsure at all n locations
ccgcagacttgatcangaagggaaagatgtgtgctctcttcatcaacgatcttgatgcaggagctggtcgtcttggtggaaccacccaatacactgtcaacaaccagatggtgaatgccaccctcatgaacattgctgataaccccaccaatgtgcagcttcctggtatgtataacaaggaagagaatccccgtgtgcccatcatcgtcaccggtaacgatttctccacactctatgcgcctctcatccgtgatgggcgtatggagaagt

SEQ ID NO: 293009 - DNA, 265 bp, Glycine max
  unsure (1)..(265): unsure at all n locations
tttagttgaggaggtggatgggcatacagcagttctttatcaccgacttcagctagactggttcccaatgtttgtgtggcctcntgatctttgttatgtgcgatactggcgccgaaatgatgatggaagtnatgttgttttatttcgctctagggaacatgcaaactgtggtccacagccagtctgtgttcgggcacatatngaangnggaggttnaaataccccccnaaannacnngggggggnccnccangcntntttttttt

SEQ ID NO: 293010 - DNA, 272 bp, Glycine max
  unsure (1)..(272): unsure at all n locations
agcgtgtagttcttggatttttattctggcaggcaaagcaaccagctcgggttctntcagtcctaaaaagtgtgtatataaattcttccaatgtggatgactatcttgnggaatctataacaaggccagctcaagatccaaatgccggagaagtctactacaggttnacgacgcgcttcatgatgaatcagagcaagtacactcaaatggcnggctaagngaacnccnaggccggttgnncctgtgggggggtccccccnccngggggtncc

SEQ ID NO: 293011 - DNA, 270 bp, Glycine max
  unsure (1)..(270): unsure at all n locations
tctggtgttggtgttgacagtgttggngaagaagcttgtgaactcaaaagatggacctccaacctttgagcagcccaagatgactctggagaagctctcgctgtatggtaacatgcttgtccaagaacaagagaatgtcaagagagtccaattggctgacaagtacttgaacgaggctgctcttggaaatgctaacgaggatgctattcagaggggaactttcttccagtcttgaattggaggcaaagcaaacttggcaagtaaatattt

SEQ ID NO: 293012 - DNA, 262 bp, Glycine max
gtggtatgtaataataagtgtattattgtcacagatattggtgtgatgagtggagcagccttgtacataaaaagggacctgaaagtgtcggatgtgcaaatcgagatcctgctcggaatcatcaacctctactctctgataggctcatgcctcgccggcagaacctccgactggataggtcggcgttacacgattgttttcgccggcgccatcttctttgtcggagcacttctcatgggtttctcccccaactattcctttc

SEQ ID NO: 293013 - DNA, 268 bp, Glycine max
  unsure (1)..(268): unsure at all n locations
catcatgatgagtgctggagagttggaaagtggaaatgcaggagagccagcaaaactgatncaggcagagataccgtgaagctgcagacatgatcaagaagggaaagatgtgcgctctcttcatcaacgatcttgatgcaggagctggtcgtcttggtggaaccacacaatacactgtgaacaaccagatggtgaatgccactctcatgaacattgctgataaccccaccaatgtgcagcttccaggnatgtacaacaaggaagagaa

SEQ ID NO: 293014 - DNA, 261 bp, Glycine max
  unsure (1)..(261): unsure at all n locations
ctgcnatgcatgtgggagctatagaaattatgntngatagtttcgnaagtgcctgacngnaacatagtnggtgcaatgcttntggttgatacttatcatacnaatcntgnnaatgcagttcgtagtatttttgttgcgcctttcagaggcggaaggccnattcgggtggttacatttccgaatagnatcgtgcaggattgaaccaganatgaattnaaggtttcagcttttgagtagcagtagnaaggtggattttgttna

SEQ ID NO: 293015 - DNA, 264 bp, Glycine max
  unsure (1)..(264): unsure at all n locations
ttnnatctcagaattntcnanaagagatctttttctgntctntgaagaaagangggtctttgcttgattttngagatgtctctgntctcagatctcatcaaccttaacctctccgataccaccgagaaggtgatcgcagagtacatatggatcggtggatcaggaatggacctnaggngcaaagcaaggactctcccaggaccagttagngacccttcagagcttcccaagtggaatatgatggttccagcacaggtcaanctc

SEQ ID NO: 293016 - DNA, 268 bp, Glycine max
  unsure (1)..(268): unsure at all n locations
aggagatggccagactttacttccaacaactcatctctncctgtggacttctgccacagccgcggcgtctaccaccgtgacctcaagccagagaaccttctcctcgacgacgacggcaacctcaaggtcaccgacttcggcctcagcactttctccgancacctccggcacgacggcctnnnagcacactacgtgcggcacgccggcctatgtcgcgcccaagntnttnggnaaaaggttnnggggnnaagggntnttttttttttgg

SEQ ID NO: 293017 - DNA, 265 bp, Glycine max
  unsure (1)..(265): unsure at all n locations
ccttgagttaaaaaatggcagcagcttcttccatggctctctcatccccatccttggctggcaaggccgtgaagctgggcccattcagccccagaagtgggaagggtgagcatgaggaagaccgtcaccaagcaggtctcctcaggaagcccatggtacggcccagaccgagtcaagtacttgggcccattctctggcgagcccccgtcctacctaaccggtgagttcccaggcgatacggcgggncctgntgggcnnncnnacc

SEQ ID NO: 293018 - DNA, 264 bp, Glycine max
  unsure (1)..(264): unsure at all n locations
ctctctgttactggaagttcaacacttttgatgcacncaagtttcctatgatttctaaccagttgttcacggccagtggacataaatatgacaccaccaagancttaacccctgagtatgtccttaatgttgatgcatacaacaagtacagcaagttataccttagccctctgtttgcattatctattggatcaggttttgcaagatttacggcaaccctcactcagnggcccntttnagggnaannttnngnnnnnnnnnnnc

SEQ ID NO: 293019 - DNA, 264 bp, Glycine max
  unsure (1)..(264): unsure at all n locations
gggaaactgactttcccccagggcacttcccgaagtgttaagagaatgcctctttctatagggggaggagctggtgcaaagaatgctattctcatgaatatgccaaatgctgttctttcaatgtggagatattttgttggagatctcgtctttgaagtttctncgatgacttctccctacattaaatgtacagtctctttcttcatagcatttggaaattggctgatgacaccatcattttgaggctttccccacaagctggtg

SEQ ID NO: 293020 - DNA, 269 bp, Glycine max
  unsure (1)..(269): unsure at all n locations
ctatatagcataaacatttgantcttcattgcacaatgtcaacctcttccataaacgggtggtgcctctcttccatctccccagccaaaacctctctcaggaaggccacattacgcccttccgtcttcgcaacccttaacactccttcttctccttcctcttcatcttccttcccctctctcattcaagacaggcctgtttttgctgcccctgcncccatcatcaccccaactgtgagagaggatatggcaaaggaatacgagaaagct

SEQ ID NO: 293021 - DNA, 260 bp, Glycine max
  unsure (1)..(260): unsure at all n locations
tctcttcaggaaatgtatggagccggtggagaaatgtttganggatgctaagatggacaaaagaagtgttgatgatgttgtccacgntggtggttctaccagaattcccaaggttcaacaactgctgcaggacttctttaatgnaaaagagctttgcaagagcattaatcccgatgaggctgttgcatatggtgcggctgttcaggctgcaatcttaagtggtgagggcaatgagaaggttcaggatcttctcctcctgg

SEQ ID NO: 293022 - DNA, 269 bp, Glycine max
  unsure (1)..(269): unsure at all n locations
acaatctctcttgaatatgtgggagagattgctggtaatcctgtaattgctcctcatcttcacaagttccatggtataataaatngaatcgaacccagatatatgggacccatataatgataaattcattcccgtatcatactcttcagaaaatgttgttgaaggaaaaagagcttcgaaggaaaccttgcaacaaggcttagtttaaaaaaagctgatcttcctttagtgggaattattactcgattgactcatcagaaaggaatcca

SEQ ID NO: 293023 - DNA, 269 bp, Glycine max
  unsure (1)..(269): unsure at all n locations
cacaacaacactctctcttctcgctcttggcttttcgctcttcactcactctcattcattcatttccacagaacatanaacagntaaagcgtgtggggtaacacgcccttggcgancggtggatcccgagntccatgacctcatcgagaaggagaagcgccgtcaatgccgcggaatcgagctcatcgcctccgagaactccacctccttcgccgtcatcgaggccctcggcagcgctctcacgaacaaatactccgagggcatgccgg

SEQ ID NO: 293024 - DNA, 260 bp, Glycine max
  unsure (1)..(260): unsure at all n locations
cntaattccaagattttnagaatgtctagctgtgggtgtggaagtngctgcaactgtngcagcaactgcggttgcaacaagtactcttttgacttgagctatgttgagaagacaaccacagagactcttgttttgggtgttgggtctgtgaaggcccaattggaggntgctgaaatgggtnnngcagctgagaacggtggctgcaactgtggatcaagctgcacctgcgacccatgcaactgcaagtnaggtcaagattt

SEQ ID NO: 293025 - DNA, 266 bp, Glycine max
  unsure (1)..(266): unsure at all n locations
ccgctttcttcacacccctccangatttcactcaagccagaacaaccccatcaccccctttgcctttcatcaaatcctcctttgcttcctccaagtcaaccttttttcaccctgccctttccctacaaacctcttccaactttcccaggctttttggaaagcctaagtttttctctgttcatgcaagggctgccacagaaaaaaccatttatgattttactgtcaaggatattgacagaaaggatgtttctcttagcaagtttaag

SEQ ID NO: 293026 - DNA, 264 bp, Glycine max
  unsure (1)..(264): unsure at all n locations
cttcgcttgnaccnccaggcanacgtttcagctccatggtgttctcnagaaggaccttaaaacngtcatgggtaccattattaggaacatgggctcgactcttggtgcttgtcgcgacctaaacaggaatgtgcttgctcctgcagctccccttgcaaganaagattacctctttgctcaacaaactgctgagaacattgctgcgctcctcgctcctcagtctggtttctactatgatatttgggtggatggggaaaagatttt

SEQ ID NO: 293027 - DNA, 256 bp, Glycine max
  unsure (1)..(256): unsure at all n locations
gcaattgaagttaaaagccttagccttccctacaactccaaacangaagacatannaatccatggctgcctccgtctccactgtcggagcngtcaacagancncttttgaacctgaatggttctggagctggagcttcagctcccagttcagccttctttgggaccagcttgaagaaggttattgctcaagggtccccaacagcaaggtttccggtggaagcttcaagattgttgctgtagaagagaagaaagaga

SEQ ID NO: 293028 - DNA, 259 bp, Glycine max
  unsure (1)..(259): unsure at all n locations
cntggggaggccgcccagagaacgtgaaggcagcacaagatgcactcgcattccgtgccaagtccaactcactcgctcagcttgggaagtacactggtgagggtgaatccgaggaagccaagaaggagttgttcgtcaaaagctactcctactaagatgtttgcagtgaatatgatacttgttaggcagcaacaccagcagttacagtaggtgttgacggacgatgaagtggaagactaatttgtctaaaatgtaatgt

SEQ ID NO: 293029 - DNA, 261 bp, Glycine max
  unsure (1)..(261): unsure at all n locations
cnggaagggtagtttccatcagagctcaagtcaccactgaggctccagccaaggttgaaaaagagtccaagaanncaggatgaaggtgtggttgtnaacaagttcaaacccaagacccctcacgttggtagatgcctgctcaacacaaagatcactggggatgatgctccaggagaaacttggcacatggtcttcagcaccgagggagagattccttacagagaaggacaatcaattggggtaattcctgatggtgttgac

SEQ ID NO: 293030 - DNA, 262 bp, Glycine max
  unsure (1)..(262): unsure at all n locations
cncgtgtactttcttgcgaaacagaagggcgaaggggcanacacaacttttttgtttttttgtagagcgagacaganaaaaatgttggggatcttcagcagttccgtggtgtcgccgccggangagctggtggctgccggcagcagancnccgtcgccgaagacgacggcggggaagctgctgaaccggtcgtggagaacaaggcgtcggcggtgtcgctgcaggtgggagaacacgtgcagttggcttacacgcaccacaa

SEQ ID NO: 293031 - DNA, 266 bp, Glycine max
  unsure (1)..(266): unsure at all n locations
tctatcncttgtttcaatttcaacaacggtnacctccnttttcgttttgantttcaatcaagccatcatcatgtctancgcatcgcaacccaaggccaagaaaacggcgtcgtccaagaagcccctctcccaccctcccttcgccgtgatgatagcagaggcgattgcnagtctgaaaganagaaccggttcagccaatacgcgataaccaaatacatcgaagggaagcacaaggngttgcctgcnacctacaagaagcttgtcct

SEQ ID NO: 293032 - DNA, 263 bp, Glycine max
  unsure (1)..(263): unsure at all n locations
cggcggcaacagggagagaagatgaagttcaatccacgtgtgtcgagcagccgccgcaaganccgaaaggctcatttcacggcgccgtcgagcgtgcggcgggtgcttatgagcgcccctccntcngcggagtgcggtccaagtacaacgtgaggtcgatcccagtacggaaggaggacgaggtgcaggtggtgcgaggaacatacaaggntcgcgaggggaaggtgactcaggtctaccgtcgaaagtgggtgattcacatt

SEQ ID NO: 293033 - DNA, 258 bp, Glycine max
  unsure (1)..(258): unsure at all n locations
aactcgccactgtatttgtaagtggcacattttgagagaaggtcaagaaagattggctcatatttaccttgctcatccttcattctatgggganctatacagctgtatcaatttttctgagactaccgaggattttgaatcancatggaagtctcttctggatanntatgatcttcagannnatgagtggcttcaagcngtgtataatgctcgcnaanaatgggcccctntttactttcatgatactntctttgctgc

SEQ ID NO: 293034 - DNA, 261 bp, Glycine max
  unsure (1)..(261): unsure at all n locations
ctagtttcttacaagcctctactatactgcttcaccttctgctctagaaaattcagtgctgaaacatggcttcggctactctctctgtagccaaaccagcccttcaggcaaatgggaaaggcttctctgaattctctggcctccgaagctcatcaggcttccttcccttttctagaaaatcttcagaggatttccattctgtcattgccttccagacctatgcagttggnagcagtggaggatacaanaagggtgtgacag

SEQ ID NO: 293035 - DNA, 263 bp, Glycine max
  unsure (1)..(263): unsure at all n locations
ccantgccatgtttgtngtcccattatgtgtaatcgttgcttggataatgggtatcaatatggacatgaacttcaacctcttagagacaggttcccttgctttggcaataatagtcacaggcttcactttacaggatggaacttctcactacatgaaaggccttgttctcctgctgtgctacattgttatggggcatgcttcttcgtacaaagaacaccctttaataaccaagctgatgttactaacatcacacttaaaccag

SEQ ID NO: 293036 - DNA, 262 bp, Glycine max
  unsure (1)..(262): unsure at all n locations
acnngatgcatcctctgacaatgatgagaagaaaggtcaatattctaagttctggaatgagtttggtaaatccattaaacttggtatcatcgaggatgccaccaacaganatcgtttggcaaaactgctcagatttgagagcaccaagtctgagggtaaattgacatctcnggatcagtacatatctagatgaaaactgggcagaaggatatcttttacataactggaaccagcaaagaacaactggaaaactctcccttcc

SEQ ID NO: 293037 - DNA, 256 bp, Glycine max
  unsure (1)..(256): unsure at all n locations
cnacgcaggactgaatgaactaatggagtctaaaggtgggaaaaagaagtcnnnnnnnnnnnnnnnnnaatcattgttctacgaagctcccctcggatacagcattgaagacgttagaccaaacggtggaatcaagaaattcagatctgctgcttactccaactgcgctcgcaaaccttcctgattccatccagattgatagttcattgcatgcaaccatagttttattaggttttttcttctttgtnttcaatta

SEQ ID NO: 293038 - DNA, 219 bp, Glycine max
aacagaagaacaaccaccaccacacacaatgggtcgcgtgagaacaaaaacggtgaagaaatcctcccgccaggtgattgagcgttactactcgcgcatgaccctcgacttccacacaaacaaaaagcttctcgaagaagtggccatcatcccttccaagaggctgcggaacaagatcgcgggtttctccacgcatctcatgaagcgcatccagaaggg

SEQ ID NO: 293039 - DNA, 258 bp, Glycine max
  unsure (1)..(258): unsure at all n locations
cngtaactctttcttttcttttctntctttctccgatcgcatcgctcgcaaccacaatcatgccttcccgaagaagaactctcttgaaggtcatcattctcggtgacagcggggtngnngaagacgtctttgatgaaccagnatgtgaataagaagtttagtaatcagtacaaggcaaccattggagcggattntttaaccaaagaagtgcaatttgaagataggcttttcaccttacagatttgggatacagctggc

SEQ ID NO: 293040 - DNA, 273 bp, Glycine max
  unsure (1)..(273): unsure at all n locations
tctcagaggatgtgcagccacctgttgaaggaacgactcttatagcagtctatgttggtttggccattggaagttctttctgcatccttgccagagcgntacttcttgtcacagctggtataaaacagctactatactcttcaataaaatgcacttctgcattttccgtgctccaatgtcatttttcgattccactccaagtggacgantccttaacagagcttcaatgatcaaagtgcatggatacaacattccttatcaaatgcatcgttt

SEQ ID NO: 293041 - DNA, 284 bp, Glycine max
  unsure (1)..(284): unsure at all n locations
gtccttcgagatggctcgtacgaagcaaaccgctcgtaagtcccacaggaggncaggctcctaggangcagcttgcaaccaaggctgcacgtaagtctgcaccaactactggtggtnngaaaagccccaccgttatcgtcctggtaccgttgctcttcgtgagattaggnaataccanaagagtaccgagcttttgatccggaagctccccttcccagaggctggttcgtgaaattgctcaggacttcaagactgactgcgtttccagagccacgccgtgcttg

SEQ ID NO: 293042 - DNA, 281 bp, Glycine max
  unsure (1)..(281): unsure at all n locations
gggatttgccaggtgatttggagcaagagagatacttctttagcaccaaagtggccaaatatcccaacggaaatcgctccaacagagccacaaattcgggttattggaaggcaactggctggacaaacaaattgttacttcaaaaggcaacaaccaagttgtcggaatgaagaagacacttgttttctacagaggcaagcctccttnccggatccagaatgattggatccatgcacgagtatcgcctcatcttacgcctctccagtctcagagccatgttg

SEQ ID NO: 293043 - DNA, 277 bp, Glycine max
  unsure (1)..(277): unsure at all n locations
gcctgagcggggcnnacangaggaaactctggtggangcncgcagcgatanncgacgtcnnnaatcgttcgtctgacttgggtataggggcgaaagactaatccgaaccgtctagtagctgttccctccgaagtttccctcaggatagctggannccgcgggcganntctatcgggtaaagccantgattagaggcatccnggggcgcaacgncctcgacctattctcaaactttaaataggtaggacggtcggctgctatgttgagccgcgccatg

SEQ ID NO: 293044 - DNA, 279 bp, Glycine max
  unsure (1)..(279): unsure at all n locations
gaaaaaaggagagtgcttagagagagagcaaaacatattattttcattttcatcttnncttgagtatcaacaaatggcaaccactgtgatgaccactctcccccaattcagtggtcttagccccaattctcagctgcccctgtgaagaacttggttgctgtgcaacccatgagtcgcaaggggaagggtgcattgggagctcgatgtgactacattggttcatccactaatctgattatggtggcttctacaacctgatgctgtttgctggaaggtttg

SEQ ID NO: 293045 - DNA, 280 bp, Glycine max
  unsure (1)..(280): unsure at all n locations
ggtggacagggtcagtttgcagatatcactgtccggtttgaacccatggacccaggtagtggatatgagttcaagagtgaaatcaaaggaggtgctgtaccaagagaatacattcctggtggatgaaaggattggnagagtgtatgagcaatggtgtgcttgctggctttccggtcgttgatgtacgagcagtactcacagatggttcttaccatgatgtagattcaagcgtgttggctttccagttggcagcaaaggagcttttagggaaggaataaga

SEQ ID NO: 293046 - DNA, 282 bp, Glycine max
caaagaaagaggcaaacaaggagccagaaaagcccaaagaagaagcagaagaggaggctcccaagcctaaagccaagaatccccttgatcttctccctccaagtccgatgatactggatgagggaaaagactctactcaaacactaaaaccaacttcagggaggttgctatcaaaggattttgggacatgtatgatcccgagggatactctctctggttttgtgattacaaatacaatcaggagaatactgtttctttgtgacttgaacaaggttggtggat

SEQ ID NO: 293047 - DNA, 271 bp, Glycine max
  unsure (1)..(271): unsure at all n locations
ctcttctctgtcgtgagcttccatggtgagggttagtgtgctgaacgatgctctgaagagcatgtacaatgctgagaaaaggggaaagcgccaagtcatgattaggccatccntaaagtcattatcaaattccttttggtgatgcaaaagcacggatacatcggagagtttgagtatgttgatgaccacagggctggtaaaatcgtggttgaattgaacggtagactgaacaagtgtggggttatcagtccccgttttgatgtgggcgtca

SEQ ID NO: 293048 - DNA, 266 bp, Glycine max
  unsure (1)..(266): unsure at all n locations
acacattgtctatcattgacagtggtattggcatgactaaggccggtaagattaaatattttgttaagttttattgagattatcgctgactgtgcatactagtctgttttcttaatgcttgtgcgatctatgttccagatttggtgaataacctcggtactattgcaaggtctgggaccaaggaattcatggnagccctggctgctggtgctgatgtgagcatgatggacagtttggtgttgtttctactcggcttatcttgtagt

SEQ ID NO: 293049 - DNA, 275 bp, Glycine max
  unsure (1)..(275): unsure at all n locations
caataatgctattgnttttnnttgttccnntttctccccaaggtttaccatagcatctgcatgatganacgaatgcaaaaagtcacaggctacatctttggcactatttggtggggnttggtctcaatctcatagcttattttattgcttctcatgttgctggagggtgctggtatgtccttgcaattcaacgtgttgcatcctgcctccggcagcnncgtgagagaactaatggatgcaatctttctggtcatgctcagaggagatatgctacc

SEQ ID NO: 293050 - DNA, 276 bp, Glycine max
  unsure (1)..(276): unsure at all n locations
ggccaagtcagntcctatggttgtntgtaccattgaggagtctggtgaacacattgttgctggtgcaggagagcttcatcttgagatctgtttgaaggacttgcaggatgatttcatggtggagctgagatcattaaatctgaccctgttgtgtcattcagggagactgtcctggagagatcatgccgcactgtgatgagcaaatcacccaacaagcacaatcgtctgtacatggaagcnagaccattggaggaaggtcttgccgaggccatgacg

SEQ ID NO: 293051 - DNA, 280 bp, Glycine max
  unsure (1)..(280): unsure at all n locations
gggctgcgcttgattgttgacaaggaagaagactgttacaaggccttgacagtagttcatcgattgtngtctgaggtgcctggaaagctgaaagattacatatgtcgtcccaagttcaatgatatcaatctctgcatactgtggtgatgggtgaaggcaaggttccccttgaagtacaaattcggaccaaagatatgcatttgcaagcagattttggatttgctgctcatggagatacaaggaagatgattgtcagcatcttcgtttgtgcttcagatgg

SEQ ID NO: 293052 - DNA, 282 bp, Glycine max
  unsure (1)..(282): unsure at all n locations
ctgatataagtcacatggacaccggcgctnctgttcgaggatttttggggcagcagcagcttgaggatgcacttataggcatggacttggtgatcatccctgctggtgttcctcgtaaactggaatgacaagagatgatctcttcaatataaatgctggaattgttaaaacattgtgtgaagcaattgcaaagtgctgtcctaaagccattgtcaatgtgataagcaatccagttaactccacagtcccgattgcagccgaagttttcaaaagagctggtac

SEQ ID NO: 293053 - DNA, 270 bp, Glycine max
  unsure (1)..(270): unsure at all n locations
gcaatctctcttgaatatgtgggagagattgctggtaatcctgtaattgctcctcatcttcacaagttccatggtataataaatggaatcgacccagatatatgggacccatatatgataaattcattcccgtatcatactcttcagaaaatgttgttgaaggaaaaagagcttcgaaggaaaccttgcaacaaaggcttagtttaaaaaaagctgatcttccttagtgggaattatactcgattgactcatcaganaggatccatctca

SEQ ID NO: 293054 - DNA, 268 bp, Glycine max
gggaacagactattaaccagcttctgacggagatggatggcttttctggcaattctggtgttattgttttggctgccactaacagaccggatgttcttgattcggcgttgttaggcctggccggttcgacaggcaagttactgtggatagacctgatgttgccggcagagttaaaattcttcaggtgcattctagaggaaaagcacttgcaaaggatgttgactttgaaaaaattgcaaggaaacccctggattcactggggctgatc

SEQ ID NO: 293055 - DNA, 273 bp, Glycine max
  unsure (1)..(273): unsure at all n locations
atctcttcaggaaatgtatggagccggtggagaaatgtttgagggcnngctaagcnncgacaaaagaagtgttgatgatgttgtccttgttggtggttctaccagaattcccaagttcaacaactgctgcaggacttctttaatggaaaagagctttgcaagagcattaatcccgatgaggctgttgcanatggtgcggctgttcaggctgcaatcnttnancggtgncggcaatgagaaggttcaggatnttctcctcctggatgtcacccc

SEQ ID NO: 293056 - DNA, 272 bp, Glycine max
  unsure (1)..(272): unsure at all n locations
tggggatcgaattgtatcgttcctgattggccaattcagcttgctttggattgatcagcagcaacgcctgaagttcaatgttgatgttgttgagagtgaatggggccatggtgcaagcttgatgttctgganncaaagattgcttcagatacttcacacactancaaggcaatttgcattgttcacaatgagactgcaactggggtcaccaatgacttggccaaagtgagacaaattcttgattctaccagcatccagccctccttattgtt

SEQ ID NO: 293057 - DNA, 273 bp, Glycine max
  unsure (1)..(273): unsure at all n locations
gatcctggaagatggaagactaacagacagtaagggcagaacagtggatttncagaacacacttcttataatgacatcaaatgttggaagcagtgtgattgagaaaggaggccgcaaattggatttgatctggattacgatgagaaggatagcagttataacagaatcaagagcctggtaactgaggagctaaaacaatacttcaggccagaatttttgnatagattggatgantgattgtcttcagcagctcacaaaactggaggtgaagga

SEQ ID NO: 293058 - DNA, 287 bp, Glycine max
gtgacagttgatgttccagatataaggggaaggactgaaatcctaaaggttcatgctagcaacaaaaagtttgatgctgatgtttctcttgaagtgattgcaatgagaacacctggctttagtgagctgatcttgcgaatctgttgaatgaagctgctatattagctggtcgccgtggaaagacagctatttcatctaaagaaattgatgattctattgataggattgtggctggaatggaaggaacagtgatgacagatggaagagcaaaagtttagtggcatatc

SEQ ID NO: 293059 - DNA, 276 bp, Glycine max
  unsure (1)..(276): unsure at all n locations
tncttggatttgtaggttccactatntgagagnncgcnatgagagattgctngatgctatatgtgaganantgaaaccgtgnttattnacggacannacttacatgttcgggaaggagatcctgttgatgagatgctgttcatcatacgtggtcgcctgagagtgttaccacagatggtgggaggagtggatttttcaaccgcggttttctanaagaggctgactcngtggggacgagcttttaactgggccctggatcccaaatctggntcnaat

SEQ ID NO: 293060 - DNA, 252 bp, Glycine max
  unsure (1)..(252): unsure at all n locations
ccttagccgttgctctgcttcaacattgcggaagcagaagaagcgccgcagctatngtgaagtactccagagaacccgacaatcccaccaagtcctgcaaggccagngcgctgacctcagagttcattttaagancactaggganactgcctttgccatcaggaagttgccccttgttaaagtaaacgatacttagaggatgttttngcccacaaacaggctattcctttcgacgtttngtggnngnttggg

SEQ ID NO: 293061 - DNA, 236 bp, Glycine max
  unsure (1)..(236): unsure at all n locations
gcgctttctgcaaaccnaacatttcatctcccaaagggatcaacaggtcgaaggagaaaggggctgacattcacgaagcttttcagccggcttttcgcgaagaaggaaatgcgaattctgatggttggtcttgatgctgctggtaagaccactancctctacaagctcaagctcgnanagatcgttcactacaattccctaccattggtgagttgctaaatttccctcttttnctc

SEQ ID NO: 293062 - DNA, 283 bp, Glycine max
  unsure (1)..(283): unsure at all n locations
caaatttctgccctatcaactttcgatggtaggatagtggcctaccatggtggtgacgggtgacggagaattagggttcgattccggagagggagcctgananacgctaccacatccaaggaaggcantaggcgcgcaaattacccaatcctgacacggggaggtagtgnccaataaataacantanccaggcttattatntggctcgcccttccccaattgataaggcccccactaagataaatngcnaagttaatangtggggtgaagatatngntncnnt

SEQ ID NO: 293063 - DNA, 279 bp, Glycine max
  unsure (1)..(279): unsure at all n locations
aggtcatccgtaagaacttggtcaagangtgncttgagctcttctttganattncagagaacaaggnggattacaacaagttctatgnggctttctctnaganttaaagcttggtatccatgaggattcccagaacaagggaaagattgctgaattgctcaggtaccactccaccaagagtggtgatgagctgacaagcctcaaggattatgtgaccaggatgaanganggtcagagtgacatctactacatcaccggtgaaagcaagaaggctgttgt

SEQ ID NO: 293064 - DNA, 279 bp, Glycine max
  unsure (1)..(279): unsure at all n locations
gancntgcntaacatcaaggttcctctcattnttggtanntggggaggtaaaggtcaaggaaantccttccaattgcgagctcntctttgccaagatgggaataaccccatcatgatgagtgttggagagttngaaagtgganatgcaggagagccagcaaagttgatanggcaanggtaccgtgaagctgntgatataatcagcaaggggaagatgtgctgtctttccataaacgatcttngatggcangagctggtcgtcttngtggancactcatt

SEQ ID NO: 293065 - DNA, 281 bp, Glycine max
  unsure (1)..(281): unsure at all n locations
accncgtgaaattctctgtcaacgaatcgctggcgaaggaaaatcgtttatctcttgagatcaagctncatctccgaccgcaccctcggcgacaccgtcatcggcccgtccatgttcctctcagggaactcctggataaccccggcgatgacagctccttccgccaagtcagttatcaggtgatgaagcaatcaagaaaatccaagggatccttgaatttctcctacaaattcggcgaacatgttcccgccccggcngccaagacacccaaagcggccaag

SEQ ID NO: 293066 - DNA, 271 bp, Glycine max
  unsure (1)..(271): unsure at all n locations
tggggatcgaattgtatcgttcctgattggccaattcagcttgctttggattgatcagcagcaacgcctgaagttcaatgttgatgttgttgagagtgaatgggccatggtgctaagcttgatgttctggaatcaaagattgcttcagatacttcacacantataaaggcnctttgcattgttcacaatgagactgcaactggggtcaccatgnttggccaanntgagacannttcnggatncctacngcnncnncccccttcatgtggag

SEQ ID NO: 293067 - DNA, 255 bp, Glycine max
agtgagcgtgaaagatgccttcggcgaggctttcagggtcaccaaggctcgacgttgctattgacatgggcaatccatttctcatctcactgttgatggtttccttaagatcggagctgtcgcagccacgcgatcagctgctgaagatacttatcatattatccgaaacgggaatatctcaagtcatgatttcgagaaaacgttgaagaagatgtgtaaagaaggtgtatattggggaatttagctggtgtttat

SEQ ID NO: 293068 - DNA, 277 bp, Glycine max
  unsure (1)..(277): unsure at all n locations
cgaagtgatccactccaggtgggccatgctcggggccttgggctgcgtcttccccgaactgttgtcccgcaacggggtcaagtttgganaagctgtgtggttcaggccgggtcccagatcttcagcgagggtgggctggactacttgggcaacccaagccttgtccacgcccagagcatcctcgccatctgggccacccaagttatcctaatgggtgctgttgagggttatcgtattgctggtgggcccctcggtgaggtcatgacccaatctaccc

SEQ ID NO: 293069 - DNA, 281 bp, Glycine max
  unsure (1)..(281): unsure at all n locations
ctgatatcaagaacagatncacactgccaccatttttgacattgaagaactttgaaggattggaccttgnnaagatggannaagctgatgactctggacttgttcatatgttgccggtcaaattgatcgtactcttagctggaaggatgtgaagtggcttcaaacaatcaccagactgccaattcntggtgaagggtgtgnnggacngctgngggacncaaggananctgtacanagtggtgagactgggaattaannaggncnaatccncggagtangcc

SEQ ID NO: 293070 - DNA, 274 bp, Glycine max
  unsure (1)..(274): unsure at all n locations
cacacacacagctagcagatattacatacacgtgaatcactaattaagccatggagaagaaatcaatagctgggttgtgcttcctcttccttgttctctttttgctcaagaagttgtggtgcaaactgaggcaaagacttgcgngaacctggctgatacatacaggggtccatgcttcaccactggcagctgcgatgatcactgcaagaacaaagagcacttgctcagaggcagatgcagggacgattttcgctgttggtgcaccaaaaactgt

SEQ ID NO: 293071 - DNA, 277 bp, Glycine max
  unsure (1)..(277): unsure at all n locations
ggcagaaagcaagctcatcctagagttttaaaaatggcagcagcctcctcccatggctctctcttccccnncccttggctggcaaggccgtgaagctgggccatcagcccccgaagtcgggagggtcagcatgaggaagaccgtcaccaagcaggcctcctccggaagcncatggtacggccccagaccgcgtcaagtatttgggcccattntcctggcgagccccgtcctacntnatggcgaatncccaggtgactagggntgggaanntnngggg

SEQ ID NO: 293072 - DNA, 271 bp, Glycine max
  unsure (1)..(271): unsure at all n locations
ctgatgtgttggcgttcagtgggccagcacctgagaggatcaatggaaggttggccatgattgggtttgtgggtgcaatggcagtggaagtagccaaaggcaaggtgtgtttgaacaaatatccaatggtggtatcccatggttcttgggaacaagtgtggtccttacccttgcttccttgattccactcttccaagggatcagcgtggagtctaagtccaaagggttcatgtcctcagatgcagaatgtggaatgggagattnctatgtt

SEQ ID NO: 293073 - DNA, 275 bp, Glycine max
gcaacgccatcctctatgagcctggtgaacatccggaccatgtggttgtcattaagtatgtaccttacgttggggacagcaagagggccatggatgagtatcttctgagatattcatgggcggaaagaacacaattgtgttgcacaacacttgtgaggattcactgttagctgctcctattatcttggacttggtccttcttgctgagcttagcactcgaatcgagtttaaagctgaaaatgagggaaagttccactcattccacccagttgcga

SEQ ID NO: 293074 - DNA, 272 bp, Glycine max
  unsure (1)..(272): unsure at all n locations
catcttcacaaactagtaatattattcttcgaatccattttattattcataatgggtattttcacatttgaggatgaaaccacctcccctgtggctcctgtaccctttacaaagctctagttacagatgccgacaangtcatcccaaaggctgtcgaagcttcaggagtgttgaaaaccttgaggggaanggtggccctggacccatcangaggatcntttcgttgnggatggnaganagcaagtttgtgttgcacaanatagatcagttga

SEQ ID NO: 293075 - DNA, 272 bp, Glycine max
  unsure (1)..(272): unsure at all n locations
cgcagagccaagacgacggcaaggactaccaggagccggcgccggcgccgctggttgacccgacggagtttacgtcatggtcgttttacagagcagggatgcagagtttgtggccacttttctgtttctctacatcaccgtcttaaccgttatgggagtcgccggggctaagtctaagtgtagtaccgttgggattcaagnaatcgcttggnccttcggtggcatgatctncgccctcnttnnaccccngngcnggnctttcngggganana

SEQ ID NO: 293076 - DNA, 243 bp, Glycine max
  unsure (1)..(243): unsure at all n locations
cttccattctctctgtgtatntccctacctctcccttcaagatgcngatcttcgtcangaccctcnccggcaagaccatcacccttgaggtggaaagctctnacaccatcgacaacgtcaaggccangatccaggancanggannnatcccccngnaccnncatngtntcattttcnccgnanagnaanttgngnactgccgaaacttgggggggtcntaagatncagagggagagnntgtta

SEQ ID NO: 293077 - DNA, 271 bp, Glycine max
  unsure (1)..(271): unsure at all n locations
cttctctctcacacaaaacactagnnnctcccttcttccttgtcnctttctcttctcaacaacatgcagatcttcgtcaagactttgactggcaagaccatcaccctcgaggtcgagagtagcgacaccatcgacaacgtcaaggcnagatccaggacaaggaaganctccctcctgaccagcagaggttgatttttgctggtaagcagctggaagatggtcgcactcttgctgattataacatacaaaaggaatcaacacttcacttggt

SEQ ID NO: 293078 - DNA, 247 bp, Glycine max
  unsure (1)..(247): unsure at all n locations
cgtgnaatgcgtataanaggaaaacnaagaaattagcgncanaatgttgggtgtgttcagcagctccatagtgtcgccnccggacgagctcgtngccgccggcnnccgtactccgtcgccgaagatgacggcggcggcgctgncgaagcggttcgaggagaagaacccctccgccgtgtcggtggaggtcggagagcatgtccagctcgcttatacccaccacaacgagtcgccgtttcagcncaga

SEQ ID NO: 293079 - DNA, 279 bp, Glycine max
  unsure (1)..(279): unsure at all n locations
ctctctctcaccaaagccttcctaganccgannaaaaanngangagcaatttgcccttcaccaannnagaannagcaaacaatggccgatcaacttancgnttaacagatctccgagttcanggaagtncgtcancttgttcgananggncggcgatggttgcatcacaaccaagggagcttggaattgttatgcngttcattggggnnaaacccaactgaggcagagctccnggacntnatgcaatgacntggatgntgntgggantgtgtancattt

SEQ ID NO: 293080 - DNA, 269 bp, Glycine max
  unsure (1)..(269): unsure at all n locations
ggtgtttcatttgtgaaactaacaacaacacaaggccatcatcatggcagctgctnccccaatnngcaagccaacttcaagtccaccttcactaggactcttgtagctcccaagggcctctctgcctcttcaccacttcacctcgtgccttctagaaggcaatttagcttcactgttaaggccatccaatcagagaagccaacctatcaagtgattcagccaatcaacggtgacccattcattggaagcctggaaaccccagttacatc

SEQ ID NO: 293081 - DNA, 266 bp, Glycine max
  unsure (1)..(266): unsure at all n locations
caatgacaacggtagctgcttctcttgatgccaaagaggtgtctacctccaaaactgaccaaaaccaagtgtgtgactgtgatccccaaactagccatgtcttcaaatcaaaattaccagatatcccaatctccaaccacctccctctccacgcttactgctttcagaaactatcccaattctccgaccgcccatgcctcatcgtcggacccgccgccaaaacctacactaatcccgagacacacntcatttcacgcaaattgccg

SEQ ID NO: 293082 - DNA, 269 bp, Glycine max
cttgttgggtctgctgagaattcatgttgaaaaaggtgtcaatcttgccatcagggatgtggtgagcagtgacccttatgttgtcatcaaaatgggcaagcagaagctgaagactcgggtagtcaataagaatctaaatcctgaatggaatgatgacttgaccttgtctatctctgaccctcatgctccaattcatctacatgtgtatgacaaggacacatttagcatggatgacaaaatgggggatgcagagtttttcataggtccat

SEQ ID NO: 293083 - DNA, 263 bp, Glycine max
  unsure (1)..(263): unsure at all n locations
gcttgtagcaaagtctgatggggtggagttcacagtcagagagggtcattattgtcctgcattgtcaaaagctgttaaaaccatgaagaagggagagaaagtgcttttgacagttaagccacaatatggatttggtgagaggggaagccagaacaaggtgatgaangtgcagttccaccaaatgcnacnttncagantactcttgnattagttnctggaaaactgtttctgaagtacctgatgacaaganggtcatnaagaag

SEQ ID NO: 293084 - DNA, 261 bp, Glycine max
  unsure (1)..(261): unsure at all n locations
gcaattgaagttgaagtcttgcccttctctcttcaactccaaacacaagacatcatcatccatggctgcctccgtctccactgtcggagctgtcaacagagctcttttgancctgaatgggtctggacctggggtttcgctcccagttcatccttctttgggagcagcttgaagaaggttattggctcangggtccccaacacaaagannnnctctngaagnttcaagattngngntgtagaagttgagagagnnannnac

SEQ ID NO: 293085 - DNA, 279 bp, Glycine max
  unsure (1)..(279): unsure at all n locations
aacgcagcatcgctattctcttccantccatggctttgcccaaccagcaaaccgtggattaccctcntttcaaactcgttatcgtcggcgatngtggcacaggaaagacaacctttgtgaaaangcatatcacggagaantgnnaaganatatgagccaaccatcggtgtngaggttcacccattggattttttcacaaactgtggaaagattcgattttactgctgggatactgcctggacaggagaatttggtggcctcagagatggatactatatc

SEQ ID NO: 293086 - DNA, 280 bp, Glycine max
  unsure (1)..(280): unsure at all n locations
ccactttcccccatagagctgatggngattatgcnagcggcaaangtgatnattananctgcttctcccggtactggggttattgcaggtgggtctgtganaattgntctcgaaatggccacnagttgataatgctttgggaaagccaactaggggagtaatantgcaactcaacaatggccagancgactgttgctgctgtgcagaaaatgaagcngtttcgtgaggttgctgaggagcgtgggattccaatggaagaattgtggaagtnatgaatttg

SEQ ID NO: 293087 - DNA, 278 bp, Glycine max
  unsure (1)..(278): unsure at all n locations
gcaccggtaacgatttctcnacaatctatncgcntctcatncgtnatgggcgtatggagaagttctactgggcaccancaanggatgaangcattngtgtctgcactggaattttcgcaccgcttcaatncatgaannncccttgtcaagattgttgacacctncccgggccaattccattgntttctttggtgcactgagggccagagtatatgatgacgaactgaggaagtggatttctngtgttggtgttgacggcattgggaagaagcttgtna

SEQ ID NO: 293088 - DNA, 269 bp, Glycine max
  unsure (1)..(269): unsure at all n locations
gnacaagactgccttcactacaaagaaagactatggtaaagaagagagggaagctcaatgggcggntgcacagaggacattcacggtcttcagcctccggaaagttcgaaccttttcantgacaanaatnctacagggagctttcagagattgcagaacaagccaagagacgtgctgaagttgcaaggcttagggancttcatactctaaagggaatgtcgagttcagtggtngaagctgaaggggcttgacatngacacgattcagcc

SEQ ID NO: 293089 - DNA, 267 bp, Glycine max
  unsure (1)..(267): unsure at all n locations
ctcataanacaaagcacaaagcaaagctcatccttgagttaaaaaatggcagcagcttcttcnatgggctctctncatccccatccttgggctggcaangccgtgaagctgggcccatcagcccagaagtggaagggtgagcatgaggaagaccgtcaccaagcaggtctccctcaggaagcccatggtacggcccagaccgagtcaangtacttgggcccattctctggcgagccccgtcctacctaaccggtgagttcccaggcg

SEQ ID NO: 293090 - DNA, 274 bp, Glycine max
  unsure (1)..(274): unsure at all n locations
gctttcnnagattgcagaanaagccaanagagcgtactgaagttgcaaggcttagggngctttcatactctaaagggacatgtcgantcagtggtgangnnganaggggcttgacattnacacgattcagcagcacnataacagtttaaggagctggacaagtttcancaagaaccgtgcttttttgagaaaaatnacatataaagacggagaaagaccatgntcaattcgtcnttaagttacataaaanaatgngtcctgtgaaattcgatgg

SEQ ID NO: 293091 - DNA, 284 bp, Glycine max
  unsure (1)..(284): unsure at all n locations
aacactcataacacaaagcacaaagcaaagctcatccttgagttaaaaaatggcagcagcttcttccatggctctctcatccccatccttggctggcaaggccgtgaagctgggcccatcagccccagaagtgggaagggtgagcatgaggaagaccgtcaccaagcaggtctcctcaggaagcccatggtacggcccagaccgagtcaagtattgggcccattctctggcgagcccccgtcttactaacgggtgattcccagggataggctggacctgntggg

SEQ ID NO: 293092 - DNA, 284 bp, Glycine max
  unsure (1)..(284): unsure at all n locations
cgccacctccaaacacagacccttcattcttcgaatcgttgacgcctgtgaaaagctcgaaggggcttattctattgttttcgtcaccgaggacaagcttgtcgccgttcgagaccctttcgggtttaggctttggttatggggagaaggagcaacggtgctgttgttttcgcttctgaaacctgcgcgcttgactaattgaagcgantatgaaagggaggtttaccctggtgaggttcctgtggtggataaaaacggtattcagatctctgcctcatgtctca

SEQ ID NO: 293093 - DNA, 294 bp, Glycine max
  unsure (1)..(294): unsure at all n locations
cattatcagaagcagaaagaaagaataagaggttgcagcaacaatggcagccatggctgcgcttcagagctcaatggtcggtctctccctctcctccaactctttcttaggccaacgcctttctcccatcaccctcccctctcttcttccgggtaagtcaacagagaagcaatgtcctattgtaatgaggccttaaacgatgggaacggaaggagtgtaaaccaaacagccntcctatcttgcacaaatgcatgtnaaacttgggagatacngtgcagtcatatctngacgnga

SEQ ID NO: 293094 - DNA, 291 bp, Glycine max
  unsure (1)..(291): unsure at all n locations
tccagacctatgcagttggaagcagtggaggatacaagaagggtgtgacagaagcaaaactgaaggttgccataaacgggtttggaaggattggaaggaacttcttgaggtgctggcacggtcgcaaagactcccctcttgatgtcattgccatcaacgacaccggcggcgtgaaacaagcctctcacttctcaaatacgattccatcctcggaaccttcgatgctgatgtcaagcctgttggcagcatgtcatctccgtggatggaaaggaattcaaagttntttctgnc

SEQ ID NO: 293095 - DNA, 293 bp, Glycine max
aaagcacaaagcaaagctcatccttgagttaaaaaatggcagcagcttcttccatggctctctcatccccatccttggctggcaaggccgtgaagctgggcccatcagccccagaagtgggaagggtgagcatgaggaagaccgtcaccaagcaggtctcctcaggaagcccatggtacggcccagaccgagtcaagtacttggggcccattctctggcgagcccccgtcctacctaaccggtgagttcccaggcgactacggctgggacactgctgggtttccgcagaccca

SEQ ID NO: 293096 - DNA, 299 bp, Glycine max
  unsure (1)..(299): unsure at all n locations
gaccgacnncggacagatgggcgggtcttgcctatgatatctcagacgaccaacaagacatcacaagaggaaagggtttggttgactccctttnccaagctccacaggatgntggaacnncantatgcagtcatgagctcctacgcggtanctcagcactggattcgccagtattnggganaacaaaatggntggattccnacattggctccagttttangggacaagcttgntggtgcacatgcnccnnggngcttcatggnccgcggcccaancatnagggnngctcncntngtggg

SEQ ID NO: 293097 - DNA, 289 bp, Glycine max
agtttccagatatggttcatgctcttaaacccaatcccaagaaccacatccaggagaattggaggatccttgacttcttctctcactttccagaaagccttcacatgttcacctttttatttgatgatttgggtgttccacaagattacaggcacctggatggttttggagttaacactacacactgatcaacaagggtgggaaagcagtgtatgtgaaattttcactgggagaccactagtggtataaagtgtctattggaggaagagggcattaaggtgggagggcc

SEQ ID NO: 293098 - DNA, 298 bp, Glycine max
  unsure (1)..(298): unsure at all n locations
gcaaggtgcncgtttcgccaaatgggcgtactgnatgtgagcatnccccaacggtccctctgctctgggcagttaaggaagcagcctggggtctgggctcgctatgctgcaattgctcaggacaatgggttggtcccaattgtggagccagagatcttgcttgatggggagcatggtattgatagaactttttgaagtagcccaaaaggtctggggcagaggttttcttctaccttggctgagaacaatgtcctttttgagggtattctccttaagcctagcatggttacacctggag

SEQ ID NO: 293099 - DNA, 285 bp, Glycine max
  unsure (1)..(285): unsure at all n locations
tttcaccaatggctgctgcggttagtgctgcagtctcttttccatccaccaagtctacatctcttccaagcaggacctccctncattgccccagagagagttgngttcaagaaggcttcattgcaaaacagagatgtttctagcagtggacgggtagtttccatcagagctcaagtcaccactgaggcaccagccaaggttgaaaaagagtccaagaaacaggatgaaggtgtggttgtgaacaagtttaaacccaagaccccttacattggtagatgcctgctc

SEQ ID NO: 293100 - DNA, 284 bp, Glycine max
  unsure (1)..(284): unsure at all n locations
ctgacccctggtcgtgttcgacttttgctccatagaggaactccttgtttccgtggatatggaaggcgcaatggagagcgtagaaggaagtctgttcgtggttgcattgtcagtccagatctctctgttttgaacctggtaattgtgaagaagggtgagagtgatttgccaggtctcactgatgttgagaagccaaggatgaggggtctaagagagcatccaaaatccgtaagcngttccaactgtccaaggaggacgacgtgagaaagtatgttaacacatac

SEQ ID NO: 293101 - DNA, 285 bp, Glycine max
gtttcattggaccaattagcagaattgggtgtgttatactggaagctcaatccaactatctatgagaacgatcaagagttgaccaagattagacaagataggggatacaactacatggacctgcttgatttatgcccagaaaaggtggaaaattatgaacagaagttgaagaacttctacactgagcacattcatcaggatgaagagattcgttattgtttggaaggaatggctactttgacgtgcgggacaaggtgatcgctggattcgcattttgatcaaggc

SEQ ID NO: 293102 - DNA, 282 bp, Glycine max
  unsure (1)..(282): unsure at all n locations
ccaaaacctagcatttagccaagacaatgcaaacaaatgggtgcaagacaacatcaaaaactatgccaataatgtcagattcnnatacatttcagtgggaaatgaagtgaagccggaacactcatttgcacaattccttgtgcctgcaatgcanaaacattcaaagggccatntcctaatgctggtcttggaaaccaaataaaagtttccactgccattgagactngagccttggcagattcatacccaccatcaatgggttcctttaggtctgatatagac

SEQ ID NO: 293103 - DNA, 283 bp, Glycine max
gacagagcgagttgttgtaaagctagccttgttgcagccatggccacccacgcggctctagcttctacaaggatccccactaacaccaagttcccatccaaggcttcacactctttcccaacccaatgcgctcaaagagacttgaggtgacagaattctctgggctaagatccacttcatgtgtgacatatgctaacgatgctagagaatcttccttttttgatctggtagcttcccaactcactcccaagaccatggatcatcaactctgtgaggggagaga

SEQ ID NO: 293104 - DNA, 268 bp, Glycine max
  unsure (1)..(268): unsure at all n locations
ctcgttttcaatatgcagatcttacgtcaaaaccctaaccncgtanaacgattacgctagacgtcgagtcctccgacacaatcgataacgtgaaagctaaantccaagacaaggaaggcattccaccggatcagcagcgtttgatcttcgccggtaaacaactcgaagacgggcagaactctcgccgattacaatatccagaaagaatcgacgctccactcgtcctccgcttcgcggtgggcatgcaaatcttcgtcaaaaccctaac

SEQ ID NO: 293105 - DNA, 283 bp, Glycine max
  unsure (1)..(283): unsure at all n locations
cctcgctctatttctcagtctctgtgtttgcggctgaggattccgaacgagtgaccttcttcgnttctcgcaaagtttaagtaatcatgggtaangaaaaggttcacatcaacattgtcgtcattggacatgtcgactctgggaagtcanctaccactggtcacttgatctacaagctngaggtatgacaagcggtgtgattgagaggttccganaaggaggncgccgatatgaaacaagaggtcattcaagtatgcctgggtgccccgaaaangctcaaanc

SEQ ID NO: 293106 - DNA, 280 bp, Glycine max
  unsure (1)..(280): unsure at all n locations
gtcaagcaaggatcagacagacctttgtggtttgcatcaaagcaaagtctttcttacttggatggcagccttccgggtgactatggatttgaccctctgggactttcagaccctgaaggaacaggagggttcattgagccgaaatggctagcatatggtgagataatcaatggtcgttatgcaatgttgggtgcagtnggtgcaatagcactgaaattctaggcaaggctggtctgatccctcaggagacagcaatccccatggttcagaacgggtgtgt

SEQ ID NO: 293107 - DNA, 278 bp, Glycine max
  unsure (1)..(278): unsure at all n locations
caatttcnntnnatgncatnaancancntnnatgaatacnnantttantttnngaaanncacggcattggctcnacggtttnaatctgtttgggttgatgagccgantgnggatgacgcaatcaagatacttatgggtctacgtgaganatatgaggcacatcacaaatgcagatacactgcagagnctataaangnngcagttgatttgtcagcgagatncatagttgataggnatctacctgataaagcnattgacctcatagatgaagcaggaag

SEQ ID NO: 293108 - DNA, 280 bp, Glycine max
  unsure (1)..(280): unsure at all n locations
agcagcaaagttatttgcctcctgattcactcatgacatggtatcttgctcttgagactggcaatttctggtttcctgctcaggtctataaccgtgagaatggccatgttggatttatgttgtcatgctatgatgctgagcttagctatgatcctcacactgacaccttccaggccagatatccaccacatggaagaagggcagttgcagtagagcatgggcattccaggggnaaggctaagagcaccanctgttggatatcctccacatgatcttcant

SEQ ID NO: 293109 - DNA, 280 bp, Glycine max
  unsure (1)..(280): unsure at all n locations
ttggcttgaggagtctgaaatcgagctctttatttggagaatctctaagagtggcatccaaatcaacactaaaggtttcaaanacaaagaatacttcactcgtgaccagatgtgaaattggtgacagtctggaagaattcctcacaaaagcaacaccagataaggggttgatcaggttgttggtgtccatgggagaagcattaagaacaatttccttcaaagtgaagacggcttcttgtggtggaacacaatgtgttaatacttttggggacgagcagct

SEQ ID NO: 293110 - DNA, 279 bp, Glycine max
  unsure (1)..(279): unsure at all n locations
ggcagatagaaaaaaaagagcgacttttgagttcaaaagatgactaacttcccattgatcaacttggagaagctcagtggtgaggaaagaaacgataccatggaaaaaattaaagatgcttgtgaaaactggggattctttgagctggtgaatcatggcattcctcatgacatattggacactgtggagaggttgaccaaagagcactacaggcccntgcatggaagagaggttcaaggaattagtggcaagcaagntctagntgctgtccaaactggg

SEQ ID NO: 293111 - DNA, 286 bp, Glycine max
  unsure (1)..(286): unsure at all n locations
ccatggccacccacgcggctcttgcttctacaaggatcccttcaaacacaaggttcccatccaaggcctctcactctttcccaacccaatgcgccttaaagagacttgaggtgacagaattctctgggcttagatccacttcatgtgtcacatatgctaacagtgctagagaatcttcctttnttgatcttgtagcttcccaactcactcccaagaccaatggatcaactcctgtgaggggagagacagtggccaagttgaaggtggcaatcaatggtttcggacg

SEQ ID NO: 293112 - DNA, 290 bp, Glycine max
  unsure (1)..(290): unsure at all n locations
caagaacaagagaatgtcaagagagtccaattggctgacaagtacttgaacgaggctgcacttggaaatgctaacgaggatgctattaacaggggaactttcttccaatcttgaattggaggcaaagcaaacttggcaagtaaatatttctgttcctgaaggttgtgctgatccaagtgctagaagtcgtgatgggacttgcgtgtaacattccttagaatncncantgtcttnggtncaangagaggncnccanttttgagatgtttcaccacatttncgnggggnccc

SEQ ID NO: 293113 - DNA, 286 bp, Glycine max
cccacttctcaaatgcagtggccgaagagacaaaggcaattttggaggactcaacatctttcttagaaactgatgaaattagtgaagctaatgaggaattgaatgcgtccacctcagtcttctcttctgaactggagctcagtttattgaatgctatattagctctttggacccaatctgcatcggtgcttcctccaaggacagaaccagcagcagatagatcattcttttcaagtgcttgaccaactgcgcttagcttgtacaccagatcttgaagataccctgt

SEQ ID NO: 293114 - DNA, 284 bp, Glycine max
  unsure (1)..(284): unsure at all n locations
ggttgtgaaagcagagaagtgagatacactaagttatcctcataaatacactctaattaggtggcaagataagtgtctaaccttagtaacattgccacatattgtgttcattttggaattgtgccactaaaattctattcaattcatctatggctgcctcttcttatgctatgcaatcaatcctggcaaaccctttgatccgcattnccagcgggtctagggtgnaaccaattgggcgttccgcttngcacagggagngggattttggcctgatatcngggccc

SEQ ID NO: 293115 - DNA, 250 bp, Glycine max
  unsure (1)..(250): unsure at all n locations
aacagaagaacaaccaccaccacacacaatgggtcgcgtgagaacaaaaacggtgaagaaatcctcccgccangtgattgagcgttactactcgcgcatgaccctcgacttccacacaaacaaaaagttctcgaagaagtggccatcatcccttccaagaggctgcggaacaagatcgcgggtttctccacgcatctcatgaagcgcatccagaagggtcccgttcgcggatctccctcaagctccangg

SEQ ID NO: 293116 - DNA, 254 bp, Glycine max
  unsure (1)..(254): unsure at all n locations
atacaccaaaacccaacatgaaaacccttaacaaagcctcacttattttattccctctcttgttcctttccctattcaagcattcccatgctgcaggaatcgctatctactggggccaaaacggtggagaaggcaccttagcagaagttgcaacactagaaataccatatgtgacatagcttcttgtcatttggacggcaactcacaatcactgcngtcatgtgcccacacatggtgcntggtgnaggaanaat

SEQ ID NO: 293117 - DNA, 294 bp, Glycine max
tttgcttcttcgagtttcacagccaagtcgtaaaagggtttcaagggatggaaaacatgcagagcttctggcaattgggtgatgaactccgtgggcactcaaaagcatcggaggatcacaagtggttaatggttgcctcgaaactggccgaacagacaagattgaagggggagcgtgtgaacaaccttgatctttcaaagggacccattgaaacaaggtcaagggataaatttgggttccaggaagagaacaaatttgattctcttaacttgagcatgttgaacctggactcta

SEQ ID NO: 293118 - DNA, 286 bp, Glycine max
cgatgcgctcctgtccttaactgggccgggtcgtgcctccggtgctgttactttgaagaaattagagtgctcaaagcaagcctacgctctgtatacattagcatgggataacaccacaggattctgatcctattgtgttggccttcgggatcggagtaatgattaacagggacagtcgggggcattcgtatttcatagtcagaggtgaaattcttggatttatgaaagacgaacaactgcgaaagcatttgccaaggatgttttcattaatcaagaacgaaagttg

SEQ ID NO: 293119 - DNA, 284 bp, Glycine max
  unsure (1)..(284): unsure at all n locations
caaagtttcatggaggaacactctgactcacggtatcataaaggtttcttgtatgagcacatctcggaagcctctcatcaagagacatgataggacattcaagcttacagatccatcgtcagagcactgcccccctggagagttcgtccgagaaatccctctttcaactcgaattcntgaagatgccaacatagaagcatactacgatgggccaggatcagtgcttgagatcctggtgccaaaacatcgcgtgggaccagaagagcatgaagtccgggtntgcc

SEQ ID NO: 293120 - DNA, 282 bp, Glycine max
gtcaaacaggtgatttgttcactttgtgggactgaacaagaggttcagcaaaactgtataaattgtggtgtttgtatgggcaagtacttctgtggaacatgcaagctttttgatgatgatatatctaagcagcagtaccattgcagtggctgtggaatttgcagaactggaggaagcgaaaatttcttccattgctacaagtgtggttgttgctactcaactcttctgaaaaacagtcacccttgtgtagaaggagcaatgcatcatgattgcccggtttgt

SEQ ID NO: 293121 - DNA, 282 bp, Glycine max
cacaaggcagaaagcaagctcatcctagagttttaaaaatggcagcagcctcctccatggctctctcttccccatccttggctggcaaggccgtgaagctgggcccatcagcccccgcagtcgggagggtcagcatgaggaagaccgtcaccaagcaggcctccttccggaagcccatggtacggcccagaccgcgtcaagtacttgggcccattctctggcgagcccccgtcctacctcactggcgagttcccaggtgactacggctgggacactgctggg

SEQ ID NO: 293122 - DNA, 285 bp, Glycine max
  unsure (1)..(285): unsure at all n locations
gaatagtcgcggaagctactcaaggtcttacttacaggcacnccggcgtggacatcgacgccggctccgaactcgtgcgcaggatagcgaagatggcgccagggattggaggcttcggtggtttattccctctcggtgactcgtacctcgttgctggtaccganngcgtgggaacgaaggtgatgcttgccttcgaaactggaatccacgatactattgggattgacctggttgcgatgagtgtgaatgacattgttacttcgggggcgaactttgtttttcctt

SEQ ID NO: 293123 - DNA, 283 bp, Glycine max
  unsure (1)..(283): unsure at all n locations
cggaacagcaacgttgtagagggagacttttgggggagagtgagtnagagtaaaaagatgtttctgcgtgcggtggcgcggccgttgatggcgaaggtgaaggcttcgacggggatcgtggggctggacgtggtgccgaacgcgagggaggtgctgattgggctgtacagcaagacgctgaaagagatccagaaggttcccgaagatgaagggtaccgcaaggccgtggagagcttcaccangcacaggctcggcntntgcaaggngaggacccttgganaac

SEQ ID NO: 293124 - DNA, 284 bp, Glycine max
  unsure (1)..(284): unsure at all n locations
tttcatcgtgcattcaatggccaccacagcagctctatccggaaccatggtgagcacctccttcatgaggaggcaacctatgaccaccacaagcctaaagacattccccaacgttggtgaagctctttttggtctgaaaagtggacgaggtggtcgtgtcacttgcatggcctcgtacaaggtgaagctcataaccccagaaggagaagtggagtttgaatgcccngatgatgttttcattgttgacaaggcagaggacgaaggcattgaacttccctactcgt

SEQ ID NO: 293125 - DNA, 278 bp, Glycine max
  unsure (1)..(278): unsure at all n locations
gaggatatttcgtatctcactaaccgcgctgctgtctacttcgaaatgggaaagtatgaggaatgcataaaagattgtnacaaggctgttgaaagaggaagagaactaagatcagattttaagatgatagcaaganctttgacaaggaaaggnaatgccttggtgaaattggcgaagtgctcaaaggattatgagcctgccattnagacntacnagaaagcantcncngnncgngtcanccctgacttttaaagtttttntgncccngatggggaaat

SEQ ID NO: 293126 - DNA, 278 bp, Glycine max
  unsure (1)..(278): unsure at all n locations
actgagctcataatagcaatatttgcccttagcagtaacaaaattgccgtggtcaagtattctctgttgggttctattctttcaaaccttcttctggttcttgggacctctctattatgtggtggcattgcaaacgttggagtggaacaaaaatatgatagaagacaagcagatgtgaactcacttatgctgttgttgggattgttgtgctacttgcttccaatgctgttcaaatacagtggtgcntcagctgctctcatgtagacccttnattanat

SEQ ID NO: 293127 - DNA, 279 bp, Glycine max
  unsure (1)..(279): unsure at all n locations
cggagagaaggagaagaggttccagatcttcaaggacaacctgcgattcatcgacgaccacaactcccaagaggaccgaacctacaagctcggactgaaccggttcgcggatctcaccaacgaggagtacagggccaagtacttgggaaccaagatcgatcccaaccggaggctcggcaagaccccgagcaaccgatacgcgccacgtgtcggcgacaaactacctgaatcggttgttggaggaaggaatgtntgttcctnagtcaaagaccggggggg

SEQ ID NO: 293128 - DNA, 280 bp, Glycine max
  unsure (1)..(280): unsure at all n locations
ggatcaactgaggagagtgagagaaaagagaagagaagatgacaacacgcttcaagaagaacaggaagaagaggggccacgtcagcgctggccacggtcgaatcggaaagcacaggaagcaccctggaggacgcggtaacgccggaggatgcaccaccacaggatcctcttcgacaaataccaccctgggttcttcggcaaggtaggaatgcgctattttcacaagcttcgcaanaattctactctcggatcctcaatttcgaaaagntgtggncctggc

SEQ ID NO: 293129 - DNA, 284 bp, Glycine max
  unsure (1)..(284): unsure at all n locations
aaaagccttagccttccctacaactccaaacncgaagacatcntcatccatggctgcctccgtctctactgtncggagctgtcaacaganctcttttgaacctgaatggttctggagctggagcttcagctcccagttcagccttctttgggaccagcttgaagaaggttattgcctcaagggtccccaacagcaaggtttccggtggaagcttcaagattgttgctgtagaagagngaaagagattgaagagacccagcagaccgacaaggacagttggnagg

SEQ ID NO: 293130 - DNA, 291 bp, Glycine max
  unsure (1)..(291): unsure at all n locations
gacgaggaagagggcngaggacctgtggcaacattgagcagttcaacttgncctacggtgccaagatcctcttgcaccacgccaacatgcgtctcaagcgtggccaccgctacggtctctgtggcgtaacggttcgggcaagtcgaccctgatgaacgccatcatcaactcgcaggtcgagggcttcccgccacccaccgaggtccgtaccttctacgtccagcacgacattgacggttccgaggccgagatttccatcatcgactgggttctcagcgacaagcgtctctt

SEQ ID NO: 293131 - DNA, 289 bp, Glycine max
  unsure (1)..(289): unsure at all n locations
ggaattgttgtaactttttgattcctaaattctctaaaatnccgaaattctaatttcgttaggggaaagagattgtttgtgtgtgagtgagtatggctggaaaaggcgagggtcctgctatcggaatcgatttgggaacgacgtactcttgcgtcggcgtgtggcaacacgatcgtgttgaaatcatagccaacgatcagggtaacagaactaccccatcctacgtggctttcaccgacacagaacggttgatcggcgatgcggcgaagaaccaggtcgtatgaaccca

SEQ ID NO: 293132 - DNA, 275 bp, Glycine max
  unsure (1)..(275): unsure at all n locations
ctcataacacaaagcacaaagcaaagctcatccttgagttaaaaaatggcagcagcttcttccatggctctctcatccccatccttggctggcaaggccgtgaagctgggcccatcagccccagaagtgggaagggtgagcatgaggaagaccgtcaccaagcaggtctcctcaggaagcccatggtacggcccagaccgagtcaagtacttgggcccnnnnncnggcgagcccccgtcctacctaaccggtgagttcccaggcgactacggctg

SEQ ID NO: 293133 - DNA, 272 bp, Glycine max
gggttgtgaaagcagagaagtgagatacactaagttatcctcataaatacactctaattaggtggcaagataagtgtctaaccttagtaacattgccacatattgtgttcattttggaattgtgccactaaaattctattcaattcatctatggctgcctcttcttatgctatgcaatcaatcctggcaaaccctttgatccgcatttccagcgggtctagggtgaaccaatttggcgttcctgctttgcacatgagaaggaatgttggcct

SEQ ID NO: 293134 - DNA, 273 bp, Glycine max
  unsure (1)..(273): unsure at all n locations
cttaattgccttaaggaacgttcgagaccacagaggtttctctagtcttcttctgtggagagcttgttttctcttgttcatncatctcacttccaattaaggaacaagctttccaccaatttgaatcaccaatggctcgctctttctccaacctcaaggttctctctgctcttgtcgccgacggattctccaacactctcaccaggcgtgggtacgcagtagcgacacaaagcgcnacaagaggaggagcagcctccatcagcggcaagtcag

SEQ ID NO: 293135 - DNA, 268 bp, Glycine max
  unsure (1)..(268): unsure at all n locations
ggaatccaaaaatgagaganatcatcagcattcacataggtcaggccgggatccaggttggcaactcctgctgggaactctactgcctggaacatggcatccagcccgatggcatgatgccaagtgactcctccttcggtgtagcccacgacgccttcaacaccttcttcagcgnnaccggatccggcaagcacgtccctcgcgccgtcttcgtcgatctcgagcccaccgtcatcgacgaagtccgttgtggcacttaccgnggctc

SEQ ID NO: 293136 - DNA, 272 bp, Glycine max
  unsure (1)..(272): unsure at all n locations
cgcatactatctataatgcagaanggaaaaagtttgccctacatcttgttccttctggnattctcaatgaggatactctctgtgttattgggaatggggttgtagtgcacctgccggggttgtttaaagagattnacggtcttgaatcaaatggggtctcttgcaagggaaggatattgatatctgatcgcgctcacctgttgtttgattttcatcaagtagtggatgggctaagagaagccgagcttgctaaatctttcattggcaccacc

SEQ ID NO: 293137 - DNA, 271 bp, Glycine max
  unsure (1)..(271): unsure at all n locations
cgcagtgaaactaaccgctggctactacaacacacgaaataacnatggatatctgcctatagcaaggatgctcgcaaaacatggagttgtcttcaatttcacctgcatggaaatgaaggncaganagcagccagactttgcaaactgctcanctgangggttagttcaccaggngaanatggcaacaacancagctagagcagagcttgcngggnaaaatgcattgganagatatgntgcagatgcatatgctcaagtttatcaacnagtt

SEQ ID NO: 293138 - DNA, 275 bp, Glycine max
  unsure (1)..(275): unsure at all n locations
cagccatggccanccacgcgggctctagcttctacaaggatccccactanacaccaagttcccatccaaggcttgcacactctttcccaacccaatgcgcctcaaagagacttgaggtgacagaattctctgggctaagatccacttcatgtgtgacatatgctaacgatgctagagaatcttccttttntgatcntgtagcttcccaactcactcccaagaccaatggatcatcaactcctgtnaggggagngacagtggccaagttgaangtg

SEQ ID NO: 293139 - DNA, 283 bp, Glycine max
  unsure (1)..(283): unsure at all n locations
ctcaagtcttcacttgtncttgacaagtctgagtgggtgaagggacaaacacttcgccaaccttctgctgcatcagttgtnagatgcaaccccaccaccccatcaggcntcacaatcagagcnggttcctatgctgatgagctcgttaagaacgcgaaancagtggcntcaccagggaggggtattttggccatggatgagtccaatgctanctgtgggaagcgtttggntncaattgggctagagngcactgaagcnaaccgccnggcgtaccgtancctct

SEQ ID NO: 293140 - DNA, 278 bp, Glycine max
  unsure (1)..(278): unsure at all n locations
cccctcacaccagaaagagtggnttgtgcggtggtgaagaagcgttcggaatagaagaagaagatgtcgtcggtttacgttctagagcctccgacgaaggggaaggtggtggtgaacactacgcgcngtcctttggacattgagctgtggccgaaagaggctccgaaggccgcgaggnacttcgttcagctctgcctcgaaaactattacgacaacaccatcttccaccgcatcatcaaggcgatcctcgtccaaagcggcgaccccaccggcaccgg

SEQ ID NO: 293141 - DNA, 269 bp, Glycine max
  unsure (1)..(269): unsure at all n locations
tcaggcttcttccaaaccagcttctattttggatacactttgatgttttgtcttgggctgggaattctgtgtggagctgtgggttatcttggttcgaatttgtttntgaggaggatctacaganacatcaagtgtgactaaggcntttgtangantctgagaccagancacttccatatgtttgtngccggagacaataaatttcntagaggaagcctctggtcatgtgtggggaccaaacaatgtntgcaggtagtaagtatcacagg

SEQ ID NO: 293142 - DNA, 269 bp, Glycine max
ttttgtctggtggacagtctgaggttgaagctaccctcaatttgaatgccatgaaccaatctccaaacccgtggcacgtgtcattctcgtatgccagagccctccaaaacactgccttgaagacatggggaggccgcccagagaacgtgaaggcagcacaagatgcactcgcattccgtgccaagtccaactcactcgctcagcttgggaagtacactggtgagggtgaatccgaggaagccaagaaggagttgttcgtcaaaagctat

SEQ ID NO: 293143 - DNA, 285 bp, Glycine max
  unsure (1)..(285): unsure at all n locations
cccaaatgggttgtggaggagattgataatgaccacgatcttgcatatactgatcaatggggaagaagaaactatgaatatatatcacttggatgtgatactttgccggtgctcaagggacgatccccagttcantgttatgctgatttcatgcgtgctttcagagacactttcaagcacctccttggtgataccattgtggaaatccaagttgggatgggaccagcaggttgagttgcgttacccttcgtacccagagcnaaatgggacatggaattcccaggg

SEQ ID NO: 293144 - DNA, 273 bp, Glycine max
  unsure (1)..(273): unsure at all n locations
cantagtagtagtagtaaatcattgntctacgnagctcccctcggatacagcattgaanacgtnagaccaaacggtggaatcaaganatncagatctgctgcttactccnactgcgctcgcaaaccttccttatatccatccagattggtagttnattgnatggnancntagttttattnggngtnncttcnttgtgctcaattnggnttttgctgctctccttcaaacnccggctttccggntcctctcgtngnggnngtgaccggtgctgc

SEQ ID NO: 293145 - DNA, 273 bp, Glycine max
  unsure (1)..(273): unsure at all n locations
attgcttcagatacttcacacantatnaaanantaaaancattgtccacaatgagactgcaantggggtcaccaatgacttggccaaanngagacaaattctcgattcctaccggcatccagccntccttattgttgatggagtgtcttctatttgtgctcttgatttccgcatggatgaatggggagttgatgtggcaataactggctctcagnaggccctttcccttcccactgggataggtattgtggttgcaggacctagagctattga

SEQ ID NO: 293146 - DNA, 271 bp, Glycine max
  unsure (1)..(271): unsure at all n locations
ggcagatagaaaaaagagctgagtnttgagttcaaaagatgactaacttcccagtgatcaacttggagaagctcaatggtgaggagagaaacgacaccatggagaaaataaaggatgcttgtgaaaactggggattctttgagctggtgaatcatggcataccccatgacttattggacactgtggagaggttgaccaangagcactacaggaaatgcatggcagagaggttcnaggaatttatggcaagcanaggnctagatgctgtcca

SEQ ID NO: 293147 - DNA, 273 bp, Glycine max
  unsure (1)..(273): unsure at all n locations
caaacgtagataacgttttttcacgcatagttgaaaccacaaggcatccagctgctgcagcgtcatttgcttcaatcatgnctgctcctcaaggagaactatcctttaatgaaacattatccagatgtcgagcaaacaatgtgccantctgcctcatgtatggaaaagaagatccctgggtggggccaatttggggtctccaggttaaaaggcaggtgcctgaagctccatattatcanatcagccctgctggtcactgccctcatgatgaag

SEQ ID NO: 293148 - DNA, 272 bp, Glycine max
  unsure (1)..(272): unsure at all n locations
cgctgttccaaaacggcgtcgtttctctaactcctctgggttccgtcttgcttcaagtcaaaccgtgaattcggttccgcgtgcgaatggaacttacaccgtttcggatttcatgacaaagaagcaagatttgcatgttgtcaaaaccaccaccaccgttgatgaagctttggaggctcttgtaaacaacagaatcagtggtcttccggtgatcnccccaggactggaatctggttggagttgtttctgattatgacttattggctattgat

SEQ ID NO: 293149 - DNA, 264 bp, Glycine max
  unsure (1)..(264): unsure at all n locations
ctttgttcactcttcttctcttgcggcnagggttttagcgcanttcttctagatttaaggaagatgggtaaggaaaaggttcacatcagtattgtggtcattggccatgtcgactctgggaaatccactaccactggtcnnctgatttacaagcttggaggcattgacnagcgtgttattgagnggtttgagaaggnnggtgctgagntgaanaagaggtctttcaagtatgcctgggtgctggacnaacttaaggcngangng

SEQ ID NO: 293150 - DNA, 266 bp, Glycine max
  unsure (1)..(266): unsure at all n locations
cgcaattgangttgaagtcttgcccttctctcttcaactccaaacacaagacatcatcatccatggctgcctccgtctccactgtcggagctgtcaacagagctcttttgaacctgaatgggtctggacctggggtttcagctcccagttcatccttctttgggagcagcttgaagaaggttattggctcaagggtccccaacacaaagatttcctcnggaagcttcaagattgttgctgtagaagagaaganagagattgaagag

SEQ ID NO: 293151 - DNA, 267 bp, Glycine max
  unsure (1)..(267): unsure at all n locations
gaaaaggaaggaaatagcagctgggagccaccctatgagcaaaatcaaggaccttgaatcgtcgtagtaaaaagcaaagtagagttgtgtaatgatggctccactgagaccaacgtagcctttgaggatgcccagcacaaccccacggcttnctgggaagttcttcacgcaagtcacaagggaaccggtgttggcgaaggactgagaattcgagcctatgcagatgtagaggcacatgtgccacacgtgcggcttgggtattttttt

SEQ ID NO: 293152 - DNA, 266 bp, Glycine max
  unsure (1)..(266): unsure at all n locations
tgatctgcaagctacgatgggtaagggaacggggagtttcggtaagagaaggaacaagacccacaccctctgtgtgaggtgtggccgccgcagtttccacctccagaagagtccttgcgccgcgtccgctttccccgctgcgcgcaccaggaaatataactggagcgtgaaggccattaggngaaagaccaccggaactggnaggatgaggtacttgcgtaacgtgccccgtagatttaagagtggcttcagagacggtaccgaag

SEQ ID NO: 293153 - DNA, 267 bp, Glycine max
  unsure (1)..(267): unsure at all n locations
gataacattaggtgggattcttggggaaggtttacagaaaggagtgttgcttatcaaccatggatatggactgcangaaaccatnaaattgattttgctccagaaattggtgaaactgtacctttcaagccttatacccaccgttaccatgttccttataaagcatctcaaagtacttcacccttcnggtattctatcaagagagcttcagcacacatcattgttttggcctcatattcagcgtatggaaaatatacaccacaatat

SEQ ID NO: 293154 - DNA, 277 bp, Glycine max
  unsure (1)..(277): unsure at all n locations
caatattttaccaggttcctctcattcttggtatctggggaggcaagggacaaggaaaatctttccaatgtgnccctgtctttgccaagatgggaatcaaccccatcatgatgagtgcnggagagttggaaagtggaaatgcaggagagccagcaaaactgatcaggcagagataccgtgaagccgcanacttgatcaanaagggnaagatgtgtgctctcttcatcaacgatcctgatgcagnanctggtcntctttgtggnaccacccaatacat

SEQ ID NO: 293155 - DNA, 273 bp, Glycine max
  unsure (1)..(273): unsure at all n locations
ttcatcagttttttgaagggtttgcgcttggaggttgcatttcccaagcgcagtttaaagcctcgtcagcaactataatggcttgtntttttgcactgactacacccttgggtgttgggattggaatggctatctncncggggtataacccttacagccccggtgcactcatcgccgaaggtatcttggattccttgtcgtcggggattttggtttatatggctttggtagatttgatcgctgcggattttcttagcaagaggatgagttgta

SEQ ID NO: 293156 - DNA, 289 bp, Glycine max
  unsure (1)..(289): unsure at all n locations
gctgnagggaggttgagaagtgtttctcaggatggtctaangtgggatgagggagctaatacaatgactgaaagtgaaattgaggttaaaggtttgattgatgctcttggacttcaagaaaagcagcagtttccaatatcacagcataagcgctatattgtgaaaaatggggcaccacttctggtacccacaaatcctgctgcactactgaagagtaaactgctttctgcacaatcaaagatctctctcatttttgaaccatttatgtggaaaagaagtgacccctcta

SEQ ID NO: 293157 - DNA, 271 bp, Glycine max
  unsure (1)..(271): unsure at all n locations
gctcgagcaacaggatgtggggaactgtgaaaggcggaggaaatgatgaagatggtttaagnnctttgaacattagccaatgcactgcactcaccccatctgctgttcaagctgtttgtgactcattcccttctctccacacatgctcagggaggcactcactcatcatgagtggctgcctcaacttgacatcagtgcattgtgcctgtgctgtccatgcgcaccgtgcattcaccactttcccttatcctgcccattaagaagctcatgc

SEQ ID NO: 293158 - DNA, 272 bp, Glycine max
  unsure (1)..(272): unsure at all n locations
cttctcttctgtgtttcttagnagaattaagatggctaccttgacctgtacctccagttcctccttcccccagagatgatgccatgcagctttaccgtgcttttaagggatttgggtgtgatacaagtgctgttatcaatatacttgctcatcgagatgctacacagcgtgcctacatccagcaagantacaaagcaatgtattctgaggaactttccaagcgcttagcttcggagcttagtggaaagttagagactgcagttctgctctgg

SEQ ID NO: 293159 - DNA, 272 bp, Glycine max
  unsure (1)..(272): unsure at all n locations
cgngaganagtagcagatcctccatggcctccaccaaggaacgtgaaaacttcgtctacgtcgccaagctcgccgaacaagccgaacgctatgaagaaatggtggaagcaatgaagaatgtggcgaantaaacgtggaattgacggtagaggagcggaaccttctgtcggttgggtacaagaacgtggtgggtgctcgtagggcttcgtggaggattctttcctcgattgaacagaangaagaagctaaagggaacgatgtgagcgtgaaga

SEQ ID NO: 293160 - DNA, 273 bp, Glycine max
  unsure (1)..(273): unsure at all n locations
cttctacattgctccagcttttatggacaagcntgtngttcacatctccaagaacttcatgaccctgcccaacatcaaggttcctctcattcttggtatctggggaggcaagggacaaggaaaatctttccaatgtgagcttgtctttgccaagatgggaatcaaccccatcatgatgagtgcngnnnagttggaaagtggaaatgcaggagagccagcaaaactgatcaggcagagataccgtgaagctgcagacatgatcaagaagggaaa

SEQ ID NO: 293161 - DNA, 281 bp, Glycine max
  unsure (1)..(281): unsure at all n locations
ctttcgccaccggtggttatgctgctatgcagagggttactcannggaatttggacttccncggatcacagcgaacagggagataggtaccgagagcttgctaaccgagttgatgaggctcttggattcatggctgctgctgggctcacagtggaccatcccataatgagaacaactgaattctggacatctcatgagtgcttattgttgcctatgaacaatccctcaccaggttggattcaattctggtctctactatgactgttcagcccatatgctct

SEQ ID NO: 293162 - DNA, 273 bp, Glycine max
  unsure (1)..(273): unsure at all n locations
cnngcagaancncctcgtcanngncntcntctnctccntcttggtaagtgnctcaatcgctntttagncactgaaaaaccctagaaaaggccggcgttatattctgctccatctccgaggccattaaggaatctcctgatttggtgaaaaagtatttggggaaagttgtcccgtcagacgacaactactacgccgcgttgaacgctgcggtcttcagcgacgggtcgttttgctacattcctaaagacaccaagtgtcctatgcagatttcga

SEQ ID NO: 293163 - DNA, 267 bp, Glycine max
  unsure (1)..(267): unsure at all n locations
cngtgagatttgcgaatctgaganatggcggattcttctcgggaggagaacgtttacatggcgaaattngcggagcaggccgagcgttacgaggagatggttganttcatggagaaggttgcaaagactgtggaggttnangagttgacggtggaggagaggaatctcctctctgtggcttacaagaacgtgattggtgcgaggagggcttcgtggaggatcatatcctccattgagcagaaggagganagcaggggcnatgaggac

SEQ ID NO: 293164 - DNA, 267 bp, Glycine max
  unsure (1)..(267): unsure at all n locations
catggactacggttttcatgcaccaacaatgtcatggcctgtgcctggcacactcatgattgagcctactgagagtgaaagcaaggccgagttagacaggttctgtgatgctcttatttccatnagacaagaaattgctgagattganaaaggaaaggttgacattaacaacaatgtacttaagggcgcccctcatccaccatcactgctcatggctgatgcatggacaaaaccatactcnagggaatatgcagccttccccagctt

SEQ ID NO: 293165 - DNA, 265 bp, Glycine max
  unsure (1)..(265): unsure at all n locations
ggcattctcttaacacttcgggaggngctggtgcaaagaatgctattctcatgaatatgccaaatgctgttctttcaatgtggagatattttgttggagatctcgtctttgaagtttctaagatgacttctccctacattaaatgtacagtctctttcttcatagcatttggaaatttggctgatgacaccatcaattttgaggcttttccccacaagctggtgcagtttggagagattcaggaaaaagttgtattgaaattttc

SEQ ID NO: 293166 - DNA, 271 bp, Glycine max
gtttctgtaaccatggcatccaccactctatcccctacaaccccttctcagctatgctcaggaaagagtgggattttcagtccctcacaggcacttcttgtgaagccagtgaagaggcagatgatggggaagagcaagggaatgagaattgcatgccaagccaccagcattcctgctgatagagtccctgacatgggcaaaagacagctcatgaatctgcttcttcttggtgccatttcactcccctctgctggaatgcttattccctaca

SEQ ID NO: 293167 - DNA, 274 bp, Glycine max
caggttcatccgctcccacaacaagaaccgcttgccctacactctctctgttaatcattttgctgattggacttgggaggagttcaaaagacacagactaggcgctgcccaaaattgctctgccactcttaacggcaaccacaagctcactgatgctgttcttcctcccacgaaagactggaggaaagaaggaatagtgagtgatgttaaagatcaaggcagctgcggatcatgctggacattcagcacaactggggctttagaagcagcctat

SEQ ID NO: 293168 - DNA, 265 bp, Glycine max
  unsure (1)..(265): unsure at all n locations
cgntttgggaccagtggatctccaaggtgaaggatggccagcaccttctcgaagaggagcttcaacttctttgcgaatatgttaaagagatccttattgaggagtcaaatgtgcagcctgtcaacagtccagtgacggtttgtggtgatattcatggtcagtttcatgatctaatgaaacttttccagactgggggtcatgtgccggagacaaattacatttttatgggagactttgttgatcggggttacaatagtcttgaagt

SEQ ID NO: 293169 - DNA, 268 bp, Glycine max
  unsure (1)..(268): unsure at all n locations
cataacacaaggcagaaagcaagctcatcctagagttttaaaaatggcagcagcctcctccatggctctctcttccccatccttggctggcaaggccgtgaagctgggcccatcagcccccgaagtcgggagggtcagcatgaggaagaccgtcaccaagcaggcctcctccggaagcccatnctacggcccagaccgcgtcaagtacttgggccnattctctggcgancccccgtcctactcantggcgagttccnaggtgactacg

SEQ ID NO: 293170 - DNA, 271 bp, Glycine max
  unsure (1)..(271): unsure at all n locations
cagaattcatgttacctgtgcattagtacatgataaaatgcccactggaaggattcacaagggagtgtgttcaacatggatgaagaattctgtgccattggagaaaagccaggactgcagttgggctcctatttttgttaggacgtccaactttagactccctgctgataataaagtgcctataatcatgattggtccaggcactggattagctcctttcaggggtttcttgcaggaaagattagctctgaaaggagggggagcnganctt

SEQ ID NO: 293171 - DNA, 277 bp, Glycine max
  unsure (1)..(277): unsure at all n locations
ctgagaaggctgtgcaattagctgttganacatggggcaaganatccttaactgagcttgaagcagaggagcgcctatcctatacctgtgaaaagggtcctgctcaagatgaagtcattgccaagctganaaatgcatttctggaaatcggaaaagaatataaagtcttcactgaggaagagaggaagaaggttgtggaagctggcggactacatgtagtaggcacagagcgtcatgaatcacgtcgaattgataatcagctgcgtggtcgaagtgg

SEQ ID NO: 293172 - DNA, 280 bp, Glycine max
  unsure (1)..(280): unsure at all n locations
ctaggggactcccattccgactcttagccgccgatctctcagggcttgcatcttctcaggtaagctgtgaagatgtacacatcaaggaagaaaatccacaaggataaggatgctgaaccaactgaatttgaagagtcagttggacaggcattgtttgatctggaaaataccaatcaggancttaaaagtgatctgaaggatttatacataaactcagccgtgcaagttgatgtttctggaaaccgcaaggctgttgttattcatgtcccttacagattaa

SEQ ID NO: 293173 - DNA, 262 bp, Glycine max
  unsure (1)..(262): unsure at all n locations
ggnagtggagaggcaagtggctgtgactaggcctgtgagaatgcattggactggctgccccaacacttgtggccaggtgcaagttgctgacattggtttcatggggtgcatggctagggatgagaatggtaaggccnctgaaggtgtggatattttncttnnagggaggnntttnggantcnacntcacatctagctgaggtgtataagangggtgtgccttgcangaactcggtggcntattgtggnnaacnnactagtna

SEQ ID NO: 293174 - DNA, 279 bp, Glycine max
tgcttttgggaagagtggaactaatgtgaaaacagctatttttctgtcccccaagtttgaacttggaccaggatcggtagccaataaatatgattatgacgctgattttccaagaggtcatatagcacttaagagtttcaatgctgaagtagttgatgaagcagggaaccctgtgcctcttcatgaaacttatctccaccactgggttgttgtaagatactatcaacctaaatatgtgacgacacacacaaactatgatggacataggatacttcacat

SEQ ID NO: 293175 - DNA, 267 bp, Glycine max
  unsure (1)..(267): unsure at all n locations
ctgatttcgttatcagaacaagaattggaccgattgtgatactggatataaccaangatgcaatggaggacttatggactatgcatttgagttcataatcaacaatggcggcattgattctgctgaggattacccataccgtggtgttgatggtagatgcgacacatataggaaaaatgctaaagtcgtttctattgatgactacgaagatgttcctgcctatgatgagttagccttgaaaaaggccgttgcaaatcagcccgtgag

SEQ ID NO: 293176 - DNA, 263 bp, Glycine max
  unsure (1)..(263): unsure at all n locations
acgatttctccacactctatgcgcctctcatccgtgatgggcgtatggagaagttctactgggcaccaacaagggatgaccgcattggtgtctgcactggaatttttcgcaccgattcaattcctgaacaggacgttgtcaagattgttgacaccttccctggccaatccattgatttctttggtgcactgagggccagagtatatgangacgaatgaggaagtggatttctggtgttggtgttgacggcattgggaagaagc

SEQ ID NO: 293177 - DNA, 259 bp, Glycine max
cccctttgccgctgttgttgttgctgcaccaccgaacaacttcccctgtaaatcgcgtttcgtttgtgcaaggttttaaaagatggctgatgctgaggacattcaacctcttgttgttgataatggaactggaatggtcaaggctggttttgcaggtgatgatgctcctagggccgtgttccccagcattattgggagaccacgccatactggtgtaatggttgggatgggtcagaaggatgcttacgtgggtgatgaa

SEQ ID NO: 293178 - DNA, 264 bp, Glycine max
  unsure (1)..(264): unsure at all n locations
gagagaacaagaacataagggaaccacagcggcggtaacagaagaacaagcagagaatgggtcgagtgagaacgaagacggtgaagaaatcctctcggcaggtgatagagcgtcactactcgcgcatgaccctggacttccacacgaacaagaagcntctggaggaagtggcgataatcccgtcgaagaggctaaggaacaagatcgcggggttctcgacgcacctgatgaagcgcatccagaagggccctgtgcgcggcatct

SEQ ID NO: 293179 - DNA, 281 bp, Glycine max
  unsure (1)..(281): unsure at all n locations
cttcttccttgtgttcatcgaccctccaatcccaaatcaatggattctgccttcacaaaacctctctttcccatcctcgttccctcactttctccaggaagaaaatttcaaccacagtgaaggctacatctcgtgttgacaagttttcaaaaagcgatatcattgtttctccatccattctttctgcaaactttgcaaaattgggagagcaggtgaaagcagtggagttggctggttntgatggattcacgttgatgtaatggatgggcgtttgttccaaa

SEQ ID NO: 293180 - DNA, 280 bp, Glycine max
  unsure (1)..(280): unsure at all n locations
gttaatgttttatattccaattttgaaaaccttttaacagaatatacatgcattccctctgagcacagcttgctgggaaaaattctcatcatattattgaggcaaccttcaaagcttttgctcgggctcttcgacaagcaacagagtatgatgcacgtcgccgtggaactataccaagttcgaaaggggttctgtcccgtagctaatatttttctggcggtggaccttcatggctcnacaatcacagtccttagatgctgtgtgatggataatgcttgtg

SEQ ID NO: 293181 - DNA, 272 bp, Glycine max
gagaagtttgatgcttcaataacaaaagactacgattttcaccttcttaatggcagttcagtcaaggttcccttcatgacgagcaagaagaagcagtttattatggcttttgatagtttcaaagtccttggtcttccctacaagcaaggcgaagataagcgccaattcaccatgtactttttccttccagaaacaaaagatgggctgttagctttggctgagaagttggcttctgaatctgggttcttggaacgcaagcttccaaccaaaaa

SEQ ID NO: 293182 - DNA, 272 bp, Glycine max
  unsure (1)..(272): unsure at all n locations
cacattacacaagaactctcncaaggatcctcctntgcacgaaattcatttgnngggaaaatccaagaagagggtggaatntcaagccagggaagatggattatttcaatgcaccaggaagaaaccatctctttgttccggggccggntaacatcccggaccagatcattcgggccatgaacagaaacaatgaggactaccgttctccagcaattccagctcatgaccaaaacactgcttgaggatgtcaagaagattttcaaaccataact

SEQ ID NO: 293183 - DNA, 271 bp, Glycine max
  unsure (1)..(271): unsure at all n locations
gaagaagcagcaatggcgccgaagataacacgtaaggttagcagaaaccctgaattgataaggggaatcggaaagtactcgaggtcgcagatgtaccacaagaggggcatttgggctatcaaggccaaaaacngtggcgttttacctcgccacgaccctaaacccaagcctgaagctcctgctgaaaaaccacccaaattttaccctgctgatgatatcaagaagccccttgtcaacaagcacaaaccgaaaccagctaagtcagggctag

SEQ ID NO: 293184 - DNA, 253 bp, Glycine max
  unsure (1)..(253): unsure at all n locations
tgnctgattttggcctttcaaggncaggtcctcttgataaccaatcctatgtcagcactngtgttaaaggcacttttgggtatcttgatcctgagtatttcaggtcacaacagctgacagaaaaatctgatgtatattcatttggggtggttcttttggaagtgttgtgtgcaagagcagtgattgacccatcacttccaagagaccagataaacttggctgagtggggaatgctttgcaaaanaaggagata

SEQ ID NO: 293185 - DNA, 277 bp, Glycine max
  unsure (1)..(277): unsure at all n locations
ctaactcactcactcacaactcagtgaaagngaatccgnggcgaagagaagagaaaaattaagatggaggggaaggagcaggatgtntcgctgggagcgaacaagttcccggagagacagccgattgggacggcggcgcagagccaagacgacggcaaggactaccaggagccggcgccggcgccactggttgacccgacggagtttacgtcatggtccttttacagagcagggatagcagagtttgtngccacttttctgtttctatnatcatgtc

SEQ ID NO: 293186 - DNA, 275 bp, Glycine max
  unsure (1)..(275): unsure at all n locations
annaagaaatattactcttgggaggagtgtgtaaacctgagagaagtcaagtcattacggnaaatgaatcatgcaaatattgtgaagctgaaggaagttatacgagaatgtgacactctgtgccttgtttttgagtacatggaatacaacctgtaccaacttatganaaacagggaaaagtngttttctgaaaatgaagttagaaattggtgttttcaagttttccaaggtttagttacatgcaccagcgtggatatnanntaannatcntaaga

SEQ ID NO: 293187 - DNA, 271 bp, Glycine max
  unsure (1)..(271): unsure at all n locations
tgctggttgccacactacaccgatatttccaccaaacccgtttgccntgttgtttgcnaataaatggcaactaagaggagcgtgggaacgttnaangagggtgatttgaaggggaagagggtattcgtgagggtcgatctaanncntgcctttggatgacaaccttaacatcaccgatgacactagagtccgtgctgctgttcccaccatcaagtacttgactggttatggtgctaaagtgatcctttctagccatttgggacgtccaaaa

SEQ ID NO: 293188 - DNA, 274 bp, Glycine max
  unsure (1)..(274): unsure at all n locations
gtctaagcagaaatggcctcttcagtgatggcatctgtggccctcaaacctgcccctttcactgttgagaagtcctcagttagaggccttccctccctctcaaggaactcctcttcattcagagttgtggccagtggtggcaagaagatcaagactgacaagccttatggaattaatggtggcatggctttgagggaaggagttgatgcatctggcaggaaaggaaagggaaagggcgtttaccagtttgtagacaaatacggtntaatgtcga

SEQ ID NO: 293189 - DNA, 251 bp, Glycine max
  unsure (1)..(251): unsure at all n locations
tcatatgcttgtctcaaagattaagccatgcatgtgtaagtatgaactaattcagactgtgaaactgcgaatggctcattaaatcagttatagtttgtntgatggtatcttctactcggataaccgtagttaattctagagtaatacgtgcaacaaaccccncttctggagggtgcattattagtaaangncacacagntctgctgtgcttgatgttccattgtactcgcgntcnacgccttggcgcgnna

SEQ ID NO: 293190 - DNA, 270 bp, Glycine max
gaaactctgcaccaacaatataaattggttaaagagaggactatatctggagattcatactatggctctcacgtgatgcagtatggtgatgtagggcttagcagagatgttctcttccattatttgggtacagatcctgctaatgataatttcacttttgtggatgaaaactccttatggtcaccttcaaaaccagtcaaccaacgtgatgctgatctcatccatttttgggataagttccgcaaagctcctgagggttctctcaggaaa

SEQ ID NO: 293191 - DNA, 265 bp, Glycine max
  unsure (1)..(265): unsure at all n locations
ggaacttcntgaggtgctggcacggtcgcaaagactcccctcttgatgtcattgccatcaacgacaccggcggcgtgaaacaagcctctcaccttctcaaatacgattccatcntcggaaccttcnatgctgatgtcaagcctgttggcagcaatgncatctccgtggatggaaaggaaatcaaagttgtttctgaccgcaaccctgccaaccttccttggnaggacttggggatagacntggtgattgaaggaaccgggtgttt

SEQ ID NO: 293192 - DNA, 265 bp, Glycine max
  unsure (1)..(265): unsure at all n locations
gtgaggttctacanggacgaagannccgaatgatcctgaatttgcaaagaagttggcttctctagctgatctctatgtgaatgatgcatttggcactgcccacagagctcatgcttctacagaaggagttgccnaatacttgaagccctctgttgcaggattcctaatgcagaaggagcttgattatctagttggggctgtgtcaaaccccaagagaccatttgctgctattgtcggtggatcgaagtgtcttccagattggagt

SEQ ID NO: 293193 - DNA, 274 bp, Glycine max
  unsure (1)..(274): unsure at all n locations
atcatcttttgtttgttcttcagtactttagtgtgtgatttaattccaagattttgagaatgtctagctgtgggtgtggaagtagctgcaactgtggcagcaactgcggttgcaacaagtactcttttgacttgagctatgttcagaagacaaccacagagactcttgttttgggtgttgggtctgtgaaggcccaattggagggtgctgaaatgggtgttgcagctgagaacggtggctgcaactgtggatcnngctgcactggacccatgca

SEQ ID NO: 293194 - DNA, 270 bp, Glycine max
  unsure (1)..(270): unsure at all n locations
ttgacgtgttagatatttcaaagaagataaagaaaactccagtggtggttggaaactgcacaggatttgctgttaataggatgttcttcccatacacgcaagcaggtctcttgcttgtngaacgtggtgcagatgtttatcaaattgatagaataataaccaaatttggnatgcccatggggcctttcagattggctgaccttgttgggtttggtgtggcgattgctactgggcacccaatttattcagaattttcctgaggaacttata

SEQ ID NO: 293195 - DNA, 270 bp, Glycine max
  unsure (1)..(270): unsure at all n locations
catccttnngctggggatgaganagccatggannaagctgctgccatttttnaactcatccccatccttggctggcaaggccgtgaagctgggcccatcagccccagaagtgggaagggtnagcatgaggaagaccgtcaccaagcaggtctcctcaggaagcccatggtacggcccagaccgagtcaagtacttgggcccattctctggcgagcccccgtcctacctaancggtnagttcncaggcgatacggctcggaantgctgggt

SEQ ID NO: 293196 - DNA, 268 bp, Glycine max
  unsure (1)..(268): unsure at all n locations
ttcccgccatatatccaataagctttaaccatntctgcctttgttggaaagtacgcagatgagcttatcaagaatgccaagtacatagccacacctgggaagggcatcttggcagcagatgagagcactggcaccattgggaagcgcctatcgagcattaacgttgagaacattgaggccaaccgccaagctcttcgcgagcttctcttcaccgctccagatgccctccaatacctctctngtgtcatcctctttgaggaaactcttt

SEQ ID NO: 293197 - DNA, 263 bp, Glycine max
  unsure (1)..(263): unsure at all n locations
ttcttgcaggttctctccttggntttatanggcagatggggtcctctgctagagcaagccactttcaggaaccgtcaccgtctctatctttccgaacagactgatggcngtgttcccaatactcttgttaaacccanggttgctgcagagtttaatgaagaagctcgctctccctttttcaagaagtacaaaactgtattacatcctggcgaggtgaatagaatcagggagtttcagcaaaacagtaagatagtgctactcac

SEQ ID NO: 293198 - DNA, 271 bp, Glycine max
  unsure (1)..(271): unsure at all n locations
gtacccaacatcaattggntccattgaccacattgaaggcacgtgtgaacaactttggcaggacaagtgctctgatccagcatgagtggcgtcccaaatcgttctttaccatatctggtgaggtagacaccaaggccattgaaaagagtgctaaggttggattgggtttggttctcaaaccctaagaattttgatccatcctggcaagagcattgagtaggtgttaggaagcgtatagtctgtgagactaaattatttccttaagttggtt

SEQ ID NO: 293199 - DNA, 266 bp, Glycine max
gggacgatgctcgcaaggcgctgaaacaccctcaaaagaagatcggaaaccgcaccacctcgtgccagctggcctccgccggccccgttccggctccaccgccgaacgtgaccccggtgtctgagtacacccagaggaagatttttgtgagcaatgtgaatgctgagattgatcctcagaagctgcttgaattcttcaagcagtttggggaggttgaggatggtcctcttggtttggataagaacactgggaaacctaagggtttg

SEQ ID NO: 293200 - DNA, 272 bp, Glycine max
  unsure (1)..(272): unsure at all n locations
aggnaaccctacacgattaccangtccagggagagctggactgagcaggagcacgacaagtttctagaagctctccaattatttgatcgggactggnaaaagattgaagcatttgttggttcaaaaacagttatccagatacgaagtcatgcacagaagtattttcttaaagttcagaagaagggaacaagtgaacatgtacctcctcccgggcccaaagagaaaagctgctcgcccataccctcaaaaagctctaaaaactctactgttcc

SEQ ID NO: 293201 - DNA, 125 bp, Glycine max
  unsure (1)..(125): unsure at all n locations
cacaaagcacaaagcaaagctcatccttgagttaaaaaatggcagcagcttcttccatggntctntcatncccatccttggctggcaaggccgtgaagctgggnccatcagccccagaagtggga

SEQ ID NO: 293202 - DNA, 272 bp, Glycine max
  unsure (1)..(272): unsure at all n locations
ctgaaccaaatcatcacacacacatactaanaagcaacaattcttctacaatggatctcctccttctggaaaagaccctcataggtctcttcctcgctgcggtggtcgccatcgccgtctccaccctccgcggccggaaattcaagctccaaccgggcccactcccgtcccaatcttcggcaatggctccaagtcggcgacgacctcaaccaccgcaacctcaccgatttggccaaaaaattcggtgacatctccctcctccgcatggggca

SEQ ID NO: 293203 - DNA, 143 bp, Glycine max
ggctagagaacactgaagctaaccgccaggcgtaccgtaccctccttgtgacagttccaggacttggtcagtacatctctggtgccattctctttgaggaaactctctaccaatccacaactgatggcaggaagattgttgac

SEQ ID NO: 293204 - DNA, 269 bp, Glycine max
  unsure (1)..(269): unsure at all n locations
ttacagatctcaaggggttgagttgctgggaaaaacaatagaanannaggggtctagtggagcaatggctagaagttgaagcacacaactttcatccacaagcctacaacttgtgtcttcatggtttgtttggttcactatttggtgtgactccanatcccaaggtgattgaggagagtgaagcaaagcnggtacaagtgttgaacatctatgangagaggctctcaaagactaagtatttggctggggatttcttcagcattgctgat

SEQ ID NO: 293205 - DNA, 195 bp, Glycine max
  unsure (1)..(195): unsure at all n locations
ggnaattgattgaggtgtttgctaagggtgttganaaagantatgttatccttcttgcagcaagagcttctaggactgaaaatcaagatgccatagatgctgcaattgttggcatgcttgctgacccaaaggaggcacgtatggtgttagggaggtacatttccttccattcaatcctgtagacaagaggactnc

SEQ ID NO: 293206 - DNA, 268 bp, Glycine max
  unsure (1)..(268): unsure at all n locations
ggggangccgcccagagaatgtgaaggcggcacaagatgcacttcttttccgtgccaagtccaactcgctcgcccagcttgggaagtacaccggtgagggtgaatctgaggaagccaagaaggagttgttcgtcaaaggctactcctactaagatgtntgtagngaatatgatacatgttaggcagctaccaacaccagcagttgtagtaggtgttgacggangatgaantggaagaagactaatttgtcnaaaatgtaatgttttnt

SEQ ID NO: 293207 - DNA, 268 bp, Glycine max
  unsure (1)..(268): unsure at all n locations
cagaatcgtcctgtgaaaaanatgaaattagtcaagactgagaaatgtggttctggaattgtggcggatgaagatatcaagcttggggagtttgtcattgaatatgttggagaagtcatnatgaccaaaaccatgtganggaaagctttggaacatgaacatcgtggggaaacaaacttctacttatgtgaatncacccgagntatggtgaagcntncncttttaggggaacaaattcagntncatcantcnnnctgctgccccatac

SEQ ID NO: 293208 - DNA, 260 bp, Glycine max
  unsure (1)..(260): unsure at all n locations
aganaagaaaganattgaaganacccagcagaccgacaaggacagatggaagggtcttgcctatgatatctcagacgaccaacangacatcacaagacganagggtttggttgactcccttttccaagctccacaggatgctggaactcantatgctgtcatgagctcctaccggtaccntagcatggacttcgcagtactnggtcaancaacatggatggatttacattgtccagcttgtatgganaacnntngttcac

SEQ ID NO: 293209 - DNA, 205 bp, Glycine max
  unsure (1)..(205): unsure at all n locations
attttgtgcatgcatgggggncttttcatcaatcagtggctgccaaaggaaggcaattgaagcattctgtaaatgnnttccatnaccttacattgaaccttcgtttacactcatcataaaatccatatatacggttantagaagcacattcatggttacccctcaaaaggcgnaaattctccnggntattctattttatatgcna

SEQ ID NO: 293210 - DNA, 273 bp, Glycine max
  unsure (1)..(273): unsure at all n locations
ggattgttgctgtagaaganaagaaagagattgaagagacccagcagaccgacaaggacagatggaagggtcttgcctatgatatctcagacgaccaacaggacatcacaagangaaanggttggttgactccnttttcccaagctccacaggatgcgggaattcactatgctgtcatgagctcctacgagtaccttagcactggacttngccagtacttggacaacaacatggtggattttacattgctccagcttttatggacaaacttgt

SEQ ID NO: 293211 - DNA, 280 bp, Glycine max
  unsure (1)..(280): unsure at all n locations
aagtagttgagaactaagaaggagaagcaaatggcttcctcaatgatctcttccccagctgttaccactgtccaaccgtgccggtgccggaatggttgctccattcactggcctcaagtccatggctggcttccccaccagaaagaccaacaatgacattacctccattgctagcaacggtggaagagtgcaatgcatgcaggtgtggccaccagttggcaagaccnatttgagactctttcctactgccagacttgatgatnnacaattggnaaggaac

SEQ ID NO: 293212 - DNA, 276 bp, Glycine max
  unsure (1)..(276): unsure at all n locations
ggaggaagagagaaaaaccatggcaataacactcaacaatggcttcaagatgcctatcattggattgggcgtgtggcgcatggaaggnaacgaaatcagggacctaattctcaattccatcaaaattggttatcgccattttgattgtnctgctgactacaaaaacgaagcagaagttggagatgcgcttaaggaggcttttgatagtggccttgtgagagagaggatctcttcattaccaccaagctttggaattctgatcaaggccacgttctt

SEQ ID NO: 293213 - DNA, 236 bp, Glycine max
  unsure (1)..(236): unsure at all n locations
cgaatagattatcctaagtctttgggaatagtgctgcaatggcttcaagtcaggaggaggtgacccttttgggagctactggaagcccatttgtgtgcagggttcatattgccctcaagttgaagggagttcaatacaaatatgtcgaagaaaatttgaggaacaagagtgaactgcttctcaaatccaacccagttcacaagaaggttccagtgttatncacaatgagaagcccc

SEQ ID NO: 293214 - DNA, 268 bp, Glycine max
  unsure (1)..(268): unsure at all n locations
attgctgctggtaactatcctgagtggaaactgttcgttcagacaatagatcctgagcatgaagacaaatttgactttgaccctcttgatgttactaagacttggcctgaggacattatacccttgcagcctgttggtcgcttggtcctgaataaaaacatagataatttctttgcngagaatgaacaacttgcattttgccctgccatngtggncctggtgtananactcagatgatangatgcttcagaccaggatttctcttatc

SEQ ID NO: 293215 - DNA, 275 bp, Glycine max
  unsure (1)..(275): unsure at all n locations
aagaggtcaagcatccattcaggaatcttctcaagcgcaggaaccgaccccaacttgtcatttccgttgccctacagatattccagcaattcacaggcancaacgcaatcatgttttatgccccggtgctgttcaacacgttaggattcangaacgatgcatccctgtattctgctgtgataactggggctgtgaacgtgctctccactgttgtatcgactatcagtggacanggnggnnccccnnattttgnnnanagaagnggncnattnccc

SEQ ID NO: 293216 - DNA, 268 bp, Glycine max
  unsure (1)..(268): unsure at all n locations
aacactcataacacaaagcacaaagcaaagctcatccttgagttaaaaaatggcagcagcttcttccatggctctctcatccccatccttggctggcaaggccgtgaagctgggcccatcagccccagaagtgggaagggtgagcatgaggaagaccgtcaccaagcaggtctcctcaggaagcccatggtacggcccagaccgagtcaagtnttgggcccattctctggcgagcccccgtcctacctaaccggtgagttcccaggcc

SEQ ID NO: 293217 - DNA, 222 bp, Glycine max
  unsure (1)..(222): unsure at all n locations
gcaattgaagttgaagtcttgcccttctctcttcaactccaaacacaagacatcatccatccatggctgcctccgtctccactgtcggagctgtcaacagagctcttttgaacctgaatgggtctggacctggggtttcagctcccagttcatccttctttgggagcagcttnaagaaggttattggctcaagggtcccnaacanaaagtttncncgnaanc

SEQ ID NO: 293218 - DNA, 269 bp, Glycine max
  unsure (1)..(269): unsure at all n locations
gacaaggccagtcctcagacagttgctgattacaccctcaagctccttcacaggagaattccccctgctgtccctggaattatgtttttgtctggtggacagtctgaggttgaagctaccctcaatttgaatgccatgaaccaatctccaaacccgtggcacgtgtncattctcgtatgccagagtcctccaaaacactgccttgaagacatgggaggccgcccagagaacgtgaaggcagcacaagatgcactcgcattccgtgccaa

SEQ ID NO: 293219 - DNA, 293 bp, Glycine max
gagcgctattgctatcaggattcttagtaacggcgtcgttccactctgggctggtgtcgtcattacagcttttgattgttttatttttctctttcttgagaactacggtgtgaggaaactggaagcgtttttcgctgttctgattggtgtaatggctctctcatttgcctggatgtttggtgaagccaagcccaatggtgttgatgttcttgttggtattttggttcctaaacttagctccagaactatacagcaagctgttggagttgtgggttgcatattatgcctcacaa

SEQ ID NO: 293220 - DNA, 285 bp, Glycine max
  unsure (1)..(285): unsure at all n locations
ctcagtctctgtntttgcggctgaggantccgaacgagtgaccttcntcgtttctcgcaaagtttaagtaatcatgggtnaggnaaaggttcacatcaacattgtcgtcattggacatgtcgactctgggaantcaactaccactggtcacttgatctacaagcttggaggtattgacaagcgtgtgattgacaggttcgagaaggaggctgccgagatgaacaagaggtcattcaagtatgcctgggtgctcgacaagctcaaagctgagcgtgaaagaggatt

SEQ ID NO: 293221 - DNA, 289 bp, Glycine max
  unsure (1)..(289): unsure at all n locations
tctgtctattgcacaatggatgcagatgcagctcctttgcacatagcaatgtatccatggtttgctatggggcacctcaccccatttctccaccttgccaacaagttagccaaaaggggacacaaaatctccttcttcatacccagaagaacacaagccaagttagaagacctcaatcttcacccaaacctcatcacctttgtccccatcaatgttcctcacgttgatggtctncccttatgatgcagaaaccacttcagatgttccctcctctttgttcccactcatt

SEQ ID NO: 293222 - DNA, 238 bp, Glycine max
  unsure (1)..(238): unsure at all n locations
gcatgctcttcttgctttcacccctggtgtgaagcagatgatctgctgctgtaacaagatggatgccactaccccgaagtactctaaggctaggtatgatgaaatngtgaaggaagtctcttcctacttgaagaaggttggttacaacctagacaagattccatttgtgcccatctctggtttcgagggtgacaacatgattganaggtccaccaccttgactggtacaagggcccac

SEQ ID NO: 293223 - DNA, 283 bp, Glycine max
  unsure (1)..(283): unsure at all n locations
ctctaattaggtggcaagataagtgtctaaccttagtaacatngccacatattgtgttcattttggaattgtgccactaaaattctattcaattcatctatggctgcctcttcttatgctatgcaatcaatcctggcaaaccctttgatccgcatttccagcgggtctagggtgaaccaatttggcgttcctgctttgcacatgagaaggaatgttggcctgagagttaggtccatggctaaggaagaacaaccaagtgagcctgcaaccccagttacaccgc

SEQ ID NO: 293224 - DNA, 235 bp, Glycine max
  unsure (1)..(235): unsure at all n locations
gccagtcctcagacagttgctgattacaccctcaagctccttcacaggagaattccccctgctgtccctggaattatgtttttgtctggtggacagtctgaggttgaagctaccctcaatttgaatgccatgaaccaatctccaaacccgtggcacgtgtcattctcgtatgccagagccctccaaaatggccttnaaaacattgggaggcgcccagagacgtgaggcagccnaa

SEQ ID NO: 293225 - DNA, 281 bp, Glycine max
  unsure (1)..(281): unsure at all n locations
gcctagggaagattctgggaccaagaggactgatgccaaacccaaaagctggcactgtaacacccaatattccccaggctatagcagaattcaagcagggaaaagttgaatacagggcagacaaaactggaatcgtgcacttaccttttggaaaagctgactttccagaagaggatcttcttgngncattgcttgctgcagtgaaatcagtagaggcaaacaaaccttnaggtgnaagtgttatggaaaangncnaattngcnnacnaangggactttaat

SEQ ID NO: 293226 - DNA, 293 bp, Glycine max
  unsure (1)..(293): unsure at all n locations
gtcgattaccctagtttcaaactcgtcatcgtcggtgacggtggtacaggaaagacaacgttcgtnaangnnacatcttaccggtgaatttgagaagaaatacgaaccgaccattggagtggaggttcacccattggatttcttcacaaactgtggaaagattcgcttctactgttgggatactgccggacaagagaagtttggtggcctcagggatggatattatatccatgggcaatgcgccattatcatgtttgatgttactgcccgactaacttacaaaaatgtcccta

SEQ ID NO: 293227 - DNA, 284 bp, Glycine max
  unsure (1)..(284): unsure at all n locations
ctcttcttctcttgcggctagggttttancgcagtttcttctagatttaaggaagatgggtaaggaaaaggttcacatctccattgtggtcattggccatgtcgactcncggaaatccactaccactggtcacctgatttacaagcttggaggcattgacaagcgtgttattgagaggtttgagaaggaagctgctgagatgaacaagaggtctttcaagtatgcctgggtgctggacaaacttaaggctgagcgtgaaagaggaatcaccattgatattgctt

SEQ ID NO: 293228 - DNA, 292 bp, Glycine max
tatataccaatactagctagtagctagagagtagagaacatggagggcaaaggtttcacggaagagtgccgaagctctggtggtgaaatcatggaacgaaatgaagaagaattctcaagaactcggtcttaaatttttcaagaaaatattggagattgctccagcagctcagcaattgttctcattcttgaaggattcaactgttcctttggaggaaaaccccaagctacaagccccatgccatggctgtctttgtcatggtaacaaagttggcatattggagaccataaaa

SEQ ID NO: 293229 - DNA, 289 bp, Glycine max
  unsure (1)..(289): unsure at all n locations
gctgttaanatgtctcgcacgtgcnccacagtgcggcaacaacggccacanctcacggacatgcaccgacnngtggcgccgccgggttctccgagggagaacggcatcatgctgttcggcgtaagagtcatgacggaagctaactcctccttcaggaagagcgccagcatgaacaacctctcacagtacgacgcggagttcaacgccgccgacgccggctacgcctccgacgacgtcgttcacgcctccggccgcacgcgcgaggcaagcgaggtgttccttggacgga

SEQ ID NO: 293230 - DNA, 285 bp, Glycine max
  unsure (1)..(285): unsure at all n locations
ttgcaagannattaacccagntgaagctgttgcttatggtgctgcagtnccaggctgcgnttcttcagtggcgagggtaatgagaaagtgcagganacttcttttgttggatgttactcctctatccactggtttggagactgcaggaggagtcatgactgtgttgattcccagaaacacaancattcccaccaagaaggagcggntgttctcaacctantctgacaaccagnccggtgtgttgattcaggtctatgaaggtgaacgaangaggactcgtgacaa

SEQ ID NO: 293231 - DNA, 281 bp, Glycine max
  unsure (1)..(281): unsure at all n locations
ttagcacnggacttaaacagtacaacttggataacaacatggacggtttttacattgctcctgcttttatggacaagcttgttgttcacatcagcaagaacttcatgaccctgcccaacatcaaggttcctnncattcttggtatctggggaggcaaaggtcaaggaaaatccttccaatgcgagcttgtctttgccaagatgnnnatcaaccctatcatgatgagtnctggagagttggaaagtggaaatgcaggagagccagcaaaactgatcagacag

SEQ ID NO: 293232 - DNA, 282 bp, Glycine max
  unsure (1)..(282): unsure at all n locations
cccaaattcattttaatcctaattctgcacttcttgatcatnccgattttnnctcctcaagatgcagatattcgtaaaaactttgaccggcaagaccatcacccttgaggtggaatcctccgacaccattgacaacgtaaaagctaagattcaagacaaggaagggatcccacctgaccagcagagacttatctttgcgggtaaacaacttgaggatggtcgcacccttgccgattacaacatccaaaaggaatcaaccctccatctcgtgcttcgcctcag

SEQ ID NO: 293233 - DNA, 283 bp, Glycine max
  unsure (1)..(283): unsure at all n locations
aaaaccttgatcaagaattgaagcattaatcttcaaccatggccacacccttgggcctaccaagagcaccttccggcggcacccagttggctgaacaaaggtgacaacgcatggcagttaacagcagccaccctcgttggtcttcaaagcatgccgggtctcgtgatcctctacgcaagcatagtgaagaagannnggcactgtaattcncagtttcatggctctctatgcctttgcagcagttctaatatgttgggtgcttgtgtgttaccgcatggccttt

SEQ ID NO: 293234 - DNA, 286 bp, Glycine max
  unsure (1)..(286): unsure at all n locations
cgaagatgagcttgttgaatgaggagagaaaaccgcacgctgtggttactccatatccagttcaaggacatgtgaaccctttgtttaaactagcgaactgcttcatctcagangctctcacataacctttgttcacactgagtacaactacaagcgtttgctcaagtcaaggggtcctaatgcccttgatggcctaccagattttagatttgagagcatcccagatggtcttccgccattggatgatgataatgttactcagcacgttccctcnctcnntgactct

SEQ ID NO: 293235 - DNA, 281 bp, Glycine max
ctgaaggtgaacagttttacagcaccagttggagcacgatccagcactacagtgtgtgcagttgctgagcctgataggcctctgtggttcccaggcagcacccctcctccatggctagatggcagtttgccaggagattttggctttgatcccctaggtcttggatctgatcctgagagcctgagatggaatgtccaagcagagcttgtgcactgcagatgggccatgttgggagctgctggcatttcatcccagaatcctcacaaagattggtatcctga

SEQ ID NO: 293236 - DNA, 280 bp, Glycine max
  unsure (1)..(280): unsure at all n locations
cgatggtataatggcacattatgatgagatatttaggctgaaggccgntgcanctaangctgatgncttccatttgttgtctngaatgtggaagacaccagcagagaggtgttttctatggcttggtggttttcggtcatctgaantcctcaagctcctggnaaatcanttggaacctctgacagagcaacagttaatgggtcattaccaattgcagnaatcttcccaacaggccgaagatgcntgtctcagggcatggaagcattgnaacagtcccttc

SEQ ID NO: 293237 - DNA, 278 bp, Glycine max
  unsure (1)..(278): unsure at all n locations
gttggatcttgctacatcactacttgcaaaagccaaggaaaagggngtgtctctcttgttaccaagtgatgtggtgattgcagacaaatttgctcctgatgctaatagcaaggtcgtgccagcatctgccatccctgatggctggatgggcttggatattggtccagattctgttaaatcattcagtgnagcattggatactacccaaaccatcatatggaatggaccaatgggagtgtttgagtttgacaagtttgctgttggtacagaggctattg

SEQ ID NO: 293238 - DNA, 279 bp, Glycine max
  unsure (1)..(279): unsure at all n locations
cccatactccatggaatggactggcttggccaatagattactgagcaagggcaacgatattctgtgttgcgattatgctagttttgactggtttgattaccaagcaagttnatgagcaagatggcaganatgataaacagtctttgtggtggtgatgaaaaattgatgcgtganaggacacacctgctgttggcttgttgttcaaggatggcaatttgtaaganagatgtttggagagttgaatgtggaatcccttctggntttccgctcacagttatt

SEQ ID NO: 293239 - DNA, 279 bp, Glycine max
  unsure (1)..(279): unsure at all n locations
ctcagagacagaagctgctcttgctgccactccctctgatggtcncaccgtatttgacaagatcatcaataaggaaattccttctactgtggtctatgaggatgataaggtccttgcctttagggacatagatccacaagctcctacccatattctaatcattcctaaagttagggatgggttaactggtctgtccaaggctgaggagaggcactgtgagattctaggtcgacttttgtgcactgctaagctggttgcaaagcaagaaggtcttgatga

SEQ ID NO: 293240 - DNA, 280 bp, Glycine max
  unsure (1)..(280): unsure at all n locations
tatnaacttgctcnntcagancgcgaagaagaagncacagagaancnagtctcctantnctcacccgnaagnnaaaaatgggcatnctcncatcgttggataacccccgtatgggtnccaagagagagctcaagttcgntctncagtctttctgggatggcaagagcagcgncngaggatttgcagaaggtgtcttctgatctcaggncatccatctggaagcagatggctgntgntgggatcagtacatcccnagcaacacttctctcactatgaccag

SEQ ID NO: 293241 - DNA, 280 bp, Glycine max
  unsure (1)..(280): unsure at all n locations
caaagatagccattttgaatgcaaactacatggcaaaacgattggagaattattatcccgttcttttccgtggagtcaatggaacagttgcncatgaattcatcatgacctgagaggcttaagaatactgctggaattgagcctgaagatgttgcaaagcgcctcatggactacggttttcatgcaccaacaatgtcatggcctgtgcctggcacactcatgattgagccaactganagtgaaagcnaggctgaactagacaggttctgtnatgctcttc

SEQ ID NO: 293242 - DNA, 282 bp, Glycine max
ctataacaagttttatgaagccttctctaagaacctgaaacttggtattcatgaggattctcagaacaagacaaagctagctgaattgctcaggtatcactccactaagagtggtgatgagatgaccagcctcaaggactatgttaccaggatgaaggaaggacagaatgacatctactacattactggtgaaagcaagaaagctgtcgagaattcccccttccttgaaaagcttaagaagaagggatacgaggttctctacatggttgatgctattgatga

SEQ ID NO: 293243 - DNA, 276 bp, Glycine max
  unsure (1)..(276): unsure at all n locations
ggctgaggattccgaacgngtgaccttcttcgtttctcgcaaagtttaagtaatcatgggtaaggaaaaggttcacatcaacattgtcgtcattggacatgtcgactctgggaagtcaactaccactggtcacttgatctacaagcttggaggtattgacaagcgtgtgattgagnaggttcgagaaggaggctgccgagatgaacaagaggtcattcaagtatgcctgggtgtcgacaagcncaaagtgagcgtgaaagaggattaccatgatat

SEQ ID NO: 293244 - DNA, 279 bp, Glycine max
  unsure (1)..(279): unsure at all n locations
gnagaattgttcctaggttccaggagttatctccagaaaagttgggaaaggctggtatggttcgagaaaagtcctttggtacaacaaaagaccgaatggtgtacattgaacattgtgcaattcaagggctgtaaccatattcattcgtggaggtaacanaatgatcatagaggagacaaagcgcagcttcnacgatgccttgtgcgtggtaggntcttatccgcaacanttcnatgtatntggtggtggttcaactgaagattcttggcccaatagccg

SEQ ID NO: 293245 - DNA, 281 bp, Glycine max
  unsure (1)..(281): unsure at all n locations
atctaagtnagatacacagtagttaggtagcaagcataagtntctaatnttagnaacatatctgctacatatcgtgtgcattttggaattgtgccactanaattctattcatctatgggctgcctcatcttatgctatgcaatcaatcttgcaaaccctatgatccgcatttccagcgggtctagggagaaccattttggtgttcctgcttatcacatgagaaggaatgttggcctgagagttaggtccatggctgaggaagagcaaccaagtcagcctgc

SEQ ID NO: 293246 - DNA, 279 bp, Glycine max
  unsure (1)..(279): unsure at all n locations
gtcgagaagacaaaagaagcgatcaaagtcctcaagcagatcggagcattcccggacgccgaaaaggctaaagacagccgcagcattcgtcccggcaagggaaaaatgcgtaaccgccgctacatctctcgccggggaccacttgtggtgtacggaaccgaagtgcgaaggccgttaaggcttccgtaacgtccccggcgtcgaggtcgccaacgtcgagaggctgaaccttctgaagctngcccccggtgggnactcgggaggtttgtnatttggacc

SEQ ID NO: 293247 - DNA, 253 bp, Glycine max
  unsure (1)..(253): unsure at all n locations
aaccataatagtcatgggtttgaaggaggattttgagcagtatnctcgagaaagcanngactttgnccaccgactcaatcaaacgaagacttgcttatctttatggattgtacaaacaggccaccgttggacctgtcaacaccagccgtcctggaancttcaacatgagggacagagctaaatgggatgcatggnaggctgttgaagggaaatccaaggacgaagcaatgggtgattacatcattancnncga

SEQ ID NO: 293248 - DNA, 281 bp, Glycine max
  unsure (1)..(281): unsure at all n locations
gacggaaatgcggcagagagtgagggagttcgaggagaggagggagcttcgagaagaaggccgaggagttgcagantcgcgttggagaggaaggcgaggaggaagaaaccgaggaagaaaagacgatgagagtcaggaaagagctcgaaaaggtagctaaggaacaggcagagaggagggccactgctcagttgatgtttgatttgggtcagaaggcttatgggaagggatcctatggacgtgccattgagtttcttgaagctgcattatatcatacccgg

SEQ ID NO: 293249 - DNA, 280 bp, Glycine max
  unsure (1)..(280): unsure at all n locations
gacccagttcagagaatgctatttgtagtaaggggnccaccttcaaagcagccaagtcctaagggatggtgtgaagagttgttgcatgttaggtccaggaaacttcagtggggacgaactcctctcatggtgtttaaggagacccttcatagaacgccttccaccatcttcatccacactcatcacgttggaaaccaccgaggcttttggccttgaagccgaggatgtgaagtatgtgacacaacattttaggtacacatttgttaaggagaaggtgaag

SEQ ID NO: 293250 - DNA, 275 bp, Glycine max
  unsure (1)..(275): unsure at all n locations
ccgagctcaaagaaaaattcaagcgcatgtgtgataagtcgatgatnccnaagcgatacatgtacttaaacgaagagatcctgaaagagaattccgagtgtttgtgcttacatggcaccttcgttggatgcaaggcaagacatggtggttgtggaggtacnaaagttgggaaaagaggcngcaataaaggcaatcanggaatgngtcaaccnagttccaggattaccanctcnnctttgccaccanantggtgtcnacngcctgggnggnttatc

SEQ ID NO: 293251 - DNA, 280 bp, Glycine max
  unsure (1)..(280): unsure at all n locations
acaagtagttgagaactaagaagaaggaaatggcttcctcaatgatctcctccccagctgttaccaccgtcaaccgtggcggtgccggcatggttgctccattcaccggcctcaaatccatggctggcttccccacgaggaagaccaacaatgacattactccattgctagcaacggtggaagagtacaatgcatgcaggactggccacaattggccacgaagagttcgagaatcttncncaattgccnnaacncggatgangccanttggnaaaggagc

SEQ ID NO: 293252 - DNA, 283 bp, Glycine max
  unsure (1)..(283): unsure at all n locations
cccaaacngncaaccgaaggtctcaacattgctgnacgatgtcacacagctcataggnncaaacgccgatggtttacntcaancaatatcgtgaagggttctgtggccaatattgctgcgaacttgagattatggagccctgtcgtagtgtcaaggacaggattggttttagtatgataaatgatgctgagcagagangagctataacacctgggaagagtatattggtggaacctactagtgggaannnnggaattggtctggcttataacagcttcaanng

SEQ ID NO: 293253 - DNA, 282 bp, Glycine max
  unsure (1)..(282): unsure at all n locations
gcttcgtgcanatataaggtgtacattgaaggttctgcttggtccgtgagtgaaaaatacattctggcatgtgactctcccaccctacttgtaaaacccccattactatgattttttcacaagaggactaattccggtgcaccactattggcccataaaggaagatgacaagtgcaggtccattaagtttgctgtggattggggcaatagtcacaaacaaagggtaatcttgaagttttgcttattcattaaggctagaatatagtcttaccaagttaatcc

SEQ ID NO: 293254 - DNA, 285 bp, Glycine max
  unsure (1)..(285): unsure at all n locations
aacactcataacacaaagcacaaagcanagctcatccttgagttaaaaaatggcagcagctntctttccatggctctctcatccccatccttgggctggcaaggccgtgaagtgggnccatcaggccccagnagtgggcnanggtgagcatgaggaagaccgtcaacaagcangtcntcttcaggnangcccaatggtacggcccagaccggtnnagtaacttgggcccaattctcttggnaanccccngtctaaactaaaccggtgattccccagnggantacg

SEQ ID NO: 293255 - DNA, 270 bp, Glycine max
  unsure (1)..(270): unsure at all n locations
gattttccgcactgatggtatccgnngaacaggacattgtcaagcntgttgacaccttccctggccaatccattgatttctttggngcactgagggncagagtatatgatgatgaagtgaggaagtggattncncgtgntggngttgacagtgtanggaagangttgtgaactcaaaagatggacngccaaccntgagtagcccaagangactctgggagagctctgcngnaagggaacaagctgtnccanaacaagannatggcnaggg

SEQ ID NO: 293256 - DNA, 282 bp, Glycine max
  unsure (1)..(282): unsure at all n locations
caaccatccatgatcggaatggaagcttctggcattcatgagaccacttacaattcaatcatgaagtgtgatgtcgacattaggaaggacttgtatgganacattgttctcagtggtngatctaccatnttccccaggtatcgctgacagaatgagccaaggaaatctccgtnttgggcccaaagcangcatgaaggattaagggtgggtncncccacctggagannaagtacnggtgtctggatggngggncnancctgggttctcccnagcactttccca

SEQ ID NO: 293257 - DNA, 276 bp, Glycine max
  unsure (1)..(276): unsure at all n locations
cggaaccttcgatgctgatgtcaagcctgttggcagcaatgtcatctccgtggatggaaaggaaatcnaagntgtttctgaccgcaaccctgccaaccttccttggaaggantttgggatagactggtgatngaaggnaccgngggtgtttgtagacagaaaaagtgcangganaacncantcaaggcagganntnaagaangtgctcatcactgcnctgggtaagggcgatatcccagcctacgngttggngtccatgngtatnaactacncccc

SEQ ID NO: 293258 - DNA, 272 bp, Glycine max
  unsure (1)..(272): unsure at all n locations
ctcatcaagggttgtganagcagagaagtgagatacactaagttatcctcataaatacactctaattaggtggcaagataagtgtctaaccttagtaacattgccacntattgtgttcattttggaattgtgccactaaaattctattcaattcatctatggctgcctcttcttatgctatgcaatcaatcctggcaaaccctttgatccgcatttccagcgggtctagggtgaaccaatttggcgttctgctttgcacatgagaaggaatg

SEQ ID NO: 293259 - DNA, 285 bp, Glycine max
ctctatgggaaatgtccgctgtcatttacaaggactgggttttcactgatcaagcattacctaatgatcttgtaaagagaggagttgctgttaaggacccatctgctccccatggagttcgtcttttgattgaggactatccttatgcttctgatgggctagagatatgggatgccatcaagtcctgggtgcaagaatatgtctcattctactacaagtcagatgaggaactccaaaaagaccctgaactccaagcttggtggaaagaattgtagaggtgggtca

SEQ ID NO: 293260 - DNA, 281 bp, Glycine max
  unsure (1)..(281): unsure at all n locations
gcaaatctttgttaagactttgaccgncaaaacaataactttagaagttgaaagttctgataccatcgataacgtgaaggcaaagatacaggacaaagaggggattccaccagaccagcagaggcttatctttgctgggaagcagctggaagatggtcgtactcttgctgattataatatccagaaggagtccactctgcatttggtgttgaggctcgtggaggtatgcagatatttgtgaagactctgacagggaagaccattaccttggaggtggaaag

SEQ ID NO: 293261 - DNA, 277 bp, Glycine max
  unsure (1)..(277): unsure at all n locations
gactcgacggtgatcgttcttcctttattccacgtgcacggnttgatcacggggctcctgagttcgnttcngcaccggggcggcngtggcganaccggcggcggggagattctccgactcgtcattctggaaggacatgattaaatacagcgccacgtggtacacagcggttcctacaatacaccagatcatactggaccgccactcgaacagccccgaancggtttacccgcgcctccggttcattcgaagctgcagcgcgtcgtcgcaaccggta

SEQ ID NO: 293262 - DNA, 207 bp, Glycine max
  unsure (1)..(207): unsure at all n locations
tgattgaagaagatgccgatcagaaacatcgccatcggnaggcctgaagaggctactcaccccgacacgttgaaggcggggttgggctgagttcatctccaccttgatcttcgtgttcgccggttcaggttccggcatcgnctacaacaagctcaccggacaacgcggccgcaatncncgncggcttcatctcngttccatcggcca

SEQ ID NO: 293263 - DNA, 280 bp, Glycine max
  unsure (1)..(280): unsure at all n locations
ctggaaaagatggtgtatgcaaattctcagctgaaaatgttgccgttcaagtcattgactcggtcaatatcaccttgggtgctgagaatgaattaaaacatgcagttgcatttgttcggccggttagtgtggcctttcaggtggtgaatggggtccatttntacgagaatggantttacactagtgacatttgccgtaacacttnccaggatgtgaacatgccgtccntgctgtggggtatggaattgaaatgggtcccaattggctcataaaaaattca

SEQ ID NO: 293264 - DNA, 287 bp, Glycine max
  unsure (1)..(287): unsure at all n locations
gtatttcagagattgattctaggaattgcagggtcagggactggtctgttgatttctctgctgcttgtgtcaaccttgataattccagaatgccagttgataacctttcacagaggagtcattcaaatgagattgccagccatttgaatttcagagagcactcaggagaaagtgttgctggggacagcagtatatatacaaaancttggattgacacagctggtggtattgcaattaaagaccatcatgccatagagagatggcaatctcaagcagctgcagctgat

SEQ ID NO: 293265 - DNA, 280 bp, Glycine max
  unsure (1)..(280): unsure at all n locations
ttaggccggaccgccaaactttactcttttctgcaactatgcctcgaaaagttgaaaagttggccagggaaatccttctgntcctattagagtaactgttggagangtggggatggcaaatgaagntattactcaagttgttcatgtaattccttccgnttctgagaaattgccctggcttctgganaagctgcctgaaatgattgatcaaggtgataccctagtttttgcntcaaaaaaggntatgtngatgaaattggatcccaattggctccaagag

SEQ ID NO: 293266 - DNA, 279 bp, Glycine max
  unsure (1)..(279): unsure at all n locations
cccccgtgttnccatcattgtcaccggtaacgatttctcaacactcnaangcacctcctcatccgtnnatggngcgtatggagaanttctactngtggaccaacaagggaagancgcattggtgtttgcaccggaattttccgcantgatggtattcctggacangncattgtcaagcttgttgacaccntncctggccaatccattgntttcttggngnactgagggccacagtatatnangatgcaagtnagnaagtggattnccggtgttggtgtt

SEQ ID NO: 293267 - DNA, 280 bp, Glycine max
  unsure (1)..(280): unsure at all n locations
tcctctcaggaatgtgttcccaggacttattgtgttttaaatccacaaaatccttttgtgttgaataggtggatggggaaactgactttcccccagggcacttcccgaagtgttnanagaatgcctctttctatagggggaggagctggtgcaaagantgcnattctcatgactatnccaaatgctgttctncaatgtggagatatnnngttngagatctcgtctttgaagtttctaagatgacttctccctncattaaatgtacagtctctttcntcat

SEQ ID NO: 293268 - DNA, 298 bp, Glycine max
  unsure (1)..(298): unsure at all n locations
ggcaaaggnattctacccgncggntcgatggggaattgcncttcaaggcgtcntcgtaagggctaatccggcttcacganggtcaccaaacgggcacgtgcctttgggggggngaggcccccttactgctggtnngcaaacggacggcgggcncacgcgttcgttntagcccggattctgacttagaggcgttcagtcataatccaacgcacggtagcttcgcgccactggtttncaaccaagcgcgatgaccaattgtgcgatcaacggttctcctcgtactaggttgaattactat

SEQ ID NO: 293269 - DNA, 283 bp, Glycine max
cgtgacacatgccgcgaaattggattcatctctgatgatgttggtcttgatgctgacaaatgcaaggtgttggtcaacattgagcagcagagccctgatatcgcccagggtgtgcacggtcacttcaccaagcgcccagaggaggttggtgctggtgaccagggtcacatgtttggctatgccactgatgaaacccctgagtacatgcccctcagccatgtcttgcaaccaaactcggtgctcgctcaccgaggttaggaaaaatggtactgtgcttggctga

SEQ ID NO: 293270 - DNA, 283 bp, Glycine max
  unsure (1)..(283): unsure at all n locations
gctgatgtttctcttgaagtgattgcaatgagaacacctggctttagtggagctgatcttgcgaatctgttgaatgaagctgctatattagctggtcgccgtggaaagacagctatttcatctaaagaaattgatgattctattgataggattgtggctggaatggaaggaacagtgnncgacagatgggaagagcaaaagtttagtggcatatcatgaagttggtcatgctattgtgggactttgnctcccggtcatgtgctgtgcaaaaggtaacctagtt

SEQ ID NO: 293271 - DNA, 251 bp, Glycine max
gctccctcggaatcccaatggcggagaacggtgaaggcggcgaggagtacctgttcaagatagtgctgattggggactccgcggtggggaagtccaacctcctctcgcggttcgcgcggaacgagttcgatagcaacttccaaggccaccattggggtcgagttccagacgcagctcgtcgagatcgacggcaaagagatcaaggcgcagatctgggacactgcgggacaagagaggtttcgagtgtcact

SEQ ID NO: 293272 - DNA, 276 bp, Glycine max
  unsure (1)..(276): unsure at all n locations
gtgttggagggagatggcagtgtgggggagttttattctgtggctttgacgaataactatcaacaggccgatacagggacgaagatgatacacaacagggangaacacaaggagtaggattatatcaaaggggatatcggtggggcattccaggaatgttatagagggctggttcaggttctgtccaaggccgagaatgcccgaaactcctcgcagtgtgactctatgctcattggtgacaatgcagctgcaaatacctatccttacattcaggtg

SEQ ID NO: 293273 - DNA, 279 bp, Glycine max
  unsure (1)..(279): unsure at all n locations
ctatgccaaaagatcgaaatggaaagctttcaaaggagtatctaagggtggcactggacacggtggctccatctgctggtttacctcctgttggtgcaattgaagagatggacaaggttattggtgaagtctntaagatggtgaatgcagatgatgcgaaggtggtgaaagaagacgaattcaagaaactattaactgaaatactggggaacataatgttgcagttggaggganatcccatatcagtttcttcaaatcggtagtacacgagccactaga

SEQ ID NO: 293274 - DNA, 268 bp, Glycine max
  unsure (1)..(268): unsure at all n locations
acaaagcacaaancaaagctcatncttgagttaaaaaatggcancagttcttccatggctctctcatccncatccttggctgncaaggccgtgaagctgggcncatcagncccagaantgggaaaggtgnntatgaggaagaccgtcaccaatcaggtctcctcangaagcccatggtanggcccagnccgattcaagtacttnggcccattctctgggcgagccnccgtnctacctaaccggtgagttccnaggcgactaggctnng

SEQ ID NO: 293275 - DNA, 275 bp, Glycine max
  unsure (1)..(275): unsure at all n locations
tgaaaagtgaaaagtgaaaatggacttggaagcagtgaagaggtacttagagaaaggaggagaaacagcatcggcggtggatgggttgcctccgncggtttctggaaccgttaataatgaacgctcttaaggtcgatctcatcgaaactggtcgcgttgtctgctccatgaagatacctccgcgtttactcaatgctgggaattcgttacacggtggcgccatcgtgctctggtcgacgtggtggggtccgctgcgattcccaccgttggatatt

SEQ ID NO: 293276 - DNA, 273 bp, Glycine max
  unsure (1)..(273): unsure at all n locations
atcattgtgcctttaattccacccagaaagctcttngaattgatgacttccggaaaattcctaatggtgtcaatggtattgaagaaaggatgcatttggtatgggatatcatggtggaatcnggccaaatatcnctcactgactntgtccggttgacnagcactgaatgtgctagaatcttcaatatatatccaaggaaaggagctattcttccaggatctgntgcagatattatcatcctcaatccaaattcaacctttgagataactgcaa

SEQ ID NO: 293277 - DNA, 220 bp, Glycine max
  unsure (1)..(220): unsure at all n locations
gctgatgtttctcttgaagtgattgcantgagancacntngcnttantggngctgatcttgtcgaatctgtagaatgaanctgctatattagctgnncgccgtgganagncagntatttcatctaaannaatngatgattctattgataggaatgnggctggaatggaaggancaggcntgacagatggncanagcaanagncnngtgggcatagcatga

SEQ ID NO: 293278 - DNA, 257 bp, Glycine max
gttgcaggctcaggtggacaaattacttgaggccagacttaaagagaggtcttttatcagaatacgaagaaaaaatggtcattgatcttcatgctcaacttggcaatagatggtctaagattgcttctcatctccctggaagaactgataatgagataaaaaatcattggaacacacacataaagaaaaagctcaagaaaatgggcattgatcctgccacacataaaccacttcctaatgcaaatgaacaaaaccat

SEQ ID NO: 293279 - DNA, 253 bp, Glycine max
ccaatttggctgcgaaagccagaagagatcaccaaggatgaatacgcttctttctacaagagcctcaccaatgactgggaagaacacttggctgtgaaacatttctctgttgagggccagcttgagttcaaggccattctctttgtgccaaagagggcaccctttgatttgtttgacaccaggaagaagatgaacaacatcaaactttatgtcaggagggtgttcatcatggacaactgtgaggagctcattc

SEQ ID NO: 293280 - DNA, 264 bp, Glycine max
caacagttgccaggtgaatcagacaatgattatgctgatttttcttccaagatcttgcatttgaaaggagacaggaaggactttgactttgtaaaatccagtctctcggcagagggatttgatgttgtttatgacataaatggacgtgaggcagatgaagttgagcccatactggatgcgctgcctaatctggaacagtttatttactgctcttctgctggtgtctatctcaaatctgatctattacctcatgcagagacagat

SEQ ID NO: 293281 - DNA, 255 bp, Glycine max
  unsure (1)..(255): unsure at all n locations
gaatcgtgaaaatgttcagaaaccagtacgacacggacgtgaccacatggagccctgcggggaggctgttccaggtggagtacgctatggaggcggtgaagcagggctcggcggcgatagggctccgatcgaagacccacgtnctcctcgcatgcgtcaacaaggccaactccgaactctcctcgcaccagaagaagatcttcaaggtcgacaatcacatcggcgtcgccatcgctggcctcaccgccgatggcc

SEQ ID NO: 293282 - DNA, 253 bp, Glycine max
ggaacctactctactgattttattgaggagtgggtcaaaattggcttgcctgcaaaggcaaaggtgaagacacagcatggggatgccccttttgctgagttgtgctcacactgtgagaaggaatctgtgaatgtttcccttggaaacctgctaacttacccatttgttagagatggcttggtgaacaaaacattgtcactgaaaggaggatactatgactttgttaaaggatcttttgagctctggggccttc

SEQ ID NO: 293283 - DNA, 256 bp, Glycine max
  unsure (1)..(256): unsure at all n locations
taaaattctctcttcctttttgggttctcctcaatccattccaagcttcaatcttttctctcttctgccctctgcacctcccctcacacccttcctcattcgcagatataggaggtgaagatgtcgaccccggcaaggaagagactgatgagggattttnanagattgcaacangatcctcctgctggcatcagtggggctccccaagacaataatattatgctttggaatgctgttatctttggaccagatgaca

SEQ ID NO: 293284 - DNA, 258 bp, Glycine max
  unsure (1)..(258): unsure at all n locations
ggataaggnnctcgngaaatttgggaacgacatcgctattgcctttagtggtgctgaagatgttgctttacttgagtatgtacatttgacgggtcgaccctacagagtgtttagttcttgacactgggagactgaacccagaaacctacaaattttttgacgctgttgagnagcattatggaattcatattgagtacatgttccctgatgcggttgaggttcaggcattagtaagaactanggggctcttctcatttt

SEQ ID NO: 293285 - DNA, 264 bp, Glycine max
  unsure (1)..(264): unsure at all n locations
gcagcttattgtactggtctcctgttggcccgaagagtcctcaaaacacttgaaatggatgaggagtacgaaggaaatgttgnggctactggagaggactattcantggaacctgctgagagcaggaggccattccgtgctctccttgatgttggtcttattaggactacaactgggcaaccgtgtctttggtgcccttaagggagctctggatgggggtttngatattcctcatagtgaccagangtttgctgggtttgataa

SEQ ID NO: 293286 - DNA, 264 bp, Glycine max
caaggttgcaacctcctcccccaccgggttactttggcaatgtgatattcacaaccacacctatagctgtggcaggtgatctcatgtcaaaaccaacatggtatgctgcaagcagaatccacaatgcattgttacgaatggacaacgattatttaaggtcagctcttgactatctagagctgcaacctgatctaaaagctctcgttcgcggggctcatactttcaagtgtccaaatcttggtatcatagctggataggcttccc

SEQ ID NO: 293287 - DNA, 189 bp, Glycine max
gaaggaatcaacccttcaccttgtcctccgtctccgtggggggttttaagctcgttgtgtaatgttggatgtgttcccaaaacatttgaagaactttgatgtttaatgggtctgtaataatgtcccttgaaaataagttcggtttgtgttgaactcaattgtgtcccattaataatagtactctaatat

SEQ ID NO: 293288 - DNA, 252 bp, Glycine max
aaacaggaagatgctgcccagcttaatggaaatgggacctcccaaggaaatggctctgccactgttgctgacattttcatctcccagaatgtggtcagcttgagcaggtccgggattgagaatttggcaaaattagagaaccgaaaagaacactggcttgttgtgctctatgcaccatggtgccgcttctgtcaggctatggaggagtcgtatgttgatctggcagagaagttagcaaggtcaggagtgaag

SEQ ID NO: 293289 - DNA, 251 bp, Glycine max
atggctcaagaacctgtgtatgtgaatgccaaacagtaccaaggaattctgaggcgaagacaggctcgtgctaaagcagagcttgaaaggaagctcataaaatctagaaagccatatcttcatgaatctaggcatcagcatgctatgagaagggcaaggggtactggaggacgatttgcaaagaaaactgacggtgagggctcaaaccactcaggcaaggaaaaggataatggtactgattctgtcctatc

SEQ ID NO: 293290 - DNA, 253 bp, Glycine max
  unsure (1)..(253): unsure at all n locations
aaggaatcaacccttcaccttgtcctccgtctccgtggggggttttaagctcgttgtgtaatgttggatgtgttcccaaaacatttgaagaactttgatgtttaatgggtctgtaataatgtcccttgaaaataagttcggtttgtgttgaactcaattgtgtcccattaataatagtactctaatatcccaaaaaaanaaaaaaaaanggggggnccnccgnttagtnancncgncnncngggganttattt

SEQ ID NO: 293291 - DNA, 257 bp, Glycine max
  unsure (1)..(257): unsure at all n locations
tggtacaagtgtttttaacaaacagcaacagtacagagcatttcgatgcatgnaagtggacaaaatcggaaccacattcctgggaattgatcttcccaatagaggtatgtggtcctaataatggttttgaaatgtggagttctgantgggcaaatcaaacttcatggcacttgagtttccttattgacaatcccaaacagtctacagtttttgatattctcttgggaatttctcaagattttnaaattgctggtaat

SEQ ID NO: 293292 - DNA, 267 bp, Glycine max
  unsure (1)..(267): unsure at all n locations
ctcgaaacttcaccgaacgcattccattcaccaattcgnccaagtctcgtatcaatcagtcaatccgtctcgtggaggttggagagatcggagnnnanaggatccatggcgcatcgagtggaccacgagtatgactatctgttcaagatcgttttgatcggagactcaggtgtangaaaatctaacatcctctncaggttcactcgaaacgagttctgtntagagtccnaatccacnatcggagttgcattggncaccagaactctt

SEQ ID NO: 293293 - DNA, 261 bp, Glycine max
  unsure (1)..(261): unsure at all n locations
aaaggnagggagtagggagtgagtaattttgaaaataaagaggaaagcttgaagcagaagagagagatgtcatcatcttcagacctggacaggcaaatagagcagttgaagaggtgtgagcctcttaaggagtctgaagtgaaggtgctctgcctcaaagccatggaaatcctcgtcgaagagagcaacgttcaaagggtcgacgctcctgtcaccatatgtggtgatattcacggtcagttttatgactgaaggagcttt

SEQ ID NO: 293294 - DNA, 252 bp, Glycine max
  unsure (1)..(252): unsure at all n locations
attgttgtaactttttgattcctaaattctctaaaatncgaaattctaatttcnttagnggaaagagattgtttgtgtgtgagtnagtatggctgganaaggcgagggtcctgctatcggaatcgatttgggaacgacgtactcttgcgtcggcgtgtggcaacacgatcgtgttgaaatcatagccaacgatcagggtaacagaactaccccatcctacgtggcttcaccgacacagaacggttgatcggc

SEQ ID NO: 293295 - DNA, 254 bp, Glycine max
ggtcatcgttgggatctccatacgccggatctgctaaaatacgcttgatccatatgggcctcctcgaccacttgtgggacgacaccgtcgccggcccaaggccggaaaacggtctcggcaagctccgaaaacaccacaccttcactttccgacctagctccggcaaggaaacggagggcgggagcgtgagatcgtacggagacgaatcgtcggaggaagcgacgagagtgacgcgtagtatcatgatcgtgaaa

SEQ ID NO: 293296 - DNA, 264 bp, Glycine max
cgcagacccagaaaccttcgccaagaaccgtgaactcgaagtgatccactccaggtgggccatgctcggagccttgggctgcgtcttcccggagttgctgtcccgcaacggggtgaagttcggagaagccgtgtggttcaaggccgggtcccagatcttcagcgagggtgggctcgactacttgggcaacccaagcctgatccacgcccagagcatccttcgccatctgggccacacaagttatcctaatgggtgccgttgaag

SEQ ID NO: 293297 - DNA, 253 bp, Glycine max
  unsure (1)..(253): unsure at all n locations
gtttcccgccatatatccaataagctttaaccatgtctgcctttgttggaaagtacgcagatgagcttatcaagaatgccaagtacatagccacacctgggangggcatcttggcagcagatgagagcactggcaccattgggaagcgcctatcgagcattaacgttgagaacattgaggccaaccgccaagctcttcgcgagcttctcttcaccgctccagatgccctccaatacctctctggtgtcatcct

SEQ ID NO: 293298 - DNA, 251 bp, Glycine max
  unsure (1)..(251): unsure at all n locations
ctcacacacaaggntatagcngcaagagttattgccaaagagattaatcttgaagagacaccagtttccaaagttatgactaggaatccggtatttgtcctttctgaaactctagctgcagaagccctccaaaagatggtgcaagggctgctgagaaaggataagcaattgcagcagctgttgaaggagttgaaaaacactggggaacatcagactccaatacatcattcattgagtctcttcggtagcaa

SEQ ID NO: 293299 - DNA, 251 bp, Glycine max
  unsure (1)..(251): unsure at all n locations
aggactcgaaaatgtgatcgcaaggcacagtncgtttaggcaaagcaaccagacttgctgtagaggcatggggtttgaagaattgcacccaaaaggaagagtggtacagtgacactgtgactgctgttcttgttcctgcttacattgatagtactgaaatngttaggagggcatggaagagatacaatttgagcttaggtcttggactgaacaaagttgctgggaaggttttcagaattggacatcttggc

SEQ ID NO: 293300 - DNA, 256 bp, Glycine max
  unsure (1)..(256): unsure at all n locations
gcttgagaagggagaaaaaggaatcggagatggaacagttagctatggaatggatgatggtgacgacatttacatgcgctcttggactggaaccattattggcccctataatactgtacatgaaggaagaatttatcaattgaagttgttttgtgataaagactacccagaaaagcccccaagtgttcggtttcattcacgaatcaatatgacttgtgtnaatcatgagactggagtggttgaatcaaaganattt

SEQ ID NO: 293301 - DNA, 275 bp, Glycine max
cttcaaaacactcataacacaaagcacaaagcaaagctcatccttgagttaaaaaatggcagcagcttcttccatggctctctcatccccatccttggctggcaaggccgtgaagctgggcccatcagccccagaagtgggaagggtgagcatgaggaagaccgtcaccaagcaggtctcctcaggaagcccatggtacggcccagaccgagtcaagtacttgggcccatctctggcgagcccccgtcctacctaaccggtgagttcccaggcga

SEQ ID NO: 293302 - DNA, 274 bp, Glycine max
  unsure (1)..(274): unsure at all n locations
actttttgcaacaaccatggttgcaatgggcagcagcaacagcatccacccagttgattttctcaaagccttgttcccccttcacgtctatgccccttccaactatgtgtctttnacactaaacaagtgctatcaagtggcaggagaaggcatgtggggggttctggagttaggtgcatggctgtgggggaagcagcaaccatgggacaaagaagagaagtggatatgagcttcaaacactcactagctggttgctgaagcaggagcaagctgg

SEQ ID NO: 293303 - DNA, 264 bp, Glycine max
atgaagggtcgttcatcctgatatatattcgtctggtaaacctcatctccaagcaaggctaaattttcttttcactctgtgtcaaaaggttattatggtgaatgtggacagcgaggtggatattttgaaatgaccaacattcctccagagacagttgatgagatctacaaggttgcatcaatatcacttagtccaaatgttccagcacaaatatttatgggagttatgctcaatccacctcaacctggagatatttcttatgac

SEQ ID NO: 293304 - DNA, 264 bp, Glycine max
  unsure (1)..(264): unsure at all n locations
ttctttcaatgtggagatattttntnggagatctcgtctttgaactttctaagatgacttctccctacattaaatgtacantctctttcttcatagcatttggaaatttggctgatgacaccatcaatttngaggcttttccccacaagctggtgcantttggagagattcaggaaaaagttgtattganattttcacaagaggaatttcttacagcttggtcaactcaggtgcgtcctgcaacaatctgttggctgatgggtg

SEQ ID NO: 293305 - DNA, 268 bp, Glycine max
  unsure (1)..(268): unsure at all n locations
actccctcctcttcacacattttcttagctctctccaacaatccctctcgttcacactttcagattgtgtgaagatgggggctggtggccgaactgctgttcctcctgccaacaggaagtcagaggctgaccctttgaagcgggtaccanttgaaaaacctcagtttagtctcagccagattaagaaggccattccacctncactgtttccancgctctgttctccgctcattctcctatgttgtttatgacnccaccatagccttct

SEQ ID NO: 293306 - DNA, 268 bp, Glycine max
  unsure (1)..(268): unsure at all n locations
taaaatagttggttgggcaccccagaagaagatattgaaccaccctgcattggctagcttcattagtcactgtggttggaattcnaccctagaaggtatatgtgccggtgtacctttcttgtgttggccatgcgccactgatcaatatcttgacaagtcatatatatgtgatgtgtggaagattgggcttggactagacaaggatgaaaatggaataatttctagggaagagataaggaagaaggtggatcaactgcttgttgatgaa

SEQ ID NO: 293307 - DNA, 266 bp, Glycine max
  unsure (1)..(266): unsure at all n locations
gtcctctggcaatgctagtgtgctcacaacagtgttgaaattgattgatancctatgacctgtacgggcaagtggcatacccaaaacatcacaatcaatctgatgttccagagatatacagattcgctgcaaaaacaaagggtgttttcataaatccggctttagtggaaccctttggcnttactttaattgaggcagctgcccatggacttccaatggtggccactaaaaatgggggacctgtggacattcatcgggccctgaac

SEQ ID NO: 293308 - DNA, 264 bp, Glycine max
  unsure (1)..(264): unsure at all n locations
ggtgaataataattttagatgttgtatgtagttaacgaaatgacatttagcgggtataatgtatatagtttggatatcttataccttgttgctatcttattaggtatattcgttattataagtaaaaaccctattgtatctgttttatttttaataggtttattctttatgtatatctgtntatttaattttnacaggattaaactttataggattatcttacttattggtatatataggggcagtatccatcctatttttatt

SEQ ID NO: 293309 - DNA, 267 bp, Glycine max
  unsure (1)..(267): unsure at all n locations
gtcacaggcttcactttacaggatgggacttctcactacatgaaaggccttgttctcctgctgtgctacatnnttattggggcatgcttcttcgtacaaagaacaccctttaataatcaagctgatgttactaacatcacacttaaaccaaccactaatgcagttttaagcgcttaattagtaggctttggcctatttgttgtcccttcctaagatgaagaaggtggcatcgatccaaaccaaaaatcagattcaaattcaatggat

SEQ ID NO: 293310 - DNA, 270 bp, Glycine max
  unsure (1)..(270): unsure at all n locations
tctcatccccctccaatgatcttgtcaatttgattgtatctgttgaagatacaggtgaaggtattcctcttgaatctcagccactcatcttcaccccattcatgcaggtaggttcatccatctcccgaaagcatggaggaacaggcattggcctaagcattagcaaatgtttggttggcctcatgaatggggaaattggatntgtgagcatacccaagattgggtccacattcacttttactgctgtattcaccaatggacaccgtagtt

SEQ ID NO: 293311 - DNA, 264 bp, Glycine max
  unsure (1)..(264): unsure at all n locations
gggcgtgtggcagaatgaccgcgtggagatcattgccaacgatcanggcaaccgcacgacgccgtcgtatgtggcattcacggactcggagcggctcatcggcgatgcggccaagaaccaggtcgccatgaacgcgcacaacacggtgttcgacgccaagcgtcttatcggccgcaagttttcggatccgatcgttcaagccgacatcaagcactggccgttcaaggtgacgtctggtgccggtgacaagccgcagatcacggt

SEQ ID NO: 293312 - DNA, 269 bp, Glycine max
  unsure (1)..(269): unsure at all n locations
gaacaacagggtttggtaccccttgctggttccaacgacgagtcatggtgccaaggtcttgatggtcttgcctctcgntgcggctgcatactaccagcaaggtgcccgtttcgccaaatggcgtactgttgtgagcatccccaacggtccctctgctctggcagttaaggaagctgcctggggtctgcctcgctatgcagcaattgctcaggacaatggattggtcccaattgtggaaccagagatcttgcttgatggggagcatggta

SEQ ID NO: 293313 - DNA, 270 bp, Glycine max
  unsure (1)..(270): unsure at all n locations
gnagagaagaaagagattgaagagacccagcagancgacaaggacagatggaagggtcttggcctatgatatctcagacgaccaacaggacatcacaagaggaaagggtttggttgactcccttttccaagctccacaggatgctggaactcactatgctgtcatgagctcctacgagtaccttagcactggacttcgccagtacttggacaacaacatggatggattttacattgctccagcttttatggacaaacttgttgttcacat

SEQ ID NO: 293314 - DNA, 269 bp, Glycine max
  unsure (1)..(269): unsure at all n locations
caactccaaacacaaagncatcatcatccatggcngcctccgtctccactgtcggagctgtcaacaganctcttttgaacctggaatggttctggagctggagcttcagctcccagttcagccttctttgggaccagcttgaagaaggttattgcctcaagggtccccaacagcaaggtttccggtggaagcttcaagattgttgctgtagaagagaagaaagagattgaagagacccagcagaccgacaaggacagatggaagggtnt

SEQ ID NO: 293315 - DNA, 264 bp, Glycine max
ttatgcagagaaacaagctcttggagaagtgaatgctgagcttcttgacacccaagtgaatcctgctgtgtgggaaattagtggacacatggttttaaagaggaggaaggattatgatgaggcgtctgaaggcaatgcttggaggcttcttgctgaggtgtccctttctcaagagaggtttcaagaagtcaatgatcttgtttttgaagccattggctgtggtgaattggaggatgtcaatgttcaaagtgtcaaaaaagaagt

SEQ ID NO: 293316 - DNA, 262 bp, Glycine max
  unsure (1)..(262): unsure at all n locations
caagttgaaccaacggatgcctctgatatatgtaaaactctatacataccagatctttagggcactctcttatattcatcgttgcattggagtctgccatcgggatatcaagcctcaaaatctattagttaatccacatactcaccaggtcaaaatatgcgactttggaagtgcaaaantcttggtaaaaggcgaaccaaatatatcgtacatatgctctagatattatagagcacctgagcttatatttggagcaactgaa

SEQ ID NO: 293317 - DNA, 268 bp, Glycine max
  unsure (1)..(268): unsure at all n locations
gcacacacattcagtcataacgtanaatatgaaattagacactatcttcgcctttatcgtagtntatattctgctggtaacctcatcagagttccctagtgttgctgcagatgatgttagcagcatcatcagtgcttcccaatttgagcaattgctgaaacacagaaacgatcaaatttgtgaggggaagaacggattctacagctacaatgcttttgtcactgctgccagaacctttgatgggtttggcactacgggtgangttaac

SEQ ID NO: 293318 - DNA, 261 bp, Glycine max
ttgtaaacaacgtgggaacaaacgtaccgaaacatacccttgatgttacggaggaagacttctcatttctgataaatacaaatcttgaatctgcttaccacctaagccagcttgcacatcctctcctgaaagcttcagaggctgcaaacatcatttttatatcctccattgctggtgtgctatcaataggtataggatccacttatggtgcaacaaaaggagcaatgaaccaactgactaaaaattggcatgtgagtgggc

SEQ ID NO: 293319 - DNA, 267 bp, Glycine max
acgaaacatggcaagagtggtggcactccaacagaaccaactatctttctctaccttagcttcctctctttctgacttcagtggaaccagacttcaaactcaacttcagttcaagagaaagcaatgccatccaaaagggtctttctacgttcccgcatcgagcaccaagaaaatcctaataatgggaggcaccaggtttattggtgtgtttttgtctaggctccttgtcaaagagggtcaccaggtgactttattcacaagaggtaa

SEQ ID NO: 293320 - DNA, 264 bp, Glycine max
  unsure (1)..(264): unsure at all n locations
tactgcttcaccttctgctctagaaaattcagtgctgaaacatggcttcggctactctctctgtagccaaaccagcccttcaggcaaatgggaaaggcttctctgaattctctggcctccgaagctcatcaggcttccttcccttttctagaaaatcttcagaggatttccattcngtcattgccttccagacctatgcagttggaagcagtgggaggatacaagaagggtgtgacagaagcaaaactgaaggttgccataaac

SEQ ID NO: 293321 - DNA, 263 bp, Glycine max
ggactcttctcagcttttggacctcaaatttcgggacggataatgcttccaattaacttgacatccgatgacggaccaacttacgtaaatgcgaagagtaccatggaatcatcagacgtcggctatcacgtgcaaaagccgtacttgagaacaaaatgattaaacgtcgcaagccatatatgcatgaatcacgccatctacatgcattgcggcgaccaagacgatgtggtggtcgcttcttgaacacaaaaggctctactaat

SEQ ID NO: 293322 - DNA, 268 bp, Glycine max
catacaaaggttgctgtaggagataagattgcagtagtgctaagtgctaacacctgcagtgaacaatggcctctgcatcagcatctctgctcaagtcttcacttgttcttgacaagtctgagtgggtgaagggacaaacccttcgccaaccttctgcatcagttgtgagatgcaaccccaccaccccatcaggcctcaccatcagagctggttcctatgctgatgagctcgttaagaccgcgaaaacagtggcttcaccagggagggg

SEQ ID NO: 293323 - DNA, 270 bp, Glycine max
cagtcaagcaaacttatggggaaaaggtcctaattcagtttgaagactttgcaaaccacaatgcttttaatctgcttgagaaatatagatctacacatctggtctttaatgatgatattcagggaacagcatccgtggttcttgctggactagttgcatctctgaagttggttgggggtaacttagctgatcacagattcttattccttggtgctggagaggctggcatcaaaacagacaaatgctccactggaggaagtgcgcaagaat

SEQ ID NO: 293324 - DNA, 246 bp, Glycine max
cgccgcggagatcagagatcccggcaagaagagccgcgtctggctcggaaccttcgacacggcggaggaggcagcgcgtgcctacgacgccgcagcacgagagtttcgcggccctaaggccaagacaaacttccctctccctttggaaaatgttaagaactcgagccccagccagagcagcaccgtcgagtcctccagccgcgaccgcgacgtcgccgccgattcctcgcctctagacctcaacct

SEQ ID NO: 293325 - DNA, 264 bp, Glycine max
  unsure (1)..(264): unsure at all n locations
caaataccaaagaatcttctttgctttctctcctttgcactttcctcctcttccttgtgattttngtttgcatcacagggagaaactgagacacagaagatgagagagataattagtattcatattggacaagctggaattcaggtggggaattcatgctgggagttgtattgccttgagcatggaattaaccctgatggcaccatgcctagtgatacctcagttggtgtagcacatgatgctttcaacaccttcttcagcgag

SEQ ID NO: 293326 - DNA, 272 bp, Glycine max
  unsure (1)..(272): unsure at all n locations
agcggctattcttgcagccaggcgtgacctncaaggaaataagtaaagatgagatatctgatgngcttgaaaggatcatagctggacctgagaagaaaaatgctgttgtctcagatgagaagaagaaattagtagnctatcatgaggctggccatgctctagtgggtgctttaatgccagaatatgaccctgtagntcaagatatcaattattcctcgtggccaagctggtggtctcacattttttgctcccagcgaagagaggctcgagtc

SEQ ID NO: 293327 - DNA, 268 bp, Glycine max
tttgcaacaaaattcaattttgagcactaaccagcaccacttccaatggcttcaaatcatgaagaagtgatacttttgggcaagtgggccagcccatttagcaacagagtagaccttgctctcaagctcaagggagttccctacaaatactcggaggaagatcttgctaacaagagtgctgatcttctcaggtacaaccccgtgcacaagaaggttccggttttggtccacaatgggaacccattacccgagtcacttatcatgttga

SEQ ID NO: 293328 - DNA, 268 bp, Glycine max
  unsure (1)..(268): unsure at all n locations
cagaattctctaaaagagatctttttctgctctttgaagaaagaagggtctttgcttgattttggngatgtctctgctctcagatctcatcaaccttaacctctccgataccaccgagaaggtgatcnccagagtacatatggatcggtggatcaggaatggacctgaggagnaaagcngggntctcggnggacnantnagcgncnctggtgngcttcncaggagantagntngaannagnccaagtccnggngntganagtggaaat

SEQ ID NO: 293329 - DNA, 272 bp, Glycine max
ctccaacaagtgtttctgtaaccatggcatccaccactctatcccctacaaccccttctcagctatgctcaggaaagagtgggattttcagtccctcacaggcacttcttgtgaagccagtgaagaggcagatgatggggaagagcaagggaatgagaattgcatgccaagccaccagcattcctgctgatagagtccctgacatgggcaaaagacagctcatgaatctgcttcttcttggtgccatttcatcccctctgctggaatgctta

SEQ ID NO: 293330 - DNA, 260 bp, Glycine max
caagttgaaccaacggatgcctctgatatatgtaaaactctatacataccagatctttagggcactctcttatattcatcgttgcattggagtctgccatcgggatatcaagcctcaaaatctattagttaatccacatactcaccaggtcaaaatatgcgactttggaagtgcaaaagtcttggtaaaaggcgaaccaaatatatcgtacatatgctctagatattatagagcacctgagcttatatttggagcaactg

SEQ ID NO: 293331 - DNA, 259 bp, Glycine max
caaagcacaaagcaaagctcatccttgagttaaaaaatggcagcagcttcttccatggctctctcatccccatccttggctggcaaggccgtgaagctgggcccatcagccccagaagtgggaagggtgagcatgaggaagaccgtcaccaagcaggtctcctcaggaagcccatggtacggcccagaccgagtcaagtacttgggcccattctctggcgagcccccgtcctacctaaccggtgagttcccaggcgact

SEQ ID NO: 293332 - DNA, 260 bp, Glycine max
aaggttgcttggcggggataagattaaagattcaacaatggcctctgcttctgctactcttctcaagtcatctcctgttcttgacaagtgcgagtgggtcaaaggccagacccttcgccaacctctcgtgagatgtaacccttcctcagcatcagctctcaccatcaaagctgcttcctatgctgacgagctcgtcaaaaccgccaaaacagtggcctcaccggggcgtggtattttggcgatggatgagtcaaatgcaa

SEQ ID NO: 293333 - DNA, 268 bp, Glycine max
  unsure (1)..(268): unsure at all n locations
cacttggaggagtgcgcccttcagcttgtntgcctattaccattgatgtgggtacaaacaatgagaagctgctgaatgatgaattatacattgggctaaagcaaagacgagcaactgggcaggantatgctgaacttatgcacgantttatgacagcagtcaagcaaacttatggggaaaaagttctaattcagtttgaagactttgcaaaccacaatgccttttgatctgcttgaganatatagatctacacatctggtctttaatg

SEQ ID NO: 293334 - DNA, 262 bp, Glycine max
  unsure (1)..(262): unsure at all n locations
agcaaccaggtcctgagagtgatgaagagataagaagagtgccaganattggaggtgaaagtgccggaacttcggcctctcagccagatgccggttcaaatgctggtacagagcgtgttcaggggacaggggagggtcagaagaagagagggagaagcccagctgataaagaaagtaaacggctaaagaggctactgaggaaccgagtttcagctcagcaagcaagggagaggaagaaggcatacttgattgatttggaaac

SEQ ID NO: 293335 - DNA, 263 bp, Glycine max
  unsure (1)..(263): unsure at all n locations
gcaganacnagcagatgtgaactcacttatgctgttgttgggattgttgtgctacttgcttccaatgctgttcaaatacagtggtgcctcagctggctctcactgtagacccttcactacacttntcaagancttctagcattgtgatgttgattgcatatgtngtctacattgtcttcaactgtggacacacagggagttatttgaagaagaagatgacggtaaagaggcgaggatggttcagaagancaagctgtgattgg

SEQ ID NO: 293336 - DNA, 268 bp, Glycine max
gtggaagtattcgcagaactttgtttcccaatttccattgcctccgcttccacctcgcaaccatgatccatcccggagaagaaccgcaaggagatctgcaaatacctcttccaagagggagtttgcttcgcgaagaaggacttcaatttggccaagcaccctgagatcgacgtgccgaatctgcaggtgattaagctgatgcagagtttcaagtctcgcgagtacgtgagagaaacttttgcttggatgcactattactggttcctca

SEQ ID NO: 293337 - DNA, 270 bp, Glycine max
  unsure (1)..(270): unsure at all n locations
tctaagtgagatacacagtagttaggtagcaagcataagtgtctaaccttagaaacatatctgctacatatcgtgtggcattttggaattgtgccactaaaattctattcatctatgggctgcctcatcttatgctatgcaatcaatccttgcaaaccctatgatccgcatttccagcgggtctagggngancnatttgggggtcngcttatncacatggagaaggatgttggncctgagagttaggtccatngctgaggaagagcaacc

SEQ ID NO: 293338 - DNA, 268 bp, Glycine max
  unsure (1)..(268): unsure at all n locations
cttttctagaaaatcttcagaggatttccattctgtcattgccttccagacctatgcagttnagcagcagtggaggatacaagaagggtgtgacagaagcaaaactgaaggttnccataaacggatttggaaggattggaaggaattcttgaggtgctggcacggtcgaaaagacncccctctngatgtcatngccatnaacgacagcggggaganaaacaagnctnntcacnnncnnangnacgattncganccncnnncntnggtg

SEQ ID NO: 293339 - DNA, 262 bp, Glycine max
gtcctaaaggccttccaataataggaaatttacatcaatttgatagttccattctttatctgcagctatggcaactctcaaagaaatatggccctatattttctcttcaattagggttaaggccagccatagttgtttcctctcctaaactagccaaagaggtactgaaaaaccatgacctagagtttagtggacgacctaaattacttggccaacagaaattgtcctataatgggtcagagattgcattttccccatacaa

SEQ ID NO: 293340 - DNA, 263 bp, Glycine max
  unsure (1)..(263): unsure at all n locations
gtggattggttgcagctggtgtcatcccatccactgangtgtgccatatctgccaatagtatagctttctgtttatcgcaaaccttgcgtacacgtacanaatcatagagacgtgcataagcgctagtccagcaacaattaattttggcagatatggcacacatcagtggattggttgcagctggtgtcatcccatcaccttttgattatgctgatgtagttactaccacaactcacaagtcacttcgaggaccacgtggagc

SEQ ID NO: 293341 - DNA, 263 bp, Glycine max
gcaaagctttttgtgcgaccaagaggttggcacctaccggaggcacatattctgattgatggtgaacctgcaactggttgcctgttgattttggcctctatttctaccacagctactcagcattccggcgcactcaaggtgctggctttggccctttcttttatcttcccaagatggagcattcaagggaagctaagatttggaacaatgtgtttgagaaagctgagaaggtagcaggcatcgaaagaggaagcataagggca

SEQ ID NO: 293342 - DNA, 254 bp, Glycine max
gtgctaatagcatatttagttgtggccttgtgctacttccctgttgctctcattggctattgggtgtttggtaattccgttgatgacaacatcctcatcaccctaaacaaacccacttggctcatagtaactgccaacatgtttgttgtcatccatgtcattggaagctaccagctatatgcaatgccggtttttgacatgatcgagaccgtgatggttaaacaattgcgcttcaagccaacttggcagctacg

SEQ ID NO: 293343 - DNA, 255 bp, Glycine max
tttggactcccagaaggtgagacttgcgttggaagagaaaggcattgattatacatctcaccatgccaatcccataactggcaagaacttggattcttcattcttcaacatgaatcccggtggaagactccctgttttccaaaatgggtctcacatcctttacaagactattgatataatccagtacatagaaagaattgctgtgttctcctcagggtctgagaatatcagtagcagtagcagggaagtgattga

SEQ ID NO: 293344 - DNA, 259 bp, Glycine max
  unsure (1)..(259): unsure at all n locations
atgatcagtcaaaatctaatgcacaacagacacaaggtttgcagaagagcctttgtggtcatcctcttttctttggtataacaatgggactgctttctgagatcataaattctaggctcttcacatctgtcagagattctctggggttaacatatgacgtgtcatttganttaaacttgtttgataggcttaaactaggatggtatgtgatctctgtgacatcaactccaagcaaggtccacaaagctgttgatgcatg

SEQ ID NO: 293345 - DNA, 261 bp, Glycine max
agcaaccaggtcctgagagtgatgaagagataagaagagtgccagagattggaggtgaaagtgccggaactttcggcctctcagccagatgccggttcaaatgctggtacagagcgtgttcaggggacaggggagggtcagaagaagagagggagaagcccagctgataaagaaagtaaacggctaaagaggctactgaggaaccgagtttcagctcagcaagcaagggagaggaagaaggcatacttgattgatttggaa

SEQ ID NO: 293346 - DNA, 263 bp, Glycine max
  unsure (1)..(263): unsure at all n locations
atggccactcttcttcttcccacgctcctccttctcatacccttcgccaccctcgtctccgcccgccctcacctcgccggagactttctccgactgccctccgaaaccgataacgatgacaacgtccagggcacccgctgggccgtcctcctcgccggttccaatggctactggaattacagacatcaggctgatgtttntcacgcctatcaaatactaaggaaaggtggcctgaaagaagaaaatattattgtttttatgta

SEQ ID NO: 293347 - DNA, 266 bp, Glycine max
  unsure (1)..(266): unsure at all n locations
gttgagaactaagaaggagaagcaaatggcttcctcaatgatctcttccccagctgttaccactgtccaaccgtgccggtgccggcatggttgctccattcactggcctcaagtccatggctggcttccccaccaggaagaccaacaatgacattacctccattgctagcaacggtggaagagtgcaatgcatgcaggtgtggccaccagttggcaagnagaantttgagactctttcctacctgccagaccttgatgatgcacaa

SEQ ID NO: 293348 - DNA, 262 bp, Glycine max
  unsure (1)..(262): unsure at all n locations
agcaagctcatcctagagttttaaaaatggcagcagcctcctccatggctctctcttccccatccttggctggcaaggccgtgaagctgggcccatcagcccccgaagtcgggagggtcagcatgaggaagaccgtcaccaagcaggcctcctccggaagcccatggtacgggccagaccgcgtcaagtattggggccattctctggcgagccccgtctaactcantgggagttccaggtgactacggttgggaattgttgg

SEQ ID NO: 293349 - DNA, 267 bp, Glycine max
  unsure (1)..(267): unsure at all n locations
ctcactatgcagtcatgagctcctacgagtacctcagcnctggacttcgccagtacttggacaacaaaatggatggattctacattnctccagcttttatggacaagcttgttgttcacatctccaagaacttcatgaccctgcccaacatcaaggttcctctcattcttggtatctgggggaggcaagggacaaaggaaaatctttcccaatgtgagcttgtcctttgcccaagatgggantcanccccatcatgatgagtgctgg

SEQ ID NO: 293350 - DNA, 266 bp, Glycine max
  unsure (1)..(266): unsure at all n locations
ctgatgatgatgatggtactagccccatcctacctgggctgcctgatgatgtttcaaaacactgccttgcactcgtgcctcgttcgaacttcccagccatgggtggtgtctgcaaganatggaggggctttattcgaagcaaagaatttataaccgtggcgaaaattggctgggatgcatgaggaatggctctatatcttgacagcaggcagtgaaggaaaagggagccattgggaggtcatggattgtcttgggcataatcgccg

SEQ ID NO: 293351 - DNA, 266 bp, Glycine max
  unsure (1)..(266): unsure at all n locations
atactattgggattgatttgaaaaaattaaatgagatttaccgttacaagacagaggagtactcatatgatgcagttaataagttcaacatatacccagaccagatttctccttggttagtggaatggatgccaaacaaaggaggctatttaattggcaanctacaaccagctcacatggatttccgatttttttcactgggaaacttgtnncctgtcgtaaacagcttggccacagaggagcaatcacatgccatattggatctt

SEQ ID NO: 293352 - DNA, 261 bp, Glycine max
  unsure (1)..(261): unsure at all n locations
gagatgaagcatttggtcacttgaagtcatcagattttctcgtttatggaatcaaatcagtggctcaagacgtcttgcccgtgttgactgatgcgtttgatggcaatcttttgagcctgagtttgataactttgctgaagtgcgcaaactctatgaaggtggagttacatacctacaaactttcttagcaagatccgcccctataccagtggtcaaggaaatttttccgaactgatggcgaacngttcctcaagtatccac

SEQ ID NO: 293353 - DNA, 261 bp, Glycine max
  unsure (1)..(261): unsure at all n locations
tgcaattgaagttgaagtcttgcccttctctcttcaactccaaacacaagacatcatcatccatggctgcctccgtctccactgtcggagctgtcaacagagctcttttgaacctgaatgggtctggacctggggtttcagctcccagttcatccttncttgggagcagcttgaagaaggttattggctcaagggtccccaacacaaagatttcctctggaagcttcaagattgttgtgtagaagagaagaaagagattga

SEQ ID NO: 293354 - DNA, 269 bp, Glycine max
cgagtggcaaggcagatggttgagagatttggattcagcaaaaaaattggacaagttgccattggtggacctggtggaaatccattcttgggtcaacagatgtcatcgcaaaaggattactccatgggcaactgcggatgtagtggatgcggaagtgagggaactggtagagagagcatattctagggcaacacatattatctcaactcacattgatatccttcacaagcttgctcaacttctcatagaaaaagaaactgtggatggtg

SEQ ID NO: 293355 - DNA, 266 bp, Glycine max
cacaccccaatgcttttctccattttttccatcttcaagggataaacttgtcttcccaactcacagaggtttcaagaaatccttgcaaaactcaacactgtcatacccttatctttactccaccggtgctgcctatagaaaatccccgttttgtttgcaatgctcgtgaagcagtaaatgaagttaaagtggtgactgactcaagctggaacaaccttgtcattgcaagtgagacccctgtgctggtagagttttgggcaccatgg

SEQ ID NO: 293356 - DNA, 262 bp, Glycine max
ttggggataaggtacactgttgggaaggaggcttcgattttgcgggagcttaagcagggtgattttgatccgaaggatcaagttctggactaggtttccgacggaggggtcgaagcttacaccgccgcatcagtccgcggagtttcgatggaaggattactggccttgtggtttttaggcatttgaggaagctgtttcaggtggatcctgctggattacatgttgggctatatgtggaaatgatgctcttcgggagctttcg

SEQ ID NO: 293357 - DNA, 266 bp, Glycine max
  unsure (1)..(266): unsure at all n locations
cgagtaagaaccacggtgatccgtatccttttgatggtccaggtgggatattgggccatgcattcgctcccactgatgggaggtgccactttgacgccgacgaatattgggtggcgtctggcgatgtcaccaaatcgccggtgacaagtgcgtttgaccttgaatctgtgggcagtgcacgagatcgggcaantgctcggattacggcaantcgtcggacctaaagaagcccatccatgtaatccttctaataccacctcgaacta

SEQ ID NO: 293358 - DNA, 257 bp, Glycine max
  unsure (1)..(257): unsure at all n locations
tggattctacattgctccagcttttatggacaagcttgttgttcacatctccaagaacttcatgaccctgcccaacatcaaggttcctctcattcttggtatctggggaggcaagggacaaggaaaatctttccaatgtgagcttgtctttgccaagatgggaatcaaccccatcatgatgagtgctggagagttggaaagtggaangcagagagccagcaaaaatgatcaggcagagatcaccgtgaagctgcaga

SEQ ID NO: 293359 - DNA, 258 bp, Glycine max
  unsure (1)..(258): unsure at all n locations
aagccaccgatcatctatggtgatgtgagccgcccaaagccaatgaccgtcttctggtcatctctggctcagagctttaccaagcgcccaatgaagggaatgcttaccggtcctgttaccattctcaactggtctttgttagaaaatgaccaacctagatctgagacaactaccagattgctttgtctatccaaggacgantnggaagaccttgaaaaggctggcatcactgttatccaaattgatgaagctgctttg

SEQ ID NO: 293360 - DNA, 261 bp, Glycine max
  unsure (1)..(261): unsure at all n locations
aggaatctaccctgcacttggttttgaggcttcgtggtggcatgcaaatctttgttaagactttgaccggaaaaacaataactttagaagttgaaagttctgataccatcgataacgtgaaggcaaagatacaggacaaagaggggattccaccagaccagcagaggcttatcnttgctgggaagcagctggaagatgggtccgtactcttgctgattatnatatcccagaaggagtcccactctgcatttggtgttgagg

SEQ ID NO: 293361 - DNA, 257 bp, Glycine max
  unsure (1)..(257): unsure at all n locations
ggcagcgtccttgttggggaagcttgttagccaacaaatgcatggaccaagagttgctataacacttgcaaggtttctccctgatggccttgtgtcagtaattagggatggacctggtgaagctgttgtagttggtctgagcagactacagagacaccagaacttgtatggacaccagcgatggcagcttccttatctgcacaaatttccactatggcattagatgnctaccgtgagcagatgaaggggcgngttgt

SEQ ID NO: 293362 - DNA, 251 bp, Glycine max
  unsure (1)..(251): unsure at all n locations
ctcatcctcttctttctctctctaccattgccatggatccctacaagcaccggccatccagcgccttcaattctcccttctggactacaaattctggtgctcctatttggaacaacaactcctctttaaccgttggagctagaggtccaattctgctggaggattatcatcttgtggagaagntgcaaatttgatagggaacgtatccagaacgtgttgtccaagcccaggggcgnaatgcnaaagggttt

SEQ ID NO: 293363 - DNA, 250 bp, Glycine max
cataccctttctatcctacttgctacttcccacttccattcttttcttaaccagctaggatggtgagtgttgaagagattcgtaaggcgcaacgtgcagaaggccctgccactgtcatggctattggcaccgccactcctcccaactgcgtggatcagagtactatcctgactattatttccgcatcaccaacagcgagcacatgaccgagtcaaagaaaattcaagcgcatgtgtgataagtcgatgat

SEQ ID NO: 293364 - DNA, 251 bp, Glycine max
ttttccaacagtgttcaccatacatggactctggcctgactataatgatggaacctggccgtcctgttgctctggatctagtttcgatccaaaagagatattgacattgactaatagtttagagcaatattggccatcattgagctgtagcaagccatcattatgccatggtgggaaaggaacattttggggctcatgagtgggagaaacatggcacatgctcttatccgtgtttcgaaatggaatatgat

SEQ ID NO: 293365 - DNA, 254 bp, Glycine max
acactcataacacaaagcacaaagcaaagctcatccttgagttaaaaaatggcagcagcttcttccatggctctctcatccccatccttggctggcaaggccgtgaagctgggcccatcagccccagaagtgggaagggtgagcatgaggaagaccgtcaccaagcaggtctcctcaggaagcccatggtacggccccagaacgagtcaagtattggggcccttctctggcgagcccccgtcctaactaacggt

SEQ ID NO: 293366 - DNA, 258 bp, Glycine max
  unsure (1)..(258): unsure at all n locations
cgtgattgcacttgggatcggtggtataaagtcatgtntgccatcttttggggcaggtcaatttgatgatactgatccaaaggaaagggttaagaaggggtcgtttttcaattggtattacttttctatcaatctaggtgccattgtatcgagcagcatagttgtgtggattcaagacaatgcaggatggggccttggatttggcattcctactttgttcatggtattatcctgtgataagcttctttataggcacac

SEQ ID NO: 293367 - DNA, 258 bp, Glycine max
ttgcacttcccaaaaacacagttggaggaaccattctgcgtagtgatctattggcaaattttttgacagagggcaattttagagcaagtgttgatttgcagcgcactcatcgtattaaaggaatgattaaaatggtggccacagttggtattcctgagaatacaggtatagcattgggcctgtgctatgaatagttcttttaggggcgtgccagttctgatatttacaccatctgctctcaagactgtgattatggaa

SEQ ID NO: 293368 - DNA, 261 bp, Glycine max
caaaacactcataacacaaagcacaaagcaaagctcatccttgagttaaaaaatggcagcagcttcttccatggctctctcatccccatccttggctggcaaggccgtgaagctgggcccatcagccccagaagtgggaagggtgagcatgaggaagaccgtcaccaagcaggtctcctcaggaagccccatggtacgggcccagacccgagtccagtacttggggcccattctctgggcgagcccccgtcctacctaacc

SEQ ID NO: 293369 - DNA, 257 bp, Glycine max
  unsure (1)..(257): unsure at all n locations
cagtggcaatgattgctactggatgtgttatggcccgcatttgccacaccaataattgcccagttggtgttgccagtncagaggnaagagttgcgtgcacgctttcctggtgttcctggggatcttgtcanctactttgtgtatgtagctgaagaggtaagaggcatattggcacagctggggtatgagaagttggatgatgtgattggcggactgatttgttccaaccagagacatatctctagcaaaaactcagc

SEQ ID NO: 293370 - DNA, 299 bp, Glycine max
  unsure (1)..(299): unsure at all n locations
atccttcttgcagcaagggcttctaggactgagaatcaggatgctatagatgctgcaatagttgggatgcttgctgatccaaaggaggcacgagctggtatcaggnaggtccactttcttccattcaatcctgtggacaagaggactgctctaacttacattgattctgatggnaattggcatcgatctagcaaaggagctcccgagcagatattgaacctctgcaactgcaaagaggatgtaaggaaaagggttcatngaacgattgacaagtttgctgagcgtggactccgttcttt

SEQ ID NO: 293371 - DNA, 295 bp, Glycine max
caaacacaatgcattccacccgagggaatgatttagcaatggcttttgccatggtccctgtgcctcccccaacatcaaccaatgactccaatcccatgaacattcccttacatttctcaatcaccaaactagtgacaaatcgagcatcacttgccatggcatcattgaacaagttattatgttttggatcagcgccaggtaaatcccaaagcatcatcccatgtgccgtttcaaatggtgtagtgtcaccatttttgaaccaagtagaaaattgattccatggatttgtcaaaat

SEQ ID NO: 293372 - DNA, 295 bp, Glycine max
atcacccacctatgctcaacgacgaagtgtggcgcctagagaagattggtaaagacggagctttccacaaaaaattgtccaaagaggggataaacagcgttcaagacttcctcaagttatactttgttgatttccataggctcaaaaagattttgggcgttgggatgtcagataaaatgtgggatgtgacaatcaagcatgcaaagacttgcgagaagggcaacaaatactacgcgtaccgtgggcataattttaccgtctttctgaattccatatgccagttggttagagctga

SEQ ID NO: 293373 - DNA, 272 bp, Glycine max
  unsure (1)..(272): unsure at all n locations
ggagtatgcgaggcagagatttcagcaatactggttgaagaagcctactttattggactcaccaagtatcgtttcccaagatgggattgccaatggtgtgaaccattgacatggatgcttnttatgtatttagcatgttcagcttggtatgtgttgactaatatatagaaaggcatgatgtgatgcataaaatttgtaaataatatataactaaaaatgtgtgatttgagaatttttacaacagttatgttagtaatccctccttttgtgat

SEQ ID NO: 293374 - DNA, 292 bp, Glycine max
caagttcgccacagttgtgcgtgtcatcgcacacacacaggccaagaaggtcggattcaccaagaaggccgatgtagtcgagatccaagttaacggaggagacatcgccgccaaggtcgcctttgcccgtggactcttcgagaagccagtcgccgtcgacgaggttttctccgagtctgagcagatcgacgttatcggtgtcaccaagggttccggattcgagggagtcacagccagatggggaaccagaagactgccacgtaagacacacaagggtctgagaaaggtcgct

SEQ ID NO: 293375 - DNA, 289 bp, Glycine max
ttctccctcttttctctctgccctccgccatgactgaggataaggagatgtcttcctctgtcaccaatggcgatgattccctcactggtcacatcatatctacaactattggaggcaaaaatggggaacccaaacagactattagttacatggcagaacgggttgtaggaactggatcatttggaattgttttccaggcaaaatgcttggaaactggggaagcagtggctattaaaaaggttttacaggacagaagatacaagaatcgcgaactacagttaatgcgtgt

SEQ ID NO: 293376 - DNA, 294 bp, Glycine max
  unsure (1)..(294): unsure at all n locations
ctccgtataggatcaggaaactgctaagaccatgttntttatgtactatgtaattnctgtatgtatgcttgacatatacaagtgggaaatccaaggaaatgtgtggtcctaaaaatggtgcaagataagcaactctctatggagattggcggggtggggttgtttcaaactgcaacaggggaatacttgccactgattatgtctcagttattgcataattaaactaatatacgtgccactgtcaatgttggttcttatggatgtggtagtgccatacccaaaaggataccaaaa

SEQ ID NO: 293377 - DNA, 294 bp, Glycine max
  unsure (1)..(294): unsure at all n locations
gtgatgataacttaattagtgttcatgaatatgtcaagccttactttagtggttctaaattgaaaagctttctagctggtcataatatcaccattactgatggtattgacaaaactagtgcaactttgcaatttagaaagttagcagattgtgattttctcaagagaaactttaagcagatgtctaatgttttgtgggtggctcctgaggataaggcgagtttatggtcacaacttcattatgtttcgtgtaatantctggaaatgcaagaagctatcttgtcaatctcgtaaa

SEQ ID NO: 293378 - DNA, 244 bp, Glycine max
  unsure (1)..(244): unsure at all n locations
ctacaacacacttttttaagtgattcgttcgcagaaacatggcttcttcgnttctatccgcagcttcgcacgctgtctcanctcttgttctctgtccancacgcacaagggagagcccatgcttggaggcaacactttgagatttcacaaaggacccaattcctctctagttcaaggtctagaggtcggatctctatggctgttgcagttaatgtatctcggtttgaaggcatacctatggcnc

SEQ ID NO: 293379 - DNA, 290 bp, Glycine max
  unsure (1)..(290): unsure at all n locations
tcgtgaatgcgtataaaagganaataaagaaattagcgtcaaaatgttgggtgtgttcagcagctccatagtgtcgccnccggacgagctcgtngccgccggccgccgtactccgtcgccgaagatgacggcggcggcgctgcggaagcggttcgaggagaagaacccctccgccgtgtcggtggaggtcggagagcatgtccagctcgcttatacccaccacaacgagtcgccgtttcagcccagatcctttgctgtcaaggatgaggtgttctgcttgtttgagggag

SEQ ID NO: 293380 - DNA, 279 bp, Glycine max
cctgagcttcatgtttgcaagtctgatccttgggatttgccaggtgatttggagcaagagagatacttctttagcaccaaagtggccaaatatcccaacggaaatcgctccaacagagccacaaattcgggttattggaaggcaactggcttggacaaacaaattgttacttcaaaaggcaacaaccaagttgtcggaatgaagaagacacttgttttctacagaggcaagcctcctaatggatccagaactgattggatcatgcacgagtatcgcctc

SEQ ID NO: 293381 - DNA, 292 bp, Glycine max
caagaaatacttagataggcttttgagtgaggttttggacgaagctttagtgaagcttatcaatacttccgataaatggggtttcccaggcaatgcaaatggcagcgaatatggttgtcttggagcgtgcttgtgattttttctttcgccatgctgcacaactttcaggtgttcccttgagaatggtggagagaagcagaaggcagttccctcttagaaaagcccgtgatgctgcagaagacatgctctctgggctactcaaagccaaggttgatggattcatgacattgat

SEQ ID NO: 293382 - DNA, 293 bp, Glycine max
  unsure (1)..(293): unsure at all n locations
cgaccttggagagcgttcttgttgtacggnccgccggggacggggaaatcgtatttggccaaggccgttgccacagaagctgattctacgtttttcagtgtttcttcatcagacctggtttcaaagtggatgggagaaagtgaaaagctggtctcaaatcttttccaaatggctcgcgaaagtgcaccttctataatattcgttgatgaaatagattctctatgtggtcaacgtggagaagggaatgagagtgaagcttcaaggcgtattaaaactgagcttctggtgcagat

SEQ ID NO: 293383 - DNA, 297 bp, Glycine max
  unsure (1)..(297): unsure at all n locations
tntanacatcatgatgttgagcaagagtacnactnanggnttttatgtatntgtaccaganaagttgagatggcntgttnttgtgatagcnatacttgctgnggttgtgggaagccaatccatcatcactggaactttctcaatcatcaggnaatgctctgcattaagttgctttcctagagttaaagtggttnacantnntncaaaatccatggacaagtatatatccctgagatcaactggttgttgatgctctgtgtttggntgtaantattggtttagagacanaaagcttat

SEQ ID NO: 293384 - DNA, 287 bp, Glycine max
cttgttatactggcattgcagattttgtgcctgctgacattgaaactgttggataccgagtattcttgggacacaaacaatactttgtatcttcagatgttggtgcgggaaagatgcaatggtatgcatttcacaaagaacctcctggtggtgttgatgagcccaacggaaaaaaggaaaggttgcttaggatatttgagggctggtgtgataatgctgtagatctgatacttgccacagaagaagaagcaattctaagacgagacatatatgacaggataccaaca

SEQ ID NO: 293385 - DNA, 280 bp, Glycine max
  unsure (1)..(280): unsure at all n locations
ttccaatatattccattctctctgtgtatttccctacctctcccttcaagatgcagatcttcgtcaagaccctcaccgggcaagaccatcacccttgaggtggaaagctctgacaccatcgacaacgtcaaggccaagatccaggacaaggaaggaatccccccggaccagcaacgtctcattttcgccggaaagcaacttgaggacgggncgtacccttgctgactacaacattcagaaggagagtactcttcacctcgtcctccgtctccgtggtggc

SEQ ID NO: 293386 - DNA, 292 bp, Glycine max
  unsure (1)..(292): unsure at all n locations
cttttaaatttgcaagangttattcttggtaccaagctttccattctcatccctgccattccagctgccatcattgccgantgctatggctttggaagaccttggatttttatattgagcttacttggacttacaccacttgctgaacgtgtgagcttcatcacagaacaagttgccttttacactggtcccacagtcggaggacttctgaatgctacntgtgggaatgttactgagctcataatagcaatatttgcccttagcagtaacaaaattgctgtggtcaagtatc

SEQ ID NO: 293387 - DNA, 285 bp, Glycine max
  unsure (1)..(285): unsure at all n locations
gcgtgggggagctgagcgcggcggacctgaaggggaagaangtcttcgtcagggccgacctcaacgtcccgctcgacgacaancagaacatcaccgacgacaccagaattcgcgccgccattcccaccatcaaacacctaatccaaaacggcgccaaagttattctctccagccacttggggaggccgaagggtgtcactcccaaatacagcttggcacctcttgtgccccggctttctgagctcattggtatccaggttgtcaaggctgaagacagtattggtc

SEQ ID NO: 293388 - DNA, 281 bp, Glycine max
  unsure (1)..(281): unsure at all n locations
ggaatgtggntgctcagcttgtgagaagagctgaaagggctggattcaaagccattgcccttactgttgataccccaatactaggacgcagagaagctgatatcaagaacagattcacattgccgccatttttgacattnaagaactttgaaggattggaccttggaaagatggacaaagctgatgactctggacttgcttcatatgtntctggtcaaattgatcgtactttaagctggaaggatgtgaagtggcttcaaacaatcaccaaactgccaatt

SEQ ID NO: 293389 - DNA, 280 bp, Glycine max
gatgtgcgcagtaaatcaagaacaatatcaaagcctgttgaacatccctctgagctccctaaatggaactatgatggatctagcactggacaggcaccgggtgatgatagtgaagtaatcctatatcctcaagcaattttcaaagatcctttccgtggtggtaacaatattttggtcatttgcgattcttacaccccacaaggtgagcctatccctacaaacaagagacacagagctgctgaaattttcagtaacccaaaggtccaagcagaagttccat

SEQ ID NO: 293390 - DNA, 277 bp, Glycine max
  unsure (1)..(277): unsure at all n locations
aggtggcttcaacagggacctgggcattcgctttttccagcttatatgtgtacaaggacaggaatgtggttgntcancttgtgagaagagctgaaagggctggattcaaagccattgcccttactgttgataccccaatactaggacgcagagaagctgatatcaagaacagattcacattgccgccatttttgacattgaagaacttgaagggatggaccttggaaagatggtccaagctgatgactctggacttgcttcatatgttctggtccaa

SEQ ID NO: 293391 - DNA, 261 bp, Glycine max
  unsure (1)..(261): unsure at all n locations
gtctctgtgtttgcggctgacgatcngaaacgagtgactncntcgtttctcgcaagtacaagtantcatggggaagggnaaangttcacatcaacattgtcgtcattggacatgtcgactctgggaagtcaactaccactggtcacttgatctacaagcttggaggtattgacaagcgtgtgattganaggttcgagaaggangctgccgagatgaacaagaggtcattcnagtatgcctgggtgctcgacaagctcaaag

SEQ ID NO: 293392 - DNA, 287 bp, Glycine max
  unsure (1)..(287): unsure at all n locations
gctgctatgatgaggtactggaataatgaggaggttttgcagaagttgggacaagccatgggtcttgccattcgggagatgcaggtgcctctgctgaaaattctggggcagatganaccgaagatttgggaaatgaagatgaatcaattgttcatcatactgctagtgntggtgatgtggagggcttgaaaaatgcactagcctctggtgctgacaaggatgaagaagattcaganggaagaactgctttgcatttgcctgtggatatggcgagtaaaatgtgctcc

SEQ ID NO: 293393 - DNA, 273 bp, Glycine max
  unsure (1)..(273): unsure at all n locations
gattgctgagtcaaacttgaattgaaggtgaagaaggagatggcagnaacttcttccttgtgttnatcgancctncaatcccaaatcaatggattctgcnttcacaaaacctctntttcccatcctcgttccctnactttctcnaggaagaaaatttcaaccacagtgaaggctacatctcgtgttnacaagttttcaaaaagcgatatcattgtttctccatccattctttntgcaaactttgcaaaattgggagagcaggtgaaagcagtg

SEQ ID NO: 293394 - DNA, 272 bp, Glycine max
  unsure (1)..(272): unsure at all n locations
cgacgtcgttgtgctctctgaagataactnccgagaaggaagttggtcaggacagaggagctctcgttgagntctatgctccttggtgtggacactgcaaaaagcttgctccagaatatgaaaagcttggtagcagcttcaagaaagccaaatctgttttaatcggcaaggttgactgtgatgagcacaagagtttgtgcagcaaatatggagtctctgggtacccaacaattcagtggtttccaaaaggatctcttgaacccaaaaagtat

SEQ ID NO: 293395 - DNA, 282 bp, Glycine max
  unsure (1)..(282): unsure at all n locations
attcattcaagattcagcaagtgcgttttggaagcagagaccgaaatacttcgagatggcccgtacaaagcaaactgctcgtaagtncaactggaggaaaagctcccaggaagcagcttgcaaccaaggctgcacgtaagtctgcaccaacaactggtggtgtgaagaagcctcatcgttatcgccctggaactgttgctcttcgtgagattaggaaataccagaagagcactgagctcctaatcaggaagcttcctttccanagnttggttcgtgaaattg

SEQ ID NO: 293396 - DNA, 283 bp, Glycine max
  unsure (1)..(283): unsure at all n locations
gaaanacagtggcttcaccanggaggggtattttggccatggatgagttccaatgctacctgtgggaagcgtttggcttnaattgggctagagancactgaagctaaccgncaggcatancgtaccctactcntgacagttccangccttggtcagtanatctctggtgccattctcttgaggaaacanttctaccaatccacaactgatgtgacaggaagattgttgacgtgctgcntgngcaaaacattgttccnggtatcaaatcnacaagggttggtgc

SEQ ID NO: 293397 - DNA, 281 bp, Glycine max
  unsure (1)..(281): unsure at all n locations
ctttctatagggggaggagctggtgcaaagaatgctattctcatgcaatatgccaaatgctgttctttcnatgtggagatattttgttggagatctcgtctttgaagtttctaagatgacttctccctacattaaatgtacagtctctttcttcatagcatttggaaatttggctgatgacaccatcaattttgaggctttccccacaagctggtgcagtttggagagattcaggaaaaagttgtattgaaatttcacaagaggattncctacagctngtc

SEQ ID NO: 293398 - DNA, 271 bp, Glycine max
  unsure (1)..(271): unsure at all n locations
ctgcaattcccgacactggcttgctttgtgatttgctttggtctgctcctggtagggatgtgaagggttggggtatgaatgacagaggagtgtcctacacctttggccctgatatggtcgctgaattcttgacaaagcatgacttngaccttgtttgtcgtgctcaccaggttgtagaggatgggtatgaattctttgctgataggaaacttgttacgatattttcagctccaaactattgtggtgaatttgacaatgctggtgcgatgat

SEQ ID NO: 293399 - DNA, 284 bp, Glycine max
  unsure (1)..(284): unsure at all n locations
ctctccttcgacgattcttcagggtttcgcttcgttcaccaacgcnccgtggtttctcttctcttcacgattttggggtcgaaatttggagtttagtttgccggcatgtccatgagtgagcgcaagactattgacctagatcaaggatgggattttatgcagaagggcattttgaagctgaagaacattctagaagggcttcccgagcctcagttcagctcggaggactatatgatgctatacacgaccatatacaatatgtgcatcagaagccgcctcatgac

SEQ ID NO: 293400 - DNA, 273 bp, Glycine max
  unsure (1)..(273): unsure at all n locations
cnnttgattgataacaacnggatattnaaanttgcagactttggnttggcaannntttttgatcccaatcaagctcagccactgacaanccgagttgtcactctttggtataggccaccagagcttttgcttggagccacttattatggcactgctgtggatttatggagtacaggttgcatacttgctgagctttatgctggaaagccnataatgcctggaagaatgaggtggagccnttacataanatttttaaacttngtggttcacctt

SEQ ID NO: 293401 - DNA, 271 bp, Glycine max
  unsure (1)..(271): unsure at all n locations
aaaatccaggacaaggagggtatcccaccagaccagcagaggttgatatttgctgggaagcaattggaggatggaaggactcttgctgactacaacattcagaaagagtctactcttcaccttgtgttgcgtcttcgtggtgggttttaaaagtctgagaatgttctgtaggtgtcttgaagtctaagcatgtggaagttccgaagatctttgggttttntcttttnaatntnccngaaggtttactcttgncaaattgtttccatggtca

SEQ ID NO: 293402 - DNA, 261 bp, Glycine max
  unsure (1)..(261): unsure at all n locations
gtccaagtgttgagacatgatcccaccgttggggaacttagggtgcacccctttgaagtaaaccttaacgacgaggtcgaagtatcccanttcgtgaacgctgcttgttggagtgtaggntcgcatgcatagtttctcgtccaacggtggcacataggaatatgtgcttcccaactggcaaacccatgagtaggtcgtcggaggggagggcaaagcggaanagcctaacgtcgtgagantggaggntttggagatgagttg

SEQ ID NO: 293403 - DNA, 266 bp, Glycine max
  unsure (1)..(266): unsure at all n locations
ggccgttgcaaatcagcccgtgagcnttgctattgaaggaggnggcanggaatttcaattatatgtatctgngcgtattcacggggagatgtggcacagcacnagatcatggtgtcgtggctgttgggtatggaacagctaaaggtctgattattggatcgtaaggaattcatggggttctagctggggagacgatggctacatcagattagaaagaaatctgctaacagcagatcncgcaagtgtggaattgcaattgagccatc

SEQ ID NO: 293404 - DNA, 243 bp, Glycine max
  unsure (1)..(243): unsure at all n locations
gatgatgaagtgaggaagtggatttctggtgttggtgttgacagtgttgggaagaagcttgtgaactcaaaagatggacctccaacctttgagcagcccaagatgactctggagaagctctgctgtatggtaaatgctgtccaagaacaagagaatgtcagagagtccatnatgacaagtattgaagaggcgtctgaatgtaacgagngtatcagaggacttcttcatctgattgagaancaa

SEQ ID NO: 293405 - DNA, 280 bp, Glycine max
cactcttggtattgtcaagcacgtggatgccaagaatgtcaccattcttgaccagtcaccccaccagcttcgccaaggccaagcagaaggagccactcaaggaatgcaaaataatcgaaggggatgccgaggatctcccacttcgaactgattatgccgatagatatgtatccgcaggaagtattgagtactggccggatccacagcgtggcatcaaggaggcatacagggttttgaaacttggaggcaaagcgtgtctattggtccggtctacccaaca

SEQ ID NO: 293406 - DNA, 278 bp, Glycine max
  unsure (1)..(278): unsure at all n locations
aagatggagaagtatcagatctggagcaggagaatagcgttggcagcgtttgcntttgccctgctgttccaatgcggcctcagcagacgacgtcgttgtgctctctgaagataacttcgagaaggaagttggtcaggacagaggagctctcgttgagttctatgctccttggtgtggacactgcaaaaagcttgctccagaatatgaaaagcttggtagcagcttcaagaaagccaaatctgttttaatggcaagttgactgtgatgagcatagattt

SEQ ID NO: 293407 - DNA, 274 bp, Glycine max
tgccgtcgtttcggtgaataagtgtcgtttaaagatgcagagtctgcaacagaaggcttccgaatggagcggtgtttccatagacgacgctttcggcatcgacgacaccaatctcttccagaaactcggcctccaaaccttcattaacctctccaccaatttctacaacagggtttacgatgacgaggaagaatggtttcgttcaatattcgcgaattctgagaaggagaatgccatcaaaaccaatacgagttcttcgtgcagcgaatgggtg

SEQ ID NO: 293408 - DNA, 278 bp, Glycine max
  unsure (1)..(278): unsure at all n locations
ggantggcttaacatatgaaactggagaccatgtgggtgtttatgctgataactgcgacgaaactgttgaaganactgncgaagttgttgggtcagaatttagatctattgttttctcttcacactgataaggaggatggcacttccctaggtggttctctcctgcctcctttccctggcccttgcacactgcgtactgcanntagcacgctatgctgatctcntgaacncccacgaaaggctggtttagttgtttagcttctcatgcatctgaacta

SEQ ID NO: 293409 - DNA, 279 bp, Glycine max
  unsure (1)..(279): unsure at all n locations
agcaatttgctgcagaagaaatctcttctatggtgctcatcaagatgcgtgagattgctgaggnttnccttggctccacggtgaagaatgctgttgtcactgtccctgcttanttcaatgattctcagcgtcaagctaccaaggatgctggagtcattgctggtcttaatgtgatgcgaattatcaatgagcctactgcagctgccattgcttatggtcttgataagnaggccacaagtgttgntccagaagaatgtgttgatttttgaccttggtggc

SEQ ID NO: 293410 - DNA, 279 bp, Glycine max
  unsure (1)..(279): unsure at all n locations
gaagagagatggatccagacgcgttggcaaaggcattcgtggagcactactacagcaccttcgacaccaacaggaacggcttagcgaatctctaccaggagggttccatgctcactttcgaagggcagaagatccaaggcgcttccaacatcgttgccaagctcacctncctcccttntcagcagtgccaccactcaatctccaccgtacgactgccagccctccggcgttcaacgccggcatgctcgtcttcgtcagcggaaaccttcagctcgccgg

SEQ ID NO: 293411 - DNA, 274 bp, Glycine max
  unsure (1)..(274): unsure at all n locations
gcatactacgagcaaggtgaccgtttcgccaaatgggcgtactgttgtnancatccccaacggtccctctgctctgagcagttaangaagcagcctggggtctggctcgctatgctgcaattgctcaggacaatgggttngtcccaattgtggagccaganattctgcntgatggggagcatggtantgatagaattttgaagtagcccaaaaggtctgggcagaggttttncttctaccntgctnagaacaatgtccttttgagggtatctcc

SEQ ID NO: 293412 - DNA, 274 bp, Glycine max
ctcagtttatctagtgccctagtagctgatgatggcaagttccttctggctgcacgcaagttcagacgccctacctgcacagattatattatctcccttgatgcagatgatatgtccagagaaagcaatgcctatgttgggaaattgagatcaaattttttgggaaccaagtttacaatctacgatagaaaaagttgttccactgagctggtggtgaattcaaaacaagtttcacctaggcccagggtcccaacaggcaactatccagttgctc

SEQ ID NO: 293413 - DNA, 274 bp, Glycine max
cagtaacaaaattgctgtggtcaagtattctctgttgggttctattctttcaaaccttcttctggttcttgggacctctctattatgtggtggcattgcaaaccttaaagtggaacaaaaatatgacagaagacaagcagatgtgaactcacttatgctgttgttgggattgttgtgctacttgcttccaatgctgttcaaatacagtggtgcctcagctgctctcactgtagacccttcactccacttgtcaagagcttctagcattgtgatg

SEQ ID NO: 293414 - DNA, 302 bp, Glycine max
  unsure (1)..(302): unsure at all n locations
ccgccatattccacaagaactctccaangatcctccttcccacgagattctttggtgggaaaaatccaagaggtttgaaatttgaaggcagggaagatggattatttcaatgcaccaggaagaaaccatctctttgttccagggccggttaacantccggaccagatcatccgggccatgaacagaaacaatgaggactaccgttctccagcaattccagctatgacaaaaactttgcttgaggatgtcaagaagattttcaagaccactactggaaccccatttctcatccctacaactgg

SEQ ID NO: 293415 - DNA, 296 bp, Glycine max
  unsure (1)..(296): unsure at all n locations
gagatcttgcccatcaactcatggactactcagatgccttatttcatcagaggctatgcgtattccggtggtggnagaaaggtgacacgtgttgaggtaaccctggacggaggtgaaacgtggcaagtgtgcacactggactgtccggagaaacccaacaaatatggaaagtactggtgttggtgtttttggtctgtggaggttgaggttttggacctgctcggagccagggagattgcggtgcgtgcttgggacgaggccctcaacacccaacctgaaaagctcatttggaatgt

SEQ ID NO: 293416 - DNA, 292 bp, Glycine max
attggtgacagtctcgaagaattcctcacaaaagcaacaccagataaggggttgatcaggttgttggtgtccatgggagaagcattgagaacaatttccttcaaagtgaagacggcttcatgtggtggaacacaatgtgttaatacttttggggatgagcagcttgcagtggatttgctagctaatcagcttctttttgaggccttaaattactctcatttctgcaagtatgcttgctctgaagaaaatcctgagctcttggacatgggaggtccagttgaaggtggattta

SEQ ID NO: 293417 - DNA, 293 bp, Glycine max
  unsure (1)..(293): unsure at all n locations
gcctgaatgtcaattctacatgaagactggagattgcaagtttggtgcagtctgtcgtttccatcatccacatgaaaggatgattcctgctcctgactgtgttttgagtcctataggtcttcctttacgtcctggagagcccctgtgtgtgttctattcacgttatggcatatgcaaatttngtccaagttgcaagtttgatcacccaatgggagtcttcacctataacatgtctgcatcacctttagctgatgccccaggacggcgtttgaaattcagtgcaaagacttttc

SEQ ID NO: 293418 - DNA, 295 bp, Glycine max
  unsure (1)..(295): unsure at all n locations
agaaaaaaaaaaacccttagccaacacaaccatcatggccacctctgctattcagcaatcagcattcactggtcaaactgctctgaagcagctcaatgagttcgtccgcaagaccggtggcgccggcaaaggtcgcactaacatgcgccgnaccgtcaagagtgctcctcagagcatttggtatggccctgaccgtcccaagtacttgggtccattctcggagcagattccatcatacctgaccggagaattccctggtgactacggatgggacactgctggattatcagctgac

SEQ ID NO: 293419 - DNA, 297 bp, Glycine max
  unsure (1)..(297): unsure at all n locations
gttaacgagaccaagcnanccatgacttgatctcatcatccaacttggtctcgttaactagatcaacagcagtgtgaagaagggaggaggagatcaagtcatggctagcttttgctgcccaaaaaattgttgaagttaacgcattggctaaagcattgtctggccacaaggatgaggccttcttctctngtaatgctgctnctctggcttcaaggaagtcttctccaagagtgaccaacgaggctgttcagaaggctgctgctgcattgaagggttcagatcatcgccgtgcaacaa

SEQ ID NO: 293420 - DNA, 302 bp, Glycine max
tcaaccccatagtgatgagtgctggagaattggaaagcggaaatgctggagaacctgcaaagttgattagggcaaaggtatcgcgagggcagcagacattatcagaaaaggaaagatgtgctgtctcttcatcaatgatcttgatgcaggagctggtaggcttggtggaaccactcaatacacagtcaacaaccagatggtgaatgcaacccttatgaacattgctgacaacccaaccaatgtccaacttcctggcatgtacaacaaggaggagaatccccgtgttcccatcatagtcatgg

SEQ ID NO: 293421 - DNA, 295 bp, Glycine max
cttttaaatttgcaagacgttattcttggtaccaagctttccattctcatccctgccattccagctgccatcattgccgagtgctatggctttggaagaccttggatttttatattgagcttacttggacttacaccacttgctgaacgtgtgagcttcatcacagaacaagttgccttttacactggtcccacagtcggaggacttctgaatgctacatgtgggaatgttactgagctcataatagcaatatttgcccttagcagtaacaaaattgctgtggtcaagtattctc

SEQ ID NO: 293422 - DNA, 293 bp, Glycine max
aaacttctcaaatcagctgctgcatatgctaattcacgtattcatgctgttaaagctgaagttcttgtacttgctagtggcaaggacaacatgcttcccagcataaacgaagctcaaagactcatgggattattgcaaaactgcaaagttcgtgtctttaaggacagtggacacacacttctcctggaagatggtattggtttgctgacaatcatcaagggaacttgcatgtaccgtcgctcaaggaggcatgatttggtcagggatttcatacctcccagtatgacagaatt

SEQ ID NO: 293423 - DNA, 295 bp, Glycine max
cccaaaattgctctgccactcttaacgggcaaccacaagctcactgatgctgttcttcctcccacgaaagactggaggaaagaaggaatagtgagtgatgttaaagatcaaggcagctgcggatcatgctggacattcagcacaactggggctttagaagcagcctatgcacaagcatttgggaagagtatctctctttctgagcagcagctagtggattgtgctggccgtttcaacaactttggctgtaatggtgggttgccatcacaagccttgagtacatcaaatacaatgg

SEQ ID NO: 293424 - DNA, 297 bp, Glycine max
tgcattattcaatggccaccacagcagctctatccggaaccatggtgagcacctccttcatgaggaagcaacctatgacgaccaagagcctaaagacattccccaacgctctttttggtctgaaaggtggacgaggtggtcgtgtaacttgcatggcctcgtacaaggtgaagctcataaccccagaaggagaagtggagtttgaatgcccagatgatgttttcatgttgacaaggctgaggaagaaggcattgaacttccctactcgtgcagggctggttcttgcgtttcatgtgt

SEQ ID NO: 293425 - DNA, 301 bp, Glycine max
atggccacccacgcggctcttgcttctacaaggatcccttcaaacacaaggttcccatccaaggcctctcactctttcccaacccaatgcgccttaaagagacttgaggtgacagaattctctgggcttagatccacttcatgtgtcacatatgctaacagtgctagagaatcttccttttttgatcttgtagcttcccaactcactcccaagaccaatggatcaactcctgtgaggggagagacagtggccaagttgaaggtggcaatcaatggtttcggacgcattggtagaaattcct

SEQ ID NO: 293426 - DNA, 303 bp, Glycine max
  unsure (1)..(303): unsure at all n locations
gcatattactcttttgttgagaaaattttcanagctgatgctgttcttcattttgggacacatggttcccttgaattcatgctggaaagccaggtggggatgagtgatgtatgttatccagacagtctgattgggaacattcctaatatctattactatgctgcaaacaacccttctgaggctaccatcgccaaacgaaggagctatgcgaataccatcagctatctgactcctccagcagaaaatgcaggactgtacaaaggtcttaagcagttaagtgagctcatctcctcataccagtcc

SEQ ID NO: 293427 - DNA, 294 bp, Glycine max
ggagaactgtttgcgagtgaccacagtaggcacagccacaccccaatgcttttctccattttttccatcttcaagggataaacttgtcttcccaactcacagaggtttcaagaaatccttgcaaaactcaacactgtcatacccttatctttactccaccggtgctgcctatagaaaatcccgttttgtttgcaatgctcgtgaagcagtaaatgaagttaaagtggtgactgactcaagctggaacaaccttgtcattgcaagtgagacccctgtgctggtagagttttgggc

SEQ ID NO: 293428 - DNA, 293 bp, Glycine max
tcataacacaaagcacaaagcaaagctcatccttgagttaaaaaatggcagcagcttcttccatggctctctcatccccatccttggctggcaaggccgtgaagctgggcccatcagccccagaagtgggaagggtgagcatgaggaagaccgtcaccaagcaggtctcctcaggaagcccatggtacggcccagaccgagtcaagtacttgggcccattctctggcgagcccccgtcctacctaaccggtgagttcccaggcgactacggctgggacactgctgggctttcc

SEQ ID NO: 293429 - DNA, 293 bp, Glycine max
  unsure (1)..(293): unsure at all n locations
gtagttgagaactaagaagaaggaaatggcttcctcaatgatctcctccccagctgttaccaccgtcaaccgtgccggtgccggcatggttgctccattcaccggcctcaaatccatggctggcttccccacgaggaagaccaacaatgacattacctccattgctagcaacggtggaagagtacaatgcatgcaggcgtggccaccaattggcnagaagaagttcgagactctttcctacttgccagacctcgatgatgcccaattggcaaaggaagtcgaataccttctaa

SEQ ID NO: 293430 - DNA, 289 bp, Glycine max
tcctacacttgtaattcgtggaactgggctttatgagctctggaaaactggcaggtatagaaactatccacctgagcaacttgtggacattatagcaaggatccttgcaatggtacccccatggacacgtgtttatagagttcagcgggatattcccatgcctctggttacctctggggttgagaaaggaaatctgagggagctagcattagctcgaatggatgacctgggattgaaatgtcgtgatgttcggaccagagaagctggaatccaggatattcaccaccaa

SEQ ID NO: 293431 - DNA, 294 bp, Glycine max
  unsure (1)..(294): unsure at all n locations
attgactgtangcagcaaagnngtatcttncnagtcgatacaaagatataacacagttccaggaagaggttatggngcttgcctctagctggaatagaagcaatattgtctagtgatgaactccaggttgcatcagaggatgctgtatatgactttgtgttgaagtgggtccgaacacagtatccaaaactagaagagnnnngagaagtcctgggtacacgacttgcccgtttaattcgcttcccttacatgacctgtcgaaaacttaagaaggtcttaacctgcaatgacttt

SEQ ID NO: 293432 - DNA, 294 bp, Glycine max
gctcgaggttataatccagccacatgggttttggagatcactactccagcagttgagagtcagcttagagtagactttgcagaattctacacaaaatcagaattgtatcagaggaatcaagaacttattgaagagctaagcacacctttagagggaacgaaggaccttgatttccctactaaatactccctttcctttattactcaatgtatagcttgcttctggaaacaacacttgtcctactggaggaatccacagtataatggcatccggttattcatggcagtaattata

SEQ ID NO: 293433 - DNA, 280 bp, Glycine max
  unsure (1)..(280): unsure at all n locations
aaagattttgatttggtgatgaancgttggagcatttcactncngttatataaaaggcgtggcttgtgggctgtgtagaactcaaatcgatcaaataaatggctactgaacatgaagacgatttcaaggatgagaagaatccccgccccctcgacgaggatgacatcgcccttctcaaaacctatggtttggggccttattccacaagcataaaaaanntcgagaaggaaatcaaagacatggcaaaaaaggtcaatgatttatgtggtatcaaggagtc

SEQ ID NO: 293434 - DNA, 293 bp, Glycine max
gactcccgtggccttccaggagtgaggaaggaagttgctgagttcatactcaggcgtgatggttatccaactgatccagagctcatatatctcactgatggtgcaagcaaaggagtgatgcagatattaaatactatcatcaggggtcaagacgatgggattttggttccagtcccacaatacccactctactcagcaacaattgctctgcttggtggtacccttgttccatactaccttgaagagacagcaaattggggtcttgatgttaatgaacttcgtcaatcagttga

SEQ ID NO: 293435 - DNA, 288 bp, Glycine max
  unsure (1)..(288): unsure at all n locations
gtcaaggtcatctcctggtggtgatgatgatcttgacaagttattaaacggtgtcataaagaaaaaattgaagatcatccctgagaatgtcacatggggngggcagtcaggtgatgttttcgactatcttgcaggtgattttatgagaccaagaattaatgaggttgatgaactgctgacaaaaggggtcaatgtgactgtatacaatggacaagttgatctgatttgttcaaccaagggggctgaagcttgggttcataaactaaagtgggaagggctaaaaatttc

SEQ ID NO: 293436 - DNA, 290 bp, Glycine max
ttaaaggttcgattagttgctgacaaagatataaataagcccaggggttatgctttcattgagtatctgcatacaagagacatgaaagctgcttataaacaagctgatggtaggaaaattgatggtagaagggtgcttgtggatgttgagcgtgggaggactgttccaaattggagaccccgtcgcttaggtggtggacttggtaccactagagttggaggtgaagaagttaatcagcgacattctgggagggagcaacaacagtctcgttctgaagaaccgagagtgcg

SEQ ID NO: 293437 - DNA, 290 bp, Glycine max
ccatggccacccacgcggctctagcttctacaaggatccccactaacaccaagttcccatccaaggcttcacactctttcccaacccaatgcgcctcaaagagacttgaggtgacagaattctctgggctaagatccacttcatgtgtgacatatgctaacgatgctagagaatcttccttttttgatcttgtagcttcccaactcactcccaagaccaatggatcatcaactcctgtgaggggagagacagtggccaagttgaaggtggcaatcaatggtttcggacgc

SEQ ID NO: 293438 - DNA, 292 bp, Glycine max
  unsure (1)..(292): unsure at all n locations
ctcattctccatacctcaacgaagaggttaaagagacggcaacactttgctgtccgccttgaccgagcagagcttcgtcttgggccctcgattttgccctaaagtactctcagtcacaacagacacnnnnnnnnnnnnnnnnnnnnnnaatggcaccgaagcagaccaaggctgagaagaagatcgcttacgatgcgaantgtgcgacctaatggaggagtacggccagatcctcgttgtgaactccgataacgtgggatcgaaccagctccagaacattcgcaagggtctc

SEQ ID NO: 293439 - DNA, 295 bp, Glycine max
  unsure (1)..(295): unsure at all n locations
gcaattgaagttgaagtcttgcccttctctcttcaactccaaacacaagacatcagcatccatggctncctccgtctccactgtcggagctgtcaacagagctcttttgaacctgaatgggtctggacctggggtttcagctcccagttcatccttctttgggagcagcttgaagaaggttattggctcaagggtccccaacacaaagatttccctctggaagcttcaagattgttgctgtagaagagaagaaagagattgaagagacccagcagaccgacaaggacagatggaa

SEQ ID NO: 293440 - DNA, 297 bp, Glycine max
caaaagccattgggaccacaagatgtcttgggcaaccctattgaataatctcaaggtgcaggagaggcagaaccgtgtttgcacaaccgtagccattgcaattgttgcagaaacatgttcacccttcacagttttaccagcattgatgaacgagtatcgcgtgccggagcttaatgtgcaaaatggtgtgctcaagtccctctctttcctatttgagtacattggtgaaatgggaaaggattacatctatgctgtgactcctttgctgaagatgcactcatggacagggattggttc

SEQ ID NO: 293441 - DNA, 296 bp, Glycine max
ctctattattctcgttttcaatatgcagatcttcgtcaaaaccctaaccggtaaaacgattacgctagaggtcgagtcctccgacacaatcgataacgtgaaagctaaaatccaagacaaggaaggcattccaccggatcagcagcgtttgatcttcgccggtaaacaactcgaagacggcagaactctcgccgattacaatatccagaaagaatcgacgctccacctcgtcctccgccttcgcggtggcatgcaaatcttcgtcaaaaccctaaccggtaaaacgattacgctag

SEQ ID NO: 293442 - DNA, 290 bp, Glycine max
  unsure (1)..(290): unsure at all n locations
caccacttctacactcaccctctganacattcagacacccaacaactaccgaatacacacagcacacccgcnatncatgcagatcttcgtcaagaccctcaccggaaagaccatcaccctcgaggttgagtcttctgacactatcgacaatgtcaagagcaagatccaggacaaggagggcattcccccagaccagcagcgcttgatcttcgccggcaagcagcttgaggatggtcgcaccctgtccgactacaacatccagaaggaatcgaccctgcatctcgtcctcc

SEQ ID NO: 293443 - DNA, 289 bp, Glycine max
cggtgagatttgcgaatctgagaaatggcggattcttctcgggaggagaacgtttacatggcgaaattggcggagcagggccgagcgttacgaggagatggttgagttcatggagaaggttgcaaagactgtggaggttgaggagttgacggtggaggagaggaatctcctctctgtggcttacaagaacgtgattggtgcgaggagggcttcgtggaggatcatatcctccattgagcagaaggaggagagcaggggcaatgaggaccacgtggccattataaaggag

SEQ ID NO: 293444 - DNA, 292 bp, Glycine max
gcatggtaatgaggctggaaaagggggggaactgacacatgatgaaacaacgatcattgccggggcacttgaactcagtgagaagacggcgagtgatgccatgactcctatatctgaaacatttactgttgatattaattcaaagcttgatagggaactgatgaatgagatattggagaaagggcacagcagagtcccagtctattatgagcagcctacaaacattattggacttgtactggtcaagatttattgacagttcatccagaagatgaagcacccatgaagagtg

SEQ ID NO: 293445 - DNA, 288 bp, Glycine max
  unsure (1)..(288): unsure at all n locations
ttagtcgaatggttttacaaganatccttgctcgcgcagttggggaagatatcattatgaatgccagtnatgttgttaattttgtggatgatggaaacaaggtaacagtagagctagagaatggtcagaaatatgaaggagatgtcttggttggagcggatggaatatggtccaaggtgaggaagcagttatttgggctcacagaagctgtttactctggttatacttgttatactggcattgcagattttgtgcctgctgacattgaaactgttggataccgagtat

SEQ ID NO: 293446 - DNA, 288 bp, Glycine max
ttcccaaattcattttaatcctaattctgcacttcttgatcattcgatttttctcctcaagatgcagatattcgtaaaaactttgaccggcaagaccatcacccttgaggtggaatcctccgacaccattgacaacgtaaaagctaagattcaagacaaggaagggatcccacctgaccagcagagacttatctttgcgggtaaacaacttgaggatggtcgcacccttgccgattacaacatccaaaaggaatcaaccctccatctcgtgcttcgcctcaggggtgg

SEQ ID NO: 293447 - DNA, 286 bp, Glycine max
  unsure (1)..(286): unsure at all n locations
cgtatacaccattgccataggctgtgctgtttgccttctgatgagtctactggtatttccaaattggtcaggcgaagatctccataattccacggtttacaagctccnaggccttgccaaatctatagaagcttgtgtgaatgagtacttttacggagaaattgaaggctctggggatatgaaattatctgaggatccaatatacaaaggttataaggctgttttggattcaaaatccattgatgaaacactggcatgcatgcaagttgggagccaaggcatcaag

SEQ ID NO: 293448 - DNA, 284 bp, Glycine max
  unsure (1)..(284): unsure at all n locations
ttcttgttggtattttggttcctaaacttagctccagaactatacagcaagctgttggagttgtgggttgcattattatgcctcacaatgtgtacttgcattctgcgcttgttcaatcaaggcaggttgatcccagcaagaaaggccgtgttcaggaagctcttaattactactccatagagtccaccattgcccttatagtgtccttngtcataatatatttgtcacaactgtgtttgctaagggctttatggtactgaaatagcaaatagcattggtcttgt

SEQ ID NO: 293449 - DNA, 290 bp, Glycine max
ttatttgggctctgcccttcccaattgagaaggcccccactaagagaattgcaagtgtaaatggtggggtgaagatatctgaactgttgaagtatccggttagaggctttgtctttgagggcggcgaaatgctggaagatctatcaaacgttgtttcagatgcatgtatatgtcttcagaacaacaacatacctttcaatgttcttatctctgactgtggaaagcaagtgtatctgttaccacagtgttatgcagagaaacaagctcttggagaagtgaatgctgagctc

SEQ ID NO: 293450 - DNA, 295 bp, Glycine max
  unsure (1)..(295): unsure at all n locations
ctcgaacctctccttccgctctgtcctgaacccttttcagctccctacacaaaacccagcttcatgcaccccttcacgctccttcaagcacccaaattcagtgtggtctgagagaactgagaacccgcattgagtctgtgaagaacacgcagaaaatcacggaggcaatgaagcttgttgctgtagccaaagtgagaagagctcaagaagctgttgtgaacggaagacccttctcagagaccctggttgaagtcctctacaacatcaacgngcagctccaaactgaggacgtaga

SEQ ID NO: 293451 - DNA, 295 bp, Glycine max
taaaatgataatgggcaacaaaccgacctgatgtacttgaccctgctctcctgcgtcctgggagattggatagaaaaatagaaatccctctgcctaatgaacaatcaaggatggaaattcttaagattcatgctgctggtatcgctaagcatggtgaaatagactatgaagctgttgtgaagcttgcagagggatttaatggggctgatcttcgaaatgtctgcacagaagctggaatggcagcaattcgtgcagagcgtgattatgtgatccatgaagattttatgaaggctgt

SEQ ID NO: 293452 - DNA, 284 bp, Glycine max
  unsure (1)..(284): unsure at all n locations
atttggaatgttatgggcatgatgaacaactgctggttcagagtgaaaaccaangtgtgcaggccccacaagggtgagataggtatagtgtttgaacaccccacccaaccaggcaaccaatccggcggatggatggcaaaagaaaaacacctagagaaatcatctgagtccaacccaaccctcaagaagagtgtctcctccccattcatgaacaccaccttcaaaaacctataccatgtctgaagtcagaaggcacaacaacgccgattcggcttggatcatag

SEQ ID NO: 293453 - DNA, 287 bp, Glycine max
  unsure (1)..(287): unsure at all n locations
gaaatgtggctatcaaaaaggttcttcaagataagaggtacaagaaccgggagctgcaaacaatgcgccttcttgaccacccaaatgttgtcgctttgaagcactgtttcttttcaaccactgaaaaggatgaactatacctcaatttggtacttgaatatgttcctgaaacagttaatcgtgtgatcaaacattacaacaagttaaaccaaaggatgccgctgatatatgtgaaactctatacataccagatctttagggcgttatcttatattcatcgtcntatt

SEQ ID NO: 293454 - DNA, 287 bp, Glycine max
  unsure (1)..(287): unsure at all n locations
caagaagctttagcaactcttgtggtgaacaaacttagaggatcactgaaaattgcagcactcaaggcccctgggtttggagatcgcaagagccagtaccttgatgatattgccatcttgactggaggtactgtaatcagagaagaggttggccttactttggacaaagctggcnaagaggttctcggatatgcctccaaggtggttctcaccaaggatacaaccacaattgttggtgatggaagtacccaggaagcagtgaacaagagagttgcacagattaggaa

SEQ ID NO: 293455 - DNA, 281 bp, Glycine max
  unsure (1)..(281): unsure at all n locations
ataaacaccacaatcgttcagggaagatatgccttattttatcaattctgtccaacaggaatgaatcagaggggaagaatccctgttggacagaattgataaaataaggcatataaacaccacaatcgttcagggaagatatgatgtttgctgtcctatgatgtcagcctgggatcttcataaagcttggccaacngcagattttagggtggttcctgatgcagggcattcagccaatgaaccaggcataactgctgaactagtggctgcaaatgagaatt

SEQ ID NO: 293456 - DNA, 282 bp, Glycine max
ttctctctgtgtatttccctacctctcccttcaagatgcagatcttcgtcaagaccctcaccggcaagaccatcacccttgaggtggaaagctctgacaccatcgacaacgtcaaggccaagatccaggacaaggaaggaatccccccggaccagcaacgtctcattttcgccggaaagcaacttgaggacggccgtacccttgctgactacaacattcagaaggagagtactcttcacctcgtctccgtctccgtggtggtatgcagatcttcgttaagac

SEQ ID NO: 293457 - DNA, 253 bp, Glycine max
  unsure (1)..(253): unsure at all n locations
acantattttgaagattcgaagagtctatgangcttttctagcagaatttcccttgtgctatggttattggaaganatatgctgaccatgangcncgccttggctctattgataaagttgtcgaagtctacgagcgtgcggttcaaggggttacatattcagtggacatgtggttgcattattgcatatttgctataaccacatatggggatccagacactgttcgtaggtaatggaagtttagttgtttgtc

SEQ ID NO: 293458 - DNA, 283 bp, Glycine max
cttgacatacccgacataatccacagccatagccatggccaacccattactttttcagagttggtgtcaattctacaagtcccaccaactaaaactcgtcaggtgcagagcctcatgcgttatctagcacacaatggattctttgagatagtaagaatccatgacaacatagaagcatatgctctcactgctgcttcagagttacttgtcaaaagcagtgagcttagtttagctccaatggttgagtattttcttgaaccaaattgtcaaggtgcatggaacc

SEQ ID NO: 293459 - DNA, 285 bp, Glycine max
  unsure (1)..(285): unsure at all n locations
gcaccacaagacttatgtggaaaatctgaaaaaacaagttgttgggacagagcttgatgggaagtcactagaagagattattgtcacatcatacaataagggtgacattcttccagctttcaacaatgcagcacaggtatggaaccatgacttcttctgggagtgncatgaaaccaggtggaggtggaaagccatccggggagcttctagaactgattgaaagagactttggttcatttgtaaaattccttgatgagttcaaggctgctgctgcaacacatttgg

SEQ ID NO: 293460 - DNA, 283 bp, Glycine max
cgttgccattctcatcctcttctttctctctctaccattgccatggatccctacaagcaccggccatccagcgccttcaattctcccttctggactacaaattctggtgctcctatttggaacaacaactcctctttaaccgttggagctagaggtccaattctgctggaggattatcatcttgtggagaagcttgcaaattttgatagggaacgtatcccagaacgtgttgtccatgccaggggcgctagtgcaaagggtttctttgaggtcacccatgaca

SEQ ID NO: 293461 - DNA, 278 bp, Glycine max
  unsure (1)..(278): unsure at all n locations
ggcttgcaccgctttgggtgaccacggcgaacaagtnccttaccaactctctgggactctctccctgctatcgccgtcgtcggtggccagagctctggaaagtcctcggtgttggaaagtgttgttggcaaggatttcttacctcgtggatcagggattgttactcggagaccccttgttttgcagcttcacaagattgatgagggtggcagagagtatgctgaatttctacacctccccaggaanaggttcaccgattttgctgctgtgagaaaaga

SEQ ID NO: 293462 - DNA, 281 bp, Glycine max
cctggttgttcctcaattggttatggagaagcagaggagctaggacccttctttcctcaggacagcagccaaccaaagctaaagttaaatccttattcttggaataacgctgccaatcttttgtttttggaatcccctgttggggtggggttctcctacaccaacaccagcagtgatataagtgagcttggtgacaccattaccgctaaagattcacacacctttatcatcaagtggtttagaagatttccacaattcagatcacacgaattctacatttc

SEQ ID NO: 293463 - DNA, 280 bp, Glycine max
  unsure (1)..(280): unsure at all n locations
ctcagcacatataataggatattggagatgtatttagaatgtggttctgtagatgatgctctcaacattttcaacaatatgccagancgcaacttgactacttgggatactatgataacacagcttgctaagaatgggtttgccgaagattcaattgatctatttactcaatttaaaaacttgggactgaaacctgatgggcagatgttcattggagttctatttgcatgtagtgtgctgggagatattgacgagggaatgctgcactttgaatccatga

SEQ ID NO: 293464 - DNA, 281 bp, Glycine max
  unsure (1)..(281): unsure at all n locations
ganaagggtgcatgagaggaaagggatggcctcagaactccgattgcaagttcagaggtgtgaggcagaggatttggggtaaatgggttgctgagattcgcgaacctatcaatggcaagcttgttggtgagaaagcaaataggcttggcttggtactttctccactgcacttgaggctgctcttgcttatgatgaagcggctaaggccttgtatggcccttgtgcccgttttgaatttttccgagtcaatagactctaaatggatcatcatcttctagtgg

SEQ ID NO: 293465 - DNA, 288 bp, Glycine max
  unsure (1)..(288): unsure at all n locations
cttgcaaactagttttgtttttggaacatatcgcattacattacattagattggnggcaaagcaatggcatcgtcactacaagcagcagctactttcatgcaacccaccaagtttttgcagctaaagtctactcaggccatatctaaggcttttggtttggaacctgctggagttaataaggtcacatgctcccttcaggctgatcttaaggacttggctcacaagtgtgttgatgctaccaaaattgcaggctttgcccttgccacctctgctctcgttgtttctgg

SEQ ID NO: 293466 - DNA, 279 bp, Glycine max
gcaacagtgagaacaccattgaattttgattctagcaagcagagcttttgtcaattttctattgaccttctcggtggaggaattttagtggacaaaactggagattggatcacacttatacaaaattctccaattagtaacttgttgagagttgctgcttggaagaaaggctgtttaatggttaaaattgtgatgtctgggaatgcagcagtcaaaaggagtgattgggcctcattggtacaagtgtttttaacaaacagcaacagtacagagcatttc

SEQ ID NO: 293467 - DNA, 279 bp, Glycine max
cagccatggccacccacgcggctctagcttctacaaggatccccactaacaccaagttccccatccaaggcttcacactctttcccaacccaatgcgcctcaaagagacttgaggtgacagaattctctgggctaagatccacttcatgtgtgacatatgctaacgatgctagagaatcttccttttttgatcttgtagcttcccaactcactcccaagaccaatggatcatcaactcctgtgaggggagagacagtggccaagttgaaggtggcaatc

SEQ ID NO: 293468 - DNA, 281 bp, Glycine max
  unsure (1)..(281): unsure at all n locations
ccttcttcttctattacaacaacgtcnggacaagaccatgaccatggccatggccacgatcctgctcctgttcacggtcttcgcggtttcatcggccctagacatgtcgataatctcgtacgacaacgcccacgccgccacgtcgcgcagnacnantgagctgatgtccatgtacgagcagtggctagtaaagcacggcaaggtgtacaacgcgctcggagagaaggagaagaggttccagatcttcaaggacaacctgcgattcatcgacgaccacaant

SEQ ID NO: 293469 - DNA, 280 bp, Glycine max
  unsure (1)..(280): unsure at all n locations
cgccagcnagcgcttcttctctcgcattccgtggagatctagtgctgccaaacctcgctgaaaattagggtttcgtttcggaggtagacgaagatgttcggaagggcaccgaagaaaagcgacagcaccaggtactacgaaatcctcggcgtttcgaagaacgcttcgccggatgatttaaagaaggcttacaaganagccgccattaagaaccaccctgacaaaggcggtgatcctgagaagttcaaagagcttgctcaagcctatgaggttctgagtg

SEQ ID NO: 293470 - DNA, 276 bp, Glycine max
  unsure (1)..(276): unsure at all n locations
acaaccataaacaatatgtgtgcatatgggctcaatcctggtatttcaggttctcgtcttttgggcaccattcctcagtctatttcacagcaaactgtttggnatcaaatggcaacagtgagaacaccattgaattttgattctagcaagcagagcttttgtcaattttctattgaccttctcggtggaggaattttagtggacaaaactggagattggatcacacttatacaaaattctccaattagtaacttgttgagagttgctgcttggaag

SEQ ID NO: 293471 - DNA, 275 bp, Glycine max
tgctacctgctgtgatgaccactacagttgctgccctaacgactatcccatctgcaacacttatgctggaacttgtctcaagagcaagaacaacccattcggagtgaaggcattgaggcgtactccggctaaaccccattggacctttgggcgtaagaacaaggtcagcagtgcttaagcagataaaggaaatgtgaacgtgcaggaaggagccaatgatgaagtaaatgaaagacgaagaattaaaacaccagctgatacacttcccctttacc

SEQ ID NO: 293472 - DNA, 277 bp, Glycine max
  unsure (1)..(277): unsure at all n locations
ggctgcctccgtctccactgtcggagctgtcaacagagctcttttgaacctgaatgnttctggagctggagcttcagctcccagttcagccntctttgggaccagcttgaagaaggttattgcctcaagggtccccaacagcaaggtttccggtggaagcttcaagattgttgctgtagaagagaagaaagagattgaagagacccagcagaccgacaaggacagatggaagggtcttgcctatgatatctcagacgaccaacaagacatcacaaga

SEQ ID NO: 293473 - DNA, 277 bp, Glycine max
  unsure (1)..(277): unsure at all n locations
ganattgtcatgcactctgctacaaaatttattgctggacatagtgacattatggctggtgtgcttgctgtgaagggtgaaaagttgggaaaggaattgtatttcttgcaaaatgcagagggttcaggcttagcaccatttgactgttggctttgtttgcgaggaatcaagacaatggccctgcgaattgaaaaacaacaggataatgcacagaagattgctgagttccttgcctcccatcctcgagtgaagaaagtgaattatgctggcttgcctg

SEQ ID NO: 293474 - DNA, 280 bp, Glycine max
  unsure (1)..(280): unsure at all n locations
agatggacaactgcaagccgtgcggtggcgccatcccgctgtgcatggtgggggagttcgacctgccgctggacatcatcgaccggcgcgtgacgaagatgaagatgatatcgccgtcgaacgtggcggtggacatcgggaggacgctgaagccgcacgagtacatcggcatggtgcggcgcgaggtgctggacgcttacctcagggaccgcgccaaggagtacggtgcgaacgtcatcaatggcttgttcttgaaaanggatattcctaaggataagaa

SEQ ID NO: 293475 - DNA, 275 bp, Glycine max
  unsure (1)..(275): unsure at all n locations
gtcatcgttgggatctccatacgccggatctgctaaaatacgcttgatccatatgggcctcctcgaccacttgtgggacgacaccgtcgccggcccaaggccggaaaacggtctcggcaagctccgaaaacaccacaccttcactttccgacctagctccggcaaggaaacggatngcgggagcgtgagatcgtacggagacgaatcgtcggaggaagcgacgagagtgacgcgtagtatcatgatcgtgaaaccgcccgggtaccagagtggat

SEQ ID NO: 293476 - DNA, 274 bp, Glycine max
gacaagcttgttgttcacatctccaagaacttcatgaccctgcccaacatcaaggttcctctcattcttggtatctggggaggcaagggacaaggaaaatctttccaatgtgagcttgtctttgccaagatgggaatcaaccccatcatgatgagtgctggagagttggaaagtggaaatgcaggagagccagcaaaactgatcaggcagagataccgtgaagctgcagacatgatcaagaagggaaagatgtgcgctctcttcatcaacgatc

SEQ ID NO: 293477 - DNA, 276 bp, Glycine max
caagggatgagaaacttcctcgtcgcaaaatttttgacaaacctaagacgcgctgcttcactattctccctatggagtttaatcttgtggtccgtcaaaagtttttaaattttgtgaggttcattatgaagaaaagggacaagcttagttgtcaagttggaatcaacccatactccatggaatggactggtttggccaatagattactgagtaagggcaacgatattctgtgttgcgattatgctagttttgatggtttgattaccaagcaagtta

SEQ ID NO: 293478 - DNA, 275 bp, Glycine max
  unsure (1)..(275): unsure at all n locations
ggaatgcgtatccgagttcatcagtttcatcaccanccgaggcctctgataagtgtcagagggaaaagagaaagactattaacggtgatgatttgctctgggccatggccactcttggttttgaggattatatcgatcctcttaaaatttacctcactagntacagagagatggagggtgatncgaagggtttagccaagggcggagactcatcttctaagaaagatgttcagccaagtcctaatgctcaggtagaatgcacccacgaatgtgcg

SEQ ID NO: 293479 - DNA, 274 bp, Glycine max
  unsure (1)..(274): unsure at all n locations
cgtatacgcgcgtgcagaacatctttatagcaggaacagacccgantcccgcgacaatagtttgggcaatgaatgcactgttgaagaatcccaatgtgatgagcaaggttcaaggagaagtgaganatctattcggtgacaaagatttcataaacgaagatgatgtcgaaagccttccttatctcaaagccgtggtgaaggagacattaagattattcccaccttcaccactacttttgccaagggtaacaatggaaacatgcaacatagaagg

SEQ ID NO: 293480 - DNA, 276 bp, Glycine max
  unsure (1)..(276): unsure at all n locations
ctgaaatataacatggtgattgtaagtccaattcttgaaaggganattaaccatggagaggttatatggaacactgccgttgtaattggaaatcatggcaatataattgggaaacacaggaagaaccatataccaagagttggagacttcaatgagagcacatattatatggaaggnaacaccggccaccctgtatttgaaacagcatttggaaaaattgccattaatatatgttatngtaggcaccatcctttaaattggttagcctttggcttg

SEQ ID NO: 293481 - DNA, 280 bp, Glycine max
  unsure (1)..(280): unsure at all n locations
ccaaaagaaaattacaagtactagatcanaaagatgcagacagaaaaagaacagctgagttacagaatatttagaaggatatatatatactaccaaggnaaagattganacgcttgaggagtttgaaaaagtttctacaagtgaggaacgccagtccttcattgagaagcttgatcaggtgcaagattggttgtatacagatggtgaagatgccaatgcaacagagtttcaagagcatctagatcagttaaaagctgttggagatccaattttcttcagg

SEQ ID NO: 293482 - DNA, 278 bp, Glycine max
tttacgagaagataaagcacgagctagccggaaagggagaggaagacttcgaagttgtgctaatatccagcgaccgcgaccaagcatcctttgactcctactacagcaccatgccttggttagccttacctttcggtgacccagaaatcaagaacctcgttagacactacaacgtgcaagggattccctggttggtgatcataggccctgatggtaaaacaataaccgtacatggcaggagtttgataaacttgtaccaagaaaatgcgtaccctttc

SEQ ID NO: 293483 - DNA, 275 bp, Glycine max
ccatcatgatgagtgctggagagttggaaagtggaaatgcaggagagccagcaaaactgatcaggcagagataccgtgaagctgcagacatgatcaagaagggaaagatgtgcgctctcttcatcaacgatcttgatgcaggagctggtcgtcttggtggaaccacacaatacactgtgaacaaccagatggtgaatgccactctcatgaacattgctgataaccccaccaatgtgcagcttccaggtatgtacaacaaggaagagaacccccgt

SEQ ID NO: 293484 - DNA, 275 bp, Glycine max
  unsure (1)..(275): unsure at all n locations
catttctccatttccattttctctctcacttttcaagaatcgtaagcnatgggaaagtcttacccaactgtgagtgctgattaccagaaggccgttgagaaggcgaagaagaagctcagaggcttcatcgctgagaagagatgcgctcctctaatgctccgtttggcatggcactctgctggaacctttgacaagggcacgaagaccggtggacccttcggaaccatcaagcaccctgccgaactggctcacagcgctaacaacggtcttgacat

SEQ ID NO: 293485 - DNA, 272 bp, Glycine max
cagtgtttttcatttcatcgtgcattcaatggccaccacagcagctctatccggaaccatggtgagcacctccttcatgaggaggcaacctatgaccaccacaagcctaaagacattccccaacgttggtgaagctctttttggtctgaaaagtggacgaggtggtcgtgtcacttgcatggcctcgtacaaggtgaagctcataaccccagaaggagaagtggagtttgaatgcccagatgatgttttcatgttgacaaggcagaggacga

SEQ ID NO: 293486 - DNA, 272 bp, Glycine max
  unsure (1)..(272): unsure at all n locations
ganaagttagggttcacaacttttccttttccttttgcttgcgaatctgaatcaaataatcaatcatccattcattattcatcatgtnntcggcgaagaaaatcacgctgaagagttcggacggcgaggctttcgaggtggaggaggcggtggcgctggagtcgcagacgattaaagcacatgatcgaggacgactgcgccgacagcggcatccctctgccgaacgtgacgagcaagatcctggcgaaggttatcgagtactgcaagaagca

SEQ ID NO: 293487 - DNA, 271 bp, Glycine max
aaggactgaaattttaaaggttcatggtagcaataaaaagtttgaagctgatgtttcacttgaggtaattgctatgagaacacctggttttagtggagcagatctggcaaacctgctgaacgaagctgctatattagctggtcgtcgtggaaagacagcaatttcttccaaagagattgatgattccattgataggattgtggctggaatggaaggaaccgtaatgacagatggaaagagcaaaagcttagtggcatatcatgaagttggg

SEQ ID NO: 293488 - DNA, 274 bp, Glycine max
  unsure (1)..(274): unsure at all n locations
gcaatgtctatgtgtaataatatnccagaaagggaagaagaagaccttcattattgcaagtaacngccaccctcagacaattgatatttgcaagacaagagctgatggttttgatctcaaggctgtgacagcagatcttaaggacattncattacaagtctggggatgtttgtggtgtgcttgtgcagtaccctgggcactgagggagaggtnttggactatggagagtttgtgaagaangctcatgctcatgaggtgaaggttgttatggcaa

SEQ ID NO: 293489 - DNA, 273 bp, Glycine max
  unsure (1)..(273): unsure at all n locations
gagtatatgatgacgaagtgaggaagtggatttctggtgttggtgttgacggcattgggaagaagcttgtgaactcaaaagatggacctccaacctttgagcagcccaagatgactctggagaagctcttgacgtatggtaacatgcttgtccaagaacaagagaatgtcaagagagtccaattggctgacaagtacttgaacgaggctgcacttggaaatgctncacgaggatgctattaacaggggaatttcttccaatcttgaattggag

SEQ ID NO: 293490 - DNA, 269 bp, Glycine max
ggttttgaagaattttgaagggttggatcttggaaagctgaacaagactagtgactcttttgctgcctcttatgctgctgaactatacgatcggtcactcaactggaaggatatcaaatggattcaaacaatcacttctttgcctattttattaaagggtgtacttactcctgaagatacaatgatagccatacaagctggagctgctggaatcattgtttccaatcacggagctcgccaacttgactatgtccctgcaactattatgg

SEQ ID NO: 293491 - DNA, 281 bp, Glycine max
  unsure (1)..(281): unsure at all n locations
cagcggaagcatcgccgaacgcacacagttcgtggcctatctcatctactcctccttcctcaccggcttcgtctntccggtggtctcccactggttctggtccccagacggctgggcctctgcctttaagatcaccgaccggctattttccaccggcgtaatagacttcgccggttccggcgtagtccacatggtcggcggtagccggcctatggggancgctgatcgaaggcccaagaatgggacgtttcgatcatgcaggacgagctgtggccttgcga

SEQ ID NO: 293492 - DNA, 275 bp, Glycine max
  unsure (1)..(275): unsure at all n locations
atctctggtgccattctctttgangaaacacttctaccaatccacaactgatggcaggaagattgttgacgtgctgcttgagcaaaacattgttcctggtattaaagtcgacaagggtttggtgccccttgcaggttccaacgacgagtcatggtgccaaggtttggatggtctagcctctcgctcagctgcatacncgagcaaggtgcccgtttcgccaaatggcgtactgttgtgagcatccccaacggtccctctgctctggcagttaaggg

SEQ ID NO: 293493 - DNA, 291 bp, Glycine max
  unsure (1)..(291): unsure at all n locations
gagcttgcaaccagacaagaggcctgagttctggcaggttgttaagatattagagcaatttgaatcttcacttgccagtgatggaaccctgagcctggtgccaaatccttgttgggatcataagaaagggcttcttcattggattcaaaagctggtcccttgcaccaaaatagtngggccgtggcctaaaaccccaaattcntggaatctttccaagtggtccctggcttttattggtaacaccaaggtcccattgtaattaaaaatgaaaggttggtttttcaaggttcc

SEQ ID NO: 293494 - DNA, 281 bp, Glycine max
  unsure (1)..(281): unsure at all n locations
tttggccaaggccgttgccacagaagctgattctacgtttttcagtgtttcttcgtcagacctggtttcaaagtggatgggagaaagtgaaaagctggtctcaaatcttttccaaatggcacgcgaaagtgcaccttctatcatattcgttgatgaaatagactctctatgtggtcagcgtggagaagggaatgagagtaagcttcaaggcgtattaaaactgagcttctggtgcagatgnagggtgtaggacacaaatgatcagaaagttccttgttcca

SEQ ID NO: 293495 - DNA, 274 bp, Glycine max
  unsure (1)..(274): unsure at all n locations
agcagaccnacaaggacagatggaagggtcttgcctatgatatctcagacgaccaacaagacatcacaagaggaaagggtttggttgactcccttttccaagctccacaggatgctggaacncactatgcagtcatgagctcctacgagtacctcagcactggacttcgccagtacttggacaacaaaatggatgttctacattgctccagcttttatggacaagcttgttgttcacatctccaagaacttcatgaccctgcccaacatcaagg

SEQ ID NO: 293496 - DNA, 268 bp, Glycine max
  unsure (1)..(268): unsure at all n locations
attatcgtgaatgcgtataaaaggaaaataaagaaattagcgncaaaatgttgggtgtgttcagcagctccatagtgtcgccnccggacgagctcgtngccgccggcagccgtactccgtcgccgaagatgacggcggcggcgctgcggaagcggttcgaggagaagaacccctccgccgtntcggtggagcggagagcatgtccagctcgcttatacccaccacaacgagtcgccgtttcagcccagatcctttgctgtcaaggatg

SEQ ID NO: 293497 - DNA, 276 bp, Glycine max
attagagtttttttcataaagattttcagatccgtttacaacaagccttaattgttgattctgtagtcgtagattaaggtttttttcatgaactacttcagatccgttaaacaacagccttatttgttgatacttcagtcgtttttcaagaaattgttcagatccgttgataaaagccttattcgttgattctgtagtatttcaagagatattgcccagatgcagatcttcgtcaagaccctcaccggaaagaccatcacccttgaggggaagctc

SEQ ID NO: 293498 - DNA, 269 bp, Glycine max
  unsure (1)..(269): unsure at all n locations
tgttggtngcagtggtggcggcaagggtgcccgtggaatattcaacataggaaaagcaccagttactaaagtagacaaaaatgccaaaaacaagatctattttaaagatgttgctggctgtgatgaggcaaagcaagaaattatggagtttgtccacttcctcaagaacccaaagaaatatgaagaacttgtgcaaaaattccaaaaggtgctctcttggttggtcctccaggcacaggaaaaacccttttagcaaaagctacagcagg

SEQ ID NO: 293499 - DNA, 266 bp, Glycine max
  unsure (1)..(266): unsure at all n locations
ttttctctctccatccaacatcgaaacncaggtcgttttgtgttccgccgaaggaaccggaggttgtagcaggctagcagctatggatttggcatccaatctcggtggcaagattgacaaagccgaagttctctctgccgttcagaagtatgagaagtatcatgtttgctatggaggtcaagaggaagaaggaaagctaattataccgatatggttaataaatactacgatcttgttaccagcttttatgagtttggctgggggga

SEQ ID NO: 293500 - DNA, 274 bp, Glycine max
  unsure (1)..(274): unsure at all n locations
gtccaactcctactggaagaattcacaaaggagtatgttcaacctggatgaagaatgccattcccttagagaaaagccgtgactgtagttgggctcctatttttatcagaacatcaaacttcaagttaccagctgatcattccattcctattattatggttggtcctgggtacaggcctggcactttcaggggatttacaggaaagattggccctcaaagaggatgccgttcaacttggtcctgcataancnccccttggatgtaggaatcgac

SEQ ID NO: 293501 - DNA, 274 bp, Glycine max
  unsure (1)..(274): unsure at all n locations
ctggtcatcgttgggatctccatacgccggatctgctaaaatacgcttgatccatatgggcctcctcgaccacttgtgggacgacaccgtcgccggcccaaggccggaaaacggtctcggcaagctccgaaaacaccacaccttcactttccgacctagctccggcaaggaaacggagggcgggagcgtgagattacggagacgaatcgtcggaggaagcgacgngagtgacgccttagtatcatgatcgtgaaccgcccgggtaccagagtgg

SEQ ID NO: 293502 - DNA, 267 bp, Glycine max
aaactattaccattataaggataacagggtactcccttctcacgttgatgccgaacttgccaatgctcaagcttggtggtacaagccggactatattatcaacgagcttaacataaactccgtgataaccacgccttgccacgaggagatcttgcccatcaactcatggactactcagatgccttattctcagaggctatgcgtattccggtggtgggagaaaggtgacacgtgttgaggtaaccctgggacggaggtgaaacgtgg

SEQ ID NO: 293503 - DNA, 265 bp, Glycine max
  unsure (1)..(265): unsure at all n locations
agccatggctttgcttccgagactatgactgcaactggaacgtggacatcctgcaggagtttgcaagcaatgtagcncatgcaagatggtggaaggtgcatgatgcaatgccaganaacttgcagaagttctgtttgcttaggtccaagcagaaggctgcattagagtgggatcgtcgacaagctgaagngaaactacagtgatggtcactggaaaattaagataaaagacccaagattgaacacttgctttgaggatttctgtt

SEQ ID NO: 293504 - DNA, 262 bp, Glycine max
  unsure (1)..(262): unsure at all n locations
agacgaggcactggagcctgctgatctctacaaccgcaacctgagagtggtggatgttggangtggaactgggcttcaccactcttggtatagtgaagcatgtggacgccaaaaacgttacaattctcgaccagtcgccacaccagctcgccaaggctaagcagaaggagcccttgaaagaatgcaattgttgaaggggatgctgaagatcttccatttccaatgattatgctgatagatatgtttctgctggaagtattga

SEQ ID NO: 293505 - DNA, 247 bp, Glycine max
  unsure (1)..(247): unsure at all n locations
cactcataacacaaagcacaaagcacnagctcatccttgagtnnaaaaatggcagcagcttcntccatggctctctcatccccatccttggctggcaaggccgtgaagctgggcccatcagccccagaagtgggaagggtgagcatgaggaagaccgtcaccaagcagtctcctcaggaagcccatggtacggcccagaccgagtcaagtacttgggcccattctctggcgagcccccgtcctacta

SEQ ID NO: 293506 - DNA, 270 bp, Glycine max
  unsure (1)..(270): unsure at all n locations
ttttctctctccatccaacatcgaaacgccggtcgttttgtgttccgccgaaggaaccggaggttgtagcaggctagcagctatggatttggcatccaatctcggtggcaagattgacaaagccgaagttctctctgccgttcagaagtatgagnagtatccatgtttgcnatggagggcaagangganagggaangccaattaatacggnaatggtnaataatactaggatctggtaaccanctttaatgagtttggcnggggggaacc

SEQ ID NO: 293507 - DNA, 264 bp, Glycine max
  unsure (1)..(264): unsure at all n locations
ggatgaggtattctgcttgtttgagggagcccttgacaatttgggcaacttgagacaacaatatggattggccaagtcaaccaatgaagtattgttggtcattgaggcttacaaagcattgcgtgacagagcaccctaccctgctaatcacgttgttggccatctcagtgggagctttgctttcatagttttgacaaatctacttctaccctctttgtggctctgatcaatatggtaaggtaccctatatggggattactgcng

SEQ ID NO: 293508 - DNA, 263 bp, Glycine max
cgacaaaatggttcgctacggtgcctcctccattgacggcgcaaagtctgctcgcgcccgcggcagctaacctccgcgtatccttcaagaacacccgcgagactgcccaggctgtcaacggctggaagctcgaccgcgccctcacctacctcggaaatgtcttggagcacaaggaggctatccccgaggcggtacgcgggcagcactggacgcactgctcagggcaaggctttcggtgtctccaaggcccgctggcccgtcaa

SEQ ID NO: 293509 - DNA, 263 bp, Glycine max
cgacgacaacttcgatgacaccctcgtatctgccatcaaaacctaccaaaagaattacaaccttcaacgtcaccggcaagttcgacatcaacactcttaaacaaatcatgacaccccggtgtggcgtccccgacataataatcaacacaaacaaaaccacatcgtttgggcatgatctcggacttaccttcttcaaagacatgccgcggtggcaagctggaaccacacaactcacctacgctttctccccggagccaagactt

SEQ ID NO: 293510 - DNA, 255 bp, Glycine max
  unsure (1)..(255): unsure at all n locations
acacaatccatgtaancaccactagcaccataccacactgccaaaatcancaaaccaaaaaggtaaactttttgcaacaaccatggttgcaatggcagcagcaacagcatccacccagttgattttctcaaagccttgttccccttcacgtctatgccccttccaactatgngnctgnactaaacaagtgntatcaagtggcaggagaaggnatgtggggggttctggagtnaggtgcatggctgtgggggaagc

SEQ ID NO: 293511 - DNA, 299 bp, Glycine max
gccagacagctggaagctgagggagatatttgccactggtgttgtgctaggagcttacatggcataatgacagtagtatttttctggctcatgaaggataccgacttcttctcggacaagttcggtgtgaggtctataaggaacagccccggagaaatgatggcagccctgtacctacaagtcagtattataagtcaagcactaatttttgtgacaaggtcccgcagctggtcctatgttgaaagacctggtcttctcctactgagtgcttttatgattgcacaactggtgggcaattt

SEQ ID NO: 293512 - DNA, 300 bp, Glycine max
agagagagagcgagcagtttcagacacagagagaggggtttgggattggagggattgacgctgcgtcttcttcctcttctctttcgatccatccctcattcctaatcctccaatccaaccacctcagcctcacactcacatatacacatatctgaacgcgtatcgtccctcctatggcttcaaagcgcatcctcaaggagctcaaggacttgcagaaagacccaccaacttcttgcagcgctggtccagtagctgaggacatgttccattggcaagcaacaataatgggtcctgctgata

SEQ ID NO: 293513 - DNA, 297 bp, Glycine max
gcggaagttgcaactgaagtgaagctctttaacaagtggtcgtacgatgacatcagcgttgcagcggatattctcattggaagactacattgccgtgaagggtaaagccgccacgtttctgccgcatacggcgcaggctaccagaagaagcgctttcgtaaggcgcagtgccccattacagagcgtctggtgaatgcgttgatgcgcaaaggtcgtaactcgggcaaaaagctcaaggccacgcgtattgtcaagcacacgctggagattatccacttgctgacggacaagaatccg

SEQ ID NO: 293514 - DNA, 297 bp, Glycine max
  unsure (1)..(297): unsure at all n locations
gcaagccccactcaaccaccacacctctcctcgttcacgctacccctttctgctcttcttctaacttttcaagttttaaaagtataaagatggcagagacattcctatttacctcagagtcggtgaacgagggacaccctgacaagctctgcgaccaaatctccgatgctgtcctcgacgcttgcctcgagcaggacccagacagcaaagttgcctgcgaaacatgnaccaaaaccaacttggtcatggtcttcggagaaatcacgaccaaggccaagttgactacgagaagatagt

SEQ ID NO: 293515 - DNA, 297 bp, Glycine max
ggcggtgagttggagctttgaccagtttgagcacacgagaattcagtgggcatgtcaatgggcaaaaaaacctgtgaaatactctctggttgacgcgtttactgagtcagtgttcaaaggaaaccctgcagcagtgtgtttcttagaagagaagagggacaaaaagtggttgcaaggagtagctgcagagttcaatctatctgtgacatgttacttaactcgcatcaccgagtcccatggaacaacctcttatcctcgttttgatctcagatggttcactcctgttagtgagattaa

SEQ ID NO: 293516 - DNA, 296 bp, Glycine max
  unsure (1)..(296): unsure at all n locations
ccatcgcttccgccaatntcttcttcgaagagcgtntcgatgacgggtgggaaaatcgatgggttaaattcagattggaaaaaagatgagaacgtggctggggagtggaaccacacctctggtcaatggaatggagacgctaatgacaaaggtattcaaaccagtgaggattacagattctatgctatttcagctgagtaccctgaattcagcaacaagggtaagacactagtctttcaattttctgttaagcacgaacagaagcttgactgtggtggtggctacatgaagttgct

SEQ ID NO: 293517 - DNA, 295 bp, Glycine max
  unsure (1)..(295): unsure at all n locations
gtgganggggaaactgactttcccccagggcacttcccgaagtgttaagagaatgcctctttctataggggggangngctggtgcaaagaatgctattctcatgaatatgccaaatgctgttctttcaatgtggagatattttgttggagatctcgtctttgaagtttctaagatgacttctccctacattaaatgtacagtctctttcttcatagcatttggaaatttggctgatgacaccatcaattttgaggctttccccacaagctggtgcagtttggagagattcaggaa

SEQ ID NO: 293518 - DNA, 130 bp, Glycine max
  unsure (1)..(130): unsure at all n locations
ataaagctggcgnattatctgtatttttgggtgtaccacttttttactgatgagaattgaacttaattaggaaattaaattgcacaaaaagcttcagaattgtcctatttattttgtgtacctttngaca

SEQ ID NO: 293519 - DNA, 296 bp, Glycine max
  unsure (1)..(296): unsure at all n locations
ggaggaggtgctgaaaaggtttcgtgggtcccagaccctgtcactggttactacaaaccggagaacatcaaagagattgatgttgctgagctgagagccacggttttgggcaaaaaattcaaccactaggctctacttaatttcaataattaacctttttggtctcacgtgaatatgttatatgatatatgangttcacanaaccttcggggattattcagcatggggtttttttcttgtatttctctcttgagaattggcctagcatatgaccaaattaatgtttactagtgtga

SEQ ID NO: 293520 - DNA, 296 bp, Glycine max
  unsure (1)..(296): unsure at all n locations
cttgtgaactccaaggaaggacctccaacctttgaccaaccgaagntgactttgagcaagcncttggagtatggtaacatgcttgtccaagaacaagagaatgtgaagagagtacaactggcagacaagtacttgaacgaggctgctcttggtgatgctaatcaggatgccatcaaaagaggaactttctatggcaaagcagcccagcaagtaaaaattcccgttcctgaaggttgtactgatccaaatgcctcaaacttcgacccaactgcaagaagtgatgatggaacctgctt

SEQ ID NO: 293521 - DNA, 294 bp, Glycine max
  unsure (1)..(294): unsure at all n locations
ttctgatgagcaaaaatttctggaagcgtctatggcttatgtgtctggaaaaccaatcttgagcgacaaaagagtttgatgagttgaaactcaggctaaagatgnaagggagtgaaattgtggctgaaggtccacggtgtagtcttcgtagtagaaaggtttacagtgacctgtctgttgactatttaaagatgttcttgctgaatgtcccagcaactgtggttgcactaggattgttcttcttccttgatgatgtgactggatttgagatctcatatctgataaagatccaga

SEQ ID NO: 293522 - DNA, 294 bp, Glycine max
tctctttctctttctctgtctgcttcttcactttctctcgtttcaatcgaaaaaaatcatgggcagaaaaattcttcgtcggtggcaactggaaatgcaatgggaccactgaggaggtgaagaagattgttactactttaaatgaagctaaagtccctggagaagatgttgtagaagttgttgtgagccctccttttgtgttccttccttttgtaaaaagtttgctgcgccctgatttccatgtctcggcccaaaattgttgggttcgcaaaggtggtgcttatactggagagg

SEQ ID NO: 293523 - DNA, 292 bp, Glycine max
  unsure (1)..(292): unsure at all n locations
gcagaagaacaagtagttgagaactaagaaggagaagcaaatggcttcctcaatgatctcttccccagtgttaancactgtcaaccgtgccggtgccggcatggttgctccattcactggcctcaagtccatggctggcttccccaccaggaagaccaacaatgacattacctccattgctagcaacggtggaagagtgcaatgcatgcaggtgtggccaccagttggcaagaagaagtttnagactctttcctacctgccagaccttgatgatgcacaattggcaaaggaa

SEQ ID NO: 293524 - DNA, 293 bp, Glycine max
caaacccgtgttctgatgcatggagtttggaatttctgaagcgtaccggatttcattgtgatatcatttgtgtcactgggatggactgccactccaatgcaggatgttcaggttacaattgattggtttatttcctctcaggaatgtgttcccaggacttattgtgttttaaatccacaaaatccttttgtgttgaataggtggatggggaaactgactttcccccagggcacttcccgaagtgttaagagaatgcctctttctatagggggaggagctggtgcaaagaatgc

SEQ ID NO: 293525 - DNA, 281 bp, Glycine max
ctggcatggacttggtaatcatacctgctggggtaccaaggaaacctgggatgacccgagatgatttatttaaaataaatgctggaattgtgaggaccctttgtgaaggaattgccaagagctgccccaatgcaattgtcaacttgattagtaatccagtgaattccacagttgctattgctgcagaggttttcaagaaagccggtacatatgatccaaagcgactactgggtgttacgacccttgatgttgtgagggcaaatacttttgtggcagaggta

SEQ ID NO: 293526 - DNA, 290 bp, Glycine max
  unsure (1)..(290): unsure at all n locations
ttgacggcattgggaagaagcttgtgaactcaaaagatggacctccaacctttgagcagcccaagatgactctnggagaagctcttgacgtatggtaacatgcttgtccaagaacaagagaatgtcaagagagtccaattggctgncaagtacttgaacgaggctgcacttggaaatgctaacgaggatgctattaacaggggaactttcttccaatcttgaattggaggcaaagcaaacttggcaagtaaatatttctgttcctgaaggttgtgctnatccaagtgcta

SEQ ID NO: 293527 - DNA, 254 bp, Glycine max
  unsure (1)..(254): unsure at all n locations
atgggtgacgttcagatccacaagaccaaaattcttgcatcatcggaagcggtccctccgcccacacagccgccgtctacgccgctcgagccgagctgaagccgatcctcttcgagggctngatggccaacgacatcgcccccggcggccagctcaccaccaccaccgacgtcgagaacttccccgggttccccgacggcatcctcggcggcgagctcatggaacgctgccggagccagtcgctccgcttcggc

SEQ ID NO: 293528 - DNA, 273 bp, Glycine max
  unsure (1)..(273): unsure at all n locations
agcggactcaatgcttgtaaataacgcattaatgctggtnanctgttaccaagtttttctgntgggaagctggatattggagcacaatggatattgcacatgatcgagctggattttatatttgctggggttgcttggtgtgggttccatctgtttatacgtctcctggaatgtaccttgtcaaccatcctgtaaatcttggcatcaagctagcgctctcaattttagtagctggcattctttgcatatacatcaactatgattgtgacaggc

SEQ ID NO: 293529 - DNA, 289 bp, Glycine max
  unsure (1)..(289): unsure at all n locations
cttggtcagtacatctctggtgccattctctttgaggaaacactctaccaatccacaactgatggcaggangattgttgacgtgctgcttgagcaaaacattgttcctggtattaaagtcgacaagggtttggtgccccttgcaggttccaacgacgagtcatggtgccaaggtttggatggtctagcctctcgctcagctgcatactacgagcaaggtgcccgtttcgccaaatggcgtactgttgtgagcatccccaacggtccctctgctctggcagttaaggaag

SEQ ID NO: 293530 - DNA, 290 bp, Glycine max
  unsure (1)..(290): unsure at all n locations
caagttacatcaagggacaggttgcgtgaatatgaagttgatgttgatcgttctaaaagacgtggacctgagggttgaaagantttatttcgtgattctagagatggcacctgtgacatacatagattctagtgctgttcaggctttgaaagacttgtatcaggagtacaaattacgggacattcagattgcaatatccaatccaagtccagaagttctgcttaccttgtctagatcgggtctggtggagttgataggcaaagaatggtactttgtgagagtacatgatg

SEQ ID NO: 293531 - DNA, 292 bp, Glycine max
  unsure (1)..(292): unsure at all n locations
cactcttcttcttcccacgctcctccttctccatacccttcgccaccctcgtctccgcccgcccttcaacttcggcgggagactttctccgactgccctccgaaaccgataacgatgacaacgtccagggcacccgctgggccgtcctcctcgccggttccaatggctactggaattacagacatcaggcngatgtttgtcacgcctatcaaatactaaggaaaggtggcctgaaagaagaaaatattattgtttttatgtatgatgacattgcattcaatggggaaaaccc

SEQ ID NO: 293532 - DNA, 293 bp, Glycine max
  unsure (1)..(293): unsure at all n locations
tccaatatattccattctctctgtgtatttccctacctctcccttcaagatgcagatcttcgtcaagacccntcaccggcaagaccatcacccttgaggtggaaagctctgacaccatcgacaacgtcaaggccaagatccaggacaaggaaggaatccccccggaccagcaacgtctcattttcgccggaaagcaacttgaggacggccgtacccttgctgactacaacattcagaaggagagtactcttcacctcgtcctccgtctccgtggtggcatgcagatcttcgtt

SEQ ID NO: 293533 - DNA, 290 bp, Glycine max
caataatgaacttaaatgcgctattgaccacattttggatgcccagagaaaaggcgagatcaacgaagacaacgtcctctacattgttgaaaacatcaacgttgctgcaattgaaacaactctatggtcgattgagtggggcattgctgagcttgtgaaccacccagagatccagcaaaagttaagggatgagattgacagagttcttggagcagggcaccaagtgactgagccagacatccaaaagctcccatacctccaagcagtggtcaaggaaactcttcgtctta

SEQ ID NO: 293534 - DNA, 285 bp, Glycine max
  unsure (1)..(285): unsure at all n locations
gtatctttcctgattggccaattcagcttgctttggattgatcagcagcaacgcctgaaattcaatgttgatgttgtagagngtgaatggggccagggtgctaagcttgatgttctggaatcaaagattgcttcagatacttcacacactattaaggcaatttgcattgtccacaatgagactgcaactggggtcaccaatgacttggccaaagtgagacaaattctcgattcctaccggcatccagccctccttattgttgatggagtgtctctatttgtgctc

SEQ ID NO: 293535 - DNA, 287 bp, Glycine max
  unsure (1)..(287): unsure at all n locations
gggagcagtgattctcccagatctcggcaccgagattttgattcccgtctgcgccatcattggaatagcgttcggcctcttccagtgggtctcgtctctaaggtcaagctctccgctgccagagacgcttcctccaacgccggcggcnccaaaaatggctacaacgattacctcatcgaagaagaggaaggcctcaacgaccacaacgtcgtcctcaaatgcgccgaaatccaaaacgccatttccgaaggagcaacctctttccttttcactgagtataagtacgt

SEQ ID NO: 293536 - DNA, 288 bp, Glycine max
  unsure (1)..(288): unsure at all n locations
gaagatggctctgcccaaagctaaggagatcgtgtcgtccaattccgtcgtcgttttcagcaaaacctattgcccctttctgcgtcgatgtgaagaagctcttcggtgacctcggtnnccaattacaaggccatcgaactcgacactgaatccgatggaaaagagctccaagcagcattagttgagtggacggaccagcgaaccgtgcctaatgtgtttattggtggaaaccacattggtggctgtgactcaacaactgccctgcacactcaggggaagctggttcct

SEQ ID NO: 293537 - DNA, 288 bp, Glycine max
  unsure (1)..(288): unsure at all n locations
gaaatttaagtgaggagctagagaatgatgatgaagtctgctatgtgtgcagtggtggttgtagcacttcttcttctggcggnggtggggcccatggctgaggctgtgacatgcaccccaacagagttgagtccgtgtcttccagcaatcacttccggtgctaaaccttccaatgcttgttgcacgaagctgaagcagcaaaaaccatgcttatgtggctacctcaaaaacgctagcttgaagcagtatgttaactctcctaatgcccgaaaaaccgttgcttcttgt

SEQ ID NO: 293538 - DNA, 289 bp, Glycine max
aaagttgttgtaaagccttgttgctgccatggccacccacgcggctcttgcttctacaaggatcccttcaaaacacaaggttcccatccaaggcctctcactctttcccaacccaatgcgccttaaagagacttgaggtgacagaattctctgggcttagatccacttcatgtgtcacatatgctaacagtgctagagaatcttccttttttgatcttgtagcttcccaactcactcccaagcagaccaatggatcaactcctgtgaggggagagacagtggccaagtt

SEQ ID NO: 293539 - DNA, 284 bp, Glycine max
caccaaactgccaattctggtgaagggtgtgctgactgctgaggacacaaggatagctgtacaaagtggtgcagctggaattatagtgtccaatcacggagctagacaacttgattatgttccagccactatatcagccttagaagaggttgtcaaagctgctgaaggtcgtgttcctgtatttttggatggtggtgttcgccgcggaactgatgtcttcaaggcattggcactaggtgcctctggcatatttattggacgcccagtggtgttctccttggctg

SEQ ID NO: 293540 - DNA, 286 bp, Glycine max
  unsure (1)..(286): unsure at all n locations
caccaagctgcatgaaggnnacgtttctgccgcaaganacgttagcatctggcttggcacttcttatctcncaactnctcattggagctgttctaggagatggttactggggtcgatactggacanttgctgttttctctgtggtttatttcattgggatgtgtaccctgacactttctgcatctttaccagcattgaagcctgctgaatgcttgggttctgtatgcccttcagctactcctgcacaatatgctgtgttctactttggtctatacgtgattgcact

SEQ ID NO: 293541 - DNA, 285 bp, Glycine max
  unsure (1)..(285): unsure at all n locations
tctgtttcccgccatatatccaataagctttaaccatgtctgcctttgttggaaagtacgcagatgagttatcaagaatgccaagtacatagccacacctgggaagggcatcttggcagcagatgagagcactggcaccattgggaagcgcctatcgagcattaacgttgagaacattgaggccaaccgccaagctcttcgcgagcttctcttcaccgctccagatgccctccaatacctctctggtgtcatcctctttgaggnaatctttaccagaaaacctcc

SEQ ID NO: 293542 - DNA, 285 bp, Glycine max
  unsure (1)..(285): unsure at all n locations
cgatgagtaccgttgaagaagctgagaacgccgtggagaaattcagtcgttacgattttnatggaagattgttgactgttaataaggcttctccaagaggaactcggccggnacgcccgccgcctcgtcactcctttgagccttccttatcaatctatgttggtaatttgccatgggatgttgataatacccggctggagcaaattttcagtgaacatggtaatgtggtgaatgctcgggtagtctatgacagggagactcgtcgatcacgtggctttggctttg

SEQ ID NO: 293543 - DNA, 278 bp, Glycine max
  unsure (1)..(278): unsure at all n locations
ctgaacaagggtttctctttctctttctctgtctgcctcttcactttctctcgtttcaatcgaaaaaatcatgggcagaaaattcttccgtcggtggcaactggaaatgcaatgggaccactgaggaggtgaagaagattgttatactttaaatgaagctaaagtccctggagaagatgttgtagaagttgttgtgagccctccttttgtgttccttcctttgtaaaaagttngctgcgccctgatttccatgtctcggcccaaaattgttgggttcg

SEQ ID NO: 293544 - DNA, 278 bp, Glycine max
  unsure (1)..(278): unsure at all n locations
aggggtttnggattggagggattgacgctgcgtctcttcctcttctctttcgatccatccctcattcctaatcctccaatccaaccacctcagcctcacactcacatatacacatatctgaacgcgtatcgtccctcctatggttcaaagcgcatcctcaaggagctcaaggacttgcagaaagacccaccaacttcttgcagcgctggtccagtagctgaggacatgttccattggcaagcaacaataatgggtcctgctgatagtccttatgctgg

SEQ ID NO: 293545 - DNA, 249 bp, Glycine max
  unsure (1)..(249): unsure at all n locations
ctttgaataacaaggntgaagttttgctaaacncangactacccgagagtcagtacctcaccctgacaacagggttgagtatgagctctggaccaacagcaatgatgaatgtgggctcgttgcgatgaacagatgaatttcgtgaagaattttaagggtcatgctcagattcttgagaggggcggttatactttgttcactccacactacataacttggttttgtccaccacccttcattcttagcagt

SEQ ID NO: 293546 - DNA, 266 bp, Glycine max
cttggcggggataagattaaagattcaacaatggcctctgcttctgctactcttctcaagtcatctcctgttcttgacaagtgcgagtgggtcaaaggccagacccttcgccaacctctcgtgagatgtaaccttcctcagcatcagctctcaccatcaaagctgcttcctatgctgacgagctcgtcaaaaccgccaaaacagtggcctcaccggggcgtggtattttggcgatggatgagtcaaatgcaacctgcgggaagcgt

SEQ ID NO: 293547 - DNA, 273 bp, Glycine max
acaaaagcaaatacaagtctatgctaattcgagcatattcatctgtatggatgattggcggctttgttttgatcatttatatgggtcacctctacatcactgcaatggtggttgttatccaaatcttcatggcaagggagtgttcaatctactcaggagagctcatgaagataggcagctgccaggatttaggctattaaattggcattttttcttcactgcaatgttatttgtttatggacgaattctgagtcaatgcctggttaacacagt

SEQ ID NO: 293548 - DNA, 274 bp, Glycine max
  unsure (1)..(274): unsure at all n locations
caattgaagttaaaagccttagccttccctacaactccaaacaannaagacatcntcatccatggctgcctccgtctccactgtcggagctgtcaacagagctcttttgaacctgaatggttctggagctggagntcagtccagttcagccttctttgggaccagcttgaagaaggttattgcctcaagggtccccaacagcaaggtttccggtggaagcttcaagattgttgctgtagaagagaagaaagagattgaagagaccagcagaccg

SEQ ID NO: 293549 - DNA, 273 bp, Glycine max
ttggtgccatattcgcctctggcttcatccgtgccattaggttccttgagaaacattgggcccttttgtgcaatgacatcaaaacaggaactattaacaactcaatcactgattcttcagtgagagaggctgtgatgaggtcctcaaggctgatcccaagcttgcggattttatccacaatgagtgtagtaaagggtcatggcaggggattattactaggctttggcccaatacaaagtatgtggatgttattgtgacggggactatggcaca

SEQ ID NO: 293550 - DNA, 256 bp, Glycine max
  unsure (1)..(256): unsure at all n locations
ggaaaatgaggaaagaaaacgtatagaaatagcagaagcctgggatagcattatatttgcncangtaataagaggtattttattaataacccaatccattcttagaaaatatattctattaccttcattgataataactaaaaatattgctcgtatactatttttcaatttcccgaatggtcggaagnttttagggattggaagagagaaatgtatattaaatgcacatataatggtgttcaattatccgaaagag

SEQ ID NO: 293551 - DNA, 279 bp, Glycine max
gagatacacagtagttaggtagcaagcataagtgtctaaccttagaaacatatctgctacatatcgtgtgcattttggaattgtgccactaaaattctattcatctatggctgcctcatcttatgctatgcaatcaatccttgcaaaccctatgatccgcatttccagcgggtctagggagaaccattttggtgtttctgcttatcacatgagaaggaatgttggcctgagagttaggtccatggctgaggaagagcaaccaagtcagcctgcgacccc

SEQ ID NO: 293552 - DNA, 278 bp, Glycine max
  unsure (1)..(278): unsure at all n locations
gttggagctaaaaaggtcacatgctcccttcaggctgatcttaaggacttggctcacaagtgtnttgatgctaccaaaattgcaggattcgcccttgccacctctgccctcgttgtctctggggcaagtgctgaaggtgttccaaagaggctaaccttcgacgaaatccagagcaagacctacttggaagtgaaggggacaggaacagcaaaccagtgcccaacaattgatggtggattggactcatttgccttcaagccggggaaatacaatgccaa

SEQ ID NO: 293553 - DNA, 272 bp, Glycine max
  unsure (1)..(272): unsure at all n locations
cttatcnctgtggttttcatcgtcttccttctcttatatttctntntttttttgncttcgccgnacgccgaaacaatggccgganaaggagagggtcctgcnatcggaatcgatctcgganccacctactcttgtgtcgtgtgtggcaacatgaccgagttnaaatcatcgccaacgaccaagggaacagaacgacgccgtcttacgtcggcttcactgataccgagcgtctcatcggtgatgcggctaagaaccaagtcgccatgaacccc

SEQ ID NO: 293554 - DNA, 275 bp, Glycine max
  unsure (1)..(275): unsure at all n locations
tgttgctgaattcaggacacaaaatgccagtnataggcatgggaacttcagtggagaatcgtccatcaaatgagacccttgcttctatctatgttgaagccattgaggtgggttaccgtcattttgacactgctgcagtgatggaacagaggaagccataggcctagccgtggccaaagccatagacaaaggccttataaagagtagagatgaagttttcatcacttcaaagccttggaacacagatgcacaccgtgaccttattgtcccagctc

SEQ ID NO: 293555 - DNA, 279 bp, Glycine max
ccgtcttatgggacgcaaggcatcacacgttgctttggaatgcaccctccagtcccatccaaatatggtaattcttggtgaggaggttgctgcatcaaagcttaccctttctgaaattgcaaaacagattactgatgcaattaggctagagcagagcaagacaaataccatggagtcattctccttccagaagggctgatagagagtattcctgaagtgtatgccctcttgaaggaaattcatggtttactcagacaaggtgttgaagttgacaagata

SEQ ID NO: 293556 - DNA, 277 bp, Glycine max
  unsure (1)..(277): unsure at all n locations
cattgaccatagaattgaaccaattcctagtcatttgatggcttcagaaaatgaattctcagaactcaacagaaatctttacccgcaaatagaaccctacagtacaggatttttgaaggtttcagatcttcacacaatttactggnangcaatcaggaaaccccagtggccatcctgttgtgttcattcatggtggtcctggagggggaacttctccaagcaatcggaaattttttgatcctggacttttaccgaattgttctatttgatcagcgaa

SEQ ID NO: 293557 - DNA, 273 bp, Glycine max
gctggttcctatgctgatgagctcgttaagaccgcgaaaacagtggcttcaccagggaggggtattttggccatggatgagtccaatgctacctgtgggaagcgtttggcttcaattgggctagagaacactgaagctaaccgccaggcataccgtaccctccttgtgacagttccaggacttggtcagtacatctctggtgccattctctttgaggaaactctctaccaatccacaactgatggcaggaagattgtcgacgtgctcctcgag

SEQ ID NO: 293558 - DNA, 276 bp, Glycine max
caactcgatcaactcaacacaaaccaaaactcaagctaaaattctcactctctctctcatctcgagatcatagtatcatattcaatatcatttcataccaaacacatggctttggaagctctcaactcaccaacaacaacgctccatcttttccctttgacgacccaactattccatgggcgaaacgaaaacgttcaaagcgttctcgcgaccatccttctgaagaagagtacctcgccctctgcctcatcatgctcgctcgcggcggcaccacca

SEQ ID NO: 293559 - DNA, 278 bp, Glycine max
cagaaagcaagctcatcctagagttttaaaaatggcagcagcctcctccatggctctctcttccccatccttggctggcaaggccgtgaagctgggcccatcagcccccgaagtcgggagggtcagcatgaggaagaccgtcaccaagcaggcctcctccggaagcccatggtacggcccagaccgcgtcaagtacttgggcccattcttcggcgagcccccgtcctacctcactggcgagttcccaggtgactacggctgggacactgctgggcttt

SEQ ID NO: 293560 - DNA, 278 bp, Glycine max
  unsure (1)..(278): unsure at all n locations
ctgcttcaccttctgctctagaaaattcagtgctgaaacatngcttcggctactctctctgtagccaaaccagcccttcaggcaaatgggaaaggcttctctgaattctctggcctccgaagctcatcaggcttccttccttttctagaaaatcttcagaggatttccattctgtcattgccttccagacctatgcagttggcaagcagtggaggatacaagaagggtgtgacagaagcaaaactgaaggttgccataaacgggtttggaaggattgg

SEQ ID NO: 293561 - DNA, 272 bp, Glycine max
ccataagtcccttccctattgtaatttctgccagcctcaaaaaagacttgctctgcctctgccacttctctgagtaggactacactgccatggctgcctcagtctccactgttggagctgtcaacggagctccactgagcttgaacagctctggagctggagcttcagttcccagttcagccttctttggcaccagcttgaagaaggttattgcctcaagggtccctaacgtcaagatttcttctggaagtttcaaaatcgttgccgcggaa

SEQ ID NO: 293562 - DNA, 272 bp, Glycine max
tggggggtttggttcatccttgattgccatggatgagagaacatatgaactcataggccctgattaccctggtaatagagctgaagatgttaaagacccaggcttgggttggatgatgggttttatgtttgttgtcatttccttggactttttagtcttgtaccacttcgtaaggttatggtcatggattataagcttacatatcccagtgggacagccacagctatgctaatcaacagtttccatacaaaaactggatcagaacttgcaga

SEQ ID NO: 293563 - DNA, 271 bp, Glycine max
  unsure (1)..(271): unsure at all n locations
tcatcatccatggctgcctccgtctccactgtcggagctgtcaacagagctcttttgaacctgaatgggtctggacctggggtttcagctcccagttcatccttctttgggagcagcntgaagaaggttattggctaagggtccccaacacaaagatttcctctggaagcttcaagattgttgctgtagaagagaagaaagagattgaagagacccagcagaccgacaaggacagatggaagggtcttgcctatgatatctcagacgacca

SEQ ID NO: 293564 - DNA, 271 bp, Glycine max
aagaagcagagggagtagcggcattaaaaatgcagatcttcgtgaaaactctgacagggaagactataaccctcgaggtcgagagcagcgacaccatcgacaatgtcaaggccaagattcaagacaaggaaggcatccctccggatcagcagcgtttgattttcgccggaaagcagcttgaagatggaaggaccctggccgattacaacatccagaaggaatcaacccttcatctcgtcctcaggcttcgtggtggcatcattgagccttc

SEQ ID NO: 293565 - DNA, 301 bp, Glycine max
  unsure (1)..(301): unsure at all n locations
ggatgcaatacagcgagcatggcagattgtggatcagattcctgggagagcnactggtgcctanaggcatagtccaggngtcaagggcttgcntgatacaatagctgctggaattgaagagcgtgatggttttcctgccaatcctgatgacattttcatgactgatggtgcaagccctgctgtccataatatgatgcaattactcattagatcagaaaatgatggtattctgtgtcccattccacagtaccctctgtactcagcctcaatgccctccatggtggctgcctggtacctatta

SEQ ID NO: 293566 - DNA, 299 bp, Glycine max
  unsure (1)..(299): unsure at all n locations
ctgccaacttcacatcccaagtcattatcatgaaccatcctggccagattggtaatggatacggaccagtcctttgactgccanacttctcacattgctgtgaagttttctgaaatcttgaccaagattgacaggcgatctggtaaggagcttgagaggagcccaaatttttgaagaatggtgatgctggtatggttaagatggttccaaccaagcccatggtggttgaaactttctctgagtatcctccccttggtcgttttgctgtgagggacatgcgtcagaccgtagctgttgga

SEQ ID NO: 293567 - DNA, 294 bp, Glycine max
  unsure (1)..(294): unsure at all n locations
cgacaagggtttggtgccccttgcaggttccaacgacgagtcatggtgccaaggtttggatggtctagccttctcgcncagctgcatactacgagcaaggtgcccgtttcgccaaatggcgtactgttgtgagcatccccaacggtccctctgctcggcagttaaggaagcagcctggggtctngctcnctatgctgcaattgctcaggacaatgggttggtcccaattgtggagccagagatcttgcttgatggggagcatggtatgatagaacttttgaagtagcccaaaag

SEQ ID NO: 293568 - DNA, 294 bp, Glycine max
tctgggagcagtttatttactgctcttctgccggtgtctatctcaaatctgatctattacctcacgcagagactgatgcagttgatcctaagagcagacacaagggaaagcttgagacagagagtttgctacaagcaaggggtgttaattggactctataaggccagtctacatctatggacccttgaactacaaccctgttgaagagtggttctccatagatgaaagcgggacgcccaattcctatccccggctacaggaatacagataacccaacttggtcatgttaaggat

SEQ ID NO: 293569 - DNA, 295 bp, Glycine max
  unsure (1)..(295): unsure at all n locations
gttgnttctgacccaattccacaagttgagaagcctttgtatgagcttgtttngactgcacaaacaattgctccagacagtgaaggtgctattgatggacaccttcgtgaggttggactcacatttcacctcctcaaggatgttcccgggattgtctcaaagaacattgacaaggcactttttgaggctttcaacccattgaacatctctgattacaactccatctttggattgcacaccccggtgggcctgctattctgaccaagttgagcaaaagttaggtctcaaacctgag

SEQ ID NO: 293570 - DNA, 300 bp, Glycine max
  unsure (1)..(300): unsure at all n locations
tatgtgcggaagacggccgagcttgctacccagttctatatcaatcctgctaccagccaacccaatgtttctgggattaatactggctggttcagctgatttcaagactgaacttagtcagtcagatatgtttgatcctcgacttcaggcaaanatactaatgttgttgatgtctcctacggaggcgagaatgggtttantcaggctattgaactctctgctgaaattctgtccaatgtgaagtttatccaggagaagcgatgattggaaaatacttgaggaaatcagccaggatacggg

SEQ ID NO: 293571 - DNA, 298 bp, Glycine max
  unsure (1)..(298): unsure at all n locations
tctgaagataacttcgagaaggaagttggtcaggacagaggagctctcgttgagttctatgctccttggtgtggacactgcaaaaagcttgctccagantatgaaaagcttggtagcagcttcaagaaagccaaatctgttttaatcggcaaggttgactgtgatgagcacaagagtttgtgcagcaaatatggagtctctgggtacccaacaattcagtggtttccaaaaggatctcttgaacccaaaaagtatgaagggccacgcactgctgattcactgctgagtttgtaaatac

SEQ ID NO: 293572 - DNA, 294 bp, Glycine max
  unsure (1)..(294): unsure at all n locations
ggncaccggattggcagganttcnnnggaattattgcactgctagtggatcaactccacaatcagttttattnaggaaaancatgctggcaaatgctgctgctgctcttatggcggtttagctccaaagactaaggtacttagggataaccgatgggtgaacaagatgctgcaattttagtaccaggagacataatcagcatcaagttaggagatatcattccggctgacgctcgtctcttgagggtgatccttgagtgttgattcatctgcttgactggagaatctcttcccg

SEQ ID NO: 293573 - DNA, 298 bp, Glycine max
  unsure (1)..(298): unsure at all n locations
ttggatttggttctccaaacaagggctaattcctacagtgttcatgggagtgcattaggtgctaaaagaagtngatgctacaaggaagaatcttggatggccatacgagcctttccatgtgccagaagatgtcaagaagcattggagtcgccatacactgagggtgctaaacttgaagctgagtggaatgccaagtttgtggaatatgagaagcaatacagtgaggaagctgcagagctgaaggctattatactggcgattaccagctggttgggagaaagcattccgacatacacac

SEQ ID NO: 293574 - DNA, 292 bp, Glycine max
  unsure (1)..(292): unsure at all n locations
tttaggacaatggattggtcccaattgtgganccanagatcttgcttgatggggagcatggtattgacagaacttttgaagtagcaaaaaaggtctgggcagaggttttcttctaccttgctgagaacaatgtcctttttgagggtattcttttaagcctagcatggttacacctggagctgagtccaaggacaaggccagtcctcagacagttgctgattacaccctcaagctcctcacaggagaattccccctgctgtccctggaattatggtaatgccaaatgcatcac

SEQ ID NO: 293575 - DNA, 296 bp, Glycine max
  unsure (1)..(296): unsure at all n locations
caaagcannaagcaaagctcatccttgagttaaaaaatggcagcagcttcttccatggctctcttcatccccatccttgggctggcaaggccgtgaagctgggcccatcagccccagaagtgggaagggtgagcatgaggaagaccgtcaccaagcaggtctcctcaggaagcccatggtacggcccagaccgagtcaancacttgggcccattctctggcgagcccccgtcctacctaaccggtgagttcccaggcgactacggctgggacactgctgggctttccgcagaccca

SEQ ID NO: 293576 - DNA, 302 bp, Glycine max
gggttatcatttctccatttccattttctctctcacttttcaagaatcgtaagctatgggaaagtcttaacccaattgtgagtgctgattaccagaaggccgttgagaaggcgaagaagaagctcagaggcttcatcgctgagaagagatgcgctcctcaatgctccgtttggcatggcactctgctggaacctttgacaagggcacgaagaccggtggacccttcggaaccatcaagcaccctgccgaactggctcacagcgctaacaacggtcttgacatcgctgttaggctttggagcc

SEQ ID NO: 293577 - DNA, 298 bp, Glycine max
tggcaaacctcataaactgagattgtattctattgctagcagtgccattggtgattttggagattccaagactggtttctctatgcgtgaaacggctagtgtacacaaatgaaaatggagaaattgtcaagggagtctgctcaaatttcttgtgtgactgaagccaggagctgaagtaacaataactggacctgttgggaaagaaatgcttatgccaaaagatcctaatgccaccatcatcatgttgggaaccggaaccgggattgccccattcgctcattttatggaaaatgttctt

SEQ ID NO: 293578 - DNA, 292 bp, Glycine max
  unsure (1)..(292): unsure at all n locations
tatgcttgtntcaaagattaagccatgcatgtgtaagtatgaactaattcagactgtgaaactgcgaatgggctcattaaatcagttatagtttgtttgatggtatctactactcggataaccgtagtaattctagagctaatacgtgcaacaaccccgacttctggaagggatgcatttattagataaaaggtcaacacaggctctncctgttgcttgatgncncatgataactcgtcggatcgcacggcctttgtgccggcgcacgcatcatcaaatttctgccctatcc

SEQ ID NO: 293579 - DNA, 292 bp, Glycine max
  unsure (1)..(292): unsure at all n locations
tngagggcaaagagaatggcacgtaaggnaggancatcggtgatatttgtggttgatgcaagtggaagcatggcattgaacaggatgcagaatgcaaaaggtgcagcacttaagcttctggctgaaagttatacaagcagggatcaggtctctaaattccattccgtggagacgcagctgaagttcttctgccaccttctagatcaattgcaancgnaaggaaacgtcttgagaggctccatgtggtggagggtccccacttgctcaggtctacaacggctgttagagttgg

SEQ ID NO: 293580 - DNA, 294 bp, Glycine max
cgatgacaacgtccagggcacccgctgggccgtcctcctcgccggttccaatggctactggaattacagacatcagggctgatgtttgtcacgcctatcaaatactaaggaaaggtggcctgaaagaagaaaatattattgtttttatgtatgagacattgcattcaatggggaaaacccaaggcctggagtcatcattaacaaaccagatggaggtgatgtttatgaaggagttccaaaggattacaccggcgaagatgttactgttggtaacttttttgctgcttacttgga

SEQ ID NO: 293581 - DNA, 286 bp, Glycine max
  unsure (1)..(286): unsure at all n locations
ttactcgatctttctataagcatatacttggtgttaaggttacataccatgatattgaagcggttnatcctgattactataagantttgannatggatgctggagaatgatgtgagtgatattcctgacctgacatttagcatggatgcgatgaggaaaagcacatactttacgagaagaatgaggtcactgattatgagctaaacctggaggaaggaacataagggtcacagaagaaacaaagcatgagtatgttgatctgttgctgaacatctttgacaaatgc

SEQ ID NO: 293582 - DNA, 293 bp, Glycine max
  unsure (1)..(293): unsure at all n locations
gncactttctgagtacaatacaacactgccatggctgcctcagtctccactattggagctgtcaacagagctccactgagcttgaacagctctgaagctggagattcggttcccagttcagccttctttggcacaagcttgaagaaggttactgcctcaagggtccctaacgtcaagatttcttctggnagtttcaaaatcgttgcggcggagaaagagattgatgagcaacaacagacaaacaaggacagatggaaaggtcttgcctatgatatttcagatgaccagcaaga

SEQ ID NO: 293583 - DNA, 291 bp, Glycine max
  unsure (1)..(291): unsure at all n locations
cacagnatgcaaagantctgnaacttgctcgagaatttcttctagatgctgctaccgttatatttanagaacaggttgaaaaggctttcagagaaggaacagcacgccaaaatgcgcacagcatatttgtttgtcttgcactganactactggngaacgagttcatgtagcatgcaaagaaatcattacattagaaaagcaggtctttattatgctttattgggaacagactttggaataantgaacaaaaactgaactctccactttattttgagntttacttccaaatc

SEQ ID NO: 293584 - DNA, 294 bp, Glycine max
  unsure (1)..(294): unsure at all n locations
ggggaggcaagggacaaggaaaatctttccaatgtgagcttgtctttgccaagatgggaatcaaccccatcatgatgagtgctggagagttggaaagtggaaatgcaggagagccagcanaactgatcaggcagagataccgtgaagccgcgacttgatcaagaagggaaagatgtgtgctctcttncatcaacgatcttgatgcaggagctggtcgtctggtggaaccacccaatacactgtncaacaaccagatggtgaatgccaccctcatgaacattgctgataacccca

SEQ ID NO: 293585 - DNA, 287 bp, Glycine max
ctacttgatgatcgttccttcacctttgatctcactctcgaccacataaaagccgtgctcatgaacatctttatagcaggaacagacccgagttccgcgacaatagtttgggcaatgaatgcactgttgaagaatcccaatgtgatgagaaggttcaaggagaagtgagaaatctattcggtgacaaagatttcataaacgaagatgatgtcgaaagcctccttatctcaaagcagtggtgaaggagacattaagattattcccacctcaccactactttgccaggg

SEQ ID NO: 293586 - DNA, 272 bp, Glycine max
  unsure (1)..(272): unsure at all n locations
cnttaaatttctctgttttctattannagatcttgaactncactgaaagagnctgtcatcttaccngaagaagcttttgatgaagctatttctgagcttgacaccttgaatgaggagtcatacaaagatagcaccttaatcatgcaacttctacagggacaacctaactttgtggacttctgacatcccagaagatggagaagatgcccagaaagtgaatggcactgccaagctggtggaggtgaggatgcagagtgagtccgatggatgat

SEQ ID NO: 293587 - DNA, 274 bp, Glycine max
  unsure (1)..(274): unsure at all n locations
ggnaagttagcttttaaagttgtcatccagctggcacttgatcttgcaagagggctgagttatcttcactcccagaagattgtccatagagatgtaaagacagagaacatgctattggataagacacgcacagttaaaattgctgattttggggttgcacgtgttgaggcatcaaatcctaatgatatgactggggagactggtactcttggttatatggctccagaggttttaatgggcaacccctataaacaggaatgtgatgtgtacagtt

SEQ ID NO: 293588 - DNA, 257 bp, Glycine max
  unsure (1)..(257): unsure at all n locations
ccaagctccacaggatgctggaactcactatgctgtcatgagctcctacgagtaccttagcactggacttcgccagtacttggacaacaacatggatggattttacattgctccagcttttatggacaaacttgttgttcacattaccaagaacttcatgaccctgcccaacatcaaggttctctcattcttggtatctggggangcaaggggacaagggaaaatctttccaatgtgagcntgtctttgccaagatg

SEQ ID NO: 293589 - DNA, 272 bp, Glycine max
  unsure (1)..(272): unsure at all n locations
gaatacatctctggtgccattctctttgaggaaactctctaccaatccactgtcgatggaaggaagatcgtcgacgtacttgttgaccaaaacattgttcccggtatcaaggtcgacaagggtttggtgcccctagctggttcgaacgatgagtcatggtgccaaggtcttgatggtcttgcgtctcgctcagctgcatactaccagcaaggtgcccgtttcgccaaatggcgtactgttgtgagcatccccaacggtccctctgcnctggc

SEQ ID NO: 293590 - DNA, 265 bp, Glycine max
ccgtttcgccaaatggcgtactgttgtgagcatccccaacggtccctctgctctggcagttaaggaagctgcctggggtctggctcgctatgcagcaattgctcaggacaatggattggtcccaattgtggaaccagagatcttgcttgatggggagcatggtattgacagaacttttgaagtagcaaaaaaggtctgggcagaggttttcttctaccttgctgagaacaatgtcctttttgagggtatcttcttaagcctagca

SEQ ID NO: 293591 - DNA, 264 bp, Glycine max
gtaaattgaagggaggaagtggcaaagtgatcaacagcaaacccgaggacagaatatttatatactactctgatgcatggaggtcctggaatacttgggatgccaaacatgccatacctttatgccatggattttattgatgtcttgaagaagaaacatgcatctggaagttacaaggagatggttatatacgtggaagcttgtgaaagtgggagcgtgtttgagggtataatgcctaaggatctgaatatttatgtcacaact

SEQ ID NO: 293592 - DNA, 264 bp, Glycine max
  unsure (1)..(264): unsure at all n locations
gnaatggcgatggcaatggcgcttcgcagggctttcatcttcaattgacaagcctctgcgccctctcttcaatgccggttccctctactacaagtcgtctttgcctgatgaagctgtttacgacaaggagcgacccggagttacatggccgaagcagttgaatgctccacttgaggtcgtggatcctgagattgctgatattattgagcttgagaaagctaggcaatggaaggggctagaattgataccgtcagagaatttcac

SEQ ID NO: 293593 - DNA, 266 bp, Glycine max
  unsure (1)..(266): unsure at all n locations
gtggaaattcaggaccttcccttctttgacactgtgaaggttaagacttccaatgcacacgcaattgctgatgctgctctcaaaagtggaataaatttncgagttgttgatggaaacactatcactgttgcttttgatgaaacaaccacattagaggatgttgataatctttcaaagtttttgctggtggaaagcccgtctccttcacagctgcatctcttgcaccagaagtttcagagtgcgatcctctggattagttaggaaga

SEQ ID NO: 293594 - DNA, 274 bp, Glycine max
  unsure (1)..(274): unsure at all n locations
gcaattgaagttgaagtcttgcccttctctcttcaactccaaacacaagacatcatncatccatggctgcctccgtctccactgtcggagctgtcaacagagctcttttgaacctgaatgggtctggacctggggtttcagctcccagttcatccttctttgggagcagcttgaagaaggttattggctcaagggtccccaacacaaagatntcctctggaagcttcaagattgttgctgtagaagagaggaagagattgagagacccagcaga

SEQ ID NO: 293595 - DNA, 271 bp, Glycine max
  unsure (1)..(271): unsure at all n locations
tccatatggaggcttcccaccgagtcgtccggctataagccggcgattcatgccaganaaaggaactccagaatacgatgaacttgtggcgaatcctgataaggcttatctgaaaacagttacttcacagtttctggctgttcttggcatttcacttgtagagatcttgtccaaacattctagtgatgaggtctacttgggcagagagacactccagattgggacatctgatgctgagcccattgcaagcntttganagtttggcaaaaaa

SEQ ID NO: 293596 - DNA, 268 bp, Glycine max
  unsure (1)..(268): unsure at all n locations
gatcgaagatctgnaaccctctcttgcccacaccgtttcagcttctgggtcgtgaaatcgtgctctggtacgacaagtccatttcccaatgggttgcttttgatgacaaatgcccccatcgtcttgcccctttgtctgaagggaggattgatgaagatgggaagttgcagtgttcttatcatgggtggtcttttgatgggtgtggatctgtgttaagatacctcaggtntgcatctgaaggccccgaagcacgtgccattggatctcc

SEQ ID NO: 293597 - DNA, 268 bp, Glycine max
tatggctctcacgtgatgcagtatggtgatgtagggcttagcagagatgttctcttccattatttgggtacagatcctgctaatgataatttcacttttgtggatgaaaactccttatggtcaccttcaaaaccagttcaaccaacgtgatgctgatctcatccatttttgggataagttccgcaaagctcctgagggttctctcaggaaaaatacagctcagaaacaagttttgggaagcaatgtctcacagaatgcatgtagacaa

SEQ ID NO: 293598 - DNA, 263 bp, Glycine max
  unsure (1)..(263): unsure at all n locations
gactttgggctatgcagtcactttgtgagagccataatgacattaaaaccatcataacagagcttgagcttcctgtacatgattgggatgagaaatggatagacgtgtacttggacattagtgtgaagttgctagatatatgcattgcatttagctctgaattatcacgcctgaaccagggtcnnnctttacttcagtgtgcattgcacaatttaggttcttcctcttcagagcagtatgttcgggcatgttcttcattgatg

SEQ ID NO: 293599 - DNA, 257 bp, Glycine max
  unsure (1)..(257): unsure at all n locations
ctatactgcttcaccttctgctctagaaaattcagtgctgaaacatgggcttcggctactctctctgtagccaaaccagcccttcaggcaaatgggaaaggcttctctgaattctctggcctccgaagctcatcaggcttccttcccttttctagaaaatcttcagaggatntccattctgtcattgccttccagacctatgcagttggaagcagtggaggatacaagaagggtgtgacagaagcaaaactgaaggt

SEQ ID NO: 293600 - DNA, 266 bp, Glycine max
  unsure (1)..(266): unsure at all n locations
ggaaacaggcatagcatgctacactcgcgggcctttcctgcctagtgtttcttccaagcactctccaccctccatctctccatcntttggcttgaggagtctgaaatcgagctctttatttggagaatctctaagagtggcatccaaatcaacactaaaggtttcaaagacaaagaatacttcactcgtgaccagatgtgaaattggtgacagtctggaagaattcctcacaaaagcaacaccagataaggggttgatcaggttgt

SEQ ID NO: 293601 - DNA, 269 bp, Glycine max
  unsure (1)..(269): unsure at all n locations
gtgcccccagcttgaacaagccacttacaagaatcgccagagnctctacctttctgagcagactgatggtagtgtgccgaatactctggtgattgcgaattgcgaggttgtgaagcctagggttgctgctgctgagcacatttcgcagtttaatgaagaggcgcggtccccatttgtgaagangtacaagaccatcatacatcctggtgaggtaaacagattagggaattgccacaaaattccaagatagtggctacacatnacgacag

SEQ ID NO: 293602 - DNA, 265 bp, Glycine max
gtcgtcgcgtgtactttcttgcgaaacagaagggcgaaggggcaaacacaacttttttgtttttttgtagagcgagagagaaaaaaatgttggggatcttcagcagttccgtggtgtcgccgccggaggagctggtggctgccggcagcagaacgccgttcgccgaagacgacggcggggaagctgctgaaccggttcgtggagaacaaggcgtcggcggtgtcgctgcaggtgggagaacactgcattggctacacgcaccaca

SEQ ID NO: 293603 - DNA, 258 bp, Glycine max
  unsure (1)..(258): unsure at all n locations
tgcaattgaagttgaagtcttgcccttctctcttcaactccaaacacaagacatcatcatccatggctgcctccgtctccactgtcggagctgtcaacagagctcttttgaacctgaatgggtctggacctggggtttcagctcccagttcatccttctttgggagcagcttgaagaaggttattggctcaagggtccccaacacaaagatttnctctggaagcttcaagattgttgctgtagaagagaagaaagaga

SEQ ID NO: 293604 - DNA, 266 bp, Glycine max
gtgtaagcaagcaaaaccctagcggcgcctgctttctttgttcgtgttttgcatcaggatggagtctcaggtgaagcacgcacttgttgtcaaagttatgggtcgtactggatccagaggacaagtgacccaggttagagtgaagtttttggatgatcagaaccgtcacatcatgaggaatgtgaaaggacctgtgagagaaggagacattctcaccctactcgagttctgaaagggaagcaagaagattgcgctagatggtctct

SEQ ID NO: 293605 - DNA, 260 bp, Glycine max
  unsure (1)..(260): unsure at all n locations
cacctttgttcactcttcttctcttgcggctagggttttagcgcagttcttctagatttaaggaagatgggtaaggaaaaggttcacatcagtattgtggtcattggccatgtcgactctgggaaatccactaccactggtcacctgatttacaagcttggaggcattgacaagcgtgttattgagaggtttgnnnccgaagctgctgagatgaacaagaggtcttcaagtatgcctgggtgctggacaaacttaaggcg

SEQ ID NO: 293606 - DNA, 259 bp, Glycine max
tggttttgaagaattttgaagggttggatcttggaaagctgaacaagactagtgactcttttgctgcctcttatgctgctgaactatacgatcggtcactcaactggaaggatatcaaatggattcaaacaatcacttctttgcctattttattaaagggtgtacttactcctgaagatacaatgatagccatacaagctggagctgctggaatcattgtttccaatcacgggagctcgccaacttgactatgtccctg

SEQ ID NO: 293607 - DNA, 264 bp, Glycine max
  unsure (1)..(264): unsure at all n locations
agttctgttctcttcaaaatggagactaataatgcatgtactatgcattctcattgcatagagatgtccatggaantgcaccaagttgtgccaccacctcacaagagcacccttcagaaactcaagggtaggctcaaggaaactttcttccctgatgatcctctgcgccaattcaagggacaacctcttaagagaaaactgatccttggagctcaatatgtgttccctattctccaatggggtcctaagtatatctcaaactct

SEQ ID NO: 293608 - DNA, 267 bp, Glycine max
  unsure (1)..(267): unsure at all n locations
gnagttaaaagccttagccttccctacaactccaaacannnaagacatcntcatccatggctgcctccgtctccactgtcggagctgtcaacagagctcttttgaacctgaatggttctggagctggagcttcagctcccagttcagccttctttgggaccagcttgaagaaggttattgcctcaagggtccccaacagcaaggtttccggtggaagcttcaagattgttgctgtagaagagaagaaagagattgaagagacccagc

SEQ ID NO: 293609 - DNA, 194 bp, Glycine max
  unsure (1)..(194): unsure at all n locations
gaattgcacatatgattgaacatgttgctttcctaggangtaaaanacgtgagangcttttgggaacaggagcccgttcaaatgcttatactgatttccaccatacagtgtttganatccatgctcctacgagcaccaaggattctgatggtgatttactccattgttctagatgcctgaatgagataggctcc

SEQ ID NO: 293610 - DNA, 261 bp, Glycine max
  unsure (1)..(261): unsure at all n locations
ctcattcttcatccatagacatggccaccgtcacttctgcagccgttgctattccctcattcactggcctcaaggcaagcgcaggcaaagtgagtgccgcagttaaagtctcagctccccaagccacaaggttgggcatcaaggcttcgctgaaagacgttggagtngctgttgtggccactgccgcgagtgcagtgctggctagcaacgccatggccattgaagtgttgctgggtggtgatgacgggtctctggcttcgt

SEQ ID NO: 293611 - DNA, 267 bp, Glycine max
ctctactctactgcttcaccttctgctctagaaaattcagtggtgatacatggcttcggctactctctctgtagccaaaccagcccttcaggcaaatgggaaaggcttctctgaattctctggcctccgcagctcatcaggcttccttccctttctagaaaatcttcagaggatttccattctgtcattgccttccagacctatgcagttggaagcagtggaggatacaagaagggtgtgacagaagcaaaactgaaggttgccata

SEQ ID NO: 293612 - DNA, 267 bp, Glycine max
  unsure (1)..(267): unsure at all n locations
gtttttgtcattggtgttaagttgacaaccataaacaatatgtgtgcatatgggctcaatcctggtatttcaggttctcgtcttttgggcaccattcctcagtctatttcacagcaaactgtttggnatnaaatggcaacagtgagaacaccattgaattttgattctagcaagcagagcttttgtcaattttctattgacttctcggtggaggaattttagtggacaaaactgggagattggatcacacttatacaaaattctccc

SEQ ID NO: 293613 - DNA, 268 bp, Glycine max
gttggaggattctaaggcgaataaagaagcaaatccaacaaaaaatagcaactaattaatcctcggacagtgtaaaatcaaatttccacatttccgagagagaggatatggcaaaggaatacgagcaagctattgaagaactccagaaattgttgagggagaagagtgaactcaaagccacagctgctgagaaagtggagcagataacagcttctctgggaacatcatcatctgatgggcatcccatcatcagaagcctcagacagga

SEQ ID NO: 293614 - DNA, 257 bp, Glycine max
agcaaagctcatccttgagttaaaaaatggcagcagcttcttccatggctctctcatccccatccttggctggcaaggccgtgaagctgggcccatcagccccagaagtgggaagggtgagcatgaggaagaccgtcaccaagcaggtctcctcaggaagcccatggtacggcccagaccgagtcaagtacttgggcccattctctggcgagcccccgtcctacctaaccggtgagttcccaggcgactacggctgg

SEQ ID NO: 293615 - DNA, 263 bp, Glycine max
tttgcgataaacagaaagctatactattggcagatatggcacacattcagtggattggttgcagctggtgtcatcccatcaccttttgattatgctgatgtagttactaccacaactcacaagttcacttcgaggaccacgtggagctatgatattctacagaaaaggggttaaagaaattaacaaacaaggaaaagaggtattgtatgactacgaagacaaaatcaaccaagctgttttccctggactgcaagtggccctca

SEQ ID NO: 293616 - DNA, 231 bp, Glycine max
  unsure (1)..(231): unsure at all n locations
gtgagtgaagtaactgaagagaagaaaaaatgccgtgcctcaacctcagcaccaacgtgtccctcgaaggcgtcgacacctcttccatcctcgccgaagccacctcctccgtcgccagcataatcggcaaacccgaagctatgtgatgattgtactganaggatcagtacccatagcttttggtgggaatgagcagccagcagcttatggagattggtttccattggtggt

SEQ ID NO: 293617 - DNA, 195 bp, Glycine max
  unsure (1)..(195): unsure at all n locations
ttggtggtagtagcaaatattcaaatgagaactttgaaggccgaagaggggaaaggttccatgtgaacggcacttgcacatgggttagtcgatcctaaggcacgggggaagcccgtctgatagcgctctgtgcgcgtactccgaaagggaatcgggttaanattcctgaaccgggactggcggctgacggcaaac

SEQ ID NO: 293618 - DNA, 227 bp, Glycine max
  unsure (1)..(227): unsure at all n locations
cgaacagatcaatgtggagtacaatgtttcgtacgtttatcatgcgatgtttgcctacttcgatagggacaatnttgcgctcaagggtcttgccaagtttttcaaggagtcaagcgaggaggaaagggagcatgctgaganattgatggaatatcagaacaagcgaggtggaaaggtgaagttacaatctatagtgatgccccctactgagtttgaccatgaggaaa

SEQ ID NO: 293619 - DNA, 191 bp, Glycine max
  unsure (1)..(191): unsure at all n locations
taaagaggagtttgagaatggcaacgatcagcgcggttcaggtggagttcctggagtttccagcggtggttacttcaccagcctccggcaagacctatttcctcggcggcgcaggggagagaggattgacgattgaggggaagttcataaagttcacaggcataggngtanacttggaggataaggcggtc

SEQ ID NO: 293620 - DNA, 158 bp, Glycine max
  unsure (1)..(158): unsure at all n locations
ttctttggtgcactgagggccagcntatatgatgatgaagtgaggtagtggatttctggtgttggtgttgacagtgttgggaagaagcttgtgaactcaaaagatggacctccaacctttgagcagcccaagatgactctggagaagctcttgctgta

SEQ ID NO: 293621 - DNA, 218 bp, Glycine max
  unsure (1)..(218): unsure at all n locations
gagcgtgaaagatgccttgggcgtcgctttcagggtctccnaggctcgacgttgctattgacatgggcaatccatttctcaatctcactgttgatggtttccttaagatcggagctgtcgacgccacgcgatcagctgctgaagatattatcatattatccaaaaggggaatatctcaagtcatganttcgagaaaacgttgangaagatgtgcaaga

SEQ ID NO: 293622 - DNA, 144 bp, Glycine max
  unsure (1)..(144): unsure at all n locations
cnttggaaaggaaacangccgaaggtttgngnatgggaacaaacatgtacccttcatcggcattgcttggccaagacnaggatgcttctatttcagctcttccagttgatgagtngattgagaaggctgatggattgcaggagt

SEQ ID NO: 293623 - DNA, 169 bp, Glycine max
  unsure (1)..(169): unsure at all n locations
cttgggagttggggcatacagaacagaagaactacagccatatgtncttaatgttgttaagaaggcagagaatcttatgctggagagaggggataacaaagagtatctcccaattgagggtttggcagcatttaataaggcaactgcagagttgttactcggagcagac

SEQ ID NO: 293624 - DNA, 160 bp, Glycine max
  unsure (1)..(160): unsure at all n locations
ctgtttcccgccatatatccaataagctttaaccatgtctgcctttgttgganagtacgcagatgagcttatcaagaatgccaagtacatagccacacctgggaagggcatcttggcagcagatgagagcactggcaccattgggaagcgcctatccgac

SEQ ID NO: 293625 - DNA, 165 bp, Glycine max
  unsure (1)..(165): unsure at all n locations
ggnagaattccccctgctgtccctggaattatgtttttgtctggtggacagtctgaggttgaagctaccctgcaatttgaatgccatgaaccaatctccaaacccgtggcacgtgtcattctcgtatgccagagccctccaaaacactgccttgaagacatgggg

SEQ ID NO: 293626 - DNA, 262 bp, Glycine max
  unsure (1)..(262): unsure at all n locations
ggctcccagtgggccagcacctgagaggatcaatggaaggttggccatgattgggtttgtggctgcaatggcagtggaagtagccaaagggcaaggtgtgttagaacaaatatccaatggtggcatcccatggttcttggggacaagtgtggtccttacccttgcttccttgattccactcttccanggtgtcagcgtggantctaantccaanggnttcatncctnagatgnanactgtggatggganttncctatgtggg

SEQ ID NO: 293627 - DNA, 261 bp, Glycine max
  unsure (1)..(261): unsure at all n locations
cgtcttcgccgccaccaagaaggccgtcgccgtcctcaaggggacctccgccgtncgaaggcgtcgccactnctcatnccaagaagacgatggcccgacgacagtttctgttcgcatcactggccttactccggggcttcatggttttcacctacatgagtntggtgatacgacaaatgggtgtatttctacgggagcacattttaatctaataattgacacatggtgccccctggggatgacncccnnaggngggncccc

SEQ ID NO: 293628 - DNA, 257 bp, Glycine max
  unsure (1)..(257): unsure at all n locations
tgactgcctccaaggatcgcgagancttcgtctacatcgccaaactcgccgagcaggcngagcgttacgaagagatggtggaatcaatgaagaacgttgcgaatctcgacgttgaactgacggtggaggagcggaatttgctttctgtngggtacaagaatgtgattggtgctcgaaaangtgcntggaggtcctgncttcnattgggcanacggnnganacaaaggnanctttnnaatgcaannggnttggggana

SEQ ID NO: 293629 - DNA, 160 bp, Glycine max
tggaaatgagtatattgacatggctgaaacactgtgccaaaagcgtgccctagaagcttttagattggatcccgctaaatggggagtgaacgtgcagcctctgtcagggtctcctgcaaatttccacgtttacactgcattgcttaaacctcatgaaaga

SEQ ID NO: 293630 - DNA, 257 bp, Glycine max
  unsure (1)..(257): unsure at all n locations
gaaactctctaccaatccactgtcgatggaaggaagatcgtcgacgtacttgttgaccaaaacattgttcccggtatcaaggtcgacaagggtttggtgcccctagctggttcgaacgatgagtcatggtgccaaggtcttgatggtcttgcgtctcgctcagctggcatactaccagcaaggtgccgnacccccntaatggcgtangttgtganatccccaagggtccctctggtctggnatnaaggaagnngctg

SEQ ID NO: 293631 - DNA, 259 bp, Glycine max
  unsure (1)..(259): unsure at all n locations
ctggacttcgccagtacttggacaacaacatggatggattttacattgctccagcttttatggacaaacttgttgttcacattaccaagaacttcatgaccctgcccaacatcaaggttcctctcattcttggtatctggggaggcaagggacaaggaaaatctttccaatgtgagcttgtctttgccaagntggggaatcnnccccatcatgatgcntgctggagntttggaaagtggaatggnggagccccaacaaa

SEQ ID NO: 293632 - DNA, 268 bp, Glycine max
  unsure (1)..(268): unsure at all n locations
ttttacttcccctatggctcgtcactccttgctcttagccctcctcctcttcgccgccgtggccaccgccgcgatggcggtggccgcgtccgacgccgacgacatcctgatccgtcaggtggtgccagatgttggcgaagcgaagaggaggacaacctgctgaacgccgagcaccactttccgagcttcaaggccaagtncgccaagacctacgccaccaaggaggagcacgatcatcgcttcggcgtcttcaagtccaacctccgca

SEQ ID NO: 293633 - DNA, 266 bp, Glycine max
gcaccaaaagcctgcaacttggtgtcagttttgctggtggatatgttgctggtgtactttgtgcaattgtgtctcatcctgctgataatcttgtctcttttctgaacaatgcaaaaggagcaacagttggtgatgcggtgaagaagcttggtttgtggggtctctttacgcgtggtctccccctccgaattgttatgattggaactcttactggagcccaatggggaatatatgatgcattcaaagtcttcgtcggattgccaacc

SEQ ID NO: 293634 - DNA, 273 bp, Glycine max
  unsure (1)..(273): unsure at all n locations
gttagatttggtgttagtgaacatggaatgggagcaatctgtaatggtattgctcttcatagccccggattcattccatactgtgcaactttctttgtcttcactgactacatgagagctgccataaggatttctgcactgtgtgaagctggagttatncnagtgatgactcatgattcgattggacttggagaggatggaccaactcatcagccaatagagcacttggcaagcttcagggcaatgccaaacatttgatgcttcgtccagctg

SEQ ID NO: 293635 - DNA, 272 bp, Glycine max
  unsure (1)..(272): unsure at all n locations
ctcgcagaatctcaggttcatccgctcccagnacaagaagcgtttgccctatactctctctgttaatcattttgctgattggacttgggaggagttcaaaagacacagactaggagctgcccaaaattgctctgccactcttaacggcaaccacaagctcaccgatgctgttcttcctccaacgaaagactggagaaaagaaggtatagtgagttcagttaaagatcaaggcagctgcggatcatgctggacattcagcacaactggggctt

SEQ ID NO: 293636 - DNA, 267 bp, Glycine max
gttcggagaagccgtgtggttcaaggccgggtcccagatcttcagcgagggtgggctcgactacttgggcaacccaagcctgatccacgcccagagcatcctcgccatctgggccacacaagttatcctaatgggtgccgttgaaggttaccgtattgctggtggccccctcggtgaggtcactgacccaatctacccaggtggcagcttcgacccattgggccttgctgatgacccagaggcttttgctgagcttaaggtgaagga

SEQ ID NO: 293637 - DNA, 266 bp, Glycine max
caatactgatattctcgagactgagtctttgaacttgctcgcagaagccacatttgtagatactctcttgactgcattgcctgttttgtccgaggaggagcagcacgccctatctgctactccggctcacccggctggtttacacgctttttatgctagttgcttaactgcaaatgtagtggagcagctttggaattttgcttggccttctgccattgccttgattcatccaagccttttgccagttgctgtaatgagtttcttca

SEQ ID NO: 293638 - DNA, 269 bp, Glycine max
ctaaagcaccaccctggacagattgaagctgctgctatcatggaacacattttggaaggaagctcttacatcaaagctgctaagaagttgcatgagattgatcctttgcaaaagcctaaacaagaccgctatgcacttaggacttcaccacaatggcttggtcctcaaattgaagtgattagattctctaccaagtcaattgagagggagataaactcagtcaatgacaaccctttgattgatgtctcaaggaacaaggcccttcatgg

SEQ ID NO: 293639 - DNA, 270 bp, Glycine max
  unsure (1)..(270): unsure at all n locations
caatatattccattctctctgtgtatttccctacctctcccttcaagatgcagatcttcgtcaagaccctcaccggcaagaccatcacccttgaggtggaaagctctgacaccatccgacaacgtcaaggccaagatccaggacaaggaaggaatccccccggaccagcaangtctcattttcgncggaaagcaacttgaggacggccgtacccttgctgactacaacattcagaaggagagtatcttcactcgtcctccgtctccgtgg

SEQ ID NO: 293640 - DNA, 268 bp, Glycine max
  unsure (1)..(268): unsure at all n locations
aaatttganttgnttgcagaagacaaggagacccaattcactaattcttgaggctcttgataaagacattggacaagataagcgattgggaatagcacagttaccccttattgatctagaaatacaaactgaaaaggagattgaattgaggctgctgccctcacttgatacactgaaggtgaaagatnagaaggatcgaggaaccttaacagtaaaggtcagtattatcatttaacaaggaagagcagcnggttgcactagaggcaga

SEQ ID NO: 293641 - DNA, 274 bp, Glycine max
atgcagggcttcttccactccttgagagttccgaggctggtttggttaaagtgaaccttagtggttgcacaaacgttaccaataaagtagtttcgtccttggccaatctgcatggttggactcttgagaatctaaaccttgatggttgcaaaaacatcagcgatgctagcttgatggcaattgctgaaaactgtgcattgctatgtgatctcgatgtctccaagtgtgctataaccgatgctgggattgaagccctggcacatgctaaacagat

SEQ ID NO: 293642 - DNA, 266 bp, Glycine max
  unsure (1)..(266): unsure at all n locations
cacttctcnnacacnnnanananaaaantccattgattttgattttgaggggatagaaaaatcaatgntaggatcagnntccggtgtggttacagtgtacggcaacggtgcaatcaccgagaccaagaagtcccccttctccgttaaagtgggcctggcccagatgctccgcggcggcgtcatcatggacgtcgtcaacgcggaacaggcccgcatcgcggaggaggccggtgcctgcgcggtcatgncccttgagcgtgtccccg

SEQ ID NO: 293643 - DNA, 268 bp, Glycine max
  unsure (1)..(268): unsure at all n locations
accagctctcccctataggtaagccttttcagagggctgctttctacatgaaggaggcttngatgtcactgcttcattcaaatgctgcacagtntcatggcttnttcgccaatnngtttcatattcaaaatcggagcntataagtccttttcngagatatcacctgtacttcagtttgccaattttactgcaaccaagccctcatggaagctgtggaaaggtttgaccgaattacatgttattgattnagatattgggtttggagtac

SEQ ID NO: 293644 - DNA, 273 bp, Glycine max
  unsure (1)..(273): unsure at all n locations
gcagcagtggcggcaagcaactccatccgcaatgggaatcgatttgaaggcaggaggtaagtccaagaagaccaagcgaaccgcccccaaatccgatgatatctacctcaagcttctcgtcaagctgtaccgttttcttgttcggaggactgggagtaacttcaatgctgttgtcctcaagcgccttttcatgagcaaggtcaacaagcccccgctatccctctctagattgatccgttacacganggaaaggaggatagatagctgtggttg

SEQ ID NO: 293645 - DNA, 271 bp, Glycine max
  unsure (1)..(271): unsure at all n locations
gtcttgcaattgangttgaagtcttgcccttctctcttcaactccaaacacaagacatcatcatccatggctgcctccgtctccactgtcggagctgtcaacagagctcttttgaacctgantgggtctggacctggggtttcagctcccagttcatccttctttgggagcagcttgaagaaggttattggctcaagggtccccaacacaaagatttcctctggaagcttcaagattgttgctgtagaagagaagaaagagattgaagaga

SEQ ID NO: 293646 - DNA, 263 bp, Glycine max
  unsure (1)..(263): unsure at all n locations
gnaagtgctttngtctggcatcatcaagatgcagaccctgattttngctcatgccaagccaaagaattgttaaatcatctggaaagtgtccttgctaatgaacctgcagttnttatcaggggccagcatattgttgaantcaagccacagggattaaacaagggattggtggctganaaggttctttccactatggttaatgatggcaatccaccagattttgtgatgtgtgtgggagatgacattctgatgaagacatgttt

SEQ ID NO: 293647 - DNA, 266 bp, Glycine max
  unsure (1)..(266): unsure at all n locations
gctatttggatctgttcacggacttcatatccgtttacaacaccttcatgaaggtggtgttcattgcaagctccttagccattttttggtgcatgcgttttcatcccatggtcaggagaagctacgatagggacctagacacttttcgccactattnccttgttggggcaagctttgctttggcactcatcttgcatgaaaagttcactgttcaagagattttctgggcatttcaatatacttggaggcagttgcaatattacctc

SEQ ID NO: 293648 - DNA, 274 bp, Glycine max
ctcaagggatttgcagaaggatcctcctacgtcatgcagcgcaggtcctgtggctgaagacatgtttcactggcaagccacaatcatgggacctgctgatagcccatatgcaggtggtgttttcttagtttcaattcattttcctcctgactatcccttcaagccaccaaaggttgcttttcggactaaggtgttccacccaaacatcaacagcaatggcagtgccatgtcttgacattctcaaggaacaatggagcccagctctaaccattcc

SEQ ID NO: 293649 - DNA, 266 bp, Glycine max
  unsure (1)..(266): unsure at all n locations
ccaaganggagcaagtgttctctacntactcagacaaccaacctggtgtcttgattcaggtgtatgagggagagagagctagaaccagggacaacaacttgttgggtaaatttgagctttctggcattcccccagcacccaggggtgttcctcagattactntctgctttgatatcgatgccaatggtatcttgaatgtctctgccgaggacaagaccacagggcagaagaacaagatcaccatcaccaacgacaagggtagacta

SEQ ID NO: 293650 - DNA, 265 bp, Glycine max
cagagagtgatttcagtgagtgatcggtgttcacttgatctcatcataatcgtcagcgtcaattgaagaagatgccgatcagaaacatcgccgtcggaaggcctgaagaggcgactcaccccgacacgttgaaggcggctttggctgagttcatctcaaccttcatcttcgtgttcgccggctcaggctccggcatcgcctacaacaagctcaccgacaacggcgctgccacccctgccggcctcatctccgcctccatcgccca

SEQ ID NO: 293651 - DNA, 262 bp, Glycine max
  unsure (1)..(262): unsure at all n locations
tgagttttctgatgacaacaggtcaggtattgataggtctttgcatcggatangcgcgattncggaatcggaaaatgcaaatccattgggcttacttgtcgggtgggtcgagctgtgggtggcagtgctgaaattatacgtgatttggttgaggatggaggttctatcttggtcattggacctcctggagttggcaaaacaaccttaatcagagagattgctaggatgctggcctgatgagttcaggaagcgtgttgtaata

SEQ ID NO: 293652 - DNA, 265 bp, Glycine max
  unsure (1)..(265): unsure at all n locations
ggccgattctccaggacaattcccttcacccaacctaattgcaattagtgtagaagatgantacgttggatgcaacaagggctgaacttggtcttcttgttttatatttgggcaaggctgaagcaagggacaaaatatgcagggcaatacaatatggttccaaatttttgagtaacggggaacctggtactgctcagaatgtcgacaaaacaaccagcttggcacgaaaagtctccgtcctttttaagtttgtcaatgacctaca

SEQ ID NO: 293653 - DNA, 268 bp, Glycine max
cccaaactaacaaacaaatcccagggagccaccaaccatggcttccaagctctgcgactcatgcaaattcagccactgctaccttgtactgccgccccgacgcggccttcctctgcggcgcctgtgactctaaggttcatgccgccaacaagctcgcatcgcgccacccgcgcgtccgtgctctgcgaggtgtgcgagcaggcgcccgcgcatgtgacctgtaaagccgacgccgccgcgctctgccttgcctgcgatcgcgatatcc

SEQ ID NO: 293654 - DNA, 269 bp, Glycine max
  unsure (1)..(269): unsure at all n locations
cnaaaacggaaaactctcggatttaatcggcgagcttcagttgctggtgaagggattggaaaaatctggggagcatgctgaaggtgaaggtgaatatgctgatgccatagctgctcaggtgcgtcgcctggcgaatgaagttcggcagctagcatcaaacaggccaatcacagtactgaatgggggttctgaacaaagtaatttatcatcccttgtcgtnccagctgctgccttgggcgctctgggtnatggctacatgtggtggaagg

SEQ ID NO: 293655 - DNA, 266 bp, Glycine max
  unsure (1)..(266): unsure at all n locations
gcaagtcgtggcggaagaaccatccccatggttttgttgcgaancggagacgctgcccgatggaaccgtgaacttgatggtgtggcattgcactattcccgggaagactgggactgattgggagggtggctacttcccgcttacgctgcactttagtgaagactacccaagcaagcctccaaagtgtaaattcccacaaggtttcttccaccctaatgtttatccttctgggactgtttgcttgtctatacttaatgaggatagtg

SEQ ID NO: 293656 - DNA, 258 bp, Glycine max
  unsure (1)..(258): unsure at all n locations
caaagattaagccatccatgtgtaancatgaactaattcagactgtgaaactgcgaatggctcattaaatcagttatagtttgtttgatggtatctactcggataaccgtagtaattctagagctaatacgtgcaacaaaccccgacttctggaagggatgcatttattagataaaaggtcaacacaggctctgcctgttgctttgatgattcatgataactcgtcggatcgcacggcctttgtgccggcgcagcatc

SEQ ID NO: 293657 - DNA, 270 bp, Glycine max
  unsure (1)..(270): unsure at all n locations
gacaaaatgattcacttatcaaattttaatttaaagttttttagctaaaaaganaataactttgctttttcccttctttttaacccccttaaatgaaaaaaggggttccccgacttggataggganctatgcgagtgacctncctaatcttattgtngaaattttcaggatcaatgattagnccatgcaaacnagaaatgctttttcttgtataaaggaagggattactcgatccatttcccatatcgatcatgatacatataataattc

SEQ ID NO: 293658 - DNA, 271 bp, Glycine max
  unsure (1)..(271): unsure at all n locations
cnctggttatggtcttggtgggtcttctatggctttgttnggaaganttggtggaggtatctatactaaggctgctgatgttggtgctgatcttgtcggaaaggttgaaagaaacatccccgaagatgatccaaganatccagctgtgattnctgataatgttggtgataatgttggggatatcnctggnatgggacctgatcttttgggtcnaaatgncngagtcancctgtnnctcccccttgtngtcnccnccanccttnttgggggg

SEQ ID NO: 293659 - DNA, 251 bp, Glycine max
  unsure (1)..(251): unsure at all n locations
tttaaagcagatgtgaaaatactggacaatgaaaccatgcactgttgatggtaagaccatcaaggttgtttcaagcagggaccctcttaagcttccttgggctgaacttggaattgacattgttattgagggaaccggagtgtttgtgncatggccctggggctggtaaacacatccaancaggtgccaagaaagttattatcactgctcctgcaaagggtgctgatattccaattatgttgttggtgtaa

SEQ ID NO: 293660 - DNA, 261 bp, Glycine max
catggccacccacgcggctcttgcttctacaaggatcccttcaaacacaaggttcccatccaaggcctctcactctttcccaacccaatgcgccttaaagagacttgaggtgacagaattctctgggcttagatccacttcatgtgtcacatatgctaacagtgctagagaatcttccttttttgatcttgtagcttcccaactcactcccaagaccaatggatcaactcctgtgaggggagagacagtggccaagttgaa

SEQ ID NO: 293661 - DNA, 272 bp, Glycine max
  unsure (1)..(272): unsure at all n locations
cnaaagcaagaagaactagtctaagcagaaatggcctcttcagtgatggcatctgtggccctcaaacctgcccctttcactgttgagaagtcctcagttagaggccttccctccctctcaaggaactcctcttcattcagagttgtggccagtggtggcaagaagatcaagactgacaagccttatgnnnttaatggtggcatggctttgagggaaggagttgatgcatctggcaggaaaggaaagggaaanggcgtttaccagtttgtaga

SEQ ID NO: 293662 - DNA, 265 bp, Glycine max
  unsure (1)..(265): unsure at all n locations
tagaatttgttagggacaacaaatcacttggtagcttccgcttggatggtatccctcctgcgcctgcgtggtgttccccagattgaggtgaaatttgacattgatgccaatggcattctatccgtcactgctatcgacaaaggcacagggaagaaacaagatattaccatcactggtgctagnacttgcnttcnnnntgnggtggagagaatggtaaacgaagctgngaattttcgaaggaagacaaagagaagagggatgctat

SEQ ID NO: 293663 - DNA, 262 bp, Glycine max
  unsure (1)..(262): unsure at all n locations
caatttcacccttcacacgtggnggtggtgttgttcttcttctcttcccctttctttttcttcttctgagcttgtttaagctctttctatttgattccattaacatatattatacacaatgtgtggnattcttgctgttcttggttgtnctgatgactctcgagccaaaagggtccgcgtgcttgagctctctcgcagattgaagcaccgtggccctgactggagtgggctcnatnaacatggggantgnttttaagnaaac

SEQ ID NO: 293664 - DNA, 270 bp, Glycine max
  unsure (1)..(270): unsure at all n locations
aattgtggtgtttgtatgggaaaatacttctgtggaacatgcaagctttttgatgatgatatatctaagcagcagtaccattgctgtggctgtggaatttgcagaactggaggaagcgaaaatttcttccattgctacaagtgtggttgttgctantcaactcttctgaaaaacagtcacccttgtgtagaaggagcaatgcatcatgattgccctgtttgttttgagtatttgtttgaatcaagaaacgatgtcatgttatgccatgtg

SEQ ID NO: 293665 - DNA, 260 bp, Glycine max
ctcagggtggttttgattctaatgctgtggcaactgcaaacatcttggagagttcaacgcctgtcattgatgggaaacagtactacagtttgactgtgttgacaaggacagctgatggagatgaaggtggcaagcaccagctgattgcagcaactgtgaaagatggcaaactatacatttgcaaggctccaagctggagacaagagatggtttaagggagcaagaagatttgtggagagcacagcaagttctttcatgtt

SEQ ID NO: 293666 - DNA, 192 bp, Glycine max
  unsure (1)..(192): unsure at all n locations
ttggtctttcagtacgacgggagcnttggaaggagctcattatctggccactggtgagctcgtgagccttagcgagcaacagcttgtggattgcnatcacgtgtgtgatccagaagaatatggagcgtgtgactcaggctgtaatggtgggttgatgaacaacgcatttnngtacatatncnttctggggga

SEQ ID NO: 293667 - DNA, 271 bp, Glycine max
aggaattatggactgggttgctaactggagaaaaggtgaggtcaccgggtgaagagtttgacaaattattcacagcaatgtgccaagggaaaattattgatcctcttatggagtgccttggggagtggaatggagctcctcttccaatctcttaaatttattgtaactcttaacaaatattttatttgtacctatgcaagaaaaaccataatcatttggtttgtctatcattaacaaatgttccttcaatgtcaaataggacttgtattta

SEQ ID NO: 293668 - DNA, 269 bp, Glycine max
  unsure (1)..(269): unsure at all n locations
catggggaggccgcccagagaacgtgaaggcagcacaagatgcactcgcattccgtgccaagtccaactncactcgctcagcttgggaagtacactggtgagggtgaatccgaggaagccaagaaggagttgttcgtcaaaagctactcctactaagatgtttgcagtgaatatgatacttgttaggcagcaacaccagcagttacagtaggtgttgacggacgatgaagtggaagactatttgtctaanngtatgtttttatagtctg

SEQ ID NO: 293669 - DNA, 255 bp, Glycine max
  unsure (1)..(255): unsure at all n locations
caacaatccacactatttgtatcggatgaccattcttcgtgctatctctctgcttgctcctgtgatgggccctgaaatcacttgttcaaacttgttaccggttgttcttgctgcatctaaagacagagtgcccaacataaagttcaatgtggcaaaggtattagagtccatcttccccatcgttgatcagtcggtcgtggagaagactattcgcccatgnctggttgagctcagngnggccctgatgtgggtntt

SEQ ID NO: 293670 - DNA, 267 bp, Glycine max
  unsure (1)..(267): unsure at all n locations
cagtttccaagaatcttaagctatgggaaagtcttacccaaccgtgagcgctgattaccagaaggccgttgagaaggcgaagaagaagctcagaggcttcatcgctgagaagagatgcgctcctctaatgctccgtttggcatggcactctgctggaacttacgacgtgagctcgaagaccggtggtcccttcggaaccataaagcacccctccgaactcgntcacggcgctaacaacggtcttgacatcgntgttaggcttttgga

SEQ ID NO: 293671 - DNA, 259 bp, Glycine max
  unsure (1)..(259): unsure at all n locations
ggcaggacgtcgagggacgntaggagggaaattcagatantgcatcatttagctggtcacaagaacattgtcaccatcaagggtgcttatgaggatcctctctatgttcatattgtcatggagctttgttccgggggtgagttgtttgatcgcatcatccagaggggccactataccgagaggaaggccgcggagttgaccaaaattatgtnggggttgttgaggcttgccattcccttggggtcatgcatagagatcc

SEQ ID NO: 293672 - DNA, 261 bp, Glycine max
cacaggcttcactttacagggatggaacttctcactacatgaaagggccttgttctcctgctgtgctacattgttattggggcatgcttcttcgtacaaagaacaccctttaataaccaagctgatgttactaacatcacacttaaaccagccactaatgcagttttaagcgcttaattagtaggctttggcctatttcttgtcctttcctgagatgaagaatggtggtatcgatccaaacccaaaatcagattcaaattc

SEQ ID NO: 293673 - DNA, 268 bp, Glycine max
  unsure (1)..(268): unsure at all n locations
gtcagctgagtacgaaggagagcataagcctganaagttggaggaacttgggaatatgctgacgggtcttgatgctggggattcaattgttattgccaagtcattttctcacatgctcaatttggccaacttggcagaagangttcaaattgcgtatcgaaganggatcagttactgaagaagggtgattttnctgatgagactctgcccattactgagtcagacattgaagagaccttcaagaagcttgtggctccactgaagaagc

SEQ ID NO: 293674 - DNA, 265 bp, Glycine max
  unsure (1)..(265): unsure at all n locations
gttttatgcagcgcagggnaagagctttaaatgccgttgcatcccgcaatgtcaaagttatagtagtgggaaacccttgcaatacaaatgcattaatatgcttgangaatgctcctaacattcctgcaaaaaattttcatgctttaactcgtttagatgagaacagagccnaatgtcagctagccctcaagggcggtgtcctctatgatnaagtgtccaangtgacantatggggccaaccatcanttantcaggtcccgattct

SEQ ID NO: 293675 - DNA, 272 bp, Glycine max
  unsure (1)..(272): unsure at all n locations
gttaagttgacaaccataaacaatatgtgtgcatatgggctcaatcctggtatttcaggttctcgtcttttgggcaccattcctcagtctatttcacagcaaactgtttggnatcaaatggcaacagtgagaacaccattgaattttgattctagcaagcagagcttttgtccattttctattgaccttctcggtgggagggatttttagtgggacaanactggagattggatccacaacttatacaaattcctccattagtaacttgttga

SEQ ID NO: 293676 - DNA, 267 bp, Glycine max
  unsure (1)..(267): unsure at all n locations
cttttaaagcagatgtgaaaatactggacaatgaaaccatcactgntgatggtaagcccatcaaggttgtttcaagcagggaccctcttaagctnccttgggctgaacttggaattgacattgttattgagggaaccggagtgtttnnggatggccctggggctggtnaacacatccaagcaggtgccaagaaagttattatcactgctcctgcaaagggtgctgatattcccaacttatgttgttggtgtaaatgcaggggatncc

SEQ ID NO: 293677 - DNA, 271 bp, Glycine max
  unsure (1)..(271): unsure at all n locations
gnatcgacagacgagaaccatgacttttaaactattacatctggtcaagccctttatgcccttnctccctgaggtcacagcgcctgagaggaaggtcccattcaaggaaagagtcctgtggacagcgatcactctatttatctacctggtctgctgccacaatccctctatncggtattgtctcaagcgacagtgctgacccattctactggatgagagtcatccttgcctctanacagaggtatcttatggagctcggtatttcacccat

SEQ ID NO: 293678 - DNA, 259 bp, Glycine max
  unsure (1)..(259): unsure at all n locations
tgcccttggctgagacctgatggcaagacccaagtcactgttgagtactacaatgacaagggtgccatggttccaatccgcgtccacactgtgctcatctccacacagcatgatgagnctgtcacaaatgntgagattgcagctgatcttaaagaacacgtgattaagcctgtgattcctgagaagtaccttgatgagagaccatttccatttgaacccttccnggcaggttgtcattggagggcggcatggggatgng

SEQ ID NO: 293679 - DNA, 263 bp, Glycine max
  unsure (1)..(263): unsure at all n locations
gncagtcctcagacagttgctgattacaccctcaagctccttcacaggagaattccccctgctgtccctggaattatgtttttgtctggtggacagtctgaggttgaagctaccctcaatttgaatgccatgaaccaatctccaaacccgtggcacgtgtcattctcgtatgccagagccctccaaaacactggcttgaagacatggggaggccgccccagagaagtgaaggcagcacaagatgcactcgcattcgtgccang

SEQ ID NO: 293680 - DNA, 268 bp, Glycine max
  unsure (1)..(268): unsure at all n locations
gggtgatgcagatattaaatactatcatcagaggtcaagacgatgggattttggttccagtcccacaatacccactctactcagcaacaattgctctgcttggtggtacccttgttccatactaccttgaagagcacagcaaattggggtcttgatgttaatgaacttcgtcaatcagttgagcaggctcgctttaaaggaataactgttaaancaatggtgatcataaatncctgggaaaccctactggtcaatgccttagtgaagc

SEQ ID NO: 293681 - DNA, 258 bp, Glycine max
tggttcagtgccaggctttggttttggcaccaacaagggagctagcacagcagattgagaaagttatgcgagctcttggtgattacctgggagttaaggttcatgcttgtgttggtgggacaagtgttcgtgaggatcagcgcattctccaagctggtgtccatactgttgttggcactccctgggcgtgtgtttgacatgctgcggaggcatctcttcgcccagattgcataaagatgtttgttttggatgaggcga

SEQ ID NO: 293682 - DNA, 266 bp, Glycine max
  unsure (1)..(266): unsure at all n locations
aatgggaacnatcaactccagncngggcaangaatccaagaaactcattgttntggattttactgcttcttngtgtggaccatnccgtttcattgcnnccattcttgagctnagctggctaagaagttcacaagtgtcatattcctaaaggtggatgtggacgaattaaagagtgtttctcaagattgggctattgaggctatgcccacttttgtgtttgtgaaagagggaagcttctggacaaagtggtgggagcaaagaaggat

SEQ ID NO: 293683 - DNA, 262 bp, Glycine max
  unsure (1)..(262): unsure at all n locations
gngctaagagagaatatggagagtagtgagggaattaggtgtaaggtatgcgtgaccggcggtgctagttacataggctcttgccttntcaagaagcttctgcaaaagggctacaccgtccactccaccctcagaaactttaaggacgagtcaaagataggccttctgagagggttgcctcatgctaatgatgagagactggtgttatttgaagcagacatatataaaccagacgagtacgagccagcaattcanggctgtg

SEQ ID NO: 293684 - DNA, 256 bp, Glycine max
tctacgaagctcccctcggatacagcattgaagacgttagaccaaacggtggaatcaagaaattcagatctgctgcttactccaactgcgctcgcaaaccttcctgatatccatccagattgatagttcattgcatgcaaccatagttttattaggttttttcttctttgttttcaattaggtttttgctgctctcctcaaactccgtctttccgaatctctcttgtgattgtgttcgttctgcttcctacggcga

SEQ ID NO: 293685 - DNA, 263 bp, Glycine max
  unsure (1)..(263): unsure at all n locations
cctttgttcactcttcttctcttgcggctagggttttagcgcanttcttctagatttaaggaagatgggtaaggaaaaggttcacatcagtattgtggtcattggccatgtcgactctgggaaatccactaccactggtcacctgatttacaancttggaggcattgacaagcgtgttattgagaggtttgagaaggaagctgctgagatgaacaagaggtctttcaagtatgcctgggtgctggacaaacttaaggctgagc

SEQ ID NO: 293686 - DNA, 262 bp, Glycine max
cattgctccagcttttatggacaagcttgttgttcacatctccaagaacttcatgaccctgcccaacatcaaggttcctctcattcttggtatctggggaggcaagggacaaggaaaatctttccaatgtgagcttgtctttgccaagatgggaatcaaccccatcatgatgagtgctggagagttggaaagtggaaatgcaggagagccagcaaaatgatcaggcagagataccgtgaagctgcagacatgatcaagaagg

SEQ ID NO: 293687 - DNA, 258 bp, Glycine max
  unsure (1)..(258): unsure at all n locations
ggnccatttcnggaaganagangtgcaatggacatcggaacctatggctatcctacaccagcagtgaanaagattgagtcttnctatgatgtgccaganggagtggatattcggggaagatatgatgcagagtttgcaaaaatcctcacaaaagatgcttgaanttcgttgctgacttgcaacgtgcattcaggaaccnatatcagtatgcattagagtgcngaagagaagcaaagcagagtacatgaggggccttcc

SEQ ID NO: 293688 - DNA, 265 bp, Glycine max
  unsure (1)..(265): unsure at all n locations
gtnaaanatggctctactatcatcagtccnaaagcaattgccgcatgagctaagttcaacccattacctaacagttttcttctgcatcttccttatacttcttcagctaataagaagaaacaaatacaatctgccaccatccccaccaaagatacccataatcggcaatcttcaccagctaggcacactgccacaccgctcctttcatgcactctcacacaaatatggccnctccatgatgttgcattgggtcaattccaaccct

SEQ ID NO: 293689 - DNA, 275 bp, Glycine max
cggagactttgccgaactatacatgttcaaatggaccacccttcttattcctccaacaaccctttctcataataaacttggtgggggtggttgctggcatctcctatgccatcaacagtggctaccaatcttggggacccctctttggtaagcttttctttgcattttgggtgatcatccatctataccctttcctcaaaggtctcatggggcgccaaaacagaacaccaaccattgtggtggtgtggtccgttctgcttgcatccatttctcat

SEQ ID NO: 293690 - DNA, 273 bp, Glycine max
cttttcagaaaaataatccttatccagatgttaagtacactttccttccaatattaatcaaatcactatctatggccctcagtaagtacccctttatgaacagttgcttcaaagaggatgcattggaggtcatcctcaaaggttcacacaatgttggaattgccatggcgacatcacatggtttagttgtgccaaacattaaaaatgttcagtctctttccataatggagataaccaaagagctggcaaggttacaacaattggcttcaaata

SEQ ID NO: 293691 - DNA, 271 bp, Glycine max
  unsure (1)..(271): unsure at all n locations
ctttcgttcacttccgtttccctctcactcacacacttctccccaaaacccaaaaccctaactctctttcgcgctcgttctctcgctcgctgcaaccatgaattgctccatctccggcgaagttccggaagatcccgtcgtgtcccggaactccggtctcctcttcgagaagcgtttgattgagcgacacatctcggattatgggaagtgtccaattactggagaaccacttanctatggatgacattgtaccantcaagacaggnaagat

SEQ ID NO: 293692 - DNA, 270 bp, Glycine max
  unsure (1)..(270): unsure at all n locations
ttctctctactactgctagctgtgacttgttttgagttcaatcaaatcgcattggtatctgaaatcaggaaagatggttagcgtantgnagatcaggcaggcacaaagggcagaaggcccagcaaccatccttgccattggaactgcaaacccaccaaaccgtgttgatcagagcacctatcctgattactacttcagaatcaccaacagtgaccacatgaccgagctcaaagagaaatttcagcgcatgtgtgacaagtctatgatcaa

SEQ ID NO: 293693 - DNA, 271 bp, Glycine max
  unsure (1)..(271): unsure at all n locations
taagcagaaggtggcagcaacaaagcagtacattgaaaatcattacaagggagcaaatgaagaaccttcaggagaggaaggagcgtcgaaccatcttggaaaagaagttggctgatgctgatgtctctgaggaggatcaaaacaacctgcttaaatttttagagaaaaaggaaactgaatatatgcgccttcagaggcataagatgggtgttgatgattttnagttattgacaatgattgggaaaggtgctttggggaggtcatngtctgt

SEQ ID NO: 293694 - DNA, 269 bp, Glycine max
  unsure (1)..(269): unsure at all n locations
aganagcaagctcatcctagagttttaaaaatggcagcagcctcctccatggctctctcttccccatccttggctggcaaggccgtgaagctgggcccatcagcccccgaagtcgggagggtcagcatgaggaagaccgtcaccaagcaggcctcctccggaagcccatggtacggcccagaccgcgtcaagtacttgggcccattctctggcgagcccccgtctaccttcactggcgagttcccaggtgatacggctgggacatgctg

SEQ ID NO: 293695 - DNA, 274 bp, Glycine max
acaaggcagaaagcaagctcatcctagagttttaaaaatggcagcagcctcctccatgggctctctcttccccatccttggctggcaaggccgtgaagctgggcccatcagcccccgaagtcgggagggtcagcatgaggaagaccgtcaccaagcaggcctcctccggaagcccatggtacggcccagaccgcgtcaagtacttgggcccattctctggcgagcccccgtcctacctcactggcgagttcccaggtgactacggctgggacat

SEQ ID NO: 293696 - DNA, 271 bp, Glycine max
aacacaaagacatcatcatccatggctgcctccgtctccactgtcggagctgtcaacagagctcttttgaacctgaatggttctggagctggagcttcagctcccagttcagccttctttgggaccagcttgaagaaggttattgcctcaagggtccccaacagcaaggtttccggtggaagcttcaagattgttgctgtagaagagaagaaagagattgaagagacccagcagaccgacaaggacagatggaagggtcttgcctatgata

SEQ ID NO: 293697 - DNA, 272 bp, Glycine max
  unsure (1)..(272): unsure at all n locations
ttatacatcgtgatctcaaacccagtaatgttctattagatgaatgtatgattccaaaaatttcagattttggtctcgccagaattgttgaaataaatcaagaccaagggagtacaagtgtaattgttggaacatatggttatatgtctccagaatatgcaatgttcggacaattttctgagangtcagatgttttcagttttggtgtcatggttttagagattataagtggaaaaanagaatttcagttcttatgaatcacaccgtattac

SEQ ID NO: 293698 - DNA, 267 bp, Glycine max
  unsure (1)..(267): unsure at all n locations
ggcagaaagcaagctcatcctagagttttaaaaatggcagcagcctccttccatggctctctcttccccatccttggctggcaaggccgtgaagctgggcccatcagcccccgaagtcgggagggtcagcatgaggaagaccgtcaccaagcaggcctcctccggaagcccatggtacggcccagaccgcgtcaagtattgggcccattctctggcgagcccccgtcctacctcatggcgattcccaggtgactacggtgggacntg

SEQ ID NO: 293699 - DNA, 266 bp, Glycine max
  unsure (1)..(266): unsure at all n locations
gtcgccaatatgatgctaagatgagtgaattgctttccactgatgggcaagaattcttcacctcttatgatgaagtgtatgacagctttgatgcatgggattgcaagagaatctctgcgaggcatatatgcttatggntttgagaggccttctgctatacagcaaaggggaattgttcctttctgcaaaggactggatgtgattcaacaggctcantctggaacaggaaagacagcaacattttgtctggattttgcagcagcttg

SEQ ID NO: 293700 - DNA, 275 bp, Glycine max
  unsure (1)..(275): unsure at all n locations
attgaagttaaaagccttagccttccctacaactccaaacancnaagacatcatcatccatgggctgcctccgtctccactgtcggagctgtcaacagagctcttttgaacctgaatggttctggagctggagcttcagctcccagttcagccttctttgggaccagcttgaagaaggttattgcctcaagggtccccaacagcaaggtttccggtggaagcttcaagattgttgctgtagaagagaagaaagagattgaagagacccagcagac

SEQ ID NO: 293701 - DNA, 274 bp, Glycine max
  unsure (1)..(274): unsure at all n locations
ctagtttcttacaagcctctactatactgcttcaccttctgctctagaaaattcagtgctgaaacatgggcttcggctactctctctgtagccaaaccagcccttcaggcaaatgggaaaggcttctctgaattctctggcctccgaagctcatcaggcttccttcccttttctagaaaatcttcagaggatttccattctgtcattgccttccagacctatgcngttggaagcagtggaggatacaagaagggtgtgacagaagcaaaactga

SEQ ID NO: 293702 - DNA, 273 bp, Glycine max
  unsure (1)..(273): unsure at all n locations
ggaacggtatgagataattaaagatattgggtcaggaaactttggtgtggcaaagctggtcaagggcaaaatggagtggtgaattatatgctatcaagttcattgagagaggcttcaagattgatgaacacgtgcaaagagagattataaatcataggtccttgangcatcccaatatcattagatttaaagagttgttgcttactccaactccatcttgccaatagtcatggaatatgcttccgggggagaactgtttganagaatntgcag

SEQ ID NO: 293703 - DNA, 269 bp, Glycine max
  unsure (1)..(269): unsure at all n locations
gcattattcaatggccaccacagcagctctatccggaaccatggtgagcacctccttcatgaggaagcaacctatgacgaccaagagcctaaagacattccccaacgctctttttggtctgaaaggtggacgaggtggtcgtgtaacttgcatggcctcgtacaaggtgaagctcataaccccagaaggagaagtggagtttgaatgcccagatgatgttttcattgttgaacaaggctgaggaagaaggcttgantnccctactcgng

SEQ ID NO: 293704 - DNA, 267 bp, Glycine max
aaagactaaaactgagaagtactgggactgggaattggccaatgaaacaaagccaatatggatgcgcaacccaaaggaagttgaaaaggaggagtacaatgaattttataagaagacatttagtgaattcttagaaccacttgcacatactcacttcactactgagggtgaggttgagttcagaagtattctgtatgttccgggaatgggacctcttaacaatgaagaagtagtgaaccctaaaacaaagaacatacgcttgtatgt

SEQ ID NO: 293705 - DNA, 266 bp, Glycine max
  unsure (1)..(266): unsure at all n locations
ggtttttctttttctcttctcactgcatcgcttcaggttcttctgaaaagatgtctcgcgtgtatgttggtaacttggattcacgagtcactgagagagatctcgaagacgaattccgcgttttcggagttattcggantgtttgggttgcacgtagaccacctggtcatgcttttattgactttgatgaccgcagagacgcacaggatgctatccgtgaatggatggcaagaatggttggagggttgagctttctcacaactcta

SEQ ID NO: 293706 - DNA, 268 bp, Glycine max
taggagcagatgtttgccatctcaatctccacaagacattttgcatccctcatggaggaggtggccctggcatgggacctattggtgtaaagaaacacttggcaccatttttaccttcacaccctgtgatagaaactggtggaattcctgcccctgacaaacctcaaccacttggtaccatcgctgctgcaccatggggctcagcactcatattgccaatctcttacacttacatagccatgatgggttctaaaggactcaccgatgc

SEQ ID NO: 293707 - DNA, 266 bp, Glycine max
  unsure (1)..(266): unsure at all n locations
gggtgatagtacctgactttcagcctaaganagatgtgaaaatagtgacagatgagaaggccaccagtctctctacagcttctatagatgatgcagcggttattaatgatctagtaatcaagttagagaggtgccgggcaaatcttcaccagtgttcaggatgaaaccaatccaatttgagaaggatgatgacacaaactaccatatggatgtgattgctgggctgccaacatgagggcacggaattacagcattcctgaggttga

SEQ ID NO: 293708 - DNA, 271 bp, Glycine max
aaagactaaaactgagaagtactgggactgggaattggccaatgaaacaaagccaatatggatgcgcaacccaaaggaagttgaaaaggaggagtacaatgaattttataagaagacatttagtgaattcttagaaccacttgcacatactcacttcactactgagggtgaggttgagttcagaagtattctgtatgttccgggaatgggacctcttaacaatgaagaagtagtgaaccctaaaacaaagaacatacgcttgtatgttaag

SEQ ID NO: 293709 - DNA, 269 bp, Glycine max
  unsure (1)..(269): unsure at all n locations
attgaagttaaaagccttagccttccctacaactccaaacancaagacatcntcatccatggctgcctccgtctccactgtccggagctgtcaacagagctcttttgaacctgaatggttctggagctggagcttcagctcccagttcagccttctttgggaccagcttgaagaaggttattgcctcaagggtccccaacagcaaggtttccggtggaagcttcaagattgttgctgtagaagagaagaaagagattgaagagacccag

SEQ ID NO: 293710 - DNA, 241 bp, Glycine max
gattatcatcttgtggagaagcttgcaaattttgatagggaacgtatcccagaacgtgttgtccatgccaggggcgctagtgcaaagggtttctttgaggtcacccatgacatttctcacctgacatgtgcagatttccttcgagcccctggagttcagacgcctgtaattgttcgtttctcaactgtcatcatgagcgtggtagccctgaaacctgagggaccctcgaggttttgccgtg

SEQ ID NO: 293711 - DNA, 269 bp, Glycine max
  unsure (1)..(269): unsure at all n locations
gtcaaatgttcaccacaagcatttcaangacaatccggataacacaaatcctacttataacacgaaanatggaatctacaaagaaggaattggactagacaatgttgtgatgtcatggggacatgatgagtatatgtatttggttgcaaaggaaaacggcaccactttgcctccagtagcattgttcattatcaaataccattctttttacgctttacatagggcaggagcatatacacatttgatgaatgaagaagatattgagaatt

SEQ ID NO: 293712 - DNA, 267 bp, Glycine max
  unsure (1)..(267): unsure at all n locations
gaagaacaagtagttgagaactaagaaggagaagcaaatggcttcctcaatgatctctttccccagctgttaccactgtcaaccgtgccggtgccggcatggttgctccattcactggcctcaagtccatggctggcttccccaccaggaagaccaacaatgacattacctccattgctagcaacggtggaagagtgcaatgcatgcaggtgtggccaccagttggcaagaagaagtttgagacnctttctacctgccagacttgat

SEQ ID NO: 293713 - DNA, 261 bp, Glycine max
  unsure (1)..(261): unsure at all n locations
cgcgcgaagattccgaaagggtgtcttttggtgggcccaccgggaaccggaaagacccttctggcgagggctgtggcgggggaagctggggtgccgtttttctcgtgcgcggcttcggagttcgttgaactttttgtgggantnggtgcgtcgagggtgagagatttgtttgagaaggcgaaggggaaggcgccgtgcattgttttcatgatgagatgacgccgttgggaggcagagaggggcggggctcggaggtgggaa

SEQ ID NO: 293714 - DNA, 263 bp, Glycine max
  unsure (1)..(263): unsure at all n locations
ctggcatgaatggtggacattagctctcaaagataattccaacccacagatagccttgcttcccctgcatccagagttgcgtgcaagattcaactccactgccgcatgggaatatgcacggagcatgtctggcaagccatatggttatcataatatgatattcagttggattgacacagtagctgacaactatcctccacctcttgatgctcacttggtatttctgtcatgtctatgtggacaagatgcagccagntatgcng

SEQ ID NO: 293715 - DNA, 264 bp, Glycine max
  unsure (1)..(264): unsure at all n locations
aaccctgacactccttcttctccgcttcctcttcgatcatcgcttcagaatgccgccgaagttcgacccctcccagatcgtcgacgtcttcgtacgcgtcaccggcgntgaggtcggcgcggcgagttccctcntcccgaagatcggtcccctcggtctctcccccaagaagatcggagaagatatcgccaaggaaaccgccaaggatggaagggcctccgcgtcaccgtcaagctcacgtgcagaaccgtcaggccaaggtca

SEQ ID NO: 293716 - DNA, 263 bp, Glycine max
  unsure (1)..(263): unsure at all n locations
ctttgtctctgttctgtgtgtgcgaganatggcgatggcaatggcgcttcgcaggctttcatcttcaattgacaagcctctgcgccctctcttcaatgccggttccctctactacaagtcgtctttgcctgatgaagctgtttacgacaaggagcgacccggagttacatggccgaagcagttgaatgctccacttgaggtcgtggatcctgagattgctgatattattgagcttgagaaagctaggcatggaagngctagat

SEQ ID NO: 293717 - DNA, 267 bp, Glycine max
gggaaaatctagcatgcttaacgcactattccggattgtggagctacaaaaaggaaaaatcattattgatggttgtgatatttctacattcggattagaagatgttcgaaaagttcttactatcataccacaatctccagttcttttctctggaactgttcgtttcaatcttgatccatttaatgaacacaatgatgctgacctatggcaagctttagaaagggcgcatttgaaggatgtaataagaagaaatacgtttggtctagc

SEQ ID NO: 293718 - DNA, 264 bp, Glycine max
  unsure (1)..(264): unsure at all n locations
acttggtgaaggacttgacccaatctaccctggtggtgcttttnaccctcttggtctggctgatgaccctgatgcattcgctgagttgaaggtcaaggaactcaagaacggtcgcttggctatgttctccatgtttggtttctttgttcaggctattgtcactggcaagggccctattcagaacctttacgaccacgttgctgatcctgttgccaacaatgcttgggcttatgccactaactttgtccctggacaatgaggatg

SEQ ID NO: 293719 - DNA, 268 bp, Glycine max
  unsure (1)..(268): unsure at all n locations
taattcctacttatccttgcttgtcttgatccttgtagctctgctacntcanccctcangggcttgctgatgaatctgcattcttactataagccaccagtttacaaganaccaccagtgtacaagcccaagcccaagccacncattcacaagcccaagccacccgtttacaagcccaagccacccgtttacaagaaacccccttatggtaagtacccaccagttcaagacaacgatcacttctaaaccatgcaacaaggcatgttaa

SEQ ID NO: 293720 - DNA, 270 bp, Glycine max
  unsure (1)..(270): unsure at all n locations
gncccgccccggttccaaaccttacgattgcgtcaaaagagcttggcacagtgaaatacaccaacccatcagaggaactctcattcaagaaattttcagggttgtcaacgagatacatgggtcttctactaagaagaacaaagagtaccaagagaagctacccgttgttgtgctcagggcagcggaaattatttactctaaagccaattccgaggctgaatacatggatcttaaaacacttttggagagaacaaatgatgctattgatac

SEQ ID NO: 293721 - DNA, 263 bp, Glycine max
caactttctggatggactccaatgtgttctttcaggcactgctagaggatgtggttggcagaaaattggtgcatttgtcaatctggggtcatactatatagttgggattccatcatctatcgtgtttgcttttgtattgcatattggtgggaagggactctggttggggatcatatgtgcactcattgttcaaatgtgttctttaatgatcataactattcgtactgattgggaccagaggcaaagaaagcaacagatagagt

SEQ ID NO: 293722 - DNA, 267 bp, Glycine max
  unsure (1)..(267): unsure at all n locations
ccaaagaagcatggtagaggaggtcaatcagctttgcgttttgctcgacttaggatggaaaagcgggcacaactatgttaggaaaactgcagaacttgctactcagtttttcatcaatcctgccaccagttcaacctaatgtttctggacttatacttgctggttctgctgacttcaagactgagttgagtcagtcagatatgtttgaccctcgattgcaagcaaaaatattgaatgtggtagatgtttctatggtngggaaaatgg

SEQ ID NO: 293723 - DNA, 265 bp, Glycine max
  unsure (1)..(265): unsure at all n locations
ggtgttggtgtttttggtctgtggaggttgaggttttggacctgctcggagccagggagattgcggtgcgtgcttgggacgaggccctcaacacccaacctgaaangctcatttggaatgttatgggcatgatgaacaactgctggttcagagtgaaaaccaatgtgtgcaggccccacaagggtgagataggtatagtgtttgaacaccccacccaaccaggcaaccaatccggcggatggatggcaaaagaaaaacacctaga

SEQ ID NO: 293724 - DNA, 268 bp, Glycine max
gcaagtacaagaacaagaagaaacaatgtcttgctccaatctcacaatgttggtgtcctcaaaaccttccctttccgatccctccaatctctccttccgctctgtcctcaacccttttcagctcccttcacaaaacccaacttcatgcactccttcacgctcctgcaaccacccaaattcagtgtggtctgagagaactcagaacccgcattgattccgtgaagaacactccagaaaatcaccgaggctatgaagcttgtggctgcag

SEQ ID NO: 293725 - DNA, 264 bp, Glycine max
aatgggagtgcttctaactgaggtttatatagatacagttggagatgcagggaaatatgaaatgaagctctctaatagttttccatctatcaaatttgtggttgcaaagaaggctgatagcctttaccccgttgtcagtggtgcaagcatagttgcaaaggtcacaagggaccgtgctttaagagaatgggtgctgatgagactgctgaaaacatgcagaggaattttggatccggatatcctggagatccccaaaccaagtcc

SEQ ID NO: 293726 - DNA, 265 bp, Glycine max
gtagatattcattccccttatctttctctcttctctctccccgcccaaaccctaactccctaccctattccgctttctctcatccatcatgaaaggaggaaagtccaagaccgaatctaagagagccgatgccaaacttgctgtgaataagaagggcgccgccaccaagactaggaaacccgccggaaaggggaaggcagcgaaagatcctaacaagccaaagaggcctccaagtgctttcttcgttttcatggaggattcagga

SEQ ID NO: 293727 - DNA, 262 bp, Glycine max
  unsure (1)..(262): unsure at all n locations
tagattcagtgacagggaacaaaaggctaatacaagantcagatcttcccaaccttccatacctacaagcctagtcaaagaaacactaaggattcaccctacagcgccactgctagggagagaatcatcagaaagctgcaatgtatgtggctatgacattccagcaaagtcntagtgtttgtnaatctgtggtctatgggagggcccccaaaatttgggaggaccctcttgagttcaagccagagaggtttatgaacaataa

SEQ ID NO: 293728 - DNA, 274 bp, Glycine max
  unsure (1)..(274): unsure at all n locations
cagcaagcagaagatgccctttcacaaggtatggacaaactccgccaaacacttgctgatagtgtagcagctgggccagttccatggaaggnacgtatatncccacagatgacttctgcaatggagangttggaagatctggtganctttgtnaaanangctgaccatcttcggcaaganaccttggagcaaatgtccgaatacttacaatccgtcaggcggctcgatgcttgcttgctttgggggaatatttccaacgcctgagggctttgag

SEQ ID NO: 293729 - DNA, 269 bp, Glycine max
cggaaagccaaatcatgaagtagccaaagaagttgaggatggcaccaatggcgaggacaacccaaggtggagcgacctcgttgattaggcctgagatgaccccaacgttggtgcccaagtccttgaagaaactgaggagattgagagtggtttggtcgtaaccgagggttgttttgatgtcgctggaatagagaccgaacatgtaggtggctccagcggcggccatgattagaaaggaggcgaacaccacgaaccatctcccggtgatg

SEQ ID NO: 293730 - DNA, 268 bp, Glycine max
gccattgctaaaacaggctcagggaaaaccttgggatatttaattccagcatttattcacctcaagcgctctggtaataactccaaaatgggccccactgcattggtactttcaccaacaagggagttggcaacacagatacaagatgaagccatgaagtttgggaaatcatctagaatttcatgtgcatgttgtatggaggagcaccaaagggtcctcaactgagagacattgatcgtggagcagatattgtggtagccactcctgg

SEQ ID NO: 293731 - DNA, 265 bp, Glycine max
cgcgcttccttttgcctgcttctgagtgtgaatatactctcaatgcgctgctggatgaattgcagacggatcaatggccggttccgcctgggcgccgccctgcacgctgcaccggagttgctttgagtgttgccgcaggttgctgagtgcttgcaatcctgggactggtgctagaatcgtagctttggttgtgggccatgcacggaaggacctggcgcgattgtgtcaaaagatttatctgacccagtgcgttctcataaagatc

SEQ ID NO: 293732 - DNA, 270 bp, Glycine max
  unsure (1)..(270): unsure at all n locations
gaacaagtagttgagaactaagaaggagaagcaaatggcttcctcaatgatctcttccccagctgttaccactgtncaaccgtgccggtgccggcatggttgctccattcactggcctcaagtccatggctggcttccccaccaggaagaccaacaatgacattacctccattgctagcnacggtggaanagtgaatgcatgcaggngtggccaccagttggcaagaagaactttgagactctttcctacctggccagaccttgatgatg

SEQ ID NO: 293733 - DNA, 272 bp, Glycine max
ttttaaaaaaaggcaatcatctgtacatgatacaacaggaactagtccaaaactggatgagaagactgtatattccattggtccaagattgaaagcattctctgattggttactgaaaactatggtgtcgggcaaacttgatgccatctttccagctgctactcgtgaatatgcaccattgattgaggaattatggaatgatgctgccattaaggctacatacgaaaggagaagcgaattagaaatgctgcctactgttgccagttattctt

SEQ ID NO: 293734 - DNA, 265 bp, Glycine max
  unsure (1)..(265): unsure at all n locations
gggaagagaacccccgtgttcccatcattgtcaccggtaacgatttctcaacactctatgcacctctcatccgtgatgggcgtatggagaagttctactgggcaccaacaagggaagaccgcattggtgtttgcaccggaattttccgcactgatggtattcctgaacaggacattgtcaagcttgttgacacttccctggccaatccattgatttctttggtgcatgagggccagagtatatgatgatgaagtgaggaatggnt

SEQ ID NO: 293735 - DNA, 266 bp, Glycine max
gtctttgccaagatgggaatcaaccccatcatgatgagtgctggagagttggaaagtggaaatgcaggagagctagcaaaactgatcaggcagagataccgtgaagccgcagacttgatcaagaagggaaagatgtgtgctctcttcatcaacgatcttgatgcaggagctggtcgtcttggtggaaccacccatacactgtcaacaaccagatggtgaatgcccaccctcatgaacttgctgataaccccaccatgtgcacttcc

SEQ ID NO: 293736 - DNA, 265 bp, Glycine max
  unsure (1)..(265): unsure at all n locations
cttggcaattgaagttgaagtcttgcccttctctcttcaactccaaacacaagacatcatcatccatggctgcctccgtctccactgtcggagctgtcaacaganctcttttgaacctgaatgggtctggacctggggtttcagctcccagttcatccttctttgggagcagcttgaagaaggttattggctcaagggtccccaacacaaagatttcctctggaagcttcaagattgttgctgtagaagagaagaaagagattga

SEQ ID NO: 293737 - DNA, 272 bp, Glycine max
  unsure (1)..(272): unsure at all n locations
cacgaccactgtaattgatccagcagatgttggagccttggaatctgcattggagcagcacaatgtgtctctattcttcactgagtctcctaccaatccattcctgagatgtgttgatattaagctggtttcagagctttgccacaagaaggggactttgctctgtattgatggtacatttgcaactccattgaaccagaaggcccctgcccttggcgctgatctgattctgcactccttaacaaaataccnnncaggacatcatgatgtcc

SEQ ID NO: 293738 - DNA, 273 bp, Glycine max
cacagagcaacactgcactgtgtggaaacgaaacatggcaagagtggtggcactccaacagaaccaactatctttctctaccttagcttcctctctttctgacttcagtggaaccagacttcaaactcaacttcagttcaagagaaagcaatgccatccaaaagggtctttctacgtctccgcatcgagcaccaagaaatcctaataatgggaggcaccaggtttattggtgtgtttttgtctaggctccttgtcaaagagggtcaccaggtg

SEQ ID NO: 293739 - DNA, 267 bp, Glycine max
  unsure (1)..(267): unsure at all n locations
cttccccaaagatacaagctnatcggcaccacttcattggcctttgttatttgtaacatggataaggtgaacttgagtattgccataattccaatgtctcatcaatttgggtggaactcaacaacggcaggnttggttcagtcctccttcttctggggctatgcattgagtcaattgcctgggggttggctagccaaaatatttggtggcggaactgttcttgaggttggagtattgatatggtcagtggctacagcttttgttcct

SEQ ID NO: 293740 - DNA, 266 bp, Glycine max
  unsure (1)..(266): unsure at all n locations
ccaaggtcggcttcggccggtcgatccgggcggaagacattgtcaggtggggagtttggctggggcggcacatctgttaaaagataacgcaggtgtcctaagatgagccacattcaaagggatagaataatggttctttttcttatatgttgatttggngtcgngtagtgtaatttgttggggcgccactagttggaatagggcccccaacaaattacactaccccactccaaaannnnaanacnaanaannaananccaanaaaa

SEQ ID NO: 293741 - DNA, 265 bp, Glycine max
  unsure (1)..(265): unsure at all n locations
tgaaaaccaagaaggggttgcaaattttgatgaaatccttgcaaattcagatgcatttatggtggcacgtggtgaccttggaatggaaattccaatagagaagatatttcttgcacagaaagtgatgatttacaagtgcaacatccaaggaaaaccagttgtcactgcaacccagatgttggagtcaatgtcaaatctncccangccaaccagggctgaagctactgatgttgccaatgcagttctggatggcacagactgtgtg

SEQ ID NO: 293742 - DNA, 265 bp, Glycine max
  unsure (1)..(265): unsure at all n locations
gccactgctgttttcagcaccatatctntcctgcttggaggtgtcacatcgcttatttctggattccttggaatganaattgcaacnnatgccaatgcaagaaccaccctggaggcaagaaagggtgttggaaaggctttcattacggcttttagatctggtgcagttntgggttctccccntngtgaaagggtctngtggtttncnanancgccnancnncttgaaanatatttacgntggtgaggagtgggntggtcnagccc

SEQ ID NO: 293743 - DNA, 265 bp, Glycine max
ggcggggataagattaaagattcaacaatggcctctgcttctgctactcttctcaagtcatctcctgttcttgacaagtgcgagtgggtcaaaggccagacccttcgccaacctctcgtgagatgtaacccttcctcagcatcagctctcaccatcaaagctgcttcctatgctgacgagctcgtcaaaaccgccaaaacagtggcctcaccggggcgtggtattttggcgatggatgagtcaaatgcaacctgcgggaagcgtt

SEQ ID NO: 293744 - DNA, 261 bp, Glycine max
ctggggcggtgacatcccaatggttccgataagtgctctcaaaggaaagaacatagatgatcttttggaaactgttatgcttgttgccgagttgcaagaactgaaagctaatcctgatagaagtgcgaagggaactgttgttgaggcggggctagataaatcaaagggaccattcgcttcatttattgtgcagaatggcaccctcagacggggagatatagtagtttgtggagaagctttggaaaggtgcggcttattgat

SEQ ID NO: 293745 - DNA, 263 bp, Glycine max
  unsure (1)..(263): unsure at all n locations
cnatagtgcatagcgtttttcattgtgcattattcaatggccaccacagcagctctatccggaaccatggtgagcacctccttcatgaggaagcaacctatgacgaccaagagcctaaagacattccccaacgctctttttggtctgaaaggtggacgaggtggtcgtgtaacttgcatggcctcgtacaaggtgaagctccataaccccagaaggagaagtggagtttgaatgcccagatgatgttttcattgttgacaagg

SEQ ID NO: 293746 - DNA, 262 bp, Glycine max
  unsure (1)..(262): unsure at all n locations
cttcccacgctcctccttctcatacccttcgccaccctcgtctccgnccgcccttcacctgcgccggagactttctccgactgccctccgaaaccgataacgatgacaacgtccagggcacccgctgggccgtcctcctcgcnggttccaatggctactggaattacagacntcaggctgatgtttgtcagcctatcaaatactaaggaaaggtggnctgaaagaagaaaatattattgtttttatgtatgatgacattgca

SEQ ID NO: 293747 - DNA, 258 bp, Glycine max
  unsure (1)..(258): unsure at all n locations
gcaggtggtgggagaaaggtgacacgtgttgaggtaaccctggacggaggtgaaacgtggcaagtgtgcacactggactgtccggagaaacccaacaaatatggaaagtactggtgttggtgtttttggtctgtggaggttgaggttttggacctgcttcggagccagggagattgcggtgcgtgctgggacgaggccctcaacacccaactgaaangctcattggaatgttatgggcatgatgaacaactgctggtt

SEQ ID NO: 293748 - DNA, 262 bp, Glycine max
  unsure (1)..(262): unsure at all n locations
gnagaaaggtgacacgtgttgaggtaaccctggacggaggtgaaacgtggcaagtgtgcacactggactgtccggagaaacccaacanatatggaaagtactggtgttggtgtttttggtctgtggangttgaggttttggacctgctcggagccaggnagattncggtncgtgcttgggacgaggcctcaacacccaacctgaaangctcatttggaatgttatggtacgttcctgtctctgccacattcntnaattgana

SEQ ID NO: 293749 - DNA, 265 bp, Glycine max
  unsure (1)..(265): unsure at all n locations
tnacacttctgcagaaatggcagccattcgagaagtttcttcagctctcggattctgttccttgcaaaattcgtgccaagcggggctgtgccactcaccctagaagcattgcagagagggttagaagaactaaaattagtgagcgaatgaggaagctacaagatctggtccccaacatggataagcaaacaacacagcagacatgttggacttggctgttgagtacattaaagaccttcaaaaccaagttgaggcatttcggaca

SEQ ID NO: 293750 - DNA, 265 bp, Glycine max
  unsure (1)..(265): unsure at all n locations
cacaacaacaataacaatggctgcctcactacaagctgcagctaccttcatgcaacccaccaaggttggcatagcctctcgcaacctcaaatctacacaatgcatttctaaggcttttggcttggaacctgctgcagctaaactcacttgctcccttcagcctgatctcaaagaatttgctcaaaaatggtcgangctaccaaaattncnggattcgcccttgccacctctgctctcgttgtttctggagcaagtgcagaaggtg

SEQ ID NO: 293751 - DNA, 263 bp, Glycine max
ttccagcgccttcaattctcccttctggactacaaattctggtgctcctatttggaacaacaactcctctttaaccgttggagctagaggtccaattctgctggaggattatcatcttgtggagaagcttgcaaattttgatagggaacgtatcccagaacgtgttgtccatgccaggggcgctagtgcaaagggtttctttgaggtcacccatgacatttctgcacctgacatgtgcagatttccttcgagcccctggagtt

SEQ ID NO: 293752 - DNA, 261 bp, Glycine max
  unsure (1)..(261): unsure at all n locations
cgccttgtgtcnaggcaactaaagcttctctcgctttgcaaganagggaggagtgagtganatggaaggagtgatacacagaacagtggaagtgaatggcataaaaatgcacatagcagagaaaggagagggtccagtggtgttgttcctccacggcttccctgagctctggtactcatggcgccaccgattctctctctcagctccctcggctaccgcgccgtcgctcccgatctccgtggctaggtgacaccgaggcac

SEQ ID NO: 293753 - DNA, 268 bp, Glycine max
  unsure (1)..(268): unsure at all n locations
anagaatccccgtgtgcccatcatcgtcaccggtaacgatttntccanactctatgcgcctctcatccgtgatgggcgtatggngaagttcntactgggcatcancaanggatgancgcantggtgtgtgaattggantttatcgtaccnatgaanttcctgnanaggacgtngttnaagantggtgacacntncctngccaatncattggtttctttggtgnntgaggggccntagtatatgatgcctttatncagnaatggatctt

SEQ ID NO: 293754 - DNA, 258 bp, Glycine max
  unsure (1)..(258): unsure at all n locations
acgaaacatgggcaagagtggtggcactccaacagaaccaactatctttctctaccttagcttcctctctttctgacttcagtggaaccagacttcaaactcaacttcagttcaagagaaagcaatgccatccaaaagggtctttctacgtctccgcatcgagcaccaagaaaatcctaatnatgggaggcaccaggtttattggtgtgtttttgtctaggctccttgtcaaagagggtcaccaggtgatttattcac

SEQ ID NO: 293755 - DNA, 261 bp, Glycine max
ctctgctcgtggcctctagggttatcatatctccatttccatttctcctctctcagtttccaagaatcttaagctatgggaaagtcttacccaaccgtgagcgctgattaccagaaggccgttgagaaggcgaagaagaagctcagaggcttcatcgctgagaagagatgcgctcctctaatgctccgtttggcatggcactctgctggaacttacgacgtgagcttcgaagaccggtggtcccttcggaaccataaagca

SEQ ID NO: 293756 - DNA, 252 bp, Glycine max
gttggatgctgagaggctgttatcagatatgcttaggaagggttgttcccctagtgttgttactttcaatatcttgattaacttcttgtgccggaaacgattactgggtagagccattgatgtcttggagaaaatgccaaagcacggttgtgttccaaattccttgagctacaatccattgcttcatgggttttgtcaagagaaaaagatggatagggcaattgagtattggaataatggtgtctaggggtt

SEQ ID NO: 293757 - DNA, 257 bp, Glycine max
  unsure (1)..(257): unsure at all n locations
ggnaggaggtggccctgggcatgggtcctataggtgtaaagaaacacttggcaccatttttaccattcacaccctgtgatagcaactggtggaattcctgcccctgacaaacctcaaccacttggtaccatcgctgccgcaccatggggctcagcactcatattgccaatctcttacacttacatagccatgatgggttctaaaggatcaccgatgcatcaaagatagccattttgaatgcaaatacatggcaaaac

SEQ ID NO: 293758 - DNA, 260 bp, Glycine max
  unsure (1)..(260): unsure at all n locations
ctaaagagaagagtctgaaatctgaatcataaatcattggttttgagatgaagaactgcgagctatgcaagcttccagctaggaccttctgcgagtcggaccaggctagcttatgctgggactgcgacgccaaggtccacggagcgaacttcctcgtcgcgagacacacgcgcacgctccnctgccacgcgtgccagtcactccacgccgtggaaggcntccggttctccccnggaaanncagnncccccnnncaaannc

SEQ ID NO: 293759 - DNA, 257 bp, Glycine max
  unsure (1)..(257): unsure at all n locations
ttgtccagcatcaaggttcctcntcaattcttggtatctggggaggcaaaggacaaggataatctttncaatgtgagcttgtctttgccannatgggaatcaanccccatcatgntgagtgctggagagttggaaagtnganatgcaggaganccagcaaaactgatcaggcgagtaccgtgaagccgcagacttgntcacnatggganagatgtgtgcncncnttcatcaacnatcttgatncaggagnggtccnc

SEQ ID NO: 293760 - DNA, 255 bp, Glycine max
  unsure (1)..(255): unsure at all n locations
gtnccaagctggaggttcatttcactgtcaccagggatacctctggtgaggttcttggcaggggtactaagatcactctcttcctcaaggaggatcagctagagtaccttgaggagcgccggttnaaggntctgattaanaagcattctgagtncattagctacccaatttctctttgggttgagaagactacngagaaggagatttccnacgatgaggntgcggaagagaanagntgncncgggtaangtngnc

SEQ ID NO: 293761 - DNA, 260 bp, Glycine max
  unsure (1)..(260): unsure at all n locations
tctaattacacttnctatctcatttccaatctcattttcgttcggttcaaacactcttcatggcatcagacaagaagattaggatcggcatcaacggatttggaaggattggccgtttggtggccagggttgctccttcagaggaatgacgttgaacttgttgctgtcaacgatcctttcatcnccactgattacatgacatacatgttcaagtacgacaccgttcatgggcagtggaagcattttgatgtgaagctgaa

SEQ ID NO: 293762 - DNA, 256 bp, Glycine max
  unsure (1)..(256): unsure at all n locations
cctggctgncgatgttacggattatcttcttcaagagacatttcgngcnncgatatccctcaattaaggggnccaaagttgtaattgataggctaactggacggacaaagggttatggttttgttaggtttggagatgagagtgaacaggttagagctatgactganatgcaaggggttcttgttcaacaaggcccatgcgaattggaccagcctctaataaaaaccctagcactcagtctcagccaaaagcatca

SEQ ID NO: 293763 - DNA, 254 bp, Glycine max
  unsure (1)..(254): unsure at all n locations
aattgaagttaaaagccttagccttccntacaacttcaaancnnnaagacatcntcatccatggctgnntccgtctccactgtcggagcnntcaacagagntcttttgaacctgaatggttctggagctggagcttcagntcccagttcagncttctttgggaccagcttgaagaaggttattgcctcaagggtccccaacagcaaggtttccggtggaagcttcaagatgttgctgtagagagagaaagagnt

SEQ ID NO: 293764 - DNA, 235 bp, Glycine max
  unsure (1)..(235): unsure at all n locations
gccaaatgcctcgtcatctaattantgacgcgcatgaatgnnttaacgagattcccactntnccctgtctactatccagcgaaaccacagccaagggaacgggcttggcggaatcagcggggaaagaagaccctgttgagcttgactctagtccgactttgtgaaatgacttgagaggtgtaggataagtgggagctggaaacagcgaaagtgaaataccactacttttaacgtt

SEQ ID NO: 293765 - DNA, 257 bp, Glycine max
  unsure (1)..(257): unsure at all n locations
ttctcagagaattactgcgaaanatgcacttgatgctgagtattnctggacagatccattaccatgcgatcccaagagtttacccaagtacgagtcatcacatgagtttcagacaaagaaaaagcgccaacaacaacggcaaaatgaaganatggctaagcgtcagaaaatgcagcacccacagccacacactcgtcttccccccatttcagcagcctgggcaacatgccccaaatgcggtcagaccaaaccancca

SEQ ID NO: 293766 - DNA, 255 bp, Glycine max
  unsure (1)..(255): unsure at all n locations
cttgctccagtgtcaaagacaggatagggtatagcatgattgtagatgctgaggagaaaggactncatncacaccgggtgaaagtgtcctcattgagcctactagtggaaacactggcataggtttggcattcatggcagctgctaagggttataaacttattatnnccatgcctcttcgangagtctcgaaagaagaaccattctccgagttttggagctgagttngtcctcacngcatcccgccaaangncnc

SEQ ID NO: 293767 - DNA, 257 bp, Glycine max
  unsure (1)..(257): unsure at all n locations
gttgactagtatcattaagatggctaattcctacttatccttgcttgtcttgatccttgtagctctgctgcctcacccctcaagggcttgctgatgaatctgattcttactataagccaccagtttacaaganaccaccagtgtacaagcccaagcccaagccacccatttcacaagcccaagccacccgtttacaagcccaagccacccgtttacaaganacccccttatggtaagtacccaccagttcaagacaa

SEQ ID NO: 293768 - DNA, 254 bp, Glycine max
  unsure (1)..(254): unsure at all n locations
tcctggatccccctgagctcattaaaccccccaaaatcttagtcattgaaggcttgcacccaatgtatgattctccgggtcagagatctcttggactttagcatctacctagacattagcaatgaggtcaaattcgcttggaaaattcagagagacatggcagagcgtggacacagtcttgaaagcatcaagggctagcattgaagcaaggaagctgattttgaagcntatattgatccacaaaagcaatnngc

SEQ ID NO: 293769 - DNA, 252 bp, Glycine max
  unsure (1)..(252): unsure at all n locations
cttccgtttgtgtcaggtgacaattatctgaagccgtacgtgatttcagaaccggaggtgatggtgacggagcggacggaggaggacgagtgtttgatactggcgagtgatgggttgtgggatgtggtatcgaatgagaccgcatgtggggtggtgaggatgtgcctcaaggcgcagaagccgccggggtctnccggggagtgacgtggcggctgacggttccgacctgcttgctccgatgcgtcgatctgc

SEQ ID NO: 293770 - DNA, 191 bp, Glycine max
  unsure (1)..(191): unsure at all n locations
ccggtgctgatatcatcctcacatattctgctctgcaagctgccagatgtttgtgtggagagaagaggtgaagttctctgattatgcagggcgttgttcatgtagaaggttgaagagtttanaaancccagtnccggngntncgggnnntcnnaaaattttaaaagggnccccgcggtttntcnaaaanga

SEQ ID NO: 293771 - DNA, 229 bp, Glycine max
  unsure (1)..(229): unsure at all n locations
gaacaagtagttgagaactaagaaggagaagcaaatggcttcctcaatgatctcttccccagctgttaccactgtcaaccgtgccggtgccggcatggttgctccattcactggcctcaagtccatggctggnttccccnaccnaannncccnaacagcaancccccccntntccnnacnnggggcacncnaacacncnggggggnccncccncgcacaaannnttnnc

SEQ ID NO: 293772 - DNA, 254 bp, Glycine max
  unsure (1)..(254): unsure at all n locations
gtnanattttatccaattganattttaaaaatgactgggataaacttnaganttcaattattganattgaataagtaaacantttaattggattggtcgantggtatcaaaaaantggagtactaactcccatttcttatttnntattganttnnccgatcaccttgcttngttatncgacacattnccnntntgattncaaaattnncnggaaaantttgantctntttttacangcgaancaatcctactcc

SEQ ID NO: 293773 - DNA, 251 bp, Glycine max
  unsure (1)..(251): unsure at all n locations
ggcgttgccattctcatcctcttctttctctctctaccattgccatggatccctacaagcaccggccatccagcgccttcaattctcccttctggactacaaattctggtgctcctatttggaacaacaactcctctttaaccgttggagctagaggtccaattctgctggaggattatcatcttgtggagaagcttgcaaattttgatagggnncgnatcccngaangtgttntccatgccagggcgctc

SEQ ID NO: 293774 - DNA, 251 bp, Glycine max
  unsure (1)..(251): unsure at all n locations
tncagaactagctggagatcggcgaaggacagttatgaggcctcctcaagttcttcgtgagggcacaaagaaaactgtgtttgtcaattttatggatctatgcaaaacgatgcatcggcagccagaccatgtcatggctttcttgcttgctgaattgggtacanntggctcccttgatggacagcagagattggttgtaaagggaaggtttgcaccaaagaactttgaaggaattctgcgacgatatgtca

SEQ ID NO: 293775 - DNA, 201 bp, Glycine max
cctggcatcggatccagatccaaatccagtttaacaaagaaaatgcagtacaagaacctgggccgatcgggactgaaggtgagccagctctcctacggggcgtgggtgagcttcggtaaccagctagacgtgaaggaggccaaggccctcctccagtgctgccgcgaccacggcgtgaacttcttcgacaagccgaggtcc

SEQ ID NO: 293776 - DNA, 239 bp, Glycine max
  unsure (1)..(239): unsure at all n locations
cngaaagccaaatcatgaagtagccaaagaagttgaggatggcaccaatggcgaggacaacccaaggtggagcgaccttcgttgattgggcctgagatgaccccaacgttggtgcccaagtccttgaagaaactgaggagattganagtggtttggtcgtaaccgagggttgttttgatgtccgctggaatagagaccgaacatgtaggtggctccagcggcggccagattagaaagga

SEQ ID NO: 293777 - DNA, 242 bp, Glycine max
  unsure (1)..(242): unsure at all n locations
attctctctgtgtatttccctacctcctcccttcaagatgcagatcttcgtcaagacnntcaccggcaagacnatcacccttgaggtggaaagctctgacaccatcgacaacgtcaaggccaagatccaggacaaggaaggaatccccccggaccagcaacgtctcattttcgccggaaagcancttgaggacggncgtaccttgctgactacaacattcagaaggagnntactcttcactc

SEQ ID NO: 293778 - DNA, 243 bp, Glycine max
  unsure (1)..(243): unsure at all n locations
ctggacagtgntctgaatgtcaaagtgaagacattcnaccaagcgccgggtaaacggcgggagtaactatgactctcnntaaggtagccaaatgncctcgtncatctaattagtgacgcgcatgaatggattaacgagattcccactgtccctgtctactatccagcgaaaccacagccaagggaacgggttggcggatcagcggggaaagaagaccctgttgagttgactctagtccgattt

SEQ ID NO: 293779 - DNA, 241 bp, Glycine max
  unsure (1)..(241): unsure at all n locations
ttttcactcagccgctgcgaggcgaacagagagacccgaagccagatttcaagatgaagttcaacattgcgaatcccaccactggttgtncagaagaagctggagatcgatgatgacctgaagctacgagcattttgggacaagaggatctcacaagangttgttggtgatgctctgggtgaggaattcaaaggctatgtcttccaaaattactggaggttgcgacaagcaaggatttcca

SEQ ID NO: 293780 - DNA, 232 bp, Glycine max
  unsure (1)..(232): unsure at all n locations
caccattactgatggtattgacaaaactagtgcaactttgcaatttaganagttagcagattgtgattttctcaagagaaactttaagcagatgtctaatgttttgtgggtggctcctgaggataaggcgagtttatggtcacaacttcattatgtttcgtgtaataatctggaaatgcaagaagcttatcttgtccaatctcgtaaatgtgttacgagaatgtatttgcac

SEQ ID NO: 293781 - DNA, 242 bp, Glycine max
  unsure (1)..(242): unsure at all n locations
gngaatgaacaacttgcattttgccctgccattgtggttcctggtgtatactactcagatgataagatgcttcagaccaggatattctcttatgctgattcacaaaggcacagacttggaccaaactatctgcaacttcctgctaatgctcccaagtgtgctcaccacaataatcatccatganggtttcatgaatttcattcacagggatgaggaggtcaatnactncccttcagggnaga

SEQ ID NO: 293782 - DNA, 245 bp, Glycine max
  unsure (1)..(245): unsure at all n locations
ttctccgacgacttccggcgacgaacaggtactatcctcgaactcatctccgattgctgggaatnatnataatacagtgcaccgtaccacaagttgcaccactgcgcccgagctgctagacgagaatgaaaggcttaggaaagagaacatgcaactgagtaacgagttgagtcaattgaagggtttgtgtaataacatactcgctttgatgaccattatgcttctggttttagcgccagcagtta

SEQ ID NO: 293783 - DNA, 237 bp, Glycine max
  unsure (1)..(237): unsure at all n locations
gttattggctcaagggtccccaacacaaagatttcctctggaagcttcaagattgttgctgtagaagagaagaaaganattgaagagacccagcagaccgacaaggacagatggaagggtcttgcctatgatatctcagacgaccaacaggacatcacaagaggaaagggtttggttgactcccttttccaagctccacaggatgctggaacttcatatgctgtccatgagctccta

SEQ ID NO: 293784 - DNA, 241 bp, Glycine max
  unsure (1)..(241): unsure at all n locations
gtaaaggattctacccgccgctcgatgngaattgcgnttcaaggcgtctcgtatggctaatnncgcctcangagggtcaccaacggcacgtgcctttggnngggccgaggccccctactgctggtccggcaaacggacggcgggcgcacgcgtcgcttctagcccggattctgacttagaggcgttcagtcataatccaacgcacggtagcttcgcgccactggcnntttnacnaagcgcg

SEQ ID NO: 293785 - DNA, 240 bp, Glycine max
  unsure (1)..(240): unsure at all n locations
gtnagccctgttgtagtgtcaaggacaggattggttttagtatgataaatgatgctgngcagagaggagctataacacctgggaagagtatattggtggaacctactagncggaacacaggaattggtcttgcctttatagcagcttcaagaggatataagctaattttgacaatgcctgcttcaatgagtttagaaagacgggttcttttgaaagcatttggggccgagcttgttttga

SEQ ID NO: 293786 - DNA, 243 bp, Glycine max
tgggagagttggaaagtggaaatgcaggagagccagcaaagttgataaggcaaaggtaccgtgaagctgctgatataatcagcaaggggaagatgtgctgtctcttcataaacgatcttgatgcaggagctggtcgtcttggtggaaccactcaatacactgtgaacaaccagatggtgaatgacaccctcatgaacattgctgataaccccacaaatgttcagcttcctggcatgtacaaca

SEQ ID NO: 293787 - DNA, 233 bp, Glycine max
  unsure (1)..(233): unsure at all n locations
tggaatatggtccaaggtgaggnagcagttatttgggctcacagaagctgtttactctggttatacttgttatactggcattgcagattttgtgcctgctgacattgaaactgttggataccgagtattcttgggacacaaacaatactttgtatcttcagatgttgntgcgggananatgcaatggtatgcatttcacaaagaacctcctggtggtgttgatgagcccacgg

SEQ ID NO: 293788 - DNA, 236 bp, Glycine max
  unsure (1)..(236): unsure at all n locations
gngacgatctaggttttgtggatatagcacttattccattcgacacttggttcaagacttttggcagcctcaacatagagagtgagtgccccaagtttgttgcttgggccaagaggtgcctgcagaaagacagtgttgccaagtctcttcctgatcaacacaaggtctatgagttcattatggacataagaaagaagttcgacattgagtaggttcatgttggattttaatagcca

SEQ ID NO: 293789 - DNA, 237 bp, Glycine max
  unsure (1)..(237): unsure at all n locations
atatctcagacgnccaacaagacatcacaagaggaaagggtttggttgactcccttttccaagctccacaggatgctggaactcactatgcagtaatgagctcctacgagtacctcagcactggacttcgccagtacttggacaacaaaatggatggattctacattgctccagcttttatggacaagcttgttgttcacatctccaagaattcatgaccctgcccaacattcaagg

SEQ ID NO: 293790 - DNA, 240 bp, Glycine max
  unsure (1)..(240): unsure at all n locations
gtaatggatgaggantatcaaggnaatnttgangctactggagaggattattccgtggaacctgntgagnagcangagggccattcccgtgtctccttgatgttggtncttattaggactacaaccggtaaccgtgtgtttggtgcccttaagggagctctggatggggggttggatattcctcacagtgataanaggtttgctgggtttgataaggaaaagaaggagcntgctgctgnc

SEQ ID NO: 293791 - DNA, 236 bp, Glycine max
  unsure (1)..(236): unsure at all n locations
gtaatctgctacactcttcaggccanaattnattgttgctggagctagcgcttatgcacgtctctatgattatgaacgtgtacgcaaggtttgcgataaacagaaagctatactattggcagatatggcacacatcagtggattggttgcagctggtgtcatcccatncaccttttgattatgctgatgtagttactaccacaatcacaagttcacttccgaggaccacgnggagc

SEQ ID NO: 293792 - DNA, 237 bp, Glycine max
  unsure (1)..(237): unsure at all n locations
gtgatctctgtaacattactgttaacaagaacgctgtttttggtgatancagtgccttggcccctggtggagtgcgaattggtgcccctgccatnacttctaggggtttggttgaaaaagactttgancagattggtgagttccttcaccgtgctgtgactctcacactggagatccagaaggagcatggcaaacttcttcaaggatttcaacaagggtctcctcaacaacaaggta

SEQ ID NO: 293793 - DNA, 274 bp, Glycine max
  unsure (1)..(274): unsure at all n locations
ancnacctntntttcttctctctcaacaacttcanccggnttcctcntcnatcangtctcacntnaaggggcaagtacnatgntgagcttatcgccaatgctgcgtacattggcactcctggaaagggtattcttgctgctgatgngtcaacagggacaattggcaagcgtttggccagncatcagtgtagagaacattgaatccaacaggngnnctcttagggagcnggctttnactgctcctggnnatctcantnnnnnnntngtgtcgtcc

SEQ ID NO: 293794 - DNA, 267 bp, Glycine max
  unsure (1)..(267): unsure at all n locations
ccaagattccttctcttgggttagggacttggcaagctgaacctggtgttgtagctgaagctctcaccacagccattcaggttngatacaggcntattgactgtgctagtgcgtataagnatcaagcagagattggttctgctctnaanaagctttttgatgatggtgtngtgaagcgtgaggactnatggatcacttccaaactctggtgttcagatcatgcaccagaagatgtgccaaaagcttggatacaacattacnggnatc

SEQ ID NO: 293795 - DNA, 246 bp, Glycine max
  unsure (1)..(246): unsure at all n locations
atctttcgaagttcgtttgcgtgtgttgtgtcngtcagtcaccgatggcagcaccacctgcgagggcacgtgccgattacgattacctcntcaagcttcttcttattggcgatagcggtgtgggaaagagttgtctgcttttgcgattttctgatggttccttcacaaccagttttatcaccaccattggcattgattttaagataagaaccattgaacttgatggcaaacgcattaagttacaaa

SEQ ID NO: 293796 - DNA, 261 bp, Glycine max
ctcggagccttgggctgcgtcttcccggagttgctgtcccgcaacggggtgaagttcggagaagccgtgtggttcaaggccgggtcccagatcttcagcgagggtgggctcgactacttgggcaacccaagcctgatccacgcccagagcatcctcgccatctgggccacacaagttatcctaatgggtgccgttgaaggttaccgtattgctggtggccccctcggtgaggtcactgacccaatctacccaggtggcagt

SEQ ID NO: 293797 - DNA, 263 bp, Glycine max
  unsure (1)..(263): unsure at all n locations
gcaccatttcgagtccaaggcagacgccggtgcctccaaaacctaccctcagcaagccggtaccattcgcaagancggctacatcgtcatcaaaggacgcccctgcaaggttgtggaagtntcgacttccaaaactggaaancacggtcacgccaagtnncactttnttggaattgatattttcactgccangnnacttgaggatattgtgccctcttctcacaactggggtgttcccccacgggnatcggacggnnaacncc

SEQ ID NO: 293798 - DNA, 262 bp, Glycine max
  unsure (1)..(262): unsure at all n locations
cagcnatggtgtacgtcaaggctcagaaatcaaaagcctacttcaagagatatcaagtcaagttcaagagnagnagagagggaaaaaccgattaccgtgccaggattcggttgattaatcaggacaagaacaantataacactccgaaataccgatttgttgttcgctttagcaacaaggacattgttgcacaaataatatctgctagcattgctggcgatattgttcttgcnggcagcatatgcacatgagctgccacgat

SEQ ID NO: 293799 - DNA, 269 bp, Glycine max
  unsure (1)..(269): unsure at all n locations
ggaaccccttggagttacagctcaaatganatagttgcagctgctatggttgctgcccatgtttctgaactatttagaaggtcaaaagcttgcatgcatgctctgtctgttctgattcgttgcaaatgggacaatgaaattcactccagggcatcatcattgtataatctcatagatattcacagcaaagctgttgcatctatagtgaacaaggcagagccattagaagcaaccttaattcatgcacctattcggaaggattcccttgt

SEQ ID NO: 293800 - DNA, 258 bp, Glycine max
  unsure (1)..(258): unsure at all n locations
ggcctgcaaggtgttaccggcagataaaaaacaagccataccccaaatcacgtttctgccgtggtgttcctgatcctaagatcagaatttatgatgttggtatgaagaagaaagntgttgatgagtttcccttctgcgttcatctggttagctgggaaaaagaaaatgtttcaagtgaagcattggaagctgctagaattgcatgcnacaaatatatggcgaaatttgctggaaaggatgctttccacttgagagtca

SEQ ID NO: 293801 - DNA, 266 bp, Glycine max
  unsure (1)..(266): unsure at all n locations
gggcacgttgtgggaattcatcatgttccagcacaggaagacttccccataatgccattattgagcactgcattcgtcctcaggccaaccaatttcttcgagaggaatccggttcttaaaacactttctcccccggatgtccaatggcctggttgccccaagtaaaantagctagccagccatttccattatatnagngtgttcgagngctacaacctagatgtgtncctggatnatgtgaaatgcgatctgcttattgcatgtgc

SEQ ID NO: 293802 - DNA, 257 bp, Glycine max
  unsure (1)..(257): unsure at all n locations
cgcacgaatatcttgttgtttggagcgatccgagaaaaactctgtaaacatgttggtttaccaggacctccttacaggtgatgagcttctctctgactccttccgttacaaggaaattgagaatggaatgctgtgggaagttgaggggaagtgggttgttnaaggagcagttgatgtanacattggtgccaaccctctgcngagggtggaggngaagatnaggganttgatgatgcagctgttaagttgttgacatc

SEQ ID NO: 293803 - DNA, 257 bp, Glycine max
  unsure (1)..(257): unsure at all n locations
gatgcccctgttgatgagcttgtctttgatgtgaataagggncttgatgacctgttgccagttgaagttaaagagcagcgcctcagcaatctactgcaggcattgatggtcgcagcctgtgttgctgctatgcctgttttgaagaagataccaactncagtgctttggggctactttgccttcatggccattgaaagcttgccaggaaatcaattttgggagagaatattgtatcttttcactgctccaagtcgaag

SEQ ID NO: 293804 - DNA, 263 bp, Glycine max
  unsure (1)..(263): unsure at all n locations
accgcacgaatatcttgttgtttggagcgatccgagaaaaactctgtaaacatgttggttnaccaggacctcgntacaggtgatgagcttctctctgactccttccgttacaaggaaattgagaatggaatgctgtgggnngttgaggggaagtgggttgttaaaggagcagttgatgtagacattggngcaaacccttctgctgagggtggaggagaagctgagggattgatgatgcagctgttaagttgtngacatgttga

SEQ ID NO: 293805 - DNA, 258 bp, Glycine max
  unsure (1)..(258): unsure at all n locations
ggnaactgagctaaggcttggactgcctggaaacgtaggaggcactggcactgaagaagtgctcatcaggaagagaggtttctctgagactgaaactgaaactgaggaggatgagtctgctaccactgtggatttgatgcttaatctttcttctaaggaannnnnnnnnnnnnnnnnnnnnnnngataagcacaagactttgcctaaggagaagactcttctgcctggcagatcctgctaagcctccagccaaggcac

SEQ ID NO: 293806 - DNA, 259 bp, Glycine max
cggagagtacatagctgactacgttctaggagaccaatatagatcagattccaaaacagttaaccaacaagcttatttctatgctaaatccctcaaactcaccaacaaagatgtctttgtcttggacgttgacgacactactctctctaatctccagtattttgctaaccatggatttggtgtggaaccacacaatacgacggcgtttaagaactgggttcttgatggcgaggcattcgcactgccagagactcttaaa

SEQ ID NO: 293807 - DNA, 258 bp, Glycine max
  unsure (1)..(258): unsure at all n locations
catgaaccaagcaaggnaaaaaaatcgattgagnaggcgtgggggttttgtatcaaacattccaggagatgtccctcgagtagatggacagctgngcagtagcannggcttttggtgacaggagcctgaagatgcatcttagttcagaacctgatgtgattgtacaggaagtagatcaacatacagagtttcttattctggctatgatggaatatggaaggttaacttcttntganaaaattctttgtttataaataa

SEQ ID NO: 293808 - DNA, 259 bp, Glycine max
  unsure (1)..(259): unsure at all n locations
ctgagttaaggcttggactgcctggaaacggaggcactgaagaagtgctcatcaggaancaggggtttctctgagactgaaactggtcatgaagatgagtctgccaccactgtggatttgatgcttaatctttcttctaaggagnnnnnnnnnnnnnnnnnnnnnnnnnnnnnnnnnnnngataagcacaagactttgcctaaggagaagacccttctgccagcagatccctgctaagcctccagccaagacgcagtgg

SEQ ID NO: 293809 - DNA, 256 bp, Glycine max
  unsure (1)..(256): unsure at all n locations
ggtgagtgaaaatggcggtacccttgctctccaagaagatcgtgaagaagcgcgtcaagaagtttatacgcccccagagtgatcgcaagatctccgtcaagccaagctggcgcagacccaagggtattgattctcgtgtcaggagaaagttcaaaggatgcactttgatggcccancattggttatggctcagacaagaaaacccgccattatctaccaaatggtttcaagaaatttgtcgtgcacaatgtgaaag

SEQ ID NO: 293810 - DNA, 250 bp, Glycine max
ggcatctgtgatccaactaagaaaaatgcaaaggcggtgaacattgatgggtacgaggatgttccaccgtatgatgagaatgccttgaagaaagctgtcgctcgtcaacccgtaagcattgctattgaagcctctggcagagctttgcaactttatcaatcgggtgtatttactggtgaatgtgggacaagtttagaccatggtgtggttgttgttggatatggctctgaaaatggtgtggattactggc

SEQ ID NO: 293811 - DNA, 259 bp, Glycine max
  unsure (1)..(259): unsure at all n locations
cttngtgttggtataagctcaagccacgcttggaatctgcaggccataaggtcacagtacttgaccttgcagcttctggaaccaacatgaagaaaattgaagatgttgatactttctcagagtattctgcgcctttgttgcagctaatggccacaattccctcaaatgagaagttngttctagttggtcacagccttggagggctgaacatagcacttgcnatggagaaattcccagaaaaggtagcagttggtgtttt

SEQ ID NO: 293812 - DNA, 263 bp, Glycine max
  unsure (1)..(263): unsure at all n locations
agtattggcgcttcatcaagatgggtatttctagggattccatgcacaagaggcgtngccactggtggcaagaaaaaggcttggagaaagaagagaaagtatgagcttgggcgtcaggcagcaaacaccaagttatcaagcaacaagacaatcaggaggattcgtgttagaggtggcaatgttaaatggagggcattgaggctggatactggcaattactcatggggtagtgaagcagttactcgcaagactcgtattctaga

SEQ ID NO: 293813 - DNA, 249 bp, Glycine max
ggcatctgtgatccaactaagaaaaatgcaaaggcggtgaacattgatgggtacgaggatgttccaccgtatgatgagaatgccttgaagaaagctgtcgctcgtcaacccgtaagcattgctattgaagcctctggcagagctttgcaactttatcaatcgggtgtatttactggtgaatgtgggacaagtttagaccatggtgtggttgttgttggatatggctctgaaaatggtgtggattactgg

SEQ ID NO: 293814 - DNA, 256 bp, Glycine max
gctgtcactgagaaaggatctctatctacgaaggagcggaataaaacccttctctctgtgattaagagaatggcttcagatcggaaacttcacacttttgaggaggtggcaaagcacaaccagaccaaggattgctggctcatcatttctggcaaggtgtatgatgtcacccctttcatggaggatcatcccggaggtgatgaggttttgttatctgcaacagggaaagatgcaaccaatgactttgaagatgtgg

SEQ ID NO: 293815 - DNA, 253 bp, Glycine max
  unsure (1)..(253): unsure at all n locations
tggcaacacaggggctcgatccctctcagacctctttcttccaggtgcttaacattcctaccaagattaacaagggtactgtggaaatcattacacctgtggaactcattaggaagggagacaaggttggatcttctgaagctgcattgcttgccaagctaggcataaggcccttctcatatggnctgtggttctctctgtttatgataatggttcagtgttcagccctgaggttctgatctactgaggatga

SEQ ID NO: 293816 - DNA, 256 bp, Glycine max
  unsure (1)..(256): unsure at all n locations
gttcgtttttgttgatcctgtgaacttatggctgacggggtggttctgttggatacatgggccagcatgtttgggatgagggttaggattgcattagctgaaaagggtgttgantatgaatacaaggaagaaaatctcaggaacaagagtcctttgcttttgcaaatgaacccaattcacaagaaaattccagttctgatccataatggcaaaccaatttgtgaatctgcaattatagtgcagtacattgatgagg

SEQ ID NO: 293817 - DNA, 257 bp, Glycine max
  unsure (1)..(257): unsure at all n locations
gagaatatgaagttgtttgttttctttgttgctgcagtagttttggtagcatggccatgccatggcggcaggctaccaaaggttccctctccgaatgaaaactggctatggtgagcgttcttcggaggtaaaatgcgcaagttttaggcttgctgtggaagcacacaacatccgagcnnttaaaaccattcctgaagagtgcgttgaaccaacaaaggactacattaatggcgaacaatttagatcagactctaaaa

SEQ ID NO: 293818 - DNA, 255 bp, Glycine max
  unsure (1)..(255): unsure at all n locations
agcgctacagcttttcaaatggagtgcacagattttgggtatactccacggacaagcctcatatgcaaggcagcaatacgaagccacgaactganattcgnatcgccggatangattatacatccggtgtgtggcaatttcaagggtttttttacgtgcctagtggcacaagcggggtgtgcatccagcaagtgtttggtggagtaacttctgccacaacctcgcagactagggtctatggtggttctctcactc

SEQ ID NO: 293819 - DNA, 255 bp, Glycine max
  unsure (1)..(255): unsure at all n locations
cgttgccatagagctgccactgaaatacggtccattcattgagtcagtgaacaagagagggctgaacctctctgaggtggtgtgttccacattcacaatgggngngtnggagaaaccaaggacagaaggacagtgagagtggaatgcttcatgaaagaaagcagccccaatatctgggtgaggcctatcagtggactcacaatggtggttgaccttgaactcatgaagatcgttcagtatcacgacggtggcatt

SEQ ID NO: 293820 - DNA, 255 bp, Glycine max
  unsure (1)..(255): unsure at all n locations
ggagcgttcgcgtttgtnctgcttttcctatcggcctcagcagacgacgtcgttgtgctctctgaagataactnccgagaaggaagttggtcaggacagaggagctctcgttgagttctatgctccttggtgtggacactgcaaaaagcttgctccagaatatgaaaagcttggtagcagcttcaagaaagccaaatctgttttaatcggcaaggttgactgtgatgagcacaagagtttgtgcagcaaatatgg

SEQ ID NO: 293821 - DNA, 255 bp, Glycine max
  unsure (1)..(255): unsure at all n locations
ccagagcaagtngcaccattactgtgtgcgggtgtgacagtgtacagtccactggtacactttgggctgaaagagagtgggctgagaggtggaatattggggcttggaggagtgggacacatgggggtgaagatagcaaaggcactgggtcaccatgtgactgtgataagctcttctgacaagaaganacaggaggcacttgagcaccttggagctgatcaatatcttgttagctctgatgtcactgccatgcag

SEQ ID NO: 293822 - DNA, 261 bp, Glycine max
  unsure (1)..(261): unsure at all n locations
ccangtagtncatnggcttggctnaaatattcangccatgcatgtgtaagnatgaacnaattcanactgtgnaactgcgaatggcncattaaattcagttatagtgtgtntgatggtatctactaactncggatnnccgtagtaattctagagcnaatacgtgcaacaancnccgncttctggaagggatncatttattagatanaaggtcnacanaggctntgccgnttgctttgtatgantcatnataactcgtnggat

SEQ ID NO: 293823 - DNA, 259 bp, Glycine max
gaacaatggtgaaggctgtggccgttcttggcagcagtgagggtgtcactggaactattcacttcgttcaggagggaagtggtccaaccaccgtaactggatctcttgctggtcttaagcctggtctccatggtttccatgtccatgccttgggggacactaccaatggttgcctctcaactggatcacatttcaatcctaataacaaggagcatggtgcccctgaggatgagaatcgtcatgctggtgatcttgggaa

SEQ ID NO: 293824 - DNA, 253 bp, Glycine max
  unsure (1)..(253): unsure at all n locations
ctgaattttccctttcaaatctcttcctttgaagttttcgtagtnctctgcatcatggagatggaacgcgtcttcgagtttcctcacactcacatggatcggcgcccgagaaagagagcgagattgggctgggacatccctgaggtccccaagataagatacatagcaaaatgggtgaaggaacttttgggcaggtcttagaatgctgggatagagaaaggaaggaaatggttgccgtaaaaattgtccgtgg

SEQ ID NO: 293825 - DNA, 251 bp, Glycine max
ccatgcatgtgtaagtatgaactaattcagactgtgaaactgcgaatggctcattaaatcagttatagtttgtttgatggtatctactactcggataaccgtagtaattctagagctaatacgtgcaacaaaccccgacttctggaagggatgcatttattagataaaaggtcaacacaggctctgcctgttgctttgatgattcatgataactcgtcggatcgcacggcctttgtgccggcgacgctcat

SEQ ID NO: 293826 - DNA, 223 bp, Glycine max
  unsure (1)..(223): unsure at all n locations
tgattacttaaaggaccaagattcagccctcgcttgtaaaagagcgacgggacatgaagagngaatatgaagaattcaaagtacggatcaatgcccttgtagccaaagctcagaagatgccagaggaaggttggacaatgcaggatggaactccttggcctggaaataatcctagggatcatccgggaatgattcagacgtttttaggtcatagtggggggct

SEQ ID NO: 293827 - DNA, 252 bp, Glycine max
tcctttctctgctctttgtcttctctgacacatttggggccttgttgagtgtgtttttgcaagagggtatggcgaaggacgttgaggttgctgagcgtggctccttctctgggaaggactaccaggaccctccaccagcaccactcattgatgctgaggagctcacaaagtggtcctttacagggctcttattgctgagttcattgccactttgctcttcctctacattactgtgctcacagttatagggta

SEQ ID NO: 293828 - DNA, 221 bp, Glycine max
  unsure (1)..(221): unsure at all n locations
tnccaatggctgctattgttttcctccacattgcatcattggcctctctttttgttgcaacaagtgcaagaatccctggagtttacaccggtggcccctggcagagtgctcatgccacctttctacggtggcagtgatgcctctggaacaatgggtggtgcttgtgggtacggaaacctgtacagccaaggctacggagtgaacactgcggcgctgagcac

SEQ ID NO: 293829 - DNA, 253 bp, Glycine max
gtcttacccaactgtgagtgctgattaccagaaggccgttgagaaggcgaagaagaagctcagaggcttcatcgctgagaagagatgcgctcctctaatgctccgtttggcatggcactctgctggaacctttgacaagggcacgaagaccggtggacccttcggaaccatcaagcaccctgccgaactggctcacagcgctaacaacggtcttgacatcgctgttaggcttttggagccactcaaggcggag

SEQ ID NO: 293830 - DNA, 253 bp, Glycine max
ctcatatatcatggctacctccatggtgaagcttatgcttttctctgctctcatactcttgtccttgcaagcagttgtgtctgtaacaccactgcattttcaacatccactagaccctttaaccaaacaagagataagtcttgtccaaaccatagtccaaaacaagtacccaagctcaagtaacaggttgagcttccactacattggactctccgaacctgaaaaggatgccatcctcaaatgggatccatca

SEQ ID NO: 293831 - DNA, 250 bp, Glycine max
  unsure (1)..(250): unsure at all n locations
cagatctcaattgcatcgctgtccatggctaccatcgttagcatcaaggcccgccagatccttcgacagtcgtggcaatccaactgtcgaggtggatttgacttgctccgatggtacttttgccagagctgctgttccaagtggtgcatccactgggatttatgaggcccttgaattgagagatggaggatctgactaccttgganagggtntatcaaaggctgtngacaatgtgaacaccgtcattggc

SEQ ID NO: 293832 - DNA, 257 bp, Glycine max
gcatgatgccaagtgactcctccttcggtgtagcccacgacgccttcaacaccttcttcagcgaaaccggatccggcaagcacgtccctcgcgccgtcttcgtcgatctcgagcccaccgtcatcgacgaagtccgttgtggcacttaccgtcaactcttccaccccgaacaactcatctccggcaaggaagatgccgccaacaactttgccagaggccactacaccgttggcaaagagatcgtagatctgtgcttg

SEQ ID NO: 293833 - DNA, 258 bp, Glycine max
  unsure (1)..(258): unsure at all n locations
gaaagtgcnaaagccaccgtcttctcttctcagagcttggctttgcttatcgattctctctcctctcatactttctcattcaaggtttgtaaaagatggccgatgntgaggatattcaaccccntgtttgtgacaatggaactggaatggtcaaggctggatttgctggtgatgatgctcccagggctgtctttcccagtattnttggccgacctcgacacactggtgttatggttgggatgggtcaaaaggatgcct

SEQ ID NO: 293834 - DNA, 252 bp, Glycine max
gtcaaattggcctgaacagccagttaatgtaattattaagtggctgaaaaaaacagagcccttcttttgctgttgctgattttggttgtggggaagcactcattgctaaaagtgtgaagaatgaagtcttctctctagatcttgtctccaatgatccgaatgtaattgcttgcaacatggcaaatactccccttgactcctcatccgttgacgtcgccgtcttctgtctttcgttgatgggaaccaactacc

SEQ ID NO: 293835 - DNA, 252 bp, Glycine max
gcagattcaagaattagttgaagccattgttttgcccatgacccacaaggagcggttccaaaagttaggagttcgtcctcccaagggagtgctgttgtatggacctccagggactgggaaaacattgatggctcgtgcctgtgcagcacagacaaatgccacttttctgaaattggctggccctcaactggtccagatgttcattggagatggagcaaaacttgttcgtgacgcctttcaactagcaaaaga

SEQ ID NO: 293836 - DNA, 252 bp, Glycine max
  unsure (1)..(252): unsure at all n locations
cacagccaagggaacgggcttggcggaatcagcggggaaagaagaccctgttgagcttnactctagtccgactttgtgaaatgacttgagaggngtangntaagtgggagctggnancancnnaagtgaaataccactacttttaacgttattttacttattccgtgaatcggaaacggggcactgcncctnctttttggaacccaaagtcggcttcggccgntcgatccgggcggngacattttcaggtgg

SEQ ID NO: 293837 - DNA, 250 bp, Glycine max
  unsure (1)..(250): unsure at all n locations
ctagttcatatatttncngctgacaccgagaaggaaagcaggaaacaaacaaaaaggagcagatgggtagctcaggtttctcatggaaattggcggatcatccaaagcttccaaagggtaagactgtggctgttgtggtattggatggttggggagaggccacacccaatgagtacaactgcatccacaaggctgaaacaccctgcatggattcacttaaaaagggtgctcctgaacggtggagattggt

SEQ ID NO: 293838 - DNA, 252 bp, Glycine max
gggaagatgataaaaagagatgaaggacgaattgagaagtggattctgaggagagcctttgatgatgaagagcatccttatctgccaaagcacattttatacaggcagaaagaacaattcagtgatggagttggctatagttggattgatggccttaaggcccatgctgcaaaacatgtgactgaaaaaatgatgctaatgctggtaacatttacccccacaacaccccaaaaaccaaggaagctattacta

SEQ ID NO: 293839 - DNA, 253 bp, Glycine max
  unsure (1)..(253): unsure at all n locations
cttaagcttgctactgagtttccacactgcataccttangtcttccgaattcgaagttaatttgcaagatggctaaggaaaaggctcagatcaacattgtggtggttggtcatgtggaccctgaggaggcaaccaccattaacgagctgaagaagcctgttgtggagaaagaagctccagggcctgccatatgagggcatgcacgtacggcctccggaggggaaccagaaaattgtgnnnncaaaataatctg

SEQ ID NO: 293840 - DNA, 252 bp, Glycine max
cacaacagcagctgcagcagcaatggctcccaaacgaggtggaaaggctccggctcttgccgctaagaagaagcctgagaaggtcacgaatccgttgttcgagaagcgtccgaagcagttcggaatcggaggggcgttgcctccgaagagagacttgactaggttcgtgaagtggccaaagaatgttcaaattcagaggaagaagaggattctgaagcagaggttgaaggttcccccagctttgaaccagtt

SEQ ID NO: 293841 - DNA, 250 bp, Glycine max
ccatgtcgtttttgtcgttcacatggaacctttcccctcttcggccttcaaagttctcatttgaatatttgctactaccaccaagatctgcaccgacgaccgctccgcccgggctcgcgccctgggttttgcagcgaccgccgcgccctcctactcatcggggcttggtccttgccccgacggccgggtataggtcgcgcgctttagcgccatccattttcggggctagttgattcggcaggtgagttgt

SEQ ID NO: 293842 - DNA, 252 bp, Glycine max
cttgtccaagtgggtcatggtgatttgaaagataagccatggtggcaaaagatgcaaacttgtgaagagttgattgaagcctcggccaccctcatatggatcgcttcagcccttcatgcagctgttaactttggacagtatccatatggaggtttaatcttgaacaggccaaccattagcaggagattcatgcctgagaaagggtctgctgagtatgctgctttggctaagaaccctgagaaggagtttttg

SEQ ID NO: 293843 - DNA, 251 bp, Glycine max
  unsure (1)..(251): unsure at all n locations
gattccatgcacaagangcgggnccaccggcggcaagaagaaagcttggaggaagaagagaaagtannngcttgggangcagccagcaaacacaaagctatcaagcaacaagacggttaggaggattagggttcgcggtgggaacgtgaagtggcgcgctttgaggcttgatactgggaactactcttgggggagtgaggctgcaacccgcaagacaaggattcttgatgtggtgtacaatgcatccaaca

SEQ ID NO: 293844 - DNA, 251 bp, Glycine max
  unsure (1)..(251): unsure at all n locations
caaaaccctaactctctttcgcgctcgttctcnccgctcgctgcaaccatgaattgctccanntccggcgaagttccggaagatcccgtcgtntcccggaactccggtctcctcttcgagaagcgtttgattgagcgacacatctcggattatgggaagtgtccaattactggagaaccacttactatggatgacattgtaccaatcaagacaggcaagatagtgntacccagacctgttcaggcagctag

SEQ ID NO: 293845 - DNA, 253 bp, Glycine max
  unsure (1)..(253): unsure at all n locations
gaaggctacaattgaactgacacataattggggtactgaaagcgatccagagttcaaagggtaccacaatggcaattctgaacctcgtggctttggacacancggtgtaactgttgatgacacatacaaggcatgtgaaagatttcagaatctgggagttgngtttgttaagaaaccagaagatgggaaaatgaaaggtatagcatttattaaagatcctgatggatactggattgaaatcttgatcggaaaa

SEQ ID NO: 293846 - DNA, 204 bp, Glycine max
  unsure (1)..(204): unsure at all n locations
ggcagccgaagaagagaacgttcaagaagttcagtttcaggggcgtggatctcgatgcgcttctggacatgtccaccgatgaactcgtgaagannttcagtgctcgcgcacgtagaaggttccagagaggcctcaccagaaagcccatggccttgatcaagaagcttcgcaaagcgaaaagagaagctccaccaggtgagangc

SEQ ID NO: 293847 - DNA, 251 bp, Glycine max
  unsure (1)..(251): unsure at all n locations
tgtttttccctttcctctcctcaaaatttcttctgattcatttaatctttactcatcaatggctctgagactgaaccctatccccacccaaaccttctccctcccccaaatggccagtctcagatctcccaggttccgcatggcctccancctccgctccggttccaaagaggttgaaaatattaagaagccattcactcctcccagagaagtgcatgttcaagtaacccactctatgcctcctcagaaga

SEQ ID NO: 293848 - DNA, 247 bp, Glycine max
  unsure (1)..(247): unsure at all n locations
cttcactctagctttgcgtgtagggctccaacgctcggagcagctanttcgttgggtttgggaggccaatagggccaacccagttggaganaatgccactttttcacttggcactgatgggaaccttgtgttggcagatgctgatggcagaattgcatggcaaactaacactgccaacaagggtgttgtggccttcaggcttctttcaaatggtaacatggtcctgcntgatgcacaaggcgggttc

SEQ ID NO: 293849 - DNA, 246 bp, Glycine max
  unsure (1)..(246): unsure at all n locations
aaaagaggaagatgtttccttgggagctaacaaattctcagagaggcaaccgattggaactgcggctcagagccaagacgatggaaaggactacacagagccacccccggctccacttttcgagccctccgaactcacttcttggtccttctaccgagccggaatagccgagtttgtagccacttttctctttctctacataaccatcttaaccgtcatgggtgtcaatnggtccagctccaagtg

SEQ ID NO: 293850 - DNA, 249 bp, Glycine max
  unsure (1)..(249): unsure at all n locations
ctcaggtggaggattcagttcctggagaagagtatcaggaagctggattttaaccctggtgggatatgcaccattgttcaggttaatgacctcaggaattctcctggcccttctaagtgggagcttagacaggctaccaaacaggccctgcagctgcttcaggataactatcctgagtttgtagccaaacaggtgtttatcaatgtgccatggtggtacttggcagtgaacnggnngataagtcccttt

SEQ ID NO: 293851 - DNA, 249 bp, Glycine max
  unsure (1)..(249): unsure at all n locations
gnagncnagggcntgtgttgtcanaatccnaganagangtnatggcgaacatagacattcgaagggatcttgangcagcagcagccttatgntgggngcgttccgaagacgaagatagtntgtactttnncnnccngcttctcgatcctaaaaatgaccgaggagcttctganggcgggatgaacgttgctcgtttcaatntctctcatggnacccacnactatcancagganaccctcaacaatctca

SEQ ID NO: 293852 - DNA, 248 bp, Glycine max
ctactactcacactcactgcagatctcaatccatggctaccattgttagcatcaaggcccgccagatctttgacagtcgtggcaatccaaccgtcgaggtggatttgacatgctccgatggtacttttgctagagctgctgttccaagtggtgcatccactgggatttatgaggcccttgaattgagagatggaggatctgactaccttggaaagggtgtatcaaaggctgttgacaatgtgaacacc

SEQ ID NO: 293853 - DNA, 248 bp, Glycine max
  unsure (1)..(248): unsure at all n locations
gccccaatatctgggtgaggcctatcagtggactcacaatggtggttgaccttnaactcatgaagatcgttcagtatcacgacggtggcattataccagtaccaactgccgacaacactgaataccgcttttcacatcagaacccaccattcggtccaagacaacatagtctagcaacccatcaaccacagggtccaggcttccaaatcaacggacacnctattngttgggccaatggagttccatat

SEQ ID NO: 293854 - DNA, 247 bp, Glycine max
ctccgaaccctcgatcactctcacgcgctcctatattcgctcctccaccgtcgctctctcgaacaaccacaacaccatcttcatcacatggcaaacgcagcatctggtatggcagtccatgatgactgcaagttgaggtttttggagctgaaggcaaaaaggacacaccgtttcatagtttttaagattgaggagcagcagaagcaggtcattgtggagaagcttggtgagcctgcccagggctatg

SEQ ID NO: 293855 - DNA, 257 bp, Glycine max
agatgatccacgttcttttcctctttgctcttgtctcgttcacttcccatgcttctgtcaatgatttctgtgtagcagacctaaaaggtccagatagcccttcaggctatcagtgcaagccacctaacacagtcacagtggatgactttgtgttctctggctttgtagctggaaacaccacaaacactttcaatgctgcattaacctccgcatttgttactgattttccaggtgtgaatggtcttggtgtatctgtg

SEQ ID NO: 293856 - DNA, 256 bp, Glycine max
  unsure (1)..(256): unsure at all n locations
gagatctcatatatcatgggctacctccatggtgaagcttatgcttttctctgctctcatactcttgtccttgcaagcagttgtgtctgtaacaccactgcattttcaacatccactagaccctttaaccaaacaagagataagtcttgtccaaaccatagtccaaaacaagtacccaagctcaagtaacaggttgagcttccactacattggactcgnccgaacctgaaaaggatgccatcctcaaatgggaatc

SEQ ID NO: 293857 - DNA, 256 bp, Glycine max
ggaaattcaggaagtgtgacgggcaactttgcagcaaatccagggctcgaactcagcaaacacctcaggatatcaaacctgaagtcaacatgggtaccatgcagagatccttgcctatggatccttcatcaatttacgggcagggaggaatgcagtcaaagcctggaattgcaaatgcaggattgaatccgggagttggtagtctcacattgaaaggatggcctctaactggcattgatcaaattcgtcctggttt

SEQ ID NO: 293858 - DNA, 253 bp, Glycine max
atggcctcaaccaacgctctctcttcagcctccattctacgctctcccaaccgccagtctctgacccgaagagcgaaccataatggaagagtaaattaccggaaaccgaataaccgtttctccgtgaaagcctccgccaaagagattgcctttgaccagcattcccgctctgctatgcaggccggcattgacaagctcgccgacgctgttgggctcactcttgggcccagagggaggaatgttgtgttggatg

SEQ ID NO: 293859 - DNA, 252 bp, Glycine max
ctgaaattctcagttatgtcgtggcaagcgtatgtggatgatcacctactgtgtgaaatcgaaggtaaccacctcactcacgccgctatcatcggccaagacggaagcgtttgggctcagagcaccaacttccctcagttcaaacctgaggaaataactgccatcaataatgactttaatgagcctggatcacttgctccaactggattgtatatcggtggcaccaaatacatggtcatccagggtgagcct

SEQ ID NO: 293860 - DNA, 250 bp, Glycine max
agggccctgctaactggcaaagctcccagcactcttggatctatgagtaatacaaatgcctcaagttgatcttgaaattggccttaggttgatccagattatctacatgttttctgtttttgtccattgttggacttttgctaagagtttggtaccgtggtttgcatgtagagtctatttatgtcatttctgttgaaacatgctcacagtttgataaattaaatcccaaactagttttgcttttaaaaaa

SEQ ID NO: 293861 - DNA, 265 bp, Glycine max
  unsure (1)..(265): unsure at all n locations
ttgaaagtagcaaagatgtttcctttcgggcaaaagggtcaaaaganaaaggggactatggtggtnatggcagangaatgtgttttatatcaacagcatcaccagtgttgnagggatcgttgaccaaggcttangcntcataggcagtgcagttcgatgcacttacttttgcagccaccnaaatctccatccagtngattatttcnaccaaggctgntggttnttcaggaaaaattgggaagagggcnaatttnagaggaaagnt

SEQ ID NO: 293862 - DNA, 252 bp, Glycine max
  unsure (1)..(252): unsure at all n locations
aatatgaagttgtttgtnttctttgttgctgcagtagttttggtagcatggccatnccatggcgcaggctaccaaaggttccctctccgaatgaaaactggctatggtgagcgttcttcggaggtaaaatgcgcaagttttaggcttgctgtggaagcacacaacatccgagccnttaaaaccattcctgaagagtgcgttgaaccaacaaaggactacattaatggcgaacaatttagatcagactctaaa

SEQ ID NO: 293863 - DNA, 252 bp, Glycine max
  unsure (1)..(252): unsure at all n locations
agaaactgaatcgcttacgcacgcgttaacattaccactttcttacttacagcacagcacnnctgctaacctttcgtcttcaatttccctttggatttcattcattagatggattcgagttcggggcatcaagaattcgattatttgtttaagttgttgatgattggagactctggggttggcaagagtagtcttcttctcagtttcacctccgatgcttttgaagatctctcccccactatcggtgttgat

SEQ ID NO: 293864 - DNA, 252 bp, Glycine max
  unsure (1)..(252): unsure at all n locations
atacgtggtgttgttactgctgctcttttctcttttcttttctctttagttctctcttcccctnnnnnnnnnnnnnnnnnnnnnnnnngagcttgtttaagcttttcttccattaacatattatcacaatgtgtggtattcttgctgttcttggttgttctgatgactctcgagccaaaagggtccgcgtgcttgagctctctcgcagattgaagcaccgtggccctgactggagtgggctccatcaacatg

SEQ ID NO: 293865 - DNA, 253 bp, Glycine max
gttcgagcacccaaggcacgggtcactgggatttctccccaggaagcgtgctgctcgtcacaggggaaaagtgaaggcattccccaaggatgacccatccaaggcacccaagctcactgcattcttgggttacaaggctggtatgactcacattgttagagaggtcgagaagccaggatcaaagcttcacaagaaggaaacatgtgagcctgttacaattattgagacccctccaatggttattgttggtgtt

SEQ ID NO: 293866 - DNA, 251 bp, Glycine max
aaaaaatgatgcttaatgctggtaacatttacccccacaacaccccaaaaaccaaggaagcatattactacagaatgatctttgagaggttcttccctcagaactcagctaggctcactgttcctggaggagcaagtgttgcatgtagcacagccaaagctgttgagtgggatgctgcttggtctaacaaccttgatccctctggtagagcagcacttggagtgcacatttcagcctatgaaaaccagaac

SEQ ID NO: 293867 - DNA, 253 bp, Glycine max
gatcatcacttcacttcactaatacatcatggcagacgagacccagaacaagtatgagagctctgaggttgaggtccaggatcgtggtgtttttgactttctcggtaagaaaaaggatgaagaagacaagcctcatcctcaggaggaggtcatcgccaccgagtttcaaaaagtcactgtctcagaccaaggagagaacaagcacagcctcttagaaaagcttcaccgatctgacagcagctctagctcttca

SEQ ID NO: 293868 - DNA, 264 bp, Glycine max
  unsure (1)..(264): unsure at all n locations
cttgcgagtnaacacaagttacaacaatgggctttctttggtagaatnnggaatttgttacgacagacagcgagcaggcaggttagttcaaaattgcgttcgcccccttcattttttcaggctatacgctgtatgtcatctgccccaagcacaaaactgtttattggaggtgtttcatattctactgacgagcaaagcttgagggaagctttttcaaaatatggtgaagttgttgatgctcggataattatggatcgtgaaact

SEQ ID NO: 293869 - DNA, 255 bp, Glycine max
caaagtaagcacaatgagggagatattgcacgtgcaaggtgggcaatgcgggaaccaaatcggttccaagttctgggaagtgatatgcgacgagcatggcatcgaccccaccggaaagtacaccggcgacgaggcctccgatctccaactggagaggatcaacgtctactacaatgaagcctccggcggaaggtacgttccccgggccgtcctcatggatctcgagcccggcaccatggacagcatcagatccgg

SEQ ID NO: 293870 - DNA, 252 bp, Glycine max
ctcaagtccaacctacccctttttcttctcccaccaacttcaccgtcttcttcctcgatcatgtctcacttcaagggcaagtaccatgatgagcttattgccaatgctgcttacattggcactcctggaaagggtattcttgctgctgatgagtcaacagggacaattggcaagcgtttggccagcatcagtgtagagaatgttgaatccaacaggcgtgctcttagggagctgcttttcaccgctcccggt

SEQ ID NO: 293871 - DNA, 250 bp, Glycine max
agatcctctacacctctctttgccacactgatgtttacttctgggaagccaagggccaaactccattgtttcctcgtatatttggtcatgaagctggagggattgtggagagcgtaggtgagggtgtgactcatctcaaaccaggggaccatgccctcccagtgtttaccggggagtgtggagaatgccctcattgcaagtcagaggagagcaacatgtgtgatcttctcaggatcaacactgatagggg

SEQ ID NO: 293872 - DNA, 249 bp, Glycine max
gatgcagttcagaagcttgtgaagttcttccaaggctgtccagagcagcattttgtacacatattggagcctttcttgaaaatcatcacaaaatctgcaaggatcaataccacattggctgttaatggattaacaccgctgctcattgcaaggctagatcatcaggatgctatagctcgtcttaatttactcaggctaataaaggccgtttatgagcatcaccctcagcccaagaaattgattgtggag

SEQ ID NO: 293873 - DNA, 248 bp, Glycine max
atttttagcatacttctggtggtgttatgatagactaaaggaaaaaactgatgacaatattccaatgcctacctattttcgtttccttgctttacttgcctttaagatatttgcagcagagcaggtagatgttgctataatggaggtaggattaggtggaaaatacgatgcaacaaatgtggttcaggcacctattgtatgtggaataacttctcttgggtatgaccacatggagattcttgggaata

SEQ ID NO: 293874 - DNA, 251 bp, Glycine max
tggaatagcgttcgccctcttccagtgggtcctcgtctctaaggtcaagctctccgctgccagagacgcttcctccaacgccggcggggcaaaaatggctacaacgattacctcatcgaagaagaggaaggcctcaacgaccacaacgtcgtcctcaaatgcgccgaaatccaaaacgccatttccgaaggagcaacctctttccttttcactgagtataagtacgtgggaatcttcatggtggcttttgc

SEQ ID NO: 293875 - DNA, 252 bp, Glycine max
  unsure (1)..(252): unsure at all n locations
gaataccgcttttcacatcagaacccaccattcggtccaagacaacatagtctncccaacccatcaaccacagggtccaggcttccaaatcaacggacacantattagttgggccaactggaagttccatattggatttgatccacgtgccggaattgtaatatcactggcatccatttatgatttggagaagcacaaatctcgtagagtgttatacaaaggttacatttctgagctgtttgtgccatacca

SEQ ID NO: 293876 - DNA, 251 bp, Glycine max
  unsure (1)..(251): unsure at all n locations
ctctgctctttgtcttctctgacacatttggggccttgttgagtgtgtttttgcaanncnggtatggcgaaggacgttgaggttgctgagcgtggctccttctctgggaaggactaccaggaccctccaccagcaccactcattgatgctgaggagctcacaaagtggtccttttacagggctcttattgctgagttcattgccactttgctcttcctctacattactgtgctcacagttatagggtacaa

SEQ ID NO: 293877 - DNA, 251 bp, Glycine max
  unsure (1)..(251): unsure at all n locations
cttttccattcttcttttnctctctgtactcaaactcacttccccacttatttatacaatgtcggcttacaaagaccaggatacccgtcttcatggcatcaaaactaagattcgtgtcgtccccaatttccccaaatccggtattatgttccaagacattactactctattgcttgatcccaaagcatttaaggacacaatagatttgttcgttgagcggtacaagggcaaaaacatttctgttgttgcag

SEQ ID NO: 293878 - DNA, 251 bp, Glycine max
  unsure (1)..(251): unsure at all n locations
caaaaccgtgcatgctattagtattagaaacaacaaaaggcaantgcctgaaacttctcaagagtctgtttccatttccaaggcctcacctgaccagcatgtggagagtgatccagcccctccagccaaggcaaagatagtggggtggccaccaatcagatcttacaggaaacaaagcctgcaggagggtgatcagggggatgggatctatgtgaaagtgatcatggatggagcaccttacctcagaaaga

SEQ ID NO: 293879 - DNA, 240 bp, Glycine max
caaaatcctaccattctgatcgcattttctttgccaacaatacatatcttccaagcgagacaccggctccacttgtcaagtacagagaagaagaattgaagaatgtaagaggggatggaactggtgagcgcaaggaatgggataggatctatgattatgatgtctacaatgacttgggcgatccagataagggtgaaaagtatgcacgccccgttcttggaggttctgccttaccttacc

SEQ ID NO: 293880 - DNA, 250 bp, Glycine max
  unsure (1)..(250): unsure at all n locations
tgttttctttgttgctgcagtagttttggtagnatggccatgccatggcgcaggctaccaaaggttccctctccgaatgaaaactggctatggtgagcgttcttcggaggtaaaatgcgcaagttttaggcttgctgtggaagcacacaacatccgagcctttaaaaccattcctgaagagtgcgttgaaccaacaaaggactacattaatggcgaacaatttagatcagactctaaaacagttaaccaa

SEQ ID NO: 293881 - DNA, 242 bp, Glycine max
  unsure (1)..(242): unsure at all n locations
ggaaaataaagaaattagcgtcaaaatgttgggtgtgttcagcagctccatagtgttcgccgccggacgagctcgtggccgccggcgnccgtactccgtcgccgaagatgacggcggcggcgctgcggaagcggttcgaggagaagaacccctccgccgtgtcggtggaggtcggagagcatgtccagctcgcttatacccaccacaacgagtcgccgtttcagcccagatcctttgctgtt

SEQ ID NO: 293882 - DNA, 239 bp, Glycine max
cagaaatccgatggggtggtgcaaagcatgaggctggagaaaaagatgatagtacggaggatgcatccaagatcatcattcaaggctttccttgaagttgtgaaggcaaggagtttaccttggaaggaatatgaaatggatgctattcattccttgcagataatactgagaaatgcattcaaagaagataccgagagtttggatttaaacgcaaaagcaattaatacaagactaagtga

SEQ ID NO: 293883 - DNA, 258 bp, Glycine max
  unsure (1)..(258): unsure at all n locations
ggctacctccatggtgaagcttatgcttttctctgctctcatactcttgtccttgcaagcagttgtgtctgtaacaccactgcattttcaacatccactagaccctttaaccaaacaagagataagtcttgtccaaaccatagtccaaaacaagtacccaagctcaagtaacaggttgagcttccactacagtggactcgncgaacctgaaaaggatgccatcctcaaatgggaatccatcaaaccaactgttataac

SEQ ID NO: 293884 - DNA, 253 bp, Glycine max
cttctattcactctgttacggtgcaacctagcagcctccaaatccaatggcttcagagaagaaactttcgaacccaatgagggagataaaagtgcagaagctcgtcctcaatatctctgttggcgagagtggagatcgtctcaccagagccgccaaggtgttggaacaacttagtggccaaaccccagtgttttccaaagcaaggtacactgttcgttcctttgggattagaagaaatgagaagattgcatgc

SEQ ID NO: 293885 - DNA, 249 bp, Glycine max
  unsure (1)..(249): unsure at all n locations
gttgcttggtgatgtccctttctgttctcttcactcttggtcttgcgagagaaagccatgccagagacgaagatttttggcatgctgtttggccaaacactcccattccaagttcattgcgagatcttctaaagcctggccctgcaagtgttgaaatcgatgatcaccctatgnaaattgaagaaacacagtacccgaaaaccttcttctatnaagaagaccttcatccaggcaaaacaatgnggtaca

SEQ ID NO: 293886 - DNA, 238 bp, Glycine max
  unsure (1)..(238): unsure at all n locations
cataaatccagctccaattcctaatcacctggttaatttcttcacatagagctatcnngatccaacgttaacatgaagaatgttttagtaaggtcagctgcgcgagctctgcttggcggcggtgggcggagtactaccgccagctctcaacggcggcgatcgtggaacagagacaccagcacggtggcggcgcgtttggaagcttccacttgcggaggatgtccactcttccagaggt

SEQ ID NO: 293887 - DNA, 249 bp, Glycine max
  unsure (1)..(249): unsure at all n locations
ggcgactcttgattccgacgtgcctatggttcccgccggcgagccctcgagcagcgccggtccttcttccaagaagcccaagcgcttcgagatcaagaagtgnaacgccgnccgctctctgggcttgggacatcgttgtcgataactgtgctatctgccggaaccacatcatggatctctgcatcgagtgccaagccaaccaggctagcgccactagcgaggagtgcactgtggcttggggagtttgta

SEQ ID NO: 293888 - DNA, 249 bp, Glycine max
gcaacttgtgagaaatggcttccaaggctgcacttctcttgtgtctcaatgttctctttttcactgtggttagttccacatatgtgccatgtaatccaccccccaaaactcccaaacacccacctgtcccaaagccaccatccccaaagcaagcaagctgccccaaagacactattaagttcggtgtgtgtgctgatgtgttaggtttgattaatgtgcaacttgggaagccaccaaagaccccatgct

SEQ ID NO: 293889 - DNA, 248 bp, Glycine max
ctcattctccttctgttcaaacactctctctcatggcatcagataagaagattaggatcggcatcaacgggtttggaaggattggccgtttggtggccagggttgcccttcaaaggaatgatgttgaacttgttgctgtcaacgatcctttcatcaccactgattacatgacatacatgttcaagtacgacaccgttcatggccagtggaagcattttgatgtgaaggtgaaggactctaagaccctt

SEQ ID NO: 293890 - DNA, 251 bp, Glycine max
  unsure (1)..(251): unsure at all n locations
cgaattcctattcccacacacatctcaaatncgnattaagggtttaacaaagcttttagcggacaatgccccgaagnnccatgaaggagaacaaattcgagagctactttggtcgcaagatcgctattgacgctagcatgagcatttaccagttccttattgtcgtgggaagaagtggaactgaaatgctcactaatgaggctggtgaagttaccagtcatttgcaagggatgttttcgcggacaatcaga

SEQ ID NO: 293891 - DNA, 272 bp, Glycine max
  unsure (1)..(272): unsure at all n locations
gtataaggtggccaataagctgaaatctgaaggtcacaatgtcacaactcnagacatggctgcttgtggtgtcaatccaaagcaaaggcaagaggttcattcagtttcagagtacaatgagcctttgatgacattcatggcctctcttcctccagaggaaaaggtgattctgttggtcacagtcttggtgggctatcagcatctattgccatggaaaattaccctgagaaaatctctgttgcagttttcatcactgccactgttgtctctca

SEQ ID NO: 293892 - DNA, 274 bp, Glycine max
  unsure (1)..(274): unsure at all n locations
ggcaatgcatttgacaacagaatagatgccaaaaggaccctaacgaganattaaacttcttcggcacatggaacatgancaatgtgatagcccttaaagacattattcgaccaccacaaaggtataacttcaatgacgtgtacattgtttatgagttaatggatactgatctgcatcaaataattcaatccaatcaacaatgactgatgatcattgtcggtattttctgtatcagttgttacgaggactcaaatatgtacactcagcaaatgtt

SEQ ID NO: 293893 - DNA, 273 bp, Glycine max
  unsure (1)..(273): unsure at all n locations
gcagttccctacctctcctttcaagatgcagatcttcgtcaagaccctcaccggaaagaccatcacccttgaggnggaaagctctgacaccatcgacaacgtcaaggccaagatccaggacaaggaaggnattcccccggatcagcaacgtctcatcttcgccggaaagcagctcgaggacggccgtaccctcgccgactacaacatccagaaggagtcaacccttcaccttgtcttcgtctccgtggtggcatgcagatcttcgtcaagatc

SEQ ID NO: 293894 - DNA, 271 bp, Glycine max
  unsure (1)..(271): unsure at all n locations
gctaaggcttggactgcctggnnacgtaggaggcactggcactgaagaagtgctcatcaggaagagaggtttctnctgagactgaaactgaaactgaggaggatgagtctgctaccactgtggatttnatgcttaatctntcttctaaggaannnnnnnnnnnnnnnnnnnnnnnngataagcacaagactttgcctaaggagaagactcttctgcctgcagatccngctaagcctccagccaaggcacaggtggtaggttggccacctgt

SEQ ID NO: 293895 - DNA, 185 bp, Glycine max
  unsure (1)..(185): unsure at all n locations
gttccttcacctctcaacaatctagcttgctncctatctatctatatgtaataagatgcgttcaaataggggcactagcttcactttatgttgtttcagctgtgtgtcaacaagtcatgtaagagacttcactatgttgttttctctttcgtggctttaataaattatgcgcccttgttccatac

SEQ ID NO: 293896 - DNA, 252 bp, Glycine max
  unsure (1)..(252): unsure at all n locations
ggcagacgccggtgcctccaaaacctaccctcagcaagccngtaccattcgcaanaaccggctacatcgtcatcaaaggacgcccctgcaaggttgtngaagtnncgacttccaaaactggnaagcncggtnncgccaagtnccactttnttngnattgatattttcactgccaaganacttgaggatattgtgccctcttctcacaactgtgatgttcctcatgtgaatcgtactgattaccagctcattg

SEQ ID NO: 293897 - DNA, 269 bp, Glycine max
ggcggtacccttgctctccaagaggatcgtgaagaagcgcgtcaagaagtttatacgcccccagagtgatcgcaagatctccgtcaagccaagctggcgcagacccaagggtattgattctcgtgtcaggagaaagttcaaaggatgcactttgatgcccaacattggttatggctcagacaagaaaacccgccattatctaccaaatggtttcaagaaatttgtcgtgcacaatgtgaaagacctggaacttctcatgatgcataaca

SEQ ID NO: 293898 - DNA, 249 bp, Glycine max
  unsure (1)..(249): unsure at all n locations
agcgaccgnggtgctattctcgtgccacgcaggattcggtcgaanctgcaaacggcgctggaanccaccgttttggaggtggacgacgtgtcgtaccagcacgcgggccacgccgccgtgaagggtagttccgacaaagaaacccacttcaacctcaacatcgtctcccccaagttcgagggccagagccttgtcaaacgacaccgtctcatctacgacctcctcgccgacgagctccagagcggcctc

SEQ ID NO: 293899 - DNA, 256 bp, Glycine max
  unsure (1)..(256): unsure at all n locations
cgcaaacgcaaataataaaaaacaaggttttagccatggcatcgaagcggatctncgaaggaactcaaggatctccaaaaggatcctcctacctcatgcagcgccggtcctgttgctgaagacatgtttcactggcaagcaacaattatgggtcctccagacagtccttatgctggaggtgttttcctagtcactattcatttccctccagattatccctttaagccacccaaggttgcattcaggacgaaggtat

SEQ ID NO: 293900 - DNA, 269 bp, Glycine max
  unsure (1)..(269): unsure at all n locations
ctgtgttcgatccgttgagagaattcgcaaaggacagcgtgaggctcgtgaagcgctgccacaaacccgntcgcaaagaattctccaaggttgccgtgcgtaccgcaattggtttcgttgtgatgggattcgtgggtttcttcgtgaagcttattttcattccaattancaacatcatcgtcggatctggttaggatgaagggtactacaatcgcctcaggaattcaggttgtcaagcaaaagtaggcagaaagagttcccacatcaat

SEQ ID NO: 293901 - DNA, 264 bp, Glycine max
ggcgcaggctaccaaaggttccctctccgaatgaaaactggctatggtgagcgttcttcggaggtaaaatgcgcaagttttaggcttgctgtggaagcacacaacatccgagcgccttaaaaccattcctgaagagtgcgttgaaccaacaaaggactacattaatggcgaacaatttagatcagactctaaaacagttaaccaacaagctttcttttatgctagtgaacgcgaagtccatcacaacgacatatttatattcgg

SEQ ID NO: 293902 - DNA, 261 bp, Glycine max
  unsure (1)..(261): unsure at all n locations
tgcggctagggttttagcgcanttcttctagatttaaggaagatgggtaaggaaaaggttcacatcagtattgtggtcatnggccatgtcgactctgggaaatccactaccactggtcacctgatttacaagcttggaggcattgacaagcgtgttattgagaggtttgagaaggaagcngctganatgaacaagaggtctttcaagtatgcctgggtgctggacaaacttaaggctgagcgtnaaagaggaatcaccatt

SEQ ID NO: 293903 - DNA, 265 bp, Glycine max
agccaacctcaaataacccttgttatctctctttcattctcacttgtactcatctctttttcacaactttttttgtaccttctgatctaatggcagttccagtgattgatttttcaaagctgaatggtgaagaaagaaccaaaactatggcacagattgctaatgggtgtgaagagtggggattttttcagttgatcaaccatggtattccagaggaactccttgagagggtgaagaaggttgcctctgagttctataagctgga

SEQ ID NO: 293904 - DNA, 268 bp, Glycine max
  unsure (1)..(268): unsure at all n locations
gagaaagagagaattcgtaaaccctaatttcggaaagatcggcgatgactgcctccaaggatcgcgagaacttcgtctacatcgccaaactcgccgagcaggccgancgttacgaagagatggtggaatcaatgaagacgttgcgaatctcgacgttgaactgacggtggaggagcggaatttgctttctgttgggtacaagaatgtgattggtgctcgcaganggtcctggaggatcctgtcttccattgagcagaaggaagaaaca

SEQ ID NO: 293905 - DNA, 264 bp, Glycine max
  unsure (1)..(264): unsure at all n locations
cgccgaccgaccctgatcttctgtgaagggttcgagtgagagcatacctgttcgggacccgaaagatggtgaactatgcctgagcggggcgaagcagaggaaactctggtggaggcccgcagcgatactgacgtgaaatcgttcgtctgacttgggtataggggcgaaagactaatcgaaccgtctagtagctggttccctccgaagnttccctcaggatagnnggaancccgcgggcgagttctatcggtaaagcaatgatta

SEQ ID NO: 293906 - DNA, 266 bp, Glycine max
  unsure (1)..(266): unsure at all n locations
atggctcccaagggtttaanctttctggctgtgttaatatgcgtttcagcactgtcactgantccttctgttgcgggggaagggcaaaataatggccttgttatgaacttctacaaggaatcatgccctcaggctgaagacatcatcacagaacaagtcaagcttctctanaancgccacaagaacactgctttctcctggctcaggaacatcttccatgactgtgctgttcagagttgtgatgcttcactgttgctggactcnac

SEQ ID NO: 293907 - DNA, 265 bp, Glycine max
  unsure (1)..(265): unsure at all n locations
gagagttgagaagtactgggatctcttgagtccaaaaatcacatcaaacacattgaggaatattatggatatgaaagcaaacatgggttcatttgcagctgctcttagagacaagaaagtttgggtaatgaatgtgtacctcaagatggaccaaacacacttaagctcatatatgacagaggccttataggaactactcatgactggtgtgaagcatnttcaacatacccccggacatacgatttacttcatgcatggactgtct

SEQ ID NO: 293908 - DNA, 269 bp, Glycine max
  unsure (1)..(269): unsure at all n locations
tttggggaagaggtcgagtttcacagcagcaatggngtacgtcaaggcttcagaaatcaaaagcctactttcaaganntattcaagtcaagctcaagagaagangngagggaaaaaccgattaccgngccaggattcggttgantaatcaggacaagaacaaatataacactccgaaataccgatttgttgttcgctttagcaacaaggacattgttgcacaaataatatctgctagcattgctggcgatattgttcttgctgcagcat

SEQ ID NO: 293909 - DNA, 235 bp, Glycine max
  unsure (1)..(235): unsure at all n locations
gttgtcgcgcacacattccttcattccgcagcaacaaacanaactcttntaccttaaacaacaatggccgatgccgaggatattcaacccctcgtttgcgataatggaccggaatggtcaaggctggttttnctggagatgatgcaccgagggctgtgttccctagcattgtggggcgtccacgtcacactggggtgatggttgggatggggcagaaggatgcgtatgttgggga

SEQ ID NO: 293910 - DNA, 263 bp, Glycine max
  unsure (1)..(263): unsure at all n locations
ttcagggcattgatattagagaaatgcttgcnggtgcatcattgatggatgaggctaatagaagtactgtgttaaggaataaccctgcagctntgctggcttangnaaggtattgggctacagatggtgtaggaccaagganatggttattcttccgtacaaggacagcctngtattattcagtagatacntgcagcagctggtcatggaatctctaggcaaggagtttgacttggatggtaatcgggttaatcaaggaatag

SEQ ID NO: 293911 - DNA, 269 bp, Glycine max
  unsure (1)..(269): unsure at all n locations
cttcttctattacaacaacgtcnggncaagaccatgaccatggccanggccacgatcctgctgcctgttcanggtcttcgcggtttcatnggccctagacatgtcgataatctcgtacgacaacgcccacgccgccactcgcgcaggagaaggtatgctgatgtccatgtacgagcagtggctagtaaagcacggcaaggtgtacaacgcgctcggngagaaggagaagaggttccagatcttcaaggacaacctgcggttcatcgacg

SEQ ID NO: 293912 - DNA, 268 bp, Glycine max
  unsure (1)..(268): unsure at all n locations
ctttcacttcacttgtggtttttcactctctctgtctctcaccacnccacactgaggagggagatagtggaaggaacactcaaatgactcaaccagccatggctaccttctccaaggaacgcgagaactttgtctatgttgccaagttagctgaacaagctgaacgctatgatgaaatggtggatgccatgaagaaggtggcgaactgggacgttgaattgagtgtggaagagaggaacctgttctctgttgggtacaagaatgtggt

SEQ ID NO: 293913 - DNA, 268 bp, Glycine max
  unsure (1)..(268): unsure at all n locations
cgagatcccctttttctcctaagaaaagccatggctaagggtcccggtctctactctgacatcggcaagaaagccagggatctgctgttcaaggactaccacagtgaccagaagttcaccatcaccacctactcaccactggagttgctataacagcatcaggaaccaggaaaagtgaactntttgtggctgatgtcaacacccagttgaagaacaaaaacatcactactgatatcaaagttgatacagattctaatctcttcacaac

SEQ ID NO: 293914 - DNA, 267 bp, Glycine max
  unsure (1)..(267): unsure at all n locations
tccaatccatggccaagggagagaaaaaacctgcagagaagaagcccgcggcggagaaggctccggcggagaaaacaaaagccgagaagaagatcccgaaggacgcagcctccggcgnnnnnnnnnnnnnnnnnnnnnnnnnnagcgtggagacgtacaagatctacatcttcaaggtgctgaagcaggttcaccctgacatcgggatctccagcaagggccatggggatcatgaacagcttcatcaacganatcttcgagnnagcc

SEQ ID NO: 293915 - DNA, 263 bp, Glycine max
  unsure (1)..(263): unsure at all n locations
acttggcaggctttcatcttccttcaacaagcctttacgtcctctcttcaatgctggctcagtttactacaagtcctctttgcctgctgaagctgcgtangacaatgagaaaagctgtgatacggaattgaatgtccacttgaggttgttgatcctgagattgctgatataattgagcttgaaaaagctagacaatggaagggactggaactgataccctccgagaatttcacttctgtctctgtaatgcaagctattggctc

SEQ ID NO: 293916 - DNA, 196 bp, Glycine max
  unsure (1)..(196): unsure at all n locations
gagcttgtttaagcttttcttccattaacatattatcacaatgtgtggtattcttgctgttcttggtgttctgatgactctcgagccaaaagggtcnncgtgcttgagctctctcgcagattgaagcaccgtggccctgactggagtgggctccatcaacatggtgactgctttttggcacatcaacggttagcca

SEQ ID NO: 293917 - DNA, 259 bp, Glycine max
gaaaaccggaaacaatgcctatctcaaccttatccccctccttgtcggcaatgtgggattgattttcaccaagggtgacctgaaggaggtcagtgaggaggttgctaagtacaaggttggagctcctgctctgttggtttggttgctccaattgatgtcgttgttcctcctggcaacacagggctcgatccctctcagacctctttcttccaggtgcttaacattcctaccaagattaacaagggtactgtggaaatca

SEQ ID NO: 293918 - DNA, 277 bp, Glycine max
  unsure (1)..(277): unsure at all n locations
tgtacgtcaaggctcagaaatcaaaagcctacttcaagagatatcaagtcaagttcaagagaagaagagagggaaaaaccgattaccgtgccaggattcggttgattaatcaggacaagaacaaatataacactccgaaataccgatttgttgttcgctttagcaacaaggacattgttgcccaattaatatcgggctagcttgctggggaatttnttcttggnggngannttccccntgggtnccanatttttntttnaagggggtccaaaatttt

SEQ ID NO: 293919 - DNA, 272 bp, Glycine max
gcggcatttaccttgacacttctgtgttacaagctgactacagaacttttgttgagattgtcttccaaaacaacgagaaaatcgttcagagctaccatcttgatggctactctttctttgtcgttggtatggacgggggacagtggacacctgctagcaggaaccagtacaatctccgagatgcagttgcacgttgcaccacacaggtataccccttttcatggactgctatttatattgcccttgacaatgtgggaatgtggaattgaggt

SEQ ID NO: 293920 - DNA, 271 bp, Glycine max
  unsure (1)..(271): unsure at all n locations
cgggactgtaactagccgcagcacgaggagcagcctcaggaggagaaggatgtctcacaggangttcgagcacccaaggcacggttcactgggatttcttcccaggaagcgtgctgctcgtcacaggggaaaagtgcaaggcattccccaaggatgacccatccaaggcacccaagctcactgcattcttgggttacaaggccggtatgactcacattgttagagaggtcgagaagccaggatcaaagcttcacaagaaggaaacttgtga

SEQ ID NO: 293921 - DNA, 269 bp, Glycine max
  unsure (1)..(269): unsure at all n locations
aaaatgaaggtccttgttttcttcgttgctacaattttngtagcatggcaatgccatgcgtacgatatgttccctctccgaatgaacactggctatggtgcccgtactccggaggtgaaatgcgcaagttngaggcttgctgtggaagcacacaacatctttggctttgagaccattcctgaagagtgcgttgaagcaacaaaggaatacatccatggcgaacaatatagatcagactccaaaacagttaaccaacaagcttactttta

SEQ ID NO: 293922 - DNA, 262 bp, Glycine max
  unsure (1)..(262): unsure at all n locations
agcacccggtggcgatcaaaacgatgagggcacgaggtgggccgttttaattgccggttccaatggctactggaatnacaggcaccagtctgatgtttgccatgcgtatcaactactgaggaaaggtggtctcaaagaagaaaatattgttgtatttatgtatgatgacattgctttcaacgaagagaacccgcgacctggagtcattattaacagtccacatggaaatgatgtntacaagggagtccctaaggattacatt

SEQ ID NO: 293923 - DNA, 198 bp, Glycine max
cggcctcggaggggaaccagaaaattatgttaacaaaataatctggaaccctaatgtatcagtgtcatcatcagtgtgtagtttaagctagctttgctatggttacgttctttgagatgagagtcttgatgaacagtaccattctgatgtattgctttccttgaaagttaatgcatgcttcttatcttctgtctagct

SEQ ID NO: 293924 - DNA, 274 bp, Glycine max
gttcgagcacccaaggcacgggtcactgggatttctccccaggaagcgtgctgctcgtcacaggggaaaagtgaaggcattccccaaggatgacccatccaaggcacccaagctcactgcattcttgggttacaaggctggtatgactcacattgttagagaggtcgagaagccaggatcaaagcttcacaagaaggaaacatgtgagcctgttacaattattgagacccctccaatggttattgttggtgttgtgggttatgtgaaaactccc

SEQ ID NO: 293925 - DNA, 274 bp, Glycine max
  unsure (1)..(274): unsure at all n locations
cttaactcaacttctgctacccacttctcttcttccaagtcncaccacgcttttctctacagtcatgggcaaggtcaagatcggaatcaacggatttggaagaattggccgtttggttgccagagtcgctctgcaaagagacgatgtggagctcgttgccgttaacgaccctttcattaccaccgattacatgacatacntgtttaaatacgacagtgttcacggacactggaagcatcacgatgtcaccgttaaggacgagaagacccttctc

SEQ ID NO: 293926 - DNA, 268 bp, Glycine max
  unsure (1)..(268): unsure at all n locations
tggatancctctccgatgacgaggaagcagagcagttgtttgttgcttttgccgagtttgaggaaaggtgtaaggagactgagcgtgcaagggctatatataagtttgctcttgatcatattcccaagggaagggcagaagatttgtatcgtanggncgtcgcatttgagaagcagtatggtgacagggaagggattgaggatgctattgttgggaagagaaggtttcagtatgaggacgaatgaaaaagaatcctttaaattatgat

SEQ ID NO: 293927 - DNA, 267 bp, Glycine max
  unsure (1)..(267): unsure at all n locations
aacttcgccggagctctaacggcgaggcccaactccgatgagccgaaaccggcaccggtgccagctgttcccccgaagaaggtcatcatcnagagcgctgatatgatccccgacatgcagaaggaggccgttgatatcgccgtcgccgcgtttgagaagtacaatgtggcgaaagacgttgcggagagataaagaaggagttcgataagaggcatggccccacgtggcattgtatcgttggacgtaattttggctcatatgtgactc

SEQ ID NO: 293928 - DNA, 268 bp, Glycine max
  unsure (1)..(268): unsure at all n locations
cnnanntannntaaatannttggaantngtnnanncaaatnaagaacaaaccataccccaagtcacggttttgccgtggtgttcctgatcccaagatcaggatttacgatgttggtatgaagaagaagggtgttgatgagtttcctttctgtgtccatctggttagttgggagaaggaaaacgtttctagtgaggccctggaagctgctcgtattgcttgcaacaagtacatggccaantnnnntccgannnnnngctttccacttga

SEQ ID NO: 293929 - DNA, 270 bp, Glycine max
  unsure (1)..(270): unsure at all n locations
tttgattagctctaataaggttaaggaccagagagagaaagagaaataagaagaaaaacacaagatgggttattggaagtctaaggttcttcccaagatcaagaaggttttcgagaagaatagcaccaagaaagctgctgctgctgaggccaccangtcctttgatgagtcaaaggaggaatacaacaaagcctttgaagaaaagaagactgaacttcaaaccaaagttgttgaaatatatgaggctcatcaactgaaatcaagagtttg

SEQ ID NO: 293930 - DNA, 277 bp, Glycine max
  unsure (1)..(277): unsure at all n locations
gntncnaggagncaagncanagtagtacagattantancaatgggctaccanggnntacattgtttattntnctacgtatggacntgntgagaagctagctagagagatagaaaaaggggctgcttctgtggagggagtagaagcaaaactgtggcaggtacctgaaacattgcctgaagaagtccttgctaagttgggagcacctccaaagagtgatgttccaattattactcccaatgagcttcctgaggctgatggctttttgtttggttttcc

SEQ ID NO: 293931 - DNA, 264 bp, Glycine max
  unsure (1)..(264): unsure at all n locations
tctggtcgtgggaaaggtggcaagggtttgggaaagggncgtgccaagaggcacagaaaagttcttcgtgataacattcaaggtatcacgaaacctgcgattcgnaggttagcgagaagaggtggcgttaagaggatcagtggtttgntctatgaggaaaccagaggagttctgaagattttcttggagaacgtgattcgagatgctgtgacctacaccgagcacgctaggaggaagacggtgactgccatggatgtggtttat

SEQ ID NO: 293932 - DNA, 266 bp, Glycine max
gcttggtgatgtccctttctgttctcttcactcttggtcttgcgagagaaagccatgccagagacgaagatttttggcatgctgtttggccaaacactcccattccaagttcattgcgagatcttctaaagcctggccctgcaagtgttgaaatcgatgatcaccctatgcaaattgaagaaacacagtacccgaaaaccttcttctataaagaagaccttcatccaggcaaaacaatgaaagtacaattcagcaagcctcccttt

SEQ ID NO: 293933 - DNA, 265 bp, Glycine max
  unsure (1)..(265): unsure at all n locations
tgaaccccattttccattggcaattgnagtgatggcgagcgccatgttagttggcgtctatgaccaccgacgacgtcgtncagagactcagagcctctcgtatgctcgaaaacggcattcgnattctcaaggaagaggtgcagagatcgaatcgggaatgggaatcatacaaggagaagataaaaaataacgaggagaaggttaaacttcataagcagttgccctacctcgttgctaacattgttgagatattggatatgaatcc

SEQ ID NO: 293934 - DNA, 278 bp, Glycine max
  unsure (1)..(278): unsure at all n locations
tatnataccacttcatcaacctnacnctgacaacaatattgtaaaactcnnaatctagtttcatactttttttcttcttcttgaaatggctctccaggctgcttctcttgttcctgcttctttctcggttcttaaagagggaaagagtggtgtgtctctcaaggactccaccttgttcggtctttcattttcagaacctatcaaagctaacttcagctcttctgcattgaggtntcaagagggaattcgaacaaaagctctgtgctgtgagggccgaa

SEQ ID NO: 293935 - DNA, 273 bp, Glycine max
  unsure (1)..(273): unsure at all n locations
caaacactctctctctgtctctcgaaaattctcagtttgcagagaaaatctgaatcatgtcgtggcaagcgtatgtcgacgatcaccttctgtgtgacatcgaaggtaaccacctcactcacgctgctatcatcggccaagacggcagcgtttgggctcagagtaccgacttccctcagttcaaacctgaggagataatgccatcatgaatgactttaatgagcctgggatcnattgctcaaatnggntcncccctcggnggncccaattant

SEQ ID NO: 293936 - DNA, 244 bp, Glycine max
  unsure (1)..(244): unsure at all n locations
tgatagttcaaagaaggctgatccanaggcacaggccttgannactgcnaaggcagttaagtccggtgctaactttaagaagaagaccaagaagatccgaacatctgttaccttccatcgaccaangacttnganaaaggntaggaaccccaaatatccacgcattagtgctctcnncaggaacaagctnggatcantatnagatattgaagtttctcttnagactgagtctgcatgaagagat

SEQ ID NO: 293937 - DNA, 213 bp, Glycine max
  unsure (1)..(213): unsure at all n locations
gtttgtttntctttgttgctgcagtagttttngtagcatggccatgccatggcgcaggctaccaaaggttccctctccgaatgnnaactggctatggtgagcananncngaggtaaaatgcgcaagttttaggcttgctgtggaagcacacaacatacnanaaatcaaaannanncctgaanantgngnnnaancaanaaangactacatnaa

SEQ ID NO: 293938 - DNA, 264 bp, Glycine max
  unsure (1)..(264): unsure at all n locations
catgtctatcgttttaaccaacaattagatctccttcgcattggccaagaccttgagttgtttgtcaagactatgccaggtttaagtgcttacgctgagaatccacaagangctgcagagcnctcttattccantnnnggagngagaanaagcngctgtncctcaggagtntcaccccaggacgccagtnaaacttggagcaactgcaggtttaaggcaattggaaggggatgcttctgataggatattgcaggcggtcagtga

SEQ ID NO: 293939 - DNA, 268 bp, Glycine max
gagacaagacagagtagtacagattactaccaatggctaccaaggtttacattgtttattattctacgtatggacatgttgagaagctagctagagagatagaaaaaggggctgcttctgtggagggagtagaagcaaaactgtggcaggtacctgaaacattgcctgaagaagtccttgctaagttgggagcacctccaaagagtgatgttccaattattactcccaatgagcttcctgaggctgatggctttttgtttggttttcc

SEQ ID NO: 293940 - DNA, 264 bp, Glycine max
  unsure (1)..(264): unsure at all n locations
tcctgctaaagaaagcaatgaatttgtggacaaccttattaaagatattgatacattgggtatcaaatatgaacaaattacatatacgtcagattacttccctgagttgatggagatggctgaaaaattaattcgccagggtaaagcatatgttgatgacacaccacgtgaacaaatgcnaaaagagagaatggatggcatagattctaaatgcagaaataatagtgtagaggagaatctaaaattgtggaaggnaatgattgc

SEQ ID NO: 293941 - DNA, 276 bp, Glycine max
gctctttgaagaaagaagggtctttgcttgattttggagatgtctctgctctcagatctcatcaaccttaacctctccgataccaccgagaaggtgatcgcagagtacatatggatcggtggatcaggaatggacctgaggagcaaagcaaggactctcccaggaccagttagcgacccttcagagcttcccaagtggaactatgatggttccagcacaggtcaagctcctggtgaagacagtgaagtgattttatacccacaagccatttcaggg

SEQ ID NO: 293942 - DNA, 277 bp, Glycine max
gccacttctgaatctattgaatcaacaatcatgtcggacgaagagcaccatttcgagtccaaggccgacgccggagcctccaaaacctaccctcagcaagccggtaccatccgcaagaacggctacatcgtcatcaaaggccgcccctggcaaggttgtggaagtttcgacttccaaaactggaaagcacggtcacgctaagtgtcactttgttggaattgatattttcactgccaagaaacttgaggatattgtgccctcttctcacaactgtgat

SEQ ID NO: 293943 - DNA, 275 bp, Glycine max
  unsure (1)..(275): unsure at all n locations
gcagccccaatatctgggtgaggcctatcagtggactcacaatggtggttgaccttgaacttcatgaagatcgttcagtatcacgacggtggcattataccagtaccaactgccgacaacactgaataccgcttttcacatcagaacccaccattcggtccaagacaacatagtctagcngcccatcaaccacagggtccaggcttccaaatcaacggacacagtattagttgggccaactggaagttccatattggatttgatccacgtgccgg

SEQ ID NO: 293944 - DNA, 286 bp, Glycine max
  unsure (1)..(286): unsure at all n locations
tcgtgaggagaatatgaagttgtttgttttctttgttgctgcagtagttttggtagcatggccatgccatggcgcaggctaccaaaggttccctctccgaatgaaaactggctatggtgagcgttcttcggaggtaaaatgcgcaagttttaggcttgctgtggaagcacacaacatccgagcctttaaaaccnttcctgaagagtgcgttgaaccaacaaaggactacattaatggcgaacaatttagatcagactctaaaacagttaaccaacaagctttcttt

SEQ ID NO: 293945 - DNA, 288 bp, Glycine max
  unsure (1)..(288): unsure at all n locations
atggcttcaagtcaggaggaggtgacccttttgggagctactggaagcccatttgtgtgcagggttcatattgccctnaagttgaagggagttcaatacaaatatgtcgaagaaaatttnaggaacaagagtgaactgcttctcaaatccaacccagttcacaagaaggttccagtgtttattcacaatgagaagcccatagcagagtctcttgtgattgttgaatacattgatgagacatggaagaacaaccccatcttgccttctgatccttaccaaagagccttg

SEQ ID NO: 293946 - DNA, 272 bp, Glycine max
  unsure (1)..(272): unsure at all n locations
tccacaacacttcttcatccatgacgcttggttcttcaggatccagtgtcgtggttccaaggaacttcagattgctggaggagcttgagaagggagaaaaaggaataggagatggcacagttagttatggaatgnntgatggtgatgacatttacatgcgctcttggactggaaccattattggtccctataatactgtacatgaaggaagaatttatcaattgaagctgttttgtgataaagactaccctgaaaagcccccgagcgtccgg

SEQ ID NO: 293947 - DNA, 273 bp, Glycine max
  unsure (1)..(273): unsure at all n locations
ctcttcttccaagtccaancacgcttttctctacagtcatgggcaaggtcaagatcggaatcaacggatttggaagaattggccgtttggttgccagantcgctctgcaaagagacgatgtggagctcgttgccgttaacgaccctnncattaccaccgattacatgacatacatgtttaaatacgacagtgttcacggacactggaagcatcacgatgtcaccgttaaggacgagaagacccttctcttcggtgacaagccagtcactgttt

SEQ ID NO: 293948 - DNA, 269 bp, Glycine max
  unsure (1)..(269): unsure at all n locations
cgaagagaaggggcaaaagagaaacgnagcgcttatcgaacnacgnacggaagcactgagttnactcggagggagtggaaagtgttgttgcgtaatgtctggtggtatcgctcgtggacgcctcaccgaggagcgcaagtcgtggcggaagaaccatccccatggttttgttgcgaaccggagacgctgcccgatggaaccgtgaatttgatggtgtggcattgcactattcccgggaagactgggactgattgggagggtggctactt

SEQ ID NO: 293949 - DNA, 286 bp, Glycine max
  unsure (1)..(286): unsure at all n locations
ggtgctatctgtggtactggattggccaaggggttccaaaaagcatactacaacaggtatggaggtggtgccaactctgttggctgatgggctacaacaatggtactgctttgggtgntganattattggnaccttcgttcttgtctacactgtcttctctgccactgaccctaagaggnacgctanggattcccatgttccgtactggcgccacttcctatggatttgccgtgttcatggttcatttggctacaatcccaattactggtactggtnttaacccag

SEQ ID NO: 293950 - DNA, 141 bp, Glycine max
  unsure (1)..(141): unsure at all n locations
gtatttccctacctctccctttcaagatgcagatcttcgtcaagancctcaccggcaagaccatcacccttgaggtggaaagctctgacaccatcgacaacgtcaagggcaagttcaggacaaggaagggattccccccgg

SEQ ID NO: 293951 - DNA, 286 bp, Glycine max
  unsure (1)..(286): unsure at all n locations
gggtccgaagttggagatagtgattctggttctgttctgttcttctttctactcacaacaacatcagaatcagaaacaacaatggccaacactaacttggaagatgttccctctctggatctcatgactgagctccttcgtcgtctcaagtgctcttccanacctgacaagcgtcttattctcattggcccactggatctggaaaaggcacccagtcaccaatcataaaagatgagtactgttatgccattagctactggtgatatgtaagagcagctgtagcagc

SEQ ID NO: 293952 - DNA, 289 bp, Glycine max
  unsure (1)..(289): unsure at all n locations
tttctcctcgttgttcttcgctttcctgttttcaatttcgattctttcgttaatttaataagatgtttggggaggggcaccgaagaagagcgataatacgaggtactacgaaatcctcggcgtctccaagaacgcttcgcaggatgatctgaaganggcttacaaganagccgccattaagaatcaccccgacaagggcggtgatcccgagaagtttaaagagctggcgcaagcttatgagggntctgagtgcccctgagaagcgtgananatannancatgngggaaa

SEQ ID NO: 293953 - DNA, 283 bp, Glycine max
gttggtgcaccgtttgtacccagagattgatccagctctgaaccctgaccacgtccctcacattctgaagaagtgccctgatgccattccagaccctaaggcggtgcagtacgtgagaaacgaccgtggcactcccatgattctagacaacaactactacagaaacatattagacagcaagggtctcttgatagtggatcaccaactagccaatgacaagaggaccaagccttatgtgaagaaaatggccagagccaagactatttcttcaaggagttctcta

SEQ ID NO: 293954 - DNA, 285 bp, Glycine max
  unsure (1)..(285): unsure at all n locations
gggatcagataggtagctacttctactacccttcccttgcattccacaaggcagcaggannctatggtggattcaaaattgagagccgccccgggattccggtgccttttcctcctccagcaggagatttcacgatattggcaggagactggtacaagagaaatcacacagatttgagggctattttggatggtggaagtgaccttcccttcccagatgggattatcatcaatggacgtggttccaatgcctacacatttacagttgatcaaggcaagacgtaca

SEQ ID NO: 293955 - DNA, 281 bp, Glycine max
gggctccaacgctcggagcagctatttcgttgggtttgggaggccaatagggccaacccagttggagaaaatgccatttttcacttggcatgatgggaaccttgtgttggcagatgctgatggcagaattgcatggcaaactaacactgccaacaagggtgttgtggccttcaggcttctttcaaatggtaacatggtccttcttgatgcacaaggcgggttcgtttggcagagttttgatcaccccacagatacccttttggttggtcaatatcttagag

SEQ ID NO: 293956 - DNA, 286 bp, Glycine max
gtggagaggggcagggatataaactctgttcttgaacagtatgcaaaatttgttaagcctgcatttgatgattttgttctaccatcaaaaaagtatgctgatgtgatcattcctcgtggaggtgataatcatgttgccattgatttgattgtgcaacatatccgtacaaagctcggccaacatgctctatgcaaaatatatccaaatgtctatgttattcagtctacattccaggtatctttaaacatagttcgccaattttattttatttttaattttccatttt

SEQ ID NO: 293957 - DNA, 282 bp, Glycine max
  unsure (1)..(282): unsure at all n locations
gaaggcctccgatcccaaatctctcggtggtctcggccttcagctacccctcattgtccgcttcccggacgttcttcaagaaccggttggactccctccaatcggctttcgattacgcaatccaatctggagggtacgagtctcattaccaaggagtttaccccgtgaaatgcaaccaggaccggttcgtggtggaggatattnttaaattcggttcgtccttccggttcggtctggaggccggctccaagccggagctccttctggccatgagctgtcttt

SEQ ID NO: 293958 - DNA, 282 bp, Glycine max
gccatatcctttgccttcgcttctgaccctgacacacttcaagacctttgtgtggcacttccctcttcaggtgtgaaggtgaatggatttgcctgcaaggcagagtcaaatgtgacagaagctgatttcttctttgctggtttagccaagcctggagttatcaacaacacagtgggatctgtggttactggagctaatgtggaaaaaatcccaggacttaacacattgggggtgtcattctcaagaatagactacaaagctgagggattaacccacctcaca

SEQ ID NO: 293959 - DNA, 282 bp, Glycine max
cttgctccctcagaagcgaagaagaagccacagagaaccagtctcctactctctctcacccacaagaaaaatggcatctcacatcgttggatacccccgcatgggtcccaagagagagctcaagttcgctctcgagtcttctgggatggcaagagcagcgccgaggatttgcagaaggtggctgctgatctcaggtcatccatctggaagcagatggctggtgctgggatcaagtacatccccagcaacactttctcgttctatgaccagctgctcgacgcc

SEQ ID NO: 293960 - DNA, 283 bp, Glycine max
ggaatttcgatgctcagtcatctcttttaccattctcttctctcttgctcttgcaggagagagccatgtccatgcatcgctacctgaggaagattattgggaagctgtttggccaaacactcccattcccactgcactgcgagagcttctaaagcctctccctgcaggtgttgaaatcgatgaactccctaagcaaattgatgatacacagtacccaaaaacattcttctataaagaagaccttcatccaggcaaaacaatgaaagtacaattcaccaagcgt

SEQ ID NO: 293961 - DNA, 283 bp, Glycine max
  unsure (1)..(283): unsure at all n locations
ggnactcacccagatattggggctgctttctttcatgaagcattccactctcactgtccttnctgtcttggtttctccaaaccaccccattgtgaatgtggaacacaccacctcagagaggttcagccctctcttgttcactgactcaatgaatggaccgtatttcagtggcagctctatggcaacgacttgttcatcaacggaaagggtagggaagccattcccggagtgaatattgtcggagacaatgcgccttgcctttagatcaattaagatctcgtgg

SEQ ID NO: 293962 - DNA, 282 bp, Glycine max
caagacgctcaagatctgcgccaatcatctcattttgcctactatgagtgtgcaagagcacgctgggaacgagaaatcttgcgtttggcacgctagggattttgctgatggtgaactcaaggacgagcttttctgcatccgttttccttctattgaaaattgcaaaagcttcatggaaacattccaagaagttgctgaatcccagaaggcagaggatgagaaggaatcagctgatgcagctggtcttattgagaaattaagtgttgaagaaaaggctgatgc

SEQ ID NO: 293963 - DNA, 278 bp, Glycine max
caaactcaaagaagaaagaagaaaatccagcgaaagtaaaaccagcatccgaaaaagatgagcagcatcggaacaggttacgatctctccgtcaccactttctcccccgatggccgtgttttccagatcgagtatgctgccaaagccgtcgataacagcgggactgttattgggatcaagtgcaaagatggggttgtgttgggcgttgagaagcttattccgtcgaaaatgatgcttccgggttccaatagaagaatacatccgttcatcgtcatctg

SEQ ID NO: 293964 - DNA, 280 bp, Glycine max
  unsure (1)..(280): unsure at all n locations
gatcaaatagctcccagtactttaattgatttctgaatatcatcacttaatttgaaggaaagatggtgagcgtantggagatccgccaggcacaaagggcagaaggcccagcaaccatccttgccattggaactgcaaacccaccaaactgtgttgatcagagcacctatcctgactactacttcagaatcaccaacagtgagcacatgaccgagctcaaagagaaattccagcgcatgtgtgacaagtctatgatcaagaggagatatatgtacctaaa

SEQ ID NO: 293965 - DNA, 257 bp, Glycine max
  unsure (1)..(257): unsure at all n locations
ggccaacgaccaagggaacagaaccacgccgtcttacgtcgncttcactgacaccgagcgtctcatcggtgatgcggccaagaatcaagtcgccatgaaccccatcaacaccgtcttcgatgccaagaggttgattggtcgtagattcagtgattcctctgttcagagtgatatcaaattgtggcctttcaaggtcattcctggtgctgctgacaagccaatgatcgtggttaatacaagggtgaagagaagcattt

SEQ ID NO: 293966 - DNA, 269 bp, Glycine max
  unsure (1)..(269): unsure at all n locations
agatgatagggtgtattacaaggggatattcatttacacgtgctttattaggaattgctgctgatgaacttcacctttgtggtgatccagctgctgttcccctattcaggagataatgaaaattactggtgacgaaattgaggttcaattttatgagagactgtcacctttagtcccactgaaggttcctcttggatctttctctaatgtaaganatggtgactgcattgtaaccttttcacgtcaggngatatacaaattgaaggtga

SEQ ID NO: 293967 - DNA, 278 bp, Glycine max
  unsure (1)..(278): unsure at all n locations
cgagagagcgaaggggcaaacacaattttttttatcttcttttttattttttgtnnnnnnnnnnnnnnnnnnnatgttggggatcttcagcagttcagtggtgtcgccgccggaggagctggtggccgctggcagcagaacgccgtcgccgaagacgacggcggggaagctgctgaaccggttcgtggagagcaaggcgtcggcggtgtcgctgcaggtgggggaacacgtgcagttggcttacacacaccacaacgaatcaccgtggcatcccagat

SEQ ID NO: 293968 - DNA, 275 bp, Glycine max
gggcgtaaaggctctattacacaaattccaattctaaccatgcccaatgatgatattacgcacccaactcctgatctaacaggatatatcactgaggggcagatatacatcgacaggcagctgtataatagacagatatacccaccaatcaatgtcctcccgtcactatctcggttgatgaagagtgctattggtgagggatgactagaaaggatcattctgatgtgtccaaccagctctacgcaaattatgctatcggaaaggatgtgcaggca

SEQ ID NO: 293969 - DNA, 273 bp, Glycine max
  unsure (1)..(273): unsure at all n locations
gagggtagtgagggtaccggctataagcttgaagatggctgatattccaccagatgattattcttggagaaagtatggacagaaaccaattaaaggatcacctcatccaaggggttactacaagtgcagtagtgtgagagggtgtccagcgcgaaaacatgtggaacganctttggatgatccagctatgctggtggtaactacgagggagagcacatcacantctntctgctgctgatgctactaatctcattctagaatcgtcttgaagtc

SEQ ID NO: 293970 - DNA, 274 bp, Glycine max
gggtttaacctttctggctgtgttaatatgcgtttcagcactgtcactgagtccttctgttgcgggggaagggcaaaataatggccttgttatgaacttctacaaggaatcatgccctcaggctgaagacatcatcacagaacaagtcaagcttctctacaagcgccacaagaacactgctttctcctggctcaggaacatcttccatgactgtgctgttcagagttgtgatgcttcactgttgctggactccacaagaaggagttgtctgaga

SEQ ID NO: 293971 - DNA, 273 bp, Glycine max
  unsure (1)..(273): unsure at all n locations
ctggattcaagtgtggtatcaactaccagccaccttctgttgttcctggtggtgaccttgctaaggttcagcgtgctgtatgcatgatcagcaacaacaccgcagttgctgaggtgttctctcgcattgaccacaagtttgatctgatgtatgccaagagggcttttgttcactggtatgttggtgagggtatggaagaaggggagttttctgaggctcgtgaggaccttgctgctcttgagaaggatatgaggaggttggagcngaaggagc

SEQ ID NO: 293972 - DNA, 275 bp, Glycine max
  unsure (1)..(275): unsure at all n locations
ggccagccaaagtcaaagattacccacttgatcttctgcaccaccagtggtgttgacatgcctggtgctgattaccaactgaccaaacaattgggccttcncccctatgtgaagaggtatatgatgtaccaacaaggttgcttgcaggtggcacggttcttcgtttggccaaggatttggctgagaacaacaagggtgcacgtgtgcttgttgtctgttctgagatcactgcagtcacattccgtggaccaagtgacactcaccttgatagtctt

SEQ ID NO: 293973 - DNA, 271 bp, Glycine max
cttagcaatgtgaaggattaccaccgtcgccacaaagtttgtgatatgcattctaaggctacccaggcactagttggaaatgttatgcagagattctgtcaacagtgtagcaggtttcatgttcttcaagaatttgatgaagggaagagaagctgtcgtaggcgtctggctggccacaataaaaggaggaggaaaacgcatcctgatgcaactgtagttaatggaggctctctgaatgaagaaaagggcagtagctatttgttaatgagtc

SEQ ID NO: 293974 - DNA, 272 bp, Glycine max
gccttcgtttgcgtttttatcacagaggaattaacatatatatagcaagcatggcagtcacactctacgaccttagctcttcctctgggttgaagaaacttgatgagtaccttctcccacgcagttacatcaccgggtaccaagctacaaaggatgatcttactgtttatgcagctttgccaactgctccatcagatgaatatggaaatgtttccaggtggtacaagcacattgatgctttgttgagaatctctggtgttactggcgaggga

SEQ ID NO: 293975 - DNA, 273 bp, Glycine max
  unsure (1)..(273): unsure at all n locations
ttttctgctctttgaagaaagaagggtctttgcttgattttggagatgtctctgctctcagatctcatcaaccttaacctctccgataccaccgagaaggtgatcgcagagtacatatggatcggtggatcaggaatggacctgaggagcaaagcaaggactctcccaggaccagttagcgacccttcagagcttcccaagtggaactatgatggttccagcacaggtcaagctcctggtgaagacagtgaagtgnttttatacccacaagcc
